United States Patent Application Publication US 2006/0134663 A1 - sequence listing, part 22

SEQ ID NO: 29871 - DNA, 6856 bp, Homo Sapiens
agccttgagtgtcattcaagggacagcacaacctcatccaagctctcctacctctgcccagccgtccctctcatcctccccattcctcgtccacactccatccaaagaagagggaaagcaccgaatagaggggggcgaaggcaaagtctgctgttcttccccctgggcccccttgctcctccatcctcattctctcaccaccagcccccctaaccccaaggagcccaggaactgaggcgactcgccccactgccatgtccaaaagcttgaaaaagaaaagccactggactagcaaagtccatgagagtgtcattggcaggaacccggagggccagctgggctttgaactgaaggggggcgccgagaatggacagttcccctacctgggggaggtgaagcccggcaaggtggcctatgagagcggcagcaaattggtgtcggaggagctgctgctggaggtgaacgagacccccgtggcggggctcaccatcagggacgtgctggccgtgatcaaacactgcaaggaccccctccggctcaagtgtgtcaagcaaggaggaattgttgataaagaccttcgtcactacctcaacttacgatttcaaaagggttctgtggaccatgagcttcagcaaatcattcgtgacaacctctacctccgcacggtgccatgcaccacaaggccacataaggagggtgaggtccctggagtggattatattttcatcactgttgaagattttatggaattggagaaaagtggtgctctcctagaaagtgggacttatgaagacaattactacggtaccccaaagccgccagcagaaccagcaccattattgttaaatgtaacagaccagatacttccaggagccactccaagtgctgaaggaaaacggaagaggaataaatcagtgagcaacatggagaaagccagtatagagcctcctgaggaggaagaggaagagaggcctgtggtcaatggaaatggagtagtagtaacaccagaatccagtgaacatgaagacaaaagtgcaggtgcctcaggggagatgccctcccagccttatcctgcaccagtgtacagtcagcctgaggagctgaaggagcagatggatgacacaaagccaactaaacctgaagacaatgaggaaccagacccattgcctgataactgggaaatggcctatacagagaagggcgaagtctacttcattgaccataacacaaagacaacatcatggctggatccacgacttgcgaaaaaagctaaacctccagaagagtgcaaagaaaatgagcttccatatggctgggaaaaaatcgatgatcccatttatggcacttattatgttgaccacataaatagaagaacacagtttgaaaatcctgtcctggaagcaaaaaggaagctacagcaacataacatgccccacacagaacttggaacaaagcccctgcaggccccaggtttccgagaaaaaccactcttcacccgggatgcatcccagttgaagggaacattcctcagcaccaccctaaaaaagagcaacatgggctttggatttaccatcattggtggagacgagcctgatgagtttctgcaggtgaaaagtgtgattccggatgggcctgcagcacaggatggaaaaatggaaacaggtgatgtcattgtctatattaatgaagtttgtgtccttggacacactcatgcagatgttgtcaaacttttccagtctgttcctattggtcagagtgtcaacctggtgttgtgtcgtggctaccctttgccctttgatcctgaagaccctgctaacagcatggtgccaccccttgcaataatggagaggccacctccagtgatggtcaatggaagacacaactatgaaacatatttggagtacatttctcggacctcacagtcagttccagatataacagatcggccgcctcattctctgcactccatgccaactgatggtcagctagacggcacgtatccaccgcccgtccatgatgacaatgtgtctatggcttcatctggggccacccaagctgaacttatgaccttaaccattgtgaaaggtgcccagggcttcggcttcactattgccgacagtcctacaggacagcgggtgaaacaaatacttgacattcagggatgccctggcctgtgtgaaggcgacctcattgttgagatcaaccagcagaatgtacagaacctgagccatacagaagtagtggatatacttaaggactgtcccattggaagtgaaacttctttgattatccatcgaggaggtttcttttctccatggaaaactccaaagcctataatggaccgatgggagaatcaaggcagtcctcaaacgagtttatctgctccggccataccgcagaacctgcccttcccacctgcccttcacaggagctcctttcctgactcaacagaggcctttgacccacggaagcctgatccatatgagctctacgagaaatctagggccatttatgaaagtaggcaacaagtgccacccaggaccagttttcgaatggattcctctggtccagattataaggaattggatgttcatcttcggaggatggagtctggatttggcttcagaatcctcgggggagatgagcctggacagcctattttgattggagctgtcattgccatgggctcagccgacagagatggccgccttcacccaggagatgagcttgtgtatgttgatgggattccagtagccggcaaaacccaccgctatgtcatcgacctcatgcaccacgcagcccgcaatgggcaggtcaacctcactgtgagaagaaaggtgctatgtggaggggagccctgcccagagaacgggagaagtccaggctctgtatccacccaccacagctctccacgcagtgactacgcaacctacaccaacagcaaccacgctgcccccagtagcaatgcctctccccctgaaggcttcgcctcccacagcctgcagaccagtgatgtggtcattcaccgcaaagagaatgagggcttcggctttgtcatcatcagctccctgaacaggcctgagtctggatccactataactgtgccccataaaatcggacgcatcattgatgggagtcctgcagatcgctgtgcaaaactaaaagtgggagaccggatcctagcagtgaatggccagtctatcatcaacatgcctcacgctgacatcgtgaagctcatcaaggatgcaggtcttagtgtcacccttcgcatcattcctcaggaggagctcaacagccccacctcggcacccagctcagagaagcagagtcccatggcgcagcagagtcccctggcacagcagagtcccctggcccagccaagcccagccacccccaacagccccatcgcccagccagcaccacctcaaccacttcagctgcaaggacacgaaaatagttacaggtcggaagtgaaagcaaggcaagatgtgaaaccagacatccgacagcctccattcacagactacaggcagcccccgctggattacaggcaacccccaggaggggactaccagcagcccccacccttggactacaggcagcctcccctactggactacaggcagcactcccccgacaccaggcagtaccctctgtcggactacagacaaccccaggattttgattatttcactgtggacatggagaaaggagccaaaggatttggattcagcattcgtggaggaagggaatacaaaatggatttgtatgtgttgagactggcagaagatggaccagcaataaggaatgggaggatgagggtaggagatcaaatcattgaaatcaatggggaaagcacaagggacatgacacatgccagagcaatagaactcatcaaatctggaggaagacgagtgaggctgctgctcaagagaggcacgggacaggtcccagaatatgacgaacccgccccctggagttctcccgctgccgccgccccaggtctgccggaagtaggcgtctccctggacgacggcctcgctccattctctccatcacatccagccccaccctccgacccttcccaccagataagcccaggcccaacttgggatatcaaacgggaacacgacgttaggaaaccaaaggagctttcagcctgcggccagaagaagcagcgcctcggggagcagagggagcgctcggcgagtccgcagagggccgcgcggccgaggctcgaggaggcgcccggcggccaggggcggcccgaggccggcaggcccgcctcggaggccagggcgcccgggctcgcggcggcagacgcggcggacgcggcgcgggcgggcgggaaggaggcgccccgtgcggcggcgggctccgagctctgccggcgcgaaggcccgggggctgcgccggcgtttgccggcccgggcggcggcggcagcggcgcgctggaggccgagggcagggcgggtgcgcgcgcgggtccccggccgggcccgcgacccccggggggcgccccggcgcgcaaggccgccgtcgcgccggggccctggaaggtgccgggttctgacaagctgcccagcgtcctcaaacccggcgcctcggccgccagcagatgagccgcgcggccacggccaacccgcccgccccggcgcaggcagttcttcttaggttccgtctcacggcgttttaatttattttcactgtcacacgcatagatccacgaggcaccaaggcctgggagcatcgacgtgaagtcccacgtgtccggtgtgcttgggcggcatcgcatcaacgcgcagacctaaactgatcctaaagcccccggttcccttgtgggggctttggcagctatggaagaaccaaaataacgtgaagaacatcacagagagacagtgcagtgtagctttagtttaagaaaaaaaaatattcctccccactgcatgaaggacttggatgtcatccaaactttatatcaagaaacaggacaaagttaagagcaatcacaaactggaatatcgccttaaaaatcaaactgcacggagcaagctgaaactgagacaagattatatcttttaattgatctaaagcgttgtaaataaattgttctcgacatatctagacaggggttaaagggtttctttgacacattcggaaccgttcacccatgacatgtttccatggctcacccttggcatccatcctcggtgttagcagcagcgttccctgcctcctgcaggatgacttagaaatctagtgagtttcttggtgtgatgccatttttattgccctttctgtgatcaaatcatatttctgtacattttcagtggtagaaaaaaaaggttttaaaaattgtatcctagggaacagtttgccataagtcagaattttgcagtttagctcatagatcttaattggtttttctctaaaatatgaattttataattgaaggaccacaatttgtttaatcaagataggcaacgctgcagttcctttatgaagaggcttttctgtcgtcccaggctagcagagatggatagcttctttgtcagcaatgtgatttcacttattttattgtcttattttaaaccctgtctccatgacttcatttgcactttgacagagcagaggcagagtatttgtcttatatttctcagattataatattaaaaaattacaatcaatttattttcattaaagaacgtgagtctttttagcattcctttctgcttatccttctttccttaccctttgtccttttgtttccattagttttctttcgtcttgtattccttgccactttattttgttagcaacttctagatgtttatcttcatggatctatgattgacctcctagtaaaattctaagtcttgcctttcttccctgctgttttagcatttctttgtaaaatgttagcttcaattaattagccattggtacttactgtagctacacatattaaaaggcaaagtgtttctgaaggcaatttctttttaatatgcccgaatgaatgaggcttcatcctttccatattcttactctttacaggagttcaaatgcaaataagctccacctccctgcacttgtagtctaaaaagtaaaaggggcgatcaggtccatctcaaaggtcacacgtaatagcctccctgggctgatcattccctctccttgtaattgcagtatcctgagtagcagtttaattttcatcaaacatcggagtagtttagttgtttgacaggaggagaataaggctgaaagcctcaagtgaaggatcttgcagcttgtaaaagcaatttccaaaaatgaaacccattcatcgtaaacaaaagcacaaacacttgtagcagtttataatgcttttggtttaatctcaattagtctttctcccctggactagaaatccagtatagtttgccattaatttattgaatctggttttggacaatgcttctgtagtgtagctgcacgtcctggtactgtatcctctgactttattttccatgtattacaaaaggaaaaaaaaattgagattacactggcataaactctagtttgcacagttcacagctactacttgtgcagtaattgctttatgcggctgtaatccataacctgtgaagacagcacatcatctaaatcccattccaaataatatttgtgtagtgttagctgtgaatttaccctgtacagctgtatctctataaatataattccatgtattaatagtcacagaaagactgtaagtgagcaactatttttatgaaacgtaccactatggataaattaacttttacagaaatcttgtttactgtatgatattctaaaacactgtcaaataaaatatatatcc

SEQ ID NO: 29872 - DNA, 4562 bp, Homo Sapiens
tcactcgctccggggacccgcaacaagtggccgccgcgccctccccggggaagccgcgggcgcgcaggggcagccgaaggaggcggtcgagccgcggagcccaggggcctgcccggctcagcgcccaccggaggggatcggggcgggcggatggggacccggcggcggcggcgcggtgagcctctgggcggccccggggcgcgggctgtgcgcggcgctgcgcccgccggcccccagcgcggattgtaagtgctgcagctgtgcccggccccgcctggagccaccgggggtgccaggaggggacgcagcaccccctcccactggagtgcggggacctctccaggccggaggtcggccccggagcttgggggggatgtgcagctaacggtcccgtcgggcgggctttcctcgggccgagcgcgcaggacgtgcgccgcagctatggagtgtcccgggagacggcgggcatgacggctacaggatgggcgcgaacaatggcaaacagtacggcagtgagggcaaaggcagctcgagcatctcatctgacgtgagttcaagtacagatcacacgcccactaaagcccagaagaatgtggctaccagcgaagactccgacctgagcatgcgcacactgagcacgcccagcccagccctgatatgtccaccgaatctcccaggatttcagaatggaaggggctcgtccacctcctcgtcctccatcaccggggagacggtggccatggtgcactccccgcccccgacccgcctcacacacccgctcatccggctcgcctccagaccccagaaggagcaggccagcatagaccggctcccggaccactccatggtgcagatcttctccttcctgcccaccaaccagctgtgccgctgcgcgcgagtgtgccgccgctggtacaacctggcctgggacccgcggctctggaggactatccgcctgacgggcgagaccatcaacgtggaccgcgccctcaaggtgctgacccgcagactctgccaggacacccccaacgtgtgtctcatgctggaaaccgtaactgtcagtggctgcaggcggctcacagaccgagggctgtacaccatcgcccagtgctgccccgaactgaggcgactggaagtctcaggctgttacaatatctccaacgaggccgtctttgatgtggtgtccctctgccctaatctggagcacctggatgtgtcaggatgctccaaagtgacctgcatcagcttgacccgggaggcctccattaaactgtcacccttgcatggcaaacagatttccatccgctacctggacatgacggactgcttcgtgctggaggacgaaggcctgcacaccatcgcggcgcactgcacgcagctcacccacctctacctgcgccgctgcgtccgcctgaccgacgaaggcctgcgctacctggtgatctactgcgcctccatcaaggagctgagcgtcagcgactgccgcttcgtcagcgacttcggcctgcgggagatcgccaagctggagtcccgcctgcggtacctgagcatcgcgcactgcggccgggtcaccgacgtgggcatccgctacgtggccaagtactgcagcaagctgcgctacctcaacgcgaggggctgcgagggcatcacggaccacggtgtggagtacctcgccaagaactgcaccaaactcaaatccctggatatcggcaaatgccctttggtatccgacacgggcctggagtgcctggccctgaactgcttcaacctcaagcggctcagcctcaagtcctgcgagagcatcaccggccagggcttgcagatcgtggccgccaactgctttgacctccagacgctgaatgtccaggactgcgaggtctccgtggaggccctgcgctttgtcaaacgccactgcaagcgctgcgtcatcgagcacaccaacccggctttcttctgaagggacagagttcatccggcgttgtattcacacaaacctgaacaaagcaaatttttttaaaagcagcgtatgtaagcaccgacacccactcaaaacagctctttcttccgggaaggttattaggaatctggcctttatttttcctcatttctcatgggcaacagaggccaaagaaacgaagcaagacaaacagcaaacaggcattttggtcaggtcatttgtaggcagtttctcttctcacaaaagatgtacttaagcaggctgatcgctgttccttgagcaaggcgcttactctcctccgctcaggcccccaaggccgccctttccctcgcacacaggccccacccccacagttccacgccccccccccaaggccacaccctccctccctagagcagcagcgaggatccatcatcagaatcacagtgctctccagacctcctctctaaactgcttcattgacctaagtcactctcttcaatcccacacccatggacattcttgtcaactcaataccatagcactttgcataggcaaaatacttttcaggcctttttaaaaaattcattacagcaaacagctggggaaggacatgcagtcctcccccagctctgtcaatgactatgaccttggccaaagcacttcactgctctgggctgcagcttccagcactgaatcagaggccacacagcccaaagattagcttcatgtccattatagcattgagggagcagagatacccatacacagaagcaccttggcatagagcacccaggcatcgacctcttccaggagaactgattctgtggatggatgtgatttcaggagattgtgcagtgccagcatcagtgcataaagggtcctgtatgtcctttggctgcaaatcacccacttccctgtgtttcagtgggagaatttcctctcccacctcctcacatcctcttttgccaggctggatgctgtcgtctctgtacacaaatactttctgcattcccccctccacaccatcctagcgaggcaccagcacacctaatcacagcaaagcccagatccccccatcagttgcttttactcagtgttttcaaataggagtaaaggcccttgcaatttttaattaacaagcaaggcccaagggaacacatgtcctcaaaagtttttctgatccctcgccttgcacacctggcatgcatcaggcacatctgtcctacagctggcagagacagatgcctcggttctttgtcattcagattgcatttgacctcttctcatctatttatttctttatacatccagacttcatcacatgaagcctattggggttaagtttgtaagtgtttaattgtgcaaattgccaccctgtgtacctcctccatgtctgtctgcgtgttttccaccaaagaatgcaaagcagacttccaggtgtttaaattctgttcactcaacaatgccagatgaatggaagagggaacacactgagatgacttagactctggtccaccaaccagacccttggaaaggaatactaaaatcattacaaggtatggattttaaatggatgaaacttcaaattatcttatttggatagaagtctatattctagcctcatttgcatgaagtcagatagccagaagaaattccattgctggttttcacgaaattcacttgtcttttgctaataaacacatggccctttcccagattattctctagccaagccccacctttgttacgttgaaatccctcatttattttcttctcaaaatgcccattatccaaatgcagaacctctgcatctccaagccagttatgctgaatttgtcaaacttagacacccttgacaactgcactcctactgtaggctcctgtgcatactgtcgtcttctgtgggggatggagaggttagtgtgatgaggtggtgtctgcccaggaggtttctttcaaacatcatggcctcccatccaatcaacatcatcaaattacatgtgtaatcaaggctctgtgccatgggggaaatgaatcatttagctaggccaggatctagtgaaagccacagagtttaaaaccatgaaagaagttgaaggcagcattcctcagctctgtgacttgtgaccctatttgaagtttcaggatttgggtgtcacaaaggattgtccctaatccttggccctggggtcttccgagtgagctggtttaatactctgagaatgagcagggagatccagagaatgaatccctgaccgcatcacctaaactgtcttccaaacatgagacaaagctgactgttcacactgattgcccagcacataccgtcttgccagtttcttcttttctcccagtctcctgttcatccattctgttctcccttggggtgggaatctatgatggaggttactggggaaacagctcagcagatttttggagaccaaaccaaaggtctcactaggaaatttatctgttttaaaacattgcttccttcctggctctgctaaattgaatgctcattgtttgttgttgttgttttttaattctaatgttcaaatcactgcgtgctgtatgaatctagaaagccttaatttactaccaagaaataaagcaatatgttcgt

SEQ ID NO: 29873 - DNA, 4703 bp, Homo Sapiens
cgccgatggtacgcgccggctcgcctggcccggctgcagtggatgttgctagaacccacgcggaggaaggaagagacgcaggcaggctgcggttacccaagcggccacccgggcctcagggaccccttccccgagagacggcaccatgacccagggaaagctctccgtggctaacaaggcccctgggaccgaggggcagcagcaggtgcatggcgagaagaaggaggctccagcagtgccctcagccccaccctcctatgaggaagccacctctggggaggggatgaaggcaggggccttccccccagcccccacagcggtgcctctccaccctagctgggcctatgtggaccccagcagcagctccagctatgacaacggtttccccaccggagaccatgagctcttcaccactttcagctgggatgaccagaaagttcgtcgagtctttgtcagaaaggtctacaccatcctgctgattcagctgctggtgaccttggctgtcgtggctctctttactttctgtgaccctgtcaaggactatgtccaggccaacccaggctggtactgggcatcctatgctgtgttctttgcaacctacctgaccctggcttgctgttctggacccaggaggcatttcccctggaacctgattctcctgaccgtctttaccctgtccatggcctacctcactgggatgctgtccagctactacaacaccacctccgtgctgctgtgcctgggcatcacggcccttgtctgcctctcagtcaccgtcttcagcttccagaccaagttcgacttcacctcctgccagggcgtgctcttcgtgcttctcatgactcttttcttcagcggactcatcctggccatcctcctacccttccaatatgtgccctggctccatgcagtttatgcagcactgggagcgggtgtatttacattgttcctggcacttgacacccagttgctgatgggtaaccgacgccactcgctgagccctgaggagtatatttttggagccctcaacatttacctagacatcatctatatcttcaccttcttcctgcagctttttggcactaaccgagaatgaggagccctccctgccccaccgtcctccagagaatgcgcccctcctggttccctgtccctcccctgcgctcctgcgagaccagatataaaactagctgccaacccagcctgtggccaggtcactgtctaccccagcccagcccagccctctgccgcttgtacatacgccatggggaccctgaggaactgaggccacgtcaatccctgtgccgccccattcgcccgttacatcttccaaactgggacggtcaaggctgaaggctcctctgggtttgagggtccaagggacaaggaggagaagcctagcaggatttcagatgcaggagagagacccaggaagcccggcagagccctgagccccactgcaattcctcctagggctgcacaatcatgtggccttagggcacactgtcctgcatccagtctgtgtcctcctgtctttctcatccaggtcaggcattgacactttgtaagaaagggggtaggggacacagctgggcaggtggagtgggtgggcaggatggctgtcccagtctgcccatcttctcttggctctgggaccagcggcttgttctagggatttggacctggaggccaagggcaataggagagggtctgaagcctgtgctgtctgctgcttgctgtgaatggccctcccgggtcatgacagagctcttttggggcaggaggtgagggcagggggccccgctccttggtaagggcctgccctggggctcccagggaagtgggagctggggagccaatccacccagacccgcgtccacctgggaggcatttggggttgcaggaccgagacccacatcctctcactcacttctccacccgccaggcagctgccacaggcctaaggctgagtgaggtgtgattgggccctccggctggatgttctgggggaggaggcaatcgctgtagctgccaggccagccccatctggaaggagtccctgctctgcctcagccctaacccgaggctgtgtgggagtcccttctgcacctcttatttcctaaacccttcctgtcagctgctgtttgctggctcgtccccagccaggcctcctgaggtcttcatagttggcacagtccacatctcttctagcttcactggccactcactcagcccagagtccctaagtgctcccccacttatctctgcatctctccaatttggaagccatccagctgatgctaacagccagggccagtccctccagctggtcccatgtaatgaggccagggctccttatcagcttccaggcggctgggatctcaggcagggtgtgcgtcagccctccaacccccagaggggcgcctgtggggagggaaccaggaggccacactgggggagcgtgcagccagcatgtgcagtggccaactccaggccagtggaaagttactgtgtggatacaggaaggctctgagtggctagcaggaccctcccttggcttcgccctcctcctcttctctctcccctgtgctgggagctccgtctgccttgggaagggagacgaggtgtgctgttccttcccagccccatccctccccacccttcctactcccagctttcaagaaacattgcagaagcatttgaagttttgttccatcttggatatttgaagagaaaaggagccaagaactggcgggtggtgtgtgtgcagcaaaggcattgggggcacgggtgagatgcccactgtgtgctggtctaaattaatccatcgcagtgatcctccagagacagcgctctgctcatgtccgtagcagagggaaaagccgaggtgctcagaaaggctcggtaatgagtcccaggtcatacggctagcgagtggcgggcctggggttcagacccacagctgcctcaagcaaacagggtatcacgcttgcccctgggcctgggtgggggccggaatgagaccacatgagagcgcagagaggtgggtggtcaggccctgatgtcctggggatttcttgtcctcagtgccacccggcctcccgtctttcctgaaacccctcgccagattttgcactctgaggtttctatcttccagacaagagctgggaggcaagatttctggtttctggttcctagcctcactgccagcgggctcctgctattaggtgagggtttcttgctgtctggaattcagtttttccatctgccacatggaagttcatagccaggatagggcgggagaggcaccagaacatttctctccactgactttctcacccggttcccaccctcctccacctcctctcctccgggcccctcagtttcctctcctcatctctggcctcagttccagagggttagccccagcaccccactctcctgccactgtcagatagccttggtcatgcttcctagaatctacttgtccaagttctcctctccctgggataagttactgcagaaactggggatttagaagcttattcagggctgagtgccaaaagcttgggggaggagggacaggtcctcggcaataaacagtgtcacacacgcatcacagccatttgagaaatggcttctttgcagagctggggaagccgggcagaagatgccgcagcctcctactctgggtcctgagggggggtggcaggtaccacagtgtaggcagcagggtcagggccaaagtctatgcgttccatctccaatccaggcagtgaggaatcctgaaacaccaggagaggcgtcagaagtaggaagggcaggggaacaggaatgcaagattaaggaaaccgcagctgagcaggtgtcacaagctgtaaaggaggaagggagtctgcaggcccttcacatttttggcctgggtggggctgggcccaggaaggggtgggctggattttgtaaagctggaggcagccaggaatctgactgtccggaatgtgagttgaggggtctcccactgaagtcctcttctggaagctgcagatgggggcccgggaggcacacacgagtctgggactcattcccgggcacacctatggctccttcggtatcacctggggaagccccggaatcttagttcttccattccctactcttccttccgagggagtcaggatgggacagacacccattttccaaaaggctccttgcctccttccctggcccacctgaagccaagtcccaggtgtcctggctgctctcctgggcggggtgggatttttgcataagcactttgctgccctccagtggctgcttgaggaaacgcagggcctggtttgggagagtcaccgagggcccatgtggctggaggttgggggcaggatctggcccgagctctcctcagacctccccagacctgtcttctcatcagccaccgctgttttcttttgccgaacgatggttgcatctctcggacacagtgtaccccctcccaagccctccctgagccgttctcctgagtccctgagggcagacacagctccagggacccaggccagctgccacacccccgacactcctgctgtccactggccttagctcctgcaagttccccagtgtccgcacctgttcccttccctgacctcaccttcctggggtctgtgactgactggagataaaaataaaagcaattgtgacacctg

SEQ ID NO: 29874 - DNA, 8778 bp, Homo Sapiens
atgatgatgaacgtccccggcggaggagcggccgcggtgatgatgacgggctacaataatggtcgctgtccccggaattctctctacagtgactgcattattgaggagaagacggtggtcctgcagaaaaaagacaatgagggctttggattcgtgcttcgaggggccaaagctgacacacccattgaagaattcacaccaacaccggctttcccagccctacagtacctggagtccgtggatgaaggtggggtggcgtggcaagccggactaaggaccggggacttcttgattgaggttaacaatgagaatgttgtcaaagtcggccacaggcaggtggtgaacatgatccggcagggagggaatcacctggtccttaaggtggtcacggtgaccaggaatctggaccccgacgacaccgccaggaagaaagctcccccgcctccaaagcgggcaccgaccacagccctcaccctgcgctccaagtccatgacctcggagctggaggagctcgtggataaagataaacccgaggagatagtcccggcctccaagccctcccgcgctgctgagaacatggctgtggaaccgagggtggcgaccatcaagcagcggcccagcagccggtgcttcccggcgggctcagacatgaactctgtgtacgaacgccaaggaatcgccgtgatgacgcccactgttcctgggagcccaaaagccccgtttctgggcatccctcgaggtacgatgcgaaggcagaaatcaatagacagcagaatctttctatcaggaataacagaggaagagcggcagtttctggctcctccaatgctgaagttcaccagaagcctgtccatgccggacacctctgaggacatcccccctccaccgcagtctgtgcccccgtccccaccaccaccttccccaaccacttacaactgccccaagtccccaactccaagagtctacgggacgattaagcctgcgttcaatcagaattctgccgccaaggtgtcccccgccaccaggtccgacaccgtggccaccatgatgagggagaaggggatgtacttcaggagagagctggaccgctactccttggactctgaagacctctacagtcggaatgccggcccgcaagccaacttccgcaacaagagaggccagatgccagaaaacccatactcagaggtggggaagatcgccagcaaagccgtctacgtccccgccaagcccgccaggcggaaggggatgctggtgaagcagtccaacgtggaggacagccccgagaagacgtgctccatccctatcccgaccatcatcgtgaaggagccgtccaccagcagcagcggcaagagcagccagggcagcagcatggagatcgacccccaggccccggagccaccgagccagctgcggcctgacgaaagcctgaccgtcagcagcccctttgccgccgccatcgccggagccgtccgcgaccgtgagaagcggctggaagccaggaggaactccccggccttcctctccacagacctgggggatgaggatgtgggcctggggccacccgcccccaggacgcggccctccatgttccccgaggagggggattttgctgacgaggacagcgctgagcagctgtcatcccccatgccgagtgccacgcccagggagcccgaaaaccatttcgtgggtggcgccgaggccagtgctccgggtgaggctgggaggccgctgaattccacgtccaaagcccaggggcccgagagcagcccagcagtgccctccgcgagcagcggcacagccggccccgggaattatgtccacccactcacagggcggctgcttgatcccagctccccgctggccctggcactctccgcaagggaccgagccatgaaggagtctcaacagggacccaaaggggaggcccccaaggccgacctcaacaaacctctttacattgataccaaaatgcggcccagcctggatgccggcttccctacggtcaccaggcagaacacccggggacccctgaggcggcaggagacggagaacaagtacgagaccgacctgggccgagaccggaaaggcgatgacaagaagaacatgctgatcgacatcatggacacgtcccagcagaagtcggctggcctgctgatggtgcacaccgtggacgccactaagctggacaacgccctgcaggaagaggacgagaaggcagaggtggagatgaagccagacagctcgccgtccgaggtgccagaaggtgtttccgaaaccgaaggtgctttacagatctccgctgcccccgagcccaccaccgtgcccggcagaaccatcgtcgcggtgggctccatggaagaggcggtgattttgccattccgcatccctcctccccctctggcatccgtggacttggatgaggattttatttttacagagccattgcctcctcccctggaatttgcaaatagttttgatatccccgatgaccgggcagcttctgtcccggctctctcagacttagtgaagcagaagaaaagcgacacccctcagtccccttcgttgaactccagccaaccaaccaactctgcagacagcaagaagccagccagtctttcaaactgtctgcctgcctcattcctgccaccccctgaaagctttgacgccgtcgccgactctgggatcgaggaggtggacagccggagtagcagcgaccaccacctcgagacgaccagcactatctccaccgtgtctagcatctccaccctgtcttccgaaggtggagagaatgtggacacctgcacagtctatgcagatgggcaagcatttatggttgacaaacccccagtacctcctaagccaaaaatgaagcccatcattcacaaaagcaatgcactttatcaagacgcgctcgtggaagaagatgtagatagctttgttatccccccgcccgctcccccgcccccgccgggcagtgcccagcctgggatggccaaggttctccagccaaggacctccaagttgtggggcgacgtcacagagatcaaaagcccgattctctcaggcccaaaggcaaacgttattagtgaattgaactctatcctacagcaaatgaaccgagagaaattggcaaagccgggggaaggactggattcaccaatgggagccaagtccgccagcctcgctccaagaagcccggagatcatgagcaccatctcaggtacacggagcacgacggtcaccttcactgttcgccccggcacctcccagcccatcaccctgcagagccggccccccgactatgaaagcaggacctcaggaacaagacgtgccccaagccctgtggtctcgccaacagagatgaacaaagagaccctgcccgcccccctgtctgctgccaccgcctctccttctcccgctctctcagatgtctttagccttccaagccagcccccttctggggatctatttggcttgaacccagcgggacgcagtaggtcgccatccccctcgatactgcaacagccaatctcaaataagccttttacaactaaacctgtccacctgtggactaaaccagatgtggccgattggctggaaagtctaaacttgggtgaacataaagaggccttcatggacaatgagatcgatggcagtcacttaccaaacctgcagaaggaggacctcatcgatcttggggtaactcgagtcgggcacagaatgaacatagaaagggctttgaaacagctgctggacagataaggacggctgctctccacctcgcagactgctcttgttataagtagagatgggctcgtgctgaaacatctgaatgccaagcgaagtctgtgagcatcaaccccactccatgggtttgtctcctggtacccaaagaaatactgagttgtgtccacaacatggctgggtcttcagacccctggctcaccatgtgggtgtcttgggcagtttctatcacacatgggacaaggggagggagtttttctaacatggaaaaagattctcagcctgccgcccagcatgcaggtggcctcgctttgccgggtccgagaggctccccgtcaattttgcacgggatcctagctcttgtaggcagacaccagtgcactctagatacctcctgagacctccgtcctctgctttccgggcagctctcaccaccccaggccccggcatgaggcctttcctcagtcctgtggcctctcagaggacacctgatgctcacctgcccctctttctcctgcacttggcttgcagtgagatgctcccagatgcatttgtccagtgccccatcatgggcctgaaaggcagagaaactttttcctacacagattcttttccccatctcctcctgtggtttgcatccatggctctttggccatgaggttcctggcagtgctgggagtttggatgggatcgtgcccagctttgcttagctttctttatttctgcaaatctgttagcataattccaaggtggccaagcagatgtcacatggagttagtcaaagcacaaagtcacgattccacaatggaggggagacctggccaagggagccagccagcgtgcaactgcccaagctccaggtctccaggacaagagcagttgtctgccatgagcacccatccaggatggagaataagggcttctctgcctctcagaattctttttaattgaagatgtcttgagctctgcaaagatcagagcaggtgagcatccactttgacatgaaggacaagaagacgcatggctcatggcgggcacatgcggctgccagtgagacagcgtctcctctgggagctgggcgggcacagcatcctcagttctgtgcccagccaagggtgagcatctctgctgagacagtccttttgctctcggaggccagggaagatggtacttagaggcttttcccctatcgctctgggtgtctaggaatcccaccagcttgtcttaacagtacaacagcttctttgaggacccagtgggtatggagtatagacagaacccagggttgagaacagaaggtgggcggcaggatcagagtgaaagcagaggcgtgaggagaggaaagcagggaggtctcctgggctgccaggtcagcctctctggcaaggctttcttgagccccgcccctttctttccccggagtccctccaccccataacaatacctcgaatttccaaaagaggtcaccagatgcacatgggccgcaaaacacacagtcaggcttccagcacattctcccccatttggaggatactcgaatgtcaggtttttggttttattattatttcagaactagctcagcccatctctaattataaaacatggttttgttttttttttttcctttttttcttgattaggtctggaacagctctagaatgaacacataaaatttagcaatttaaaatctttctttactgcaagtttaaatagttgtacagatagtttataagcacaatattttaagaaaaaaaagtggctggtctactaggcagcctttgtgccacttcagtgctagaaagttaaagaaaaaaaaacttttgtgatttaataatactatttctgtggaataattataaaagtatgacctttttaaatcaaccttatttggatgcatctgaaccagcagagctgtgttatattttctatctttgctagaacttcgtcattgaaggacaatttcttcaaagtggttacaattcataatgcagcagtttctccaaaaacaaaaacaaaacacacaccacacacacgcgcttttccagtcacacacccctgatgttggaaccaagtttttggaccttctgttccaaaaccttttgcaggtcaatctttgtatttgaaatgatccaatccaacttgaagtcaattgaatattaaggcgctttacttccgtgtgctttcagtttttccatcatgagatgaatgagcattactctagataaatttcaagacaggatactacaggtggcctgctgaggctgccccatattttagaaaatgtaaaaatggtggtttggccattaatttgtcttccatttgatgataccgcaaaattccgtgagtccattcctttggcatggcactttccctgggcctacagttggtattacctctgtgctcagtgccaggcaaaacactagctcaaaggagagtcaaggaaaccgctggcagacgataaccagtcgaaactcgtgacttcggtttgttgaactttggcagccagttggtgagggccagatgttattccctttcttaaagatactccaagccacatgccactaaccacaagcaagctggctgcaagactaaagagctgataacatagtttatttttacactgtcttattatagagaagtaatagacctatcagaacctgcactgaccaacaaataaacacatgttgccaagatgaatcggtctctatctctatctgcttattttggtactgaaagcaatagttcctcattcaaatcaccacccactgttctccccctttgggacatgttaggacgaggccctattccatgcccctctttaatggtggaacaaatgttaaactgctcatctaaagatcatgttgatattattccaggttttaagatcaacttttgttacatactgtaatttaaataaactgcatttacatgcctagtttctgtaatattgtgtatacaaaacccaaatctctcaaaatgtaaattatgtatacctgccaagataccttttccagggtgtctgcgcacattttaagttaattcacataatataaaaattactcaatgtgactgttgatttgctgaactttacatatcacaaagtgaattatttgtgatactttagttaataaaatggtaaatttttttctcagttattgaacaagcaagcattatccagttgatctggcaatgactttttgtgtgtgggccacaatattgattttcccattaacaatttttttttgttttttaaatactaatatgtttcacactatagtttgtgtaacaacacgtgttcgcattatctatgttgctgttacttttgtgcttttattctttttagactttataaaaaaaaaaaaaagctcctgtaatttgcactttctcccaatccttaaatctcttgtatggcaaccaaaattactgtaaaaaaataaatatactattgcactaaggttgtggttctgattgcaaacaaacagtgaacactgtctgaattaaacaaaaagctgcccgacttgcaatctaatgtagattatctcaggcattgtggccagctctgcctctctaaaactgaccagaaaaatctctctcatcgagtaaacaggctcctgtcactgagctaatctgccttggttccatttccttattctcaatttatcaatggatacgtgcatgttatttcagaattatgcaaaacgtcaaaatctgcttctgtgaccgctgctataggcgtggagctgaggctcggcttttccttttgttctgggtggaagcagcggtgccgcggagggccagccagatccggacccttcccttagggtccagtctccccacaccccagcagggtgtcttctagccataaggccaagggagtggcagaactgggccgcctctctggttgacaagcaaaccacatgctaaggcttggagcaagagagaatttgtgtctattggcaaagaactaagccaggaagacatgggccatccctccgctttagggaagcatattttaaacctaaacgttgaacttcttctttggcctcaccagtgaaaacttgttgtctttagttcctaaagtttcttctactttggcacattccccagttgagcagcagcctctatgcttccacgttcaggaaaaattccagtcctcatatcttttgtagttcaccctcaagctctcccgcttcaccatccaatagtttctcccaaaccttggcacccccctagactttgcttccaatggtttcttccagaccacttttcctagatgaatatattcgtttaccttactaggaaaattattggaagattttttcttttacttgaaattggaggcattttaataactggcgaactggaatgtgtttctgtatttgtagacaaccatgaacccatgcaagtaggtgaacattccacagtggctgggtgaccacagcagctgcatgcagacaggactgcccgtgctttgtggggaatcagagaatttccaaacttgtttctcagacttccgcagatctcatcactttgatttctaatccatgctgtattggtgattttgtttatcgttcctgtaacttgttctacattccacagtctttaccgttttatgttcaaaattacaacaatccctgtccattgattccactctggaactctttgttcatgccaattttgaaattttaatacgagccttcaaataaacacagaaaagaaaaaaaaaaaggaaaaaaaataaagtgtgtgccttgggtgttttgaacctgatctgcataaaaccatattgtattcaaatgctgtatctttcatgaaaggataaatatatcttcaatgtattaatgtagctgataaaatagttatagtgccttgttttctgaactgagaagcccatatcaatgcacaacgtaaagaaaggacggttcgagctatgaaatgttgaggacacctacacgtgattctggagcctttctcatcataagactgtggaaaatacacagtcgtttaagttaaaaataaaaagtaaattga

SEQ ID NO: 29875 - DNA, 3984 bp, Homo Sapiens
atattgtctactgaaagctgccgctgaagctgccgccgttgcctccgccgccaagagtgagcgagcggacccgcgatggagaccatggcgagcccagggaaagacaattatcgaatgaagagctataagaacaatgctctaaaccctgaagaaatgagacgaagaagagaggaagagggcattcagctccggaagcagaagcgagagcaacaactttttaaacggagaaatgtggagctgattaatgaagaagctgccatgttcgatagtcttctcatggactcttatgtgagctctaccactggggagagtgtgatcacaagagagatggtggagatgctcttttctgatgattctgacctgcagttagcaaccacacagaaattccggaaactgctctccaaagagcctagtcctccaatagatgaagttatcaacactccaagagtggtggatcggttcgtggagtttctgaagaggaatgagaattgtacattacagtttgaagctgcctgggctctaacgaatattgcctctggaacctctcagcagaccaaaattgtcattgaagcaggggctgtccccatttttatagagctgcttaattcagactttgaggatgttcaggaacaggcagtctgggcactgggaaacatagctggagatagctctgtttgccgagattacgtcttgaactgttccatccttaatcctttgttaacactccttaccaagtccacacgactgacgatgacacggaatgcagtctgggccctgtcaaatctctgccgagggaaaaacccacccccagagtttgcaaaggtctctccttgtttgcctgtactgtctcgcctactcttcagcagcgactcggacttgctggcagatgcttgctgggccctttcttatctgtctgatggccccaatgagaagatccaggcagtcatagactccggagtctgccggagattggtagagctgctgatgcacaatgattacaaagtggcttctcctgccctgagagccgtgggtaacatcgtcactggggatgacatccagacccaggtcattcttaactgttcagccctaccttgccttctccacttgttgagcagtcccaaggagtcaatccggaaggaagcttgctggactatttcaaatattactgctggcaacagggctcaaatacaggctgttatagatgcaaatatcttccctgtgttgatcgaaatccttcagaaagcagagtttcgtacaaggaaagaggcagcctgggccatcaccaatgccacatcaggaggaacccctgagcagatcaggtacctggtctcactgggctgcatcaaacccctatgtgacttgctgactgtaatggattcgaagattgtgcaagtggccctcaatggactggagaacatcctgcggcttggagagcaagagggcaagcgcagtggctcaggggtcaatccttattgtggcctcatagaggaagcctatggcttggataaaattgagtttctccagagccacgagaaccaggagatctaccagaaggccttcgacctcattgagcactactttggtgtagaagacgatgatagcagcctggctccccaagtcgatgaaacgcaacagcagttcatcttccagcagcctgaggcccccatggagggcttccagctataatatctgcctccagggaggggaggggatgggaagcaccaccagccagcggaagagcagccctctggtgggcgggaaaccagtgtccccaccatcagccaccacacacctctgctgccctggagactgtgctcttgacctgctccgcccccttccctggagggagcaccctctggacagacagaaccatctgaggctcacctttgggttttgtgacaagaaggggacgtgttgggtttttcttccttacactatattttggctgcacacatgtctttaacccaggagcccaggggtagacaaaggaggactaaggtaatcaatttgcacctttttttatttttattttttttctttttttcttcagtggtgacttccttccctttatcttttttcattcttcccggtcctctgccctgatctgtgtaactcttatcttgggtacttgagcagacggtatattccagaggtgggaggtgggaggggaagggagaaatccaaaacaaagtgttcttgctctgacagaatattaatcttgtacgcttggattgagttatttaatttttttttcttttgcacatttttcttgtattaagattgctcttcccaagagccacaagttcctggttttagtaaacccagctgcctgcattgcctgggactagaggctggggaggctaccatgaaacaaaggtccctccctccctctgactctttgcccagacctctttagtttgggggatcctcctcactctcctgaagtgtctcaagtataccagtgggagtgcaggggaggagcacaggccttcagatggggcttcccacgtgtagctactgatcccatatttcctactcaccttccaaatggtgcgacccaacttcatttgtttacttgaaaattccccctcgaggttgagagaacctctgaggtggctgtattttctcctaagcttgagatagggggctgtggtccttcctttctcctgaggagaaagtccttgctctggtgacctgtaagttgcagaggagggtggagtgagagtgtcatgtattgggatagtcagggatccctgcctttggcctttcttcttcttcttcttcctcttccatagttggatcatgtatattttacttctaaaggagagaatgtcaaaaagttctgtatttttttatattctatatattaggtaggtcaatcttaattggtctcaagaggaagaactgtctgtcatttcggtaagtaggatactgtgaggaagaccaaaaagagatatggatgcttcctcgctcaggaggcctgagcttggtccttttcctctctgcttggattctggaccaccacctgggaccaaccttcagctctggaaccttcataaagcaggtcagcgtggcctgattgtcccaggacctgaagggagcaaggatggcctcagggcctggtgaagtctgctactctgtccttactgctgaacatcctgcttgtatcaggaaactcagaagcagtttgccttgtcaaattcaatctcaatggccattgtccacataactgatcacccatggctgcctctcctattatctattatcactgaaacttagtagcctgctttttttttttttttttttagagctattgcgtatcttccctgtttgggatccttgtacctggtttgggttttcccttccttgtgacaattataatccagatgcctcttctttctgtttgaattacggtagtgcattgccttagtggcttgcctgtgcctctgggtggattacatatgatagtaaagcccacctgtttggatgggagtagaggaagttggtgtagaccagctgtggagctgaaggcacagtctgccccacccccacctccccactgtggttagtcagaggcatcctgctccaagctctgcttttccttcctctgaaacaatgccattcttgcttctattgctacacatctccttctggctcaggtgaaatccatgcccttctgcttatagacctaaagttcaggtacttattattggccattgatcttgaatttgccctctcctagtgctgcagtcccacttcaaagccattttctgaggaggatggtttaggtctggcaattgtccttgaaaaatcccacccatgttgtaccaccttggtgagtcatatgccactcatcagcttgggaatgatggctgccaactcccaatctcccaggaaggcagggggcagaatctttttttcacttggcctgctacctccattaaaaaaccattctcttacagtttaaaaaaaaaaaaaaaaaaa

SEQ ID NO: 29876 - DNA, 2711 bp, Homo Sapiens
gagagcccagagagctgaacctgcatcccggacctgcggcgaccgtcgtacaccatgggcctccacctccgcccctaccgtgtggggctgctcccggatggcctcctgttcctcttgctgctgctaatgctgctcgcggacccagcgctcccggccggacgtcaccccccagtggtgctggtccctggtgatttgggtaaccaactggaagccaagctggacaagccgacagtggtgcactacctctgctccaagaagaccgaaagctacttcacaatctggctgaacctggaactgctgctgcctgtcatcattgactgctggattgacaatatcaggctggtttacaacaaaacatccagggccacccagtttcctgatggtgtggatgtacgtgtccctggctttgggaagaccttctcactggagttcctggaccccagcaaaagcagcgtgggttcctatttccacaccatggtggagagccttgtgggctggggctacacacggggtgaggatgtccgaggggctccctatgactggcgccgagccccaaatgaaaacgggccctacttcctggccctccgcgagatgatcgaggagatgtaccagctgtatgggggccccgtggtgctggttgcccacagtatgggcaacatgtacacgctctactttctgcagcggcagccgcaggcctggaaggacaagtatatccgggccttcgtgtcactgggtgcgccctgggggggcgtggccaagaccctgcgcgtcctggcttcaggagacaacaaccggatcccagtcatcgggcccctgaagatccgggagcagcagcggtcagctgtctccaccagctggctgctgccctacaactacacatggtcacctgagaaggtgttcgtgcagacacccacaatcaactacacactgcgggactaccgcaagttcttccaggacatcggctttgaagatggctggctcatgcggcaggacacagaagggctggtggaagccacgatgccacctggcgtgcagctgcactgcctctatggtactggcgtccccacaccagactccttctactatgagagcttccctgaccgtgaccctaaaatctgctttggtgacggcgatggtactgtgaacttgaagagtgccctgcagtgccaggcctggcagagccgccaggagcaccaagtgttgctgcaggagctgccaggcagcgagcacatcgagatgctggccaacgccaccaccctggcctatctgaaacgtgtgctccttgggccctgactcctgtgccacaggactcctgtggctcggccgtggacctgctgttggcctctggggctgtcatggcccacgcgttttgcaaagtttgtgactcaccattcaaggccccgagtcttggactgtgaagcatctgccatggggaagtgctgtttgttatcctttctctgtggcagtgaagaaggaagaaatgagagtctagactcaagggacactggatggcaagaatgctgctgatggtggaactgctgtgaccttaggactggctccacagggtggactggctgggccctggtcccagtccctgcctggggccatgtgtcccccctattcctgtgggcttttcatacttgcctactgggccctggccccgcagccttcctatgagggatgttactgggctgtggtcctgtacccagaggtcccagggatcggctcctggcccctcgggtgacccttcccacacaccagccacagataggcctgccactggtcatgggtagctagagctgctggcttccctgtggcttagctggtggccagcctgactggcttcctgggcgagcctagtagctcctgcaggcaggggcagtttgttgcgttcttcgtggttcccaggccctgggacatctcactccactcctacctcccttaccaccaggagcattcaagctctggattgggcagcagatgtgcccccagtcccgcaggctgtgttccaggggccctgatttcctcggatgtgctattggccccaggactgaagctgcctcccttcaccctgggactgtggttccaaggatgagagcaggggttggagccatggccttctgggaacctatggagaaagggaatccaaggaagcagccaaggctgctcgcagcttccctgagctgcacctcttgctaaccccaccatcacactgccaccctgccctagggtctcactagtaccaagtgggtcagcacagggctgaggatggggctcctatccaccctggccagcacccagcttagtgctgggactagcccagaaacttgaatgggaccctgagagagccaggggtcccctgaggcccccctaggggctttctgtctgccccagggtgctccatggatctccctgtggcagcaggcatggagagtcagggctgccttcatggcagtaggctctaagtgggtgactggccacaggccgagaaaagggtacagcctctaggtggggttcccaaagacgccttcacgctggactgagctgctctcccacagggtttctgtgcagctggattttctctgttgcatacatgcctggcatctgtctccccttgttcctgagtggccccacatggggctctgagcaggctgtatctggattctggcaataaaagtactctggatgctgtaaaaaaaaaaaaaaaaaaa

SEQ ID NO: 29877 - DNA, 3463 bp, Homo Sapiens; identical to SEQ ID NO: 23194

SEQ ID NO: 29878 - DNA, 901 bp, Homo Sapiens
ctcttcccgcagccaagggtgggcgccggtcctaggaggcgacggttgtaagccagacaaaaagaactggggtgcccggagtgccaggtggcgggcaagcggtgggcttttcggcggggtctttaggatttgcagctccaggaagcgagatgtcgaagccgccacccaaaccagtcaaaccagggcaagttaaagtcttcagagccctgtatacgtttgaacccagaactccagatgaattatactttgaggaaggtgatattatctacattactgacatgagcgataccaattggtggaaaggcacctccaaaggcaggactggactaattccaagcaactatgtggctgagcaggcagaatccattgacaatccattgcatgaagcagcaaaaagaggcaacttgagctggttgagagagtgtttggacaacagagtgggtgttaatggcttagacaaagctggaagcactgccttatactgggcttgccacgggggccacaaagatatagtggaaatgctatttactcaaccaaatattgaactgaaccagcagaacaagttgggagatacagctttcgatgctgctgcctggaagggttatgcagatatcgtccagttgcttctggcaaaaggtgctagaacagacttaagaaacattgagaagaagctggccttcgacatggctaccaatgctgcctgtgcatctctcctgaaaaagaaacagggaacagatgcagttcgaacattaagcaatgccgaggactatctcgatgatgaagactcagattaattcctttctggagctttgagatctaaaacttctgttgcttttgccattccaaaactttgtctttgccagaaaagtgttggtaactataaagaaaatatatatgaaaa

SEQ ID NO: 29879 - DNA, 5338 bp, Homo Sapiens
ggccgcgagtgcatcttccacgaacctaattcatctctccagcaaaggacacatctctccagcaaaggacacctctctccagcaaaggacacctgcagagatgtccccagtccttcacttctatgttcgtccctctggccatgagggggcagcccctggacacactcggaggaaactgcaagggaaactgccagagctgcagggcgtcgagactgaactgtgctacaacgtgaactggacagctgaggccctccccagtgctgaggagacaaagaagctgatgtggctgtttggttgccccttactgctggatgatgttgctcgggagtcctggctccttcctggctccaatgacctgctgctggaggtcgggcccaggctgaacttctccaccccaacatccaccaacatcgtgtcagtgtgccgcgccactgggctggggcctgtggatcgtgtggagaccacccggcgctaccggctctcgtttgcccaccccccgtcagctgaggtggaagccattgctctggctaccctgcacgaccggatgacagagcagcacttcccccatcccatccagagtttctcccctgagagcatgccggaacccctcaatggccctatcaatatactgggtgagggccggcttgcgctggagaaggccaaccaggagcttggtctggctttagactcttgggacctagacttctacaccaagcgcttccaggagctacagcggaacccgagcactgtggaggcctttgacttggcgcagtccaatagcgagcacagccgacactggttcttcaagggccagctccacgtggatgggcagaagctggtgcactcactgtttgagtccatcatgagcacccaggaatcctcgaaccccaacaacgtcctcaaattctgtgataacagcagtgcaatccagggaaaggaagtccgattcctacggcctgaggaccccacacggccaagccgcttccagcaacagcaagggctgagacatgttgtcttcacagcagagactcacaactttcccacaggagtatgcccctttagtggtgcaaccactggcacagggggccggattcgagatgtccagtgcacaggccgcggggcccacgtggtggctggcactgccggctattgctttggaaatctgcatattccaggttacaatctgccctgggaggatccaagcttccagtatcctgggaattttgcccggcccctggaggttgccattgaagccagtaatggagcttctgactatggcaacaagtttggggaaccagtgctggctggcttcgcccgctccttgggcctccagctcccagacggccagcggcgtgagtggatcaagcccatcatgtttagtgggggcattgggtccatggaagctgaccacataagcaaggaggccccagagccaggcatggaagttgtaaaggttggaggtcccgtctacaggattggagttggaggtggagctgcttcatctgtgcaggtgcagggagataacaccagtgacctggactttggggctgtgcagcgaggagacccggagatggaacagaagatgaaccgtgtgatcagggcttgtgtggaggcccccaagggaaaccccatctgcagccttcatgatcagggcgctggtggcaatggcaatgtcctaaaagagctgagtgacccagctggagccatcatttacaccagccgcttccagcttggggacccaaccctgaatgccctggaaatctggggggctgagtaccaggaatcaaatgctcttctgctgaggtcccccaaccgggacttcctgactcatgtcagtgcccgtgaacgttgcccggcttgcttcgtgggcaccatcactggagaccggagaatagtgctggtggacgatcgggagtgtcctgtcagaagaaatggccagggggatgcccccccgacacccctgccaacccctgtggacctggagctcgaatgggtgctgggcaagatgcctcggaaggagttcttcctgcagaggaagccccccatgctgcagcctctggccttgcccccagggctgagcgtgcaccaggctctggagagggttctgaggctgcccgccgtggccagcaagcgctacctcaccaataaggtggaccgctctgtgggaggcctggtggcccagcagcagtgcgtggggcccctgcaaactcctctggcagatgtagcggttgtggcactgagccatgaggagctcataggggctgccacagccttgggagaacagccagtcaagagcctgctggacccaaaagtcgccgcccggctggccgtggccgaagccctcaccaacctggtgtttgctctggtcactgacctccgggatgtgaagtgtagcgggaactggatgtgggcagccaagctcccaggggagggcgcagctttggcggatgcctgtgaggctatggtggcagtgatggcagccctgggtgtggcagtggatggtggcaaggactccctcagcatggctgctcgggttggcactgagaccgtgcgggctcctgggtcactggtcatctcagcctatgccgtctgcccagacatcacagccactgtgaccccagacctcaagcatcctgaagggagaggccatctgctctatgtggctctgagccctgggcagcaccggctcgggggcacagctctggcccagtgcttctcccagcttggggaacaccctccagacctggaccttcctgagaacttggtgcgggccttcagcatcactcaggggctgctgaaagaccgcctcctctgctcaggccacgatgtcagtgacggaggcctcgtcacatgcctgctggagatggcctttgctggaaattgcgggctacaggtggatgtgcctgtccccagggttgatgtcctgtctgtgctgttcgctgaggagccaggcctcgtgctggaggtgcaggagccagacctggcccaggtgctgaagcgttaccgggatgctggcctccattgcctggagctgggccacacaggcgaggccgggccccacgccatggtccgggtgtcagtgaacggggctgtggttctggaggagcctgttggggagctgcgagccctctgggaggagacgagtttccagctggaccggctacaggcagagcctcgctgtgtggcagaggaggaacggggcctgagggagcggatggggcccagctattgcctgccccccacctttcccaaagcctccgtgccccgtgagcctggtggtcccagcccccgagtcgccatcttgcgagaggagggcagtaatggagaccgggagatggccgatgccttccacttagctgggtttgaggtatgggacgtgaccatgcaggacctctgctctggggcaattgggctggacactttccgtggcgtggccttcgtgggcggcttcagctatgcagatgtcctgggctctgccaaagggtgggcagctgctgtgacctttcatcccagggctggggctgagctgaggcgcttccggaagcggccagacaccttcagcctgggcgtgtgtaatggctgtcaactgctggctctgctcggctgggtgggaggcgaccccaatgaggatgctgcagagatgggccctgactcccagccagcccggccaggccttctgctacgccacaacctgtctgggcgctacgagtctcgctgggccagcgtgcgtgtggggcctgggccagccctgatgctgcgagggatggagggcgccgtgctgcccgtgtggagtgcgcacggggaaggttacgtagcattttcttctccggaactccaagctcagattgaggccaggggcttggctccactgcactgggctgatgatgacgggaaccccacagagcagtaccctctgaatcccaatgggtccccagggggcgtggctggcatctgctcctgtgatggccgccacctggctgtcatgcctcaccctgagcgggccgttaggccttggcagtgggcatggcgaccccctccatttgatactctgaccacctccccctggctccagctctttatcaatgcccgaaactggaccctggaagggagctgctgactggccacaggggctcacctgggccccatggcttttcacctaagtgggtcctgccccctcccccatgaccttcaggagcaccccatattatttccaaaaatatcttggacagacaaggaccaaaatgccaaaatctcagcggactcgataatctgcctgctgatgttccttctgtggctgtgtctattttcagttctgctctaacatggcatgccctttctcagcccaggaaacagcatgtggttcagagaaaagagcgacaaggaaaagttaggactcctgaggtccgaacaggggcttctgttgcccacttcacaacacccagtgatcaccggtgtgcaattgcctccttggctctgagggatgttttgcgctcccttttctcatcattggggttagcgggtgcagacaaattcagcaatagtatgcagatcagcccctcaccacctcattgttctcatctggaactgaaactttctggatttctcttgaagtgctacactgcactgaatgtaaggaattgttgcttgtggaagtttctcagcgtttctggctgtcttagggctggcctcagaacccagcattcctgttatttgcttctaaattagcagctctctttttttttttttttttgaggcagtctcactctgtcacccaggctggagtacaatggcgtgatctcggcccactgcaacctctgcctcctgggttcaagcaattttcctgcctcagcctcccgagtagctgggagtacaggcacacaccaccacacccagctaatttttgtatttttagtagagatagggtttcaccatgtctcccaggctggtctcaaactcctaacctcaagtgattcgcctgcctcggcctcccaaagtgctgggattacaggtgggagccactacagctggcccagcagctctgtttctgatagaggtggttggggctctcatccctagatcctaaccctttagtatgctggaattctactcttcacttactgcattgactgttgttgattagttattattgcaaagcactgtcaccggcctcagggagtttatgtgtaatagaattaaaaataatagctgtgtataacacttagctcaagccacgcatgtgtgaggcatttggtatgtatctgaattaattctcactaaaattcagcaaaggacttgatagcccctccccgccttttcaataaaggatgaatgaaggttg

SEQ ID NO: 29880 - DNA, 2747 bp, Homo Sapiens
tgctctgtgctgggatcatggaacttgcactgctgtgtgggctggtggtgatggctggtgtgattccaatccagggcgggatcctgaacctgaacaagatggtcaagcaagtgactgggaaaatgcccatcctctcctactggccctacggctgtcactgcggactaggtggcagaggccaacccaaagatgccacggactggtgctgccagacccatgactgctgctatgaccacctgaagacccaggggtgcagcatctacaaggactattacagatacaacttttcccaggggaacatccactgctctgacaagggaagctggtgtgagcagcagctgtgtgcctgtgacaaggaggtggccttctgcctgaagcgcaacctggacacctaccagaagcgactgcgtttctactggcggccccactgccgggggcagacccctgggtgctagaagcccacaccctctaccctgttcctcagcatggagctctggcatccccacctcagtatctaacctgaaccagcctggcttttcaaacactccggggggaggtagtcccagcctcccccggaaccctctaccaatgccttctgaccttctgaagctttccgaatcctcccagttgaggcagtagctgtgtcctctgagggtggatgggaatcttgggagaagcccaagcaagggagccctcagaggtggtgtttggaccaaagcatcggggtgggggaggggtctgccgctgtcccccacctgctggcccccttgtccttcctcaccccctccaatatagtctcggagctacaaccgcagcagccactataaagggcaatattgatctttctgtccatgtggctctatcttttaaaacctcaaggccctccactgtcctaagataaagcctctcataggcactggggaccctgcacagtctggccatgtgaccctctccccaggcaagctctgaagtccctgcaggtggaggccatgcctgtcttaaactcagttgcatccctggtgcccaaagcaacaccagaaccaagaaggagctccataaatccttcttgggtgaagcctagacaaagccgccaggtcttgtggctccaggcaccagagccttgagtactttctcctgcctccaggcattggctcagggtgaattacaaggggctactgaatggctattactttcatcacgactgatccccacctcctcagggtcaaagggctactttctggaagtctccccaggctgactccttctccctgactgcaagggctcactccctcctccaagctcccacaatgcttcatggctctgccgcttacctagcttggcctagagtggcaaatggaacttctctgatctcccccaactagactggagcccccgaaggatggagaccatgtctgtgccatctctgtttcccctgttttcccacatactaggtgctcaattcatgcctgtgaatggcgtgagcccataatggatacacagaggttgcagcagatggtgtgggtacctcacccagatatcatccaggcccaaggcccctctccctgagtgaggccaggtgttggcagccaactgctccaatctgcctccttcccctaaatactgccctggtctagtgggagctgccttccccctgccccacctctcccaccaagaggccacctgtcactcatggccaggagagtgacaccatggagggtacaattgccagctcccccgtgtctgtgcaggattgtctgggttgaatgacactctcaaattgttcctgggatcgggctgaggccaggcctctcctggaaccacctctctgcttggtctgaccccttggcctatccagttttcctggttccctcacaggtttctccagaaagtactccctcagtaaagcatttgcacaagaatccttgtctcaggctctgcttctaaggaaagagactgaagagggacaactttttcctatgaggactcccaatctgccatttgtgtgtggctagctgtttccagccagggggctgaggcacctgcagtcacccacactctgggcctgtggcaccatctgtgcctcagctgactgagcagttctgagatgtggtgactcatgtgaagtggtgtcataggaatgaaggactgtgggcgctgggttcaaattccagttctatgcaccactccaggtagggatacccatgggggcagctgtgcctgtgtgggggaacagggtagggaaatctccataccttctcaattttgctgtgaacctaaaactgccatataaagataaagtctaggccaggcatggtggctcatgcctgtaatcccaacacttagggtggctgaggcaggcagatcacctggggtcaggagttcaagaccagcctgcccaacatggcaaaacctcgtctctactaaaaatacaaaaattagccaggcatcgtggtgggtgcctgtaatcccagctattcaggaggctgaggcaggagaatcacttggacctgggaggcagaggtttcagtgagcccagatcgcgacactgcactccagcctgggcaacagagtgacactctgtctcaaaaaataaaataaaataaaataaaataaaataaaataaaataaaaaaaaaaaaaaaaaaaaaaaaaaaaaaaaaaaaaaaaaaaaaaaaaaaaaaaaaaaaaaaaaaaaaaaaaaaaaaaaaaaaaaaaaaaaaaaaaaaaaaaaaaaaaaaaaaaaaaaaa

SEQ ID NO: 29881 - DNA, 4225 bp, Homo Sapiens
gcagagggtgcggcccagaggaggccgcgggccgggaagggccgggcgggacgggaaacgttagggcagcggcccccggggtgagggggccgagcggacgggcagggccccgaggcgaactctgcccggatgaggaacaaagcagtggggcaggcgcgtgcgcccccagcgcagctggcaggttgggcagcccccttcccgaagcttctggacggaaggccccaggtgttccccgagatgccccaacccgtggcggggtgcacggccaccggccctcgggagaagttgggcggccccgggcgaccccggggacgagtggccgcgtcggtgcagcggttgtgagcaagatgtggtagcacgtgaccctggaacgcaaaccctgatgcctgttccccaccacccgagcgctcctttctctgatatttggccccaagccgatgcatcacaggatgaatgaaatgaacctgagtccagtggggatggagcagctgacttcatcctctgtgagcaatgccttgccagtctcaggaagtcacctgggattggctgcctcacccactcacagtgccatccctgccccaggcctcccagtggcaattccaaacctgggtccctccctgagctctctgccttctgctctgtctttaatgctaccaatgggtattggggatcgaggggtgatgtgtgggttacctgaaagaaactacaccctacctccaccaccttaccctcacctggagagcagttatttcagaaccattctacctggcattttatcttatttagctgacagaccacctccacagtacatccaccctaactctataaatgttgatggtaatacagcattatctatcaccaataacccttcagcactagatccctatcagtccaatggaaatgttggattagaaccaggcattgtttcaatagactctcgctctgtgaacacacatggtgcccaaagtcttcatcccagtgatggccatgaggtggccttggacacagcaatcactatggagaacgtttctagggttaccagcccaatttcgacagatggaatggcagaggagcttacgatggacggtgttgcaggcgagcattcccaaatcccaaatggctccagaagtcatgaacctctgtctgtggattctgtgagcaacaaccttgcagcagacgctgtaggacatggtggtgtgatacccatgcatgggaatggcctggagctccctgtggtcatggagacagaccacattgcaagtcgggtcaatggcatgtctgacagtgccctcagtgactccattcacactgtggccatgagcaccaactctgtaagcgtggcactctctacctcacacaaccttgcctccctagaatctgtttccctccatgaagttggcctcagcctagaacctgtggctgtctcctccatcacccaggaggttgctatggggacaggtcatgtagatgtatcttcagacagtctttcttttgtatcaccttcactgcaaatggaagactccaattcaaacaaggagaacatggcaaccttgtttacaatttggtgtactctgtgtgaccgcgcctatccctcggactgtcccgaacatggaccagtgacttttgttcctgacactccaatagagagcagagcaaggctttctctcccaaagcagcttgttctccgtcagtcaattgtgggagcagaagttggtgtatggactggagaaaccattcctgtgcggacttgctttggacctctaattggccagcagagtcactccatggaagtagcagaatggacagacaaggcagttaaccatatctggaagatataccacaatggtgtcctagaattctgcatcattacaactgatgaaaatgaatgtaattggatgatgtttgtgcgcaaagccaggaaccgggaagagcagaatttggtggcttatcctcatgatggaaaaatctttttctgcacctcacaagatatccctcctgaaaatgaactgcttttttattatagccgagattatgctcaacagattggtgttcctgaacacccagatgtgcatctctgtaactgtggcaaggagtgcaattcttacacagagttcaaagcccatctgaccagccacatccataaccatcttcctacccagggacatagcggcagccatgggccaagtcacagcaaagaaaggaagtggaagtgctcaatgtgcccccaagcttttatctctccttccaaacttcatgtccactttatgggtcacatgggtatgaagccccacaagtgtgatttctgtagcaaggcttttagtgatcccagcaacctgcggacccacctcaagatacatacaggtcagaagaactacaggtgtaccttgtgtgacaagtctttcacccagaaggctcacctggagtcccacatggttatccacactggggagaagaatcttaagtgtgattactgtgacaagttgtttatgcggaggcaggacctcaagcagcacgtgctcatccacactcaagaacgccagatcaagtgtcccaagtgtgataagctgttcttgagaacaaatcacttaaagaagcatctcaattctcatgaaggaaaacgggattatgtctgtgaaaaatgtacaaaggcttatctaaccaaataccatctcacccgccacctgaaaacctgcaaagggcccacctccagttcgtcagcaccagaggaggaagaagaggatgactcagaagaggaagatctagcagactctgtggggacagaagactgtaggattaacagtgctgtgtattcagcggatgagtctctttctgcacataaataaaaggaaaagaaacaagcaattttggatgaaaatgcaaatggaaaaatacacataaccagttatctactataatggtttttatataaaatggttcctgatttattttcagccagtaatcaaaacagactgggaatgaataaagcacttacagaagagtatcctaatgaaaacactttaaaacagattgggaaaactgagcatgtgtcctgttttaagtggtggactgggagggaagtgtcaacttctgaggtctttatttacatgataatctgggagatgcatttatgcctgaatcaaagctgccttctgctcaaacaaatcagatttatttcacattcttccattattccattttcctgctggtcctgtgacttggtaacattctaaacggtccttgccccatagccatcctgattgctgatagtgttttatgcagactcttgtgacttatactcaccacagaatggattgggacacagcagcataagtgtgctacttggcagctagtaagtttaaagcaggacctgccttaactgctcctggccacttggaagtttagggtagatcttgttttccaaagtttcggcaggtgcctggagggcaaataaaaaagcagcagtcagtcagtagtcagtgatggagagaacaagaggagagatgcctggcctctgcccaagaaattagctttgatggaagcctgagcaagtcacctggttattgtaacgtggagatctttgtaggtttagacatggctccctgtctccagtaaacatccagccattcagacaaagggggcctggagatacagagagcccaaataatgcctgctggattgtctcctgatgagtacatgtggactcacctgaggaagggaaggaagggaataatcttttatgtttcatttaccttatgaaaagtgttaaaacattgccaactcaaaataacattatttaatgcatgtgcaaagttaggtcttcccagttgtctcagtgctgaggaacctcatcagagaagcatggaagatgccaaaggatttttggaaggtaaagaaggctgaatagtgaccacatgggcctgttttcagggtcccagcttagttaagtcacccatgcacctggtcattgtgtctcccatgcacatccagcgtttctcagaagcagacccacccttaagttgacaggattgatggaacatgctctcctgctcaaggcacaacctctgggctggagtagaggactctggtgggaaggttttgctgctaatgtatttatggaatgaatgtatttcattcaaatctgtattcctctaggaaggattaaaattaaacttttttaaaatacaggaaaaaaaaaaaaaaaaaaaaaaaaaaaaaaaaaaaaaaa

SEQ ID NO: 29882 - DNA, 3906 bp, Homo Sapiens
ctggcgcgcgcacgcgcacgcgcacgcccaccgcgcggcttcccccgctccccggtgctgaggagagagcgatccgagggactgcgccgcccggacggcctgcagagcgctgccatcatgagtgaaattcgtaaggacaccttgaaggccattctgttggagttagaatgtcattttacatggaatttacttaaggaagacattgatctgtttgaggtagaagatacaattgggcaacagcttgaatttcttaccacaaaatctagacttgctctttataacctattggcctatgtgaaacacctaaaaggccaaaataaagacgcccttgagtgcttggaacaagcagaagaaataatccagcaagaacactcagacaaagaagaagtacgaagcctggtcacttggggaaactatgcctgggtgtattatcacatggaccagcttgaagaagctcagaagtatacaggtaagatagggaatgtctgtaagaaattgtccagtccttctaactacaagttggagtgtcctgagactgactgtgagaaaggctgggcactcttgaaatttggaggaaagtattatcaaaaggctaaagcggcttttgagaaggctctggaagtggagcctgacaatccagaatttaacatcggctatgctatcacagtgtatcggctggatgattctgatagagaagggtctgtaaagagcttttctctggggcctttgagaaaggctgttaccctgaacccagataacagctatattaaggtttttctggcactgaagcttcaagatgtacatgcagaagctgaaggggaaaagtatattgaagaaatcctggaccaaatatcatcccagccttacgtccttcgttatgcagccaagttctataggagaaaaaattcctggaacaaagctctcgaacttttaaaaaaggccttggaggtgacaccaacttcttctttcctgcatcaccagatgggactttgctacagggcacaaatgatccaaatcaagaaggccacacacaacagacctaaaggaaaggataaactaaaggttgatgagctgatttcatctgctatatttcatttcaaagcagccatggaacgagactctatgtttgcatttgcctacacagacctggccaacatgtatgctgaaggaggccagtatagcaatgctgaggacattttccggaaagctcttcgtctggagaacataaccgatgatcacaaacatcagatccattaccactatggccgctttcaggaatttcaccgtaaatcagaaaatactgccatccatcattatttagaagccttaaaggtcaaagacagatcaccccttcgcaccaaactgacaagtgctctgaagaaattgtctaccaagagactttgtcacaatgctttagatgtgcagagtttaagtgccctagggtttgtttacaagctggaaggagaaaagaggcaagctgctgagtactatgagaaggcacaaaagatagatccagaaaatgcagaattcctgactgctctctgtgagctccgactttccatttaaatacatactctaggaaattagctctaagtttttcccttcattttgggttctcctgtttgttttttttttattattttaatcccttgtttattatagagctaatatttattgaatagttattgtgtaccaagcattgtgctaaatactttatatgcattatgatgaatcttgtgcggttttctttctttttttctttttaattaaaatactataatccattgagaaatagcaatattctagctattgtaacttctaaaaatggtatggccattagatctgtgctttttatctctgctctttgaatttctcatattatatagtaaatatattcctacgtaaacctttgatacctagatcaggaatactcttccaggagtacaaaattacattattgatagttaagctcttaattgtgtagcttgcaaaagacagcactttttagttacagatgttttgactttgatgaggatatttagctatcaatctaatagtcacctaaaatatcttttttgttggaaaaaagtttataataaaaaagtttgtcatctctagtgacttcaataaagaaaaaactagaagaggagaaaaaggatttcctcaaattttaaatatgtaacttcagggattcaatccccaaatgtttattaagtagctagaaataattatgtggaaaaaaatgaataatggaaaatagtgagtctcaaattgtttttttttaactaaaatctgcaatgaatctagatgcaattaattttattccttccaactaaaattacaatatttttaggttaaaattattgagatataaagcagccattgggaaattgggagaaatgataaacaaatggaaaaagaagatgtccctaacctacacccatagattaccaaggtttcagtgtactagttttgaatctgttctgaatggagtttttataccctcaatttctggcctttggctattttagcatttcaaagtgacttctatgaagctttttttttaatgtgaaattttcagaatgttgtttttttcatgtagatactccaggaagagttaagcactgctttcagttttaatatccaccttgaggggtcgctgcttgagggctcttatcccaggggactttttaattcggatgttacttaatgtggcttctctaatgtagtttctttgattaccgactacacaattatgtaccatcacagtattagtggaaaagtaccatgtgatttaattctccattcctccaatgtaactcttaaaattattatgtatgtgtatgtgttttactttttgttttttatcatctttaaaatttctattatggtttgattattataaaaataatgaattctcactgtaaatttcaaaaaaaaaattacaaaagtatgtgaatttaaaaatgagagcagtcccctcaccctaccacagttccacaccctcaaggtaaacttataacttataatttgatatgtaaacttccagatcttttttctatgcgtaatcagacatacatatatactgcagtgtatctcacgtattaatttttaaaaatcttttgttttacttaattctgtttttattattattattattttgtttgatctattaaggaagaacaaggaagggaatgatctttactcaagaatttcagaaagtcagcactgaagtcctgacctatcagtagacacatttgtccctttcagatattttaggatattctagcaaagcaggccatttctcccacctgaaagtacataacttctatcacttgccacataattaaaagaactcacattaagcggttactcagacagttaatcatagaaaagattatttgcttcatcagttcatagaaaagattatttgcttcatcagttaacttgtttttataaatcagggcctgtgttcatacacagaaggggcctgagatttctgcactttaaacaagctcctcctaggtgaggatgctgtggctgttctaattacattttgagtagtaaggtctacagcattgttcctcaaacttggctacgtattggaatcacctaaaaagttaaaacaaaacatggatgtctgggtcccgccccatagagaatgacttaattggcatggggtgcagtccaggcatcatgatttttagatttcccagttggaacttgtgcagcaaagtttgggagctactgatggacatgtgaaaagtaagtataaatggaataaaattaattaggctaataggcttaacccaggaaatcctaagttccttgaatatccagtttgcatttgggactcctcatcatatacttggtatataatactctaataaaagctgcctgagttga

SEQ ID NO: 29883 - DNA, 6229 bp, Homo Sapiens
cgccgtgggaagatggcggacggaaagggagacgccgccgctgtcgccggggctggggctgaggctccggcggtagcgggagccggagatggagtcgagactgagtccatggttcggggtcatcgccccgtatctccagcgccgggagcctcgggactgcggccgtgtctgtggcagctggagacagagctgagggagcaagaggtgtcggaggtctcatctttgaactactgccggagcttctgccagactttattgcaatatgcaagcaacaagaatgcatcagaacatattgtgtatcttctggaggtatatcgacttgccatccaaagctttgccagtgcacgtccatacttaactactgaatgtgaagatgtcctcttagtgcttggcagattagtactgagttgtttcgaattactgctttcagtgtctgaaagtgaactgccatgtgaagtctggctaccattccttcagtctctacaggagtcacatgatgcattattggaatttgggaataataacctacaaatattggttcatgttaccaaggaaggggtgtggaaaaacccagttcttcttaaaattctgtctcaacagccagtagaaacggaggaagtcaataaattgattgcacaagaaggaccttcctttctgcaaatgcgaataaaacatttgttgaaatctaactgcatcccccaggctactgctttatcaaaactatgtgcagaatctaaagaaatttcaaatgtgtcatcttttcagcaagcctatatcacatgtttatgttctatgctccctaatgaagatgctattaaggagattgcaaaggtcgactgcaaggaagtactagacatcatttgtaatctggaatctgaggggcaggataacacagcatttgttctttgtacgacttaccttacccagcagctccaaactgcaagtgtatattgttcttgggaactgactcttttttggagtaaactgcaaagaagaattgacccttctttagatacttttttggagcgctgtcgtcagtttggtgtcatagctaaaacgcagcagcatttattttgcctcattagagttatacaaactgaagcacaagatgctggtcttggggtgtcaattttactgtgtgtcagagctcttcaactcagatcaagtgaagatgaggaaatgaaggcatcagtttgtaaaacaattgcctgtcttttaccagaagatttagaagttagacgagcctgtcagcttacagaattcttaattgaacccagtttggatggatttaatatgttagaagaactatatttgcaaccagatcaaaaatttgatgaagaaaatgcaccggttccaaattctcttcgatgtgagctcttactagctttaaaagcccactggccttttgatcctgagttttgggactggaaaactttaaaacgacactgccaccaacttttaggacaagaagcctcagattctgatgatgatttaagtggctatgaaatgtccattaatgacacagatgttttagagtcatttctcagtgactatgatgagggtaaagaagataaacaatatagaagaagagatttgacagatcagcataaggagaaaagagacaaaaaacctattggctcttctgaaagatatcagaggtggcttcagtacaagtttttctgtttgttatgtaagcgggaatgtatagaggctagaattcttcatcattctaagatgcatatggaagatggaatttacacctgtccagtttgtattaaaaaatttaagagaaaagaaatgtttgttcctcatgtgatggagcatgttaaaatgccaccaagcagaagggaccgctctaaaaagaaattactgttaaaaggctctcaaaagggtatttgtcctaagagcccctctgcaatcccagagcaaaaccattcattgaatgaccaagccaaaggagagtctcatgaatacgtcacattcagcaaattagaagattgccacctgcaagacagagatttgtatccatgtcccggtacagactgttcccgtgtgtttaagcaatttaaatacttaagtgtgcatcttaaagctgaacaccaaaataatgatgaaaatgccaagcactacttggatatgaaaaatagaagagagaagtgtacttactgtcgacgacattttatgtctgcttttcaccttcgagagcacgaacaagtgcattgtgggcctcagccttatatgtgtgtatctatagattgctatgctaggtttggatcagtaaatgaactacttaaccataaacaaaagcatgacgatctgcgttacaaatgtgaattaaatggctgtaatattgttttcagtgacttgggacagctttaccaccatgaagcacaacactttagggatgcatcttacacatgcaacttccttggctgtaaaaagttctattactccaaaattgaataccagaatcacctctcaatgcataatgttgaaaattcaaatggagacataaagaaatcagtgaaacttgaggagtctgcaacaggtgaaaagcaagattgtattaatcagccccatctacttaaccaaactgataaatcacatttacctgaagatcttttctgtgcagaatcagctaattctcaaatagatacagaaactgcagaaaacctgaaagaaaacagtgacagtaattctagtgatcagttaagtcatagctcttcagcttcaatgaatgaagagctaattgacacactagatcactctgaaactatgcaggatgtattgttatctaatgagaaagtctttgggccctccagtttaaaagaaaaatgttccagtatggcagtttgttttgacgggactaagtttacctgtggttttgatggctgtggttccacatacaaaaatgcaagaggaatgcagaaacatttacggaaggttcatccataccatttcaagcccaaaaagataaagacgaaagatctgtttccctctttgggtaatgaacataatcagacaactgaaaagttggatgcagaacctaaaccctgctcagatacaaacagtgactccccagatgaaggtctagatcacaatattcacattaaatgtaaacgagaacatcaaggttattcctcagaatcctccatttgtgcttctaaaaggccctgtacagaggataccatgttggaacttctgttacgcttgaaacatttaagcttgaaaaactcaataacacatggatctttctcagggtcattgcaggggtacccatccagtggtgctaagtctcttcagtcagtttcatctatctcagaccttaattttcagaatcaagatgaaaacatgccaagtcagtaccttgcacagttggcggctaagccgtttttctgtgagcttcaaggatgcaaatatgaatttgtgaccagagaggctctgttaatgcattatcttaaaaagcataattattcaaaagaaaaagtccttcagttaaccatgttccaacatcggtattccccatttcagtgtcatatttgccaaaggtcatttacaagaaaaacacaccttaggattcattataaaaataaacatcaaattggcagtgacagagcaactcacaaactattagataatgaaaagtgtgatcatgaaggcccatgttcagtagataggttgaaaggtgattgttctgcagaacttggaggtgatcccagtagtaactctgagaaaccacactgtcatcctaaaaaggatgaatgtagttctgaaacagatttggaatcatcttgtgaagaaacagaaagtaaaacatctgacatttcatcaccaataggcagccatagagaagaacaagaaggaagagagggcagaggtagcaggcgaactgttgctaaaggaaatctgtgttatattttgaataaataccacaaaccattccattgtattcataaaacttgcaactcctcattcaccaatctaaaaggcttaattcgccattacagaactgtacatcagtacaacaaagaacagttatgtttggagaaagacaaagcaagaaccaaaagggaacttgtcaaatgtaaaaagatatttgcttgcaaatataaggaatgtaataaacgcttcctgtgttccaaagctcttgctaagcactgtagtgattctcataacctagaccatattgaagagcctaaagtactttccgaagctggatctgcagcaaggttttcttgtaaccagcctcagtgccctgctgttttttatacattcaacaagttgaagcaccacttgatggaacagcataatattgaaggggaaatacattcagattatgaaattcattgtgatcttaatggctgtggccagattttcacccatcgcagtaattactcacaacatgtatattaccgacataaagactattatgatgatttgtttagaagccagaaagtagcaaatgagagactactaaggagtgaaaaggtatgtcaaacagctgatactcaggggcatgaacatcagaccaccaggagatcatttaatgctaagtctaaaaaatgtggcttaatcaaagaaaagaaagccccaataagttttaaaaccagagctgaggccctccatatgtgtgtggagcactctgagctctctctgtacccctgcatggttcaaggatgcttatctgtggtgaagttggagagcagcattgtgaggcattacaaacgcactcatcagatgagtagtgcctatttagagcaacagatggagaatcttgttgtttgcgttaagtacggtaccaaaattaaggaggaacccccttctgaagcagatccctgtataaagaaagaagaaaatagaagctgtgaatcagagcgcacagaacacagccattccccgggtgacagtagtgcacccatccagaacactgattgctgtcattcaagtgaaagggatggaggtcagaaagggtgcatagaaagcagctcagtatttgatgcagatactctgctctacaggggaactttgaaatgtaatcatagttccaaaaccacttccctagaacagtgtaatatagttcagcctcctcctccttgtaaaatagaaaattccatacctaatcccaatgggactgaaagtgggacttatttcacaagtttccagctgcctttaccaaggatcaaagaatcagaaactaggcagcatagttcagggcaagaaaacactgtaaaaaatccaacccatgtcccaaaagagaattttaggaaacattcacagccccggtcatttgatttgaagacttacaaacctatgggatttgaatcttcatttctgaaatttattcaggaaagtgaagagaaagaagatgattttgatgattgggagccttcagagcacttaacattaagtaattcttcacagtccagtaatgatttaacagggaatgttgtggcaaataatatggtgaatgacagtgaacctgaagttgacatacctcattcttccagtgactctacaattcatgagaacctgactgcaatcccacctttaatagtagctgaaacaacaacagttccttccttggaaaacctgagggttgtattggacaaagcattaacagactgtggagagcttgccttaaaacagcttcattatcttcggccagtggtggttcttgaaagatctaagttttccacaccaattttagacttatttccaacaaaaaagacagatgagctttgtgtaggaagttcataagtagcaattttgttttagtaacagactggctccaacactgcaacatggggacatttgccaactcgaacaaaggctgagaagcagccacaccgttgtttagggtagaataggctgtgtatttacatgaatgtataatatctatgtcagcagtattggctgagtccattagctctccagttggtttaatgattgggtttatttttgtttgtttgtttattaaaaaaatggaactgtacacttgtttggtgctaattaatacatcaaaatatactggggcttcctttttcaaattaagtgtgcatgattgtatatggaacaaatactaaggtcccagggtgggagggctagggaaagggatatggagttcttacttgacttgaatgtgcacctgagggtgctttgtgtaatatattgtacactacagcatcttatattttttgagttgagtttcaataaattacaatttttcacc

SEQ ID NO: 29884 - DNA, 3769 bp, Homo Sapiens
gctgtgtgcgcctgcgcggggcgccgagacagggcgtgttcgctgttcagtgccggtgttgcagggagtgagggcagctggagtgcgttctgccgaagcttgtggttgcacgcccatcgtcttaggggctaccttccgtgaccatgtccaagtctctgaagaagttggtggaggagagccgggagaagaaccagcccgaggtggacatgagtgaccggggcatctccaacatgctggatgtcaacggcctctttaccttatcccatatcacacaactggtcctcagccataacaagctaacaatggtgccaccgaacatcgcagaactgaagaatttggaggtgctcaacttttttaataaccaaatcgaggagctgcccacacagatcagtagccttcagaaactcaaacacctgaaccttggcatgaacaggctgaacactttgccacgaggcttcggctccctgccagctcttgaggttctggacttgacgtacaacaacttgagcgaaaattctcttcctggaaacttcttctacctgaccaccctgcgtgcactctatctaagtgacaacgattttgaaatcctgccgccagatattgggaagctcacaaagttgcagatactcagccttagggataacgacctgatctcgctgcctaaggaaatcggggagcttacccagcttaaagagctccacattcaggggaaccgcctcaccgttctgcccccagaactaggaaacttggatttaactggccagaagcaggtattcaaagcagagaacaatccctgggtgacccccattgcagaccagttccagcttggcgtgtcccatgtttttgagtatatccgttctgagacatacaaatacctctacggcagacacatgcaggccaacccagaaccaccgaagaagaataatgacaaatcgaaaaagatcagccggaaacccctggcagccaagaacagataaggaagggattggcatcggctggccttccagcaccttctctctccaacacttcattctctcttgccctgtctctcaaataaacccaatgctgcgtgtgaggccttttttatttttcttttcactctctttctaatgcttcccaccttaccttttagattcttttgctaggtgggagattgttataaggtctttaaaccatttccatttgtttctttaacattaccaaaagcagggaacaaagctcttattcaactgcgaattccatagtgggctctggcttttcttgaatagatatcacaaggttgcttattatcaaaagaataattaaaatcatgtaaccatttaaatgtcactgttaacacttttcactctttctgttgattcacctaactcattattttgctttattaaaagtcttccttcaccaccgagatatgctaatttaacttacaaatgattttaataaaatcttgagtttgtatcacatgttacttattgactcagaataaaagaacagtctgatcttggggtataacacattttcatttacttttctcccccaaaatcatcttatccaattttattggttatacatgataaacttttcatgaaagaaatgcaaaattaaatcacagttcgtttcttctcacattaatttgtcaagttttttttttctttgaagactttctaaattaggaagcagaaaaacaaatctctaggagattctgccaaaggattttggaaagtagcattccttcgccgaagaaatggtgatttctgccaggggctggtagacaagaactgtgaaagagagagagaaaaaacctcaactgtgtattttgtcacggcggaaaatctgctcgcatcgaagcattcttctaagcgacttcgatgccaaggaagttgtgtaaatgtgcacgcgctacaccacacccagggtggaaaccacagttgcagagtcattaaacaatcaattgtttgtttaacatctgtgataggcagctttccttcttttcaacagtgatacctacgaaaatcaaaataaatgcaagctgaggttttgtgctcactgaaagggctgtcaaccccagaaggccgacacaaaaaaaatggtatgtgaagatgcaccgtcttttcaaatggcctgggagagtcaaatggcctgggagagggggcctgcccttctctgctgtgtcctttcggcttcccagttgagctcccaagaccaggacccactggggcatataaaatctctgctgtatcctttcggcttcccagttgagctcccaagaccaggacccactggggcatataaaaaagtcaaaaatcaaaatcaaacaacaagttctgagttacttaggaaacagacttcgcatttcaatcagagaggccacagagcaaggtctaaacttctggcttctagacaaattcctgatagaacatttaaatgtgggaagtggcttccccaggtcccatcccctgtttagggatagagttgatatcatttttataggtgccatgtatgcctctgcctgaatttttttaattgacttttgagcttttgagattgcacgagggagaacaaggcctttgctgttgtggataggaaagacttaacctaaaattaaaccagcaagaaagcattagtaaaaatctaacaatatgaagggctcttatgagtcatttttttcaaaagatgaaaactccagaaacgcacaggaacgaaatacctcccagaaacatgaagcaatcatcgaagactcactggtaatatttttaaaaagtatacagatcaaagcaaaaagaagccatgtgtaacaaagagaaatgtgcaaatattttttaaggcagtattaagtgcaagaggagtaacatgaaataaacattctttcacatggctactgggaatataaatttcgctccagaaaggccgtagcagtttgacgataggtggcaaaaccttaagattgtgtactggggcccagaatttttatttctaggaatgtatcctgaggaaattatccgagatccccacaaactgcaatgtttaggaattgtccttatagcattgcatacacaagaaaaacagagaaaagcctgatccctgtcagtggaaaaggggttcaatgaattacggtgtgtctgcatgaggcttttatgacattaaaaattgttgaacaacggccaggcacagtggctcatgcctgtaatcctaacactttgggaggccaaggtgggaagattgcctgagctcaggagtttgagaccagcctgggcaacacggtgaaaccccgtctctactaaaatacaaaaaattagccgggcgtcgcagcatgcgcctgtagtcccagctgctcaggaggctgaggcaggagaattgattgaacccgggaggcagaggttgcactgagctgagattaagccaccgcactccagcctgggcgacagagcaagattccgttcccaagaaaaaaaaattgttcaacaataagggcaaagggagagaatcataacatctgattaaacagaaaaagcaagatttttaaaactaactatataaggatggtcccagctgtgtcaaaaggaagcttgtttgtaatacgtgtgcataaaaattaaatagaggtgaacacaattattttaaggcagttaaattatctctgtattgtgaactaagactttctagaattttacttattcattctgtacttaaattttttctaatgaacacatatacttttgtaatcagaaaatattaaatgcatgtatttttcaaaaaaaaaaaaaaaaaa

SEQ ID NO: 29885 - DNA, 1009 bp, Homo Sapiens
ggcgaaaggaagggcgggccctcaggtgacgcagattggccctccagagaaggggcggccccttctcaggtgccgtcacccccaaacctcagcactgccattccaggtccttaaaggggagaccgcgattctaagaagcagccaagcccagggctggcctgaagcccccggacggcagtgcccagcaggcagcgcccagcaccctggctcccacctcccagtggccccaaaggaaaacagctgccatgcacatccccaaaagcctccaggagctggccaacagcgaagccgtgcagtttctgagaaggcccaagaccatcacgcgggtcttcgaaggggtcttctccctgatcgtcttctcctccctgctgaccgacggctaccagaacaagatggagtctccgcagctccactgcattctcaacagcaacagcgtggcctgcagctttgccgtgggagccggcttcctggccttcctcagctgcctggccttcctcgtcctggacacacaggagacccgcattgccggcacccgcttcaagacagccttccagctcctggacttcatcctggctgttctctgggcagttgtctggttcatgggtttctgcttcctggccaaccaatggcagcattcgccgcccaaagagttcctcctggggagcagcagtgcccaggcagccatcgccttcaccttcttctccatccttgtctggatattccaggcctacctggcattccaggacctccgaaatgatgctccagtcccttacaagcgcttcctggatgagggtggcatggtgctgaccaccctccccttgccctctgccaacagccctgtgaacatgcccaccactggccccaacagcctgagttatgctagctctgccctgtccccctgtctgaccgctccaaagtccccccggcttgctatgatgcctgacaactaaatatccttatccaaatcaataaagagagaatcctccctccagaagggtttctaaaaaca

SEQ ID NO: 29886 - DNA, 4681 bp, Homo Sapiens
gggggcggaaccggaaccggcagtggcttgggggcgggacctcgcggactgctgtggcggcagctggagcggcggccgcggtggcagaaccgggggcggccgctgcagtctggagccccatagtgcggggccgcggccaggccacaggaagagctcgaggcccgggccgcaccggctgagtgtgcgggcccgcgcggctcggagccgccgccgcccatcgagcccctccgggcgcgggtcggcccgccatggggtccctgttccggagcgagaccatgtgcctggcgcagctcttcctgcagtcgggcacggcctacgagtgcctcagcgccctgggcgagaaaggcctggtccagttccgagacctcaaccagaacgtaagttctttccaaagaaaatttgttggtgaggtgaagaggtgtgaagagctagagcgaatattggtgtatttggtacaggaaattaatagagctgatattccccttcctgaaggagaggccagccctcctgcgccacccctgaaacaggttctagaaatgcaggagcagttgcagaagctcgaggttgaactgagagaagtcactaagaacaaggagaaactgaggaaaaacttgctggaactgatagagtacactcacatgctgagagtgacaaagacctttgtgaaacgcaatgttgagtttgaacccacttatgaagaattcccttccttagagagtgattctttgttggattacagctgtatgcagaggctgggagcaaaactgggatttgtgtctggcctaattaaccaaggaaaagtggaagcatttgaaaaaatgttgtggagagtctgcaaagggtacaccatcgtgtcctatgcagaactggatgaatcccttgaagaccctgaaacaggggaagtcataaaatggtatgtctttttaatatccttttggggagagcagattggccacaaggttaagaagatatgtgattgctaccactgccacgtgtacccctatccaaacacagccgaggagcggagggagatccaggaggggctgaacacccgcatccaggatctctacactgtactgcacaaaaccgaggactatttgaggcaagtgctatgtaaagccgccgagtctgtctacagccgtgtgatccaggtgaagaaaatgaaggccatctatcacatgctgaacatgtgcagctttgacgtgaccaacaagtgcctcattgctgaggtctggtgtcccgaggcggatctgcaggacctgcgccgggcactggaggagggctcgagagagagtggtgctacaatcccctcattcatgaatataatccccacaaaagaaacaccccccactcggatccgcaccaacaaattcaccgagggatttcagaacatcgtggatgcttatggagtcggaagctacagagaagtcaatccagctctctttaccatcatcaccttcccgtttttatttgctgtgatgtttggagacttcggacatggctttgtgatgtttttatttgccctcttgttggtgttaaatgaaaatcatcccagactaaatcagtcacaagagatcatgaggatgttttttaatggccggtacatcctcctgctgatggggctgttctcagtgtacactggcctcatctacaacgactgcttttcaaagtcagtcaacctgttcggctctgggtggaacgtgtcggccatgtacagctccagccacccacccgcagagcataagaagatggtgctttggaatgacagcgtcgttagacacaacagcattttgcagctggatccaagcattcctggagtgttccgaggcccttatccccttggcattgatcctatttggaacttggccacaaatcgcctcacttttctaaactctttcaaaatgaaaatgtccgtgattttaggaatcattcatatgacttttggagtcattctgggaatatttaaccacttgcacttcaggaagaagttcaacatttacctggtttccatcccggaacttctcttcatgctctgtatctttggataccttatatttatgattttctacaagtggctggttttttcagcagaaacctccagagttgctcccagcattctgattgaatttattaacatgtttttattcccagccagtaaaacaagtggcctttacacagggcaggagtatgtccagagagtgctgctggttgtcacagcattgtctgtccctgtcctcttcttgggaaagccactgtttttgttgtggcttcacaatgggcgtagttgcttcggggtgaaccggagtggctacacacttataaggaaagatagtgaggaagaagtttcattgctgggaagccaagatatagaagagggaaatcaccaggtggaagatggatgtagagaaatggcgtgtgaagagtttaattttggagaaatattaatgacccaagtaatccattccatcgagtactgtctgggatgcatctccaacaccgcctcctacctgaggctctgggcgcttagcctggctcacgcacagttgtctgatgtcctgtgggccatgctgatgcgcgtgggcctccgcgttgacaccacctatggcgtcttgctactgctcccggttatcgcgctctttgcagttttgaccattttcatccttctgatcatggaagggctttctgcgtttcttcacgccatacgcctccactgggtagaatttcagaacaaattctacgttggtgcaggcaccaaatttgttcctttctcattcagtctactttcatcaaagttcaataacgacgacagtgtggcatgatcatattgctgtaaccaacaagctttcagatttatggagaatgaccatgttatagactttcacttatgtcagatttatgataggaaaaattccatcttcattactgccttatgacatagccaaataattctgtaagatatacctcttcctcatatgttaaatattttgtaaagtttaccaatttgagatataaaaatttcttttggttttttatgatgagcaaatataagttaatgccaaacgttatgttaaagttattttttcaaatacaggatttggggagagaagccaattttgcatggctagttgaaaatggtattagatacttatttcctttaaactttatttaaaacaaacaacagagttaatctgtcacctgaagttgccagataatattttccaacagctgaagtagggatagttttttaaaaaatttaatgatgggtaatcaaaacattcacatttattctgctggatttaaaaatatgtactttttttttttttttgagatgaagtcttgctgtgtcacgtaggctggagtgcaatggcacgatcgtgtctcattgcaacttccgcctcctggattcaggtgattctcctgtctcagcctcccgagtaactgggattacaggcatgcgccaccgtgaccagctaatttttttgtatttttgtagagatggggtttcaccatgttggccaggctggtctcgaacttctgacctcaagtgatccacctgcctcggcctccctaagtgctgggattacaggcgtgagccaccatgcctggccaaaatatgcaaatattttttatcctgtgctacctagaattacaagtagaggattgtttttacaattttgtcttgttttagtaattggggacaatgggataaaatgacatacaacaaatggttatcccacttgtatatttttttaaagactcttatcctgttacccttacataaaaccagttatgataattgtatgtttggaagataaattgtatgctgagccttaaaacccagtgtgactgtagaagatataatgcggacatgatttgaatttagtgacagcttggctgatgtcactgaaccagaagggtttatactgagtgaaggaaaggtaaaaagtagtattttgtatatttttgtaacaaaatataaatgaagatattttaccatgaagagattgcacttatccttgagaacagtctaaatataaatgaagatattttaccatgaagagattgcacttatccttgagaacagtctaatgatactttttttactttcagactgtttctagctaaagttctgataaaagtattgagttaatttaaactttcaaacactgtttagatcagttgaaaactaattcttaatagccattgttttataatctttagtttaaattcatctgtttgacatttggttttttgtgaacttgagtcagtcctattgaacattttgacctatattcttgcaaattatgttaatttttcatattttagtttgattttagacaattattttcaaaaagaaacctgactttttttcaccttcttgacattgtgagtgatacacgttaaaaggctatttgcccgcatcctcctctatcctgtttcgaggtagagagcttggcacttctgttacaagctgagagtctggaggtgctgagtttaacgtggctgtgcagctgatttcaaggcatgagctgaacagcgttgacacagccgtgacttacaattaaaccctttcaattacagtacagattctgtgtgctacttgatgagatgttacccaaggccagtttggacttactgctttttgtccctcatattaaattatcaaatgatgccgatgaaa

SEQ ID NO: 29887 - DNA, 6753 bp, Homo Sapiens
gcagcctcggccgccgggcaagtagctccgagcggctgcttcccggttgcctcgacgaagacagggggcgccgcgctccgcttgctccgcgcctgagccatgcccagcagccctgtgtaaccaccgagtcccggccggagccgaccgacccagtgtgcgccgtctttcggccgagctgagctttcgtgcacgcaactccctctgccccagccggccccgcgccaccatgccccgggcgactgcacttggggccctggtgtcactgctgctgctgctgccgctgcctcgcggcgccgggggactcggggagcgcccggacgccaccgcagactactcagagctggacggcgaggagggcacggagcagcagctggagcattaccacgacccttgcaaagccgctgtcttttggggagacattgccttagatgaagatgacttgaagctgtttcacattgacaaagccagagactggaccaagcagacagtgggggcaacaggacacagcacaggtgggcttgaagagcaggcatctgagagcagcccagacaccacagccatggacactggcaccaaggaagctggaaaggatggccgggagaataccacactcctgcacagccctgggaccttgcatgccgcagccaagaccttctctccccgggtccgaagagccacaacctcaaggacagagaggatatggcctggaggagtcatcccctacgtcattggagggaacttcactgggagccagagggccatttttaagcaggccatgagacactgggagaagcacacctgtgtgaccttcatagaaaggacggatgaggaaagctttattgtattcagttacagaacctgtggctgttgctcctatgttgggcgccgaggaggaggcccacaggccatatccattgggaagaactgtgacaagtttggcattgtggctcacgagctgggccatgtggttgggttttggcatgaacacacccggccagacagagaccaacatgtcaccatcatcagggaaaacatccagccaggtcaggagtataatttcttaaaaatggaagctggggaagtgagctctctgggagagacatacgactttgacagcatcatgcactacgcccggaacaccttctcaagaggagttttcttagacaccatccttccccgtcaagatgacaatggcgtcaggccaaccattggccagcgcgtgcggctcagtcagggagacatagctcaagcccggaagctgtacaaatgcccagcgtgtggggagaccctgcaggacacaacgggaaacttttctgcacctggtttcccaaatgggtacccatcttactcccactgcgtctggaggatctcggtcaccccaggggaaaagatcgtattaaacttcacatccatggatttgtttaaaagccgactgtgctggtatgattacgtggaggtccgggatggttactggagaaaagccccccttttgggcaggttttgtggcgataagatcccggagcccctcgtctccacggacagccggctctgggtggagttccgcagcagcagcaacatcttgggcaagggcttctttgcagcgtacgaagctacctgcgggggagacatgaacaaagatgccggtcagattcaatctcccaactatccggatgactacagaccttccaaggaatgtgtctggaggattacggtttcagaggggtttcacgtgggacttaccttccaagcttttgagattgaaaggcacgacagctgtgcatatgactacctggaagtccgggatggccccacggaagagagtgccctgatcggccacttttgtggctatgagaagccggaggatgtgaaatcgagctccaacagactgtggatgaagtttgtgtccgatggctctatcaataaagcgggctttgcagccaattttttcaaggaggtggatgagtgttcctggccagatcacggcgggtgcgagcatcgctgtgtgaacacgctgggcagctacaagtgtgcctgtgaccctggctacgagctggccgccgataagaagatgtgtgaagtggcctgtggcggtttcattaccaagctgaatggaaccatcaccagccctgggtggccgaaggagtatcccacaaacaaaaactgtgtctggcaggtggtggcccccgctcagtaccggatctcccttcagtttgaagtgtttgaactggaaggcaatgacgtctgtaagtacgactttgtagaggtgcgcagcggcctgtcccccgacgccaagctgcacggcaggttctgcggctctgagacgccggaggtcatcacctcgcagagcaacaacatgcgcgtggagttcaagtccgacaacaccgtctccaagcgcggcttcagggcccacttcttctcagataaggacgagtgtgccaaggacaacggcgggtgtcagcatgagtgcgtcaacaccttcgggagctacctgtgcaggtgcagaaacggctactggctccacgagaatgggcatgactgcaaagaggctggctgtgcacacaagatcagcagtgtggaggggaccctggcgagccccaactggcctgacaaataccccagccggagggagtgtacctggaacatctcttcgactgcaggccacagagtgaaactcacctttaatgagtttgagatcgagcagcaccaggaatgtgcctatgaccacctggaaatgtatgacgggccggacagcctggcccccattctgggccgtttctgcggcagcaagaaaccagaccccacggtggcttccggcagcagtatgtttctcaggttttattcggatgcctcagtgcagaggaaaggcttccaggcagtgcacagcacagagtgcgggggcaggctgaaggctgaagtgcagaccaaagagctctattcccacgcccagtttggggacaacaactacccgagcgaggcccgctgtgactgggtgatcgtggcagaggacggctacggcgtggagctgacattccggacctttgaggttgaggaggaggccgactgcggctacgactacatggaagcctacgacggctacgacagctcagcgcccaggctcggccgcttctgtggctctgggccattagaagaaatctactctgcaggtgattccctgatgattcgattccgcacagatgacaccatcaacaagaaaggctttcatgcccgatacaccagcaccaagttccaggatgccctgcacatgaagaaatagtgctgatgttcttgaaagacagaaactgagaattttttttgttttgttttgtttttaacaacaatagcaccttgaaaatctgccctaaaacagtgtacagtatttttctcaaacaaaaactcagaatccagccttagaggtatatatttgaatgaaagtcttgtaagtttggccaacaaggtggagagaaaaatgttcttttgcttctgtctgcaatgttatcattcatgaactgttaaagtgttaaagattaggattgaagtcactgaccattccggctatgcttcttcataccattctccttgtcccttgctcctatgtggcaaaaggtcagccttggggttggccgttcctctaatctggacttgcttgcaaaggtgccaggctgtcttctgtccatgttgggcataagggatgaaaacttggccgagactaatgtgtggcccacagctttggctggaatcattttctttctctctgccagggacatgtcaaccaagaaacctgaaaatatggatggatgtcaggactaaaaaaaggcatcacagtgagcagtgagcacagagggagtttcgagtataagaatcattgtcatgaagttaggagaccacaaagccatttctcagagtcattcactctccttgtccctttggtttccccccctccctaattgcagtgggggctaaggcatccattatgaatacagcagaacatttgctggcgagagtcctgtctgctgagaagacaatattgtggctcgtcctgatatttttttcattcattgactttgagaagactccacctgtgcttggaattccatgggcttcaaagaacatttcttcttttagctttggaggcacttgccgtggcacacctggactccttgacatccaattcaaactgcatttgcaaaatgtgcaaagacctcttatgagggaccaattcaggtcccttatggggtgaacactgttgaagactggttaattataagttatgtaagaatcatcgccttgtggaacaagtcaatcagtgactagcttcctgtagccaatcaggttaaagagtgcgttggtaactttgctctgattaactagtattcaatcaccaacttgcaaacagaattcataacacttggcacttgttctagagaagtgtagaggatgatgtttacataattttagcacctcaaggtataatttaaacagtgaggtagttttgaatggcatttcattaaggcatctatgggcattatgagctaaaagctgtggtatgttagctttaaaagagtatttatgttggaataatttttaaataatgtttacataactgtaagtcctgtttggttgttgttggacgcagggcggcacatgagtgtttttggttagagccaagatagctcccatgcaccggaattcctttgggatgaatcagcatcattttaaacaaagtatatgtaaaaggtgaaaggttatattttttacagatcagaatgtggcaccagaggactgtgtctcattaaagtgattgctgggagcaaaaactagaatgatacaaagaaaggtcagagaaatgcatgggaatattttttccttaaaacagaaaaaaattaaagtattattaataatatatgtctgtatatatgtatgtatgtaaaagatcagctgtcaaagccttaatcaatgcagtgtggaaaatgccaacccctggtcctcgctttactgtgggccctgcaggactggctctccatttcctgcctctcctttcaccaagctctgttttggcctttctcggccctggactgaggctcagcctacacgctcatattgtgcatatggcagaccctgcccagcgtgcgctttgatacagcaaatggagcagctgacctcatggctccaatcccacctgcctgttagggtagattccatttatctgatttttgtattttctgaggttttatttggtctcatcttgtctatgagagttgaaactggaactgggaaacctaagatgggtgttatggttctttctccaaggaaataaaaattctgcagttttaacctttagaagtctaagcaagattaacaaatttcatagaaaagtgggagggagtcagaaacagagttggtgctgctcagcaggacggtgaaacaatgatacttctttttatctctttagtatgaacattttcaaaaacacacagcttcaacaattgtcaccatatggccaatttgcaacaatgggactcttatgaaaaacctttatttaggccttctgtgtgacgtatccacagaaaagagaagctctgattcagctggggctagctgggccgctcctctggaagcccacacttgtggggacttaggcatgacacaggttcttgcaaagaaactagaggctggcttcactagagagagtccattcagcagaaagtcccaggcctctgccttggtgcttccaattatcagtgacctgcctgcaagcatccccagaagcaaacagcagaggtagaagatatcactgcagcctgctttgtgctttaattgggtaccaagctttggggatgacagtgagttgcaagaatagttttagttcagagaattgtcttaggacaacaggctaatgaaggatttggggtctgggtttttagcctggctccgttctggtgtaacccggtctagcaaaagctaagcctggattgcagggcaggaaaaaatctggaattaactttagccagtggaatttcttcaaacagagaaagagaggctgttcattgatccactattccctctattttcctctaaggtaaatatttagaggtatttacctgtaaggtgaagtttcctttttatttctactttacaatttctctctaaagcaagcttgtccaacccttggcccaggacggctttgaatatggcccgacacaaattcgtaaactttttaaaaaacattgtaagattctttctgtgatttttttttttctcgtcagctatcgttagtgtattttatgtgtggcccaagataattcttcttccaatgtggcccagggaagccaaaagatgggacacccctgctgtaaagtttcatatcactcatgaattgctcagctgatttaaataatttgtaaaatcctgctaactagcaaattcacattgagattttctattgattgggtccctttgatagctttcagattggtattgttagcgttccatttgtgaacaaatgttcccttggctttagcagatgtttttaaagtttcttttgtagaccgaacttctgaagagtaataccaaatgcctaaaattttatttttaaaaaggaaaattgtttaaagtattatatgtaaacatatgggtattttttattttgtgtaattttacatttcatgaaatgatgtcagtttcaaagagaaagtggagaggacctaacatatgtctctacctagaacggatggtttcattaaagaatgtggattt

SEQ ID NO: 29888 - DNA, 7434 bp, Homo Sapiens
cggccaggtgtgtgggactgaagttcttggagaagggagtccaactcttcaaggtgaactatgaccactttactctgggttttcgtgactctgagggtcatcactgcagctgtcactgtagaaacttcagaccatgacaactcgctgagtgtcagcatcccccaaccgtccccgctgagggtcctcctggggacctccctcaccatcccctgctatttcatcgaccccatgcaccctgtgaccaccgccccttctaccgccccactggccccaagaatcaagtggagccgtgtgtccaaggagaaggaggtagtgctgctggtggccactgaagggcgcgtgcgggtcaacagtgcctatcaggacaaggtctcactgcccaactacccggccatccccagtgacgccaccttggaagtccagagcctgcgctccaatgactctggggtctaccgctgcgaggtgatgcatggcatcgaggacagcgaggccaccctggaagtcgtggtgaaaggcatcgtgttccattacagagccatctctacacgctacaccctcgactttgacagggcgcagcgggcctgcctgcagaacagtgccatcattgccacgcctgagcagctgcaggccgcctacgaagacggcttccaccagtgtgacgccggctggctggctgaccagactgtcagataccccatccacactccccgggaaggctgctatggagacaaggatgagtttcctggtgtgaggacgtatggcatccgagacaccaacgagacctatgatgtgtactgcttcgccgaggagatggagggtgaggtcttttatgcaacatctccagagaagttcaccttccaggaagcagccaatgagtgccggcggctgggtgcccggctggccaccacgggccacgtctacctggcctggcaggctggcatggacatgtgcagcgccggctggctggccgaccgcagcgtgcgctaccccatctccaaggcccggcccaactgcggtggcaacctcctgggcgtgaggaccgtctacgtgcatgccaaccagacgggctaccccgacccctcatcccgctacgacgccatctgctacacaggtgaagactttgtggacatcccagaaaacttctttggagtggggggtgaggaggacatcaccgtccagacagtgacctggcctgacatggagctgccactgcctcgaaacatcactgagggtgaagcccgaggcagcgtgatccttaccgtaaagcccatcttcgaggtctcccccagtcccctggaacccgaggagcccttcacgtttgcccctgaaataggggccactgccttcgctgaggttgagaatgagactggagaggccaccaggccctggggctttcccacacctggcctgggccctgccacggcattcaccagtgaggacctcgtcgtgcaggtgaccgctgtccctgggcagccgcatttgccagggggggtcgtcttccactaccgcccgggacccacccgctactcgctgacctttgaggaggcacagcaggcctgccctggcacgggggcggtcattgcctcgccggagcagctccaggccgcctacgaagcaggctatgagcagtgtgacgccggctggctgcgggaccagaccgtcagataccccattgtgagcccacggaccccatgcgtgggtgacaaggacagcagcccaggggtcaggacctatggcgtgcgcccatcaacagagacctacgatgtctactgctttgtagacagacttgagggggaggtgttcttcgccacacgccttgagcagttcaccttccaggaagcactggagttctgtgaatctcacaatgccactgccaccacgggccagctctacgccgcctggagccgcggcctggacaagtgctatgccggctggctggccgacggcagcctccgctaccccatcgtcaccccaaggcctgcctgcggtggggacaagccaggcgtgagaacggtctacctctaccctaaccagacgggcctcccagacccactgtcccggcaccatgccttctgcttccgaggcatttcagcggttccttctccaggagaagaagagggtggcacacccacatcaccctctggtgtggaggagtggatcgtgacccaagtggttcctggtgtggctgctgtccccgtagaagaggagacaactgctgtaccctcaggggagactactgccatcctagagttcaccaccgagccagaaaaccagacagaatgggaaccagcctataccccagtgggcacatccccgctgccagggatccttcctacttggcctcctactggcgccgaaacagaggaaagtacagaaggcccttctgcaactgaagtgccctctgcctcagaggaaccatccccctcagaggtgccattcccctcagaggagccatccccctcagaggaaccattcccctcagtgaggccattcccctcagtggagctgttcccctcagaggagccattcccctccaaggagccatccccctcagaggaaccatcagcctcagaagagccgtatacaccttcaccccccgagcccagctggactgagctgcccagctctggggaggaatctggggcccctgatgtcagtggtgacttcacaggcagtggagatgtttcaggacaccttgacttcagtgggcagctgtcaggggacagggcaagtggactgccctctggagacctggactccagtggtcttacttccacagtgggctcaggcctgactgtggaaagtggactaccctcaggggatgaagagagaattgagtggcccagcactcctacggttggtgaactgccctctggagctgagatcctagagggctctgcctctggagttggggatctcagtggacttccttctggagaagttctagagacctctgcctctggagtaggagacctcagtgggcttccttctggagaagttctagagaccactgcccctggagtagaggacatcagcgggcttccttctggagaagttctagagaccactgcccctggagtagaggacatcagcgggcttccttctggagaagttctagagaccactgcccctggagtagaggacatcagcgggcttccttctggagaagttctagagaccactgcccctggagtagaggacatcagcgggcttccttctggagaagttctagagaccactgcccctggagtagaggacatcagcgggcttccttctggagaagttctagagaccgctgcccctggagtagaggacatcagcgggcttccttctggagaagttctagagaccgctgcccctggagtagaggacatcagcgggcttccttctggagaagttctagagaccgctgcccctggagtagaggacatcagcgggcttccttctggagaagttctagagaccgctgcccctggagtagaggacatcagcgggcttccttctggagaagttctagagaccgctgcccctggagtagaggacatcagcgggcttccttctggagaagttctagagaccgctgcccctggagtagaggacatcagcgggcttccttctggagaagttctagagaccgctgcccctggagtagaggacatcagcgggcttccttctggagaagttctagagactgctgcccctggagtagaggacatcagcgggcttccttctggagaagttctagagactgctgcccctggagtagaggacatcagcgggcttccttctggagaagttctagagactgctgcccctggagtagaggacatcagcgggcttccttctggagaagttctagagactgctgcccctggagtagaggacatcagcgggcttccttctggagaagttctagagactactgcccctggagtagaggagatcagcgggcttccttctggagaagttctagagactactgcccctggagtagatgagatcagtgggcttccttctggagaagttctagagactactgcccctggagtagaggagatcagcgggcttccttctggagaagttctagagacttctacctctgcggtaggggacctcagtggacttccttctggaggagaagttctagagatttctgtctctggagtagaggacatcagtgggcttccttctggagaggttgtagagacttctgcctctggaatagaggatgtcagtgaacttccttcaggagaaggtctagagacctctgcttctggagtagaggacctcagcaggctcccttctggagaagaagttctagagatttctgcctctggatttggggacctcagtggagttccttctggaggagaaggtctagagacctctgcttctgaagtagggactgacctcagtgggcttccttctggaagggagggtctagagacttcagcttctggagctgaggacctcagtgggttgccttctggaaaagaagacttggtggggtcagcttctggagacttggacttgggcaaactgccttctggaactctaggaagtgggcaagctccagaaacaagtggtcttccctctggatttagtggtgagtattctggggtggaccttggaagtggcccaccctctggcctgcctgactttagtggacttccatctggattcccaactgtttccctagtggattctacattggtggaagtggtcacagcctccactgcaagtgaactggaagggaggggaaccattggcatcagtggtgcaggagaaatatctggactgccctccagtgagctggacattagtgggagagctagtggactcccttcaggaactgaactcagtggccaagcatctgggtctcctgatgtcagtggggaaatacctggactctttggtgtcagtggacagccatcagggtttcctgacactagtggggaaacatctggagtgactgagcttagcgggctgtcctctggacaaccaggtgttagtggagaagcatctggagttctttatggcactagtcaaccctttggcataactgatctgagtggagaaacatctggggtccctgatctcagtgggcagccttcagggttaccagggttcagtggggcaacatcaggagtccctgacctggtttctggtaccacgagtggcagcggtgaatcttctgggattacatttgtggacaccagtttggttgaagtggcccctactacatttaaagaagaagaaggcttagggtctgtggaactcagtggcctcccttccggagaggcagatctgtcaggcaaatctgggatggtggatgtcagtggacagttttctggaacagtcgattccagtgggtttacatcccagactccggaattcagtggcctaccaagtggcatagctgaggtcagtggagaatcctccagagctgagattgggagcagcctgccctcgggagcatattatggcagtggaactccatctagtttccccacggtctctcttgtagacagaactttggtggaatctgtaacccaggctccaacagcccaagaggcaggagaagggccttctggcattttagaactcagtggtgctcattctggagcaccagacatgtctggggagcattctggatttctggacctaagtgggctgcagtccgggctgatagagcccagcggagagccaccaggtactccatattttagtggggattttgccagcaccaccaatgtaagtggagaatcctctgtagccatgggcaccagtggagaggcctcaggacttccagaagttactttaatcacttctgagttcgtggagggtgttactgaaccaactatttctcaggaactaggccaaaggccccctgtgacacacacaccccagctttttgagtccagtggaaaagtctccacagctggggacgttagtggagctaccccagtgctccctgggtctggagtagaagtatcatcagtcccagaatctagcagtgagacgtccgcctatcctgaagctgggttcggggcatctgccgcccctgaggccagcagagaagattctgggtcccctgatctgagtgaaaccacctctgcattccacgaagctaacctcgagagatcctctggcctaggagtgagcggcagcactttgacatttcaagaaggcgaggcgtccgctgccccagaagtgagtggagaatccaccaccaccagtgatgtggggacagaggcaccaggcttggcttcagccactcccacggcttctggagacaggactgaaatcagcggagacctgtctggtcacacctcgcagctgggcgttgtcatcagcaccagcatcccagagtctgagtggacccagcagacccagcgccctgcagagacgcatctagaaattgagtcctcaagcctcctgtactcaggagaagagactcacacagtcgaaacagccacctccccaacagatgcgtccatcccagcttctccggaatggaaacgtgaatcagaatcaactgctgcagcccccgccaggtcctgtgcagaggagccctgtggagctgggacctgcaaggagacagagggacacgtcatatgcctgtgcccccctggctacactggcgagcactgtaacatagaccaggaggtatgtgaggagggctggaacaagtaccagggccactgttaccgccacttcccggaccgcgagacctgggtggatgctgagcgccggtgtcgggagcagcagtcacacctgagcagcatcgtcacccccgaggagcaggagtttgtcaacaacaatgcccaagactaccagtggatcggcctgaacgacaggaccatcgaaggggacttccgctggtcagatggacaccccatgcaatttgagaactggcgccccaaccagcctgacaacttttttgccgctggagaggactgtgtggtgatgatctggcacgagaagggcgagtggaatgatgttccctgcaattaccacctccccttcacgtgtaaaaagggcacagtggcctgcggagagccccctgtggtggagcatgccaggaccttcgggcagaagaaggaccggtatgagatcaattccctggtgcggtaccagtgcacagaggggtttgtccagcgccacatgcccaccatccggtgccagcccagcgggcactgggaggagcctcggatcacctgcacagaccccaccacctacaaacgcagactacagaagcggagctcacggcaccctcggaggagccgccccagcacagcccactgagaagagcttccaggacgcacccaggacgctgagcccaggagcctgccaggctgacgtgcatcccacccagacggtgtcctcttcttgtcgctttttgtcatataaggaatcccattaaaaaaaaaa

SEQ ID NO: 29889 - DNA, 7171 bp, Homo Sapiens
aagaagaggtagcgagtggacgtgactgctctatcccgggcaaaagggatagaaccagaggtggggagtctgggcagtcggcgacccgcgaagacttgaggtgccgcagcggcatccggagtagcgccgggctccctccggggtgcagccgccgtcgggggaagggcgccacaggccgggaagacctcctccctttgtgtccagtagtggggtccaccggagggcggcccgtgggccgggcctcaccgcggcgctccgggactgtggggtcaggctgcgttgggtggacgcccacctcgccaaccttcggaggtccctgggggtcttcgtgcgccccggggctgcagagatccaggggaggcgcctgtgaggcccggacctgccccggggcgaagggtatgtggcgagacagagccctgcacccctaattcccggtggaaaactcctgttgccgtttccctccaccggcctggagtctcccagtcttgtcccggcagtgccgccctccccactaagacctaggcgcaaaggcttggctcatggttgacagctcagagagagaaagatctgagggaagatggatgcaaaagctcgaaattgtttgcttcaacatagagaagctctggaaaaggacatcaagacatcctacatcatggatcacatgattagtgatggatttttaacaatatcagaagaggaaaaagtaagaaatgagcccactcaacagcaaagagcagctatgctgattaaaatgatacttaaaaaagataatgattcctacgtatcattctacaatgctctactacatgaaggatataaagatcttgctgcccttctccatgatggcattcctgttgtctcttcttccagtgtaaggacagtcctgtgtgaaggtggagtaccacagaggccagttgtttttgtcacaaggaagaagctggtgaatgcaattcagcagaagctctccaaattgaaaggtgaaccaggatgggtcaccatacatggaatggcaggctgtgggaagtctgtattagctgcagaagctgttagagatcattcccttttagaaggttgtttcccagggggagtgcattgggtttcagttgggaaacaagacaaatctgggcttctgatgaaactgcagaatctttgcacacggttggatcaggatgagagtttttcccagaggcttccacttaatattgaagaggctaaagaccgtctccgcattctgatgcttcgcaaacacccaaggtctctcttgatcttggatgatgtttgggactcttgggtgttgaaagcttttgacagtcagtgtcagattcttcttacaaccagagacaagagtgttacagattcagtaatgggtcctaaatatgtagtccctgtggagagttccttaggaaaggaaaaaggacttgaaattttatccctttttgttaatatgaagaaggcagatttgccagaacaagctcatagtattataaaagaatgtaaaggctctccccttgtagtatctttaattggtgcacttttacgtgattttcccaatcgctgggagtactacctcaaacagcttcagaataagcagtttaagagaataaggaaatcttcgtcttatgattatgaggctctagatgaagccatgtctataagtgttgaaatgctcagagaagacatcaaagattattacacagatctttccatccttcagaaggacgttaaggtgcctacaaaggtgttatgtattctctgggacatggaaactgaagaagttgaagacatactgcaggagtttgtaaataagtctcttttattctgtgatcggaatggaaagtcgtttcgttattatttacatgatcttcaagtagattttcttacagagaagaattgcagccagcttcaggatctacataagaagataatcactcagtttcagagatatcaccagccgcatactctttcaccagatcaggaagactgtatgtattggtacaactttctggcctatcacatggccagtgccaagatgcacaaggaactttgtgctttaatgttttccctggattggattaaagcaaaaacagaacttgtaggccctgctcatctgattcatgaatttgtggaatacagacatatactagatgaaaaggattgtgcagtcagtgagaattttcaggagtttttatctttaaatggacaccttcttggacgacagccatttcctaatattgtacaactgggtctctgtgagccggaaacttcagaagtttatcagcaagctaagctgcaggccaagcaggaggtcgataatggaatgctttacctggaatggataaacaaaaaaaacatcacgaatctttcccgcttagttgtccgcccccacacagatgctgtttaccatgcctgcttttctgaggatggtcagagaatagcttcttgtggagctgataaaaccttacaggtgttcaaagctgaaacaggagagaaacttctagaaatcaaggctcatgaggatgaagtgctttgttgtgcattctctacagatgacagatttatagcaacctgctcagtggataaaaaagtgaagatttggaattctatgactggggaactagtacacacctatgatgagcactcagagcaagtcaattgctgccatttcaccaacagtagtcatcatcttctcttagccactgggtcaagtgactgcttcctcaaactttgggatttgaatcaaaaagaatgtcgaaataccatgtttggtcatacaaattcagtcaatcactgcagattttcaccagatgataagcttttggctagttgttcagctgatggaaccttaaagctttgggatgcgacatcagcaaatgagaggaaaagcattaatgtgaaacagttcttcctaaatttggaggaccctcaagaggatatggaagtgatagtgaagtgttgttcgtggtctgctgatggtgcaaggataatggtggcagcaaaaaataaaatctttctttttgacattcatactagtggcctattgggagaaatccacacgggccatcacagcaccatccagtactgtgacttctccccacaaaaccatttggcagtggttgctttgtcccagtactgtgtagagttgtggaatacagactcacgttcaaaggtggctgattgcagaggacatttaagttgggttcatggtgtgatgttttctcctgatggatcatcatttttgacatcttctgatgaccagacaatcaggctctgggagacaaagaaagtatgtaagaactctgctgtaatgttaaagcaagaagtagatgttgtgtttcaagaaaatgaagtgatggtccttgcagttgaccatataagacgtctgcaactcattaatggaagaacaggtcagattgattatctgactgaagctcaagttagctgctgttgcttaagtccacatcttcagtacattgcatttggagatgaaaatggagccattgagattttagaacttgtaaacaatagaatcttccagtccaggtttcagcacaagaaaactgtatggcacatccagttcacagccgatgagaagactcttatttcaagttctgatgatgctgaaattcaggtatggaattggcaattggacaaatgtatctttctacgaggccatcaggaaacagtgaaagactttagactcttgaaaaattcaagactgctttcttggtcatttgatggaacagtgaaggtatggaatattattactggaaataaagaaaaagactttgtctgtcaccagggtacagtactttcttgtgacatttctcacgatgctaccaagttttcatctacctctgctgacaagactgcaaagatctggagttttgatctccttttgccacttcatgaattgaggggccacaacggctgtgtgcgctgctctgccttctctgtggacagtaccctgctggcaacgggagatgacaatggagaaatcaggatatggaatgtctcaaacggtgagcttcttcatttgtgtgctccgctttcagaagaaggagctgctacccatggaggctgggtgactgacctttgcttttctccagatggcaaaatgcttatctctgctggaggatatattaagtggtggaacgttgtcactggggaatcctcacagaccttctacacaaatggaaccaatcttaagaaaatacacgtgtcccctgacttcaaaacatatgtgactgtggataatcttggtattttatatattttacagactttagaataaaatagttaagcattaatgtagttgaactttttaaatttttgaattggaaaaaaattctaatgaaaccctgatatcaactttttataaagctcttaattgttgtgcagtattgcattcattacaaaagtgtttgtggttggatgaataatattaatgtagctttttcccaaatgaacatacctttaatcttgtttttcatgatcatcattaacagtttgtccttaggatgcaaatgaaaatgtgaatacataccttgttgtactgttggtaaaattctgtcttgatgcattcaaaatggttgacataattaatgagaagaatttggaagaaattggtattttaatactgtctgtatttattactgttatgcaggctgtgcctcagggtagcagtggcctgctttttgaaccacacttaccccaagggggttttgttctcctaaatacaatcttagaggttttttgcactctttaaatttgctttaaaaatattgtgtctgtgtgcatagtctgcagcatttcctttaattgactcaataagtgagtcttggatttagcaggcccccccaccttttttttttgtttttggagacagagtcttgctttgttgccaggctggagtgcagtggcgcgatctcggctcaccacaatcgctgcctcctgggttcaagcaattctcctgcctcagcctcccgagtagctgggactacaggtgtgcgcacatgccaggctaatttttgtatttttagtagagacggggtttcaccatgttggccgggatggtctcgatctcttgacctcatgatctacccgccttggcctcccaaagtgctgagattacaggcgtgagccaccgtgcctggccaggccccttctcttttaatggagacagggtcttgcactatcacccaggctggagtgcagtggcataatcatacctcattgcagcctcagactcctgggttcaagcaatcctcctgcctcagcctcccaagtagctgagactacaggcacgagccaccacacccagctaatttttaagttttcttgtagagacagggtctcactatgttgtctaggctggtcttgaactcttggcctcaagtaatcctcctgcctcagcctcccaaagtgttgggattgcagatatgagccactggcctggccttcagcagttctttttgtgaagtaaaacttgtatgttggaaagagtagattttattggtctacccttttctcactgtagctgctggcagccctgtgccatatctggactctagttgtcagtatctgagttggacactattcctgctccctcttgtttcttacatatcagacttcttacttgaatgaaacctgatctttcctaatcctcacttttttcttttttaaaaagcagtttctccactgctaaatgttagtcattgaggtggggccaattttaatcataagccttaataagatttttctaagaaatgtgaaatagaacaattttcatctaattccatttacttttagatgaatggcattgtgaatgccattcttttaatgaatttcaagagaattctctggttttctgtgtaattccagatgagtcactgtaactctagaagattaaccttccagccaacctattttcctttcccttgtctctctcatcctcttttccttccttctttcctttctcttcttttatctccaaggttaatcaggaaaaatagcttttgacaggggaaaaaactcaataactagctatttttgacctcctgatcaggaactttagttgaagcgtaaatctaaagaaacattttctctgaaatatattattaagggcaatggagataaattaatagtagatgtggttcccagaaaatataatcaaaattcaaagattttttttgtttctgtaactggaactaaatcaaatgattactagtgttaatagtagataacttgtttttattgttggtgcatattagtataactgtggggtaggtcggggagagggtaagggaatagatcactcagatgtattttagataagctatttagcctttgatggaatcataaatacagtgaatacaatcctttgcattgttaaggaggttttttgtttttaaatggtgggtcaaggagctagtttacaggcttactgtgatttaagcaaatgtgaaaagtgaaaccttaattttatcaaaagaaatttctgtaaatggtatgtctccttagaatacccaaatcataattttatttgtacacactgttaggggctcatctcatgtaggcagagtataaagtattaccttttggaattaaaagccactgactgttataaagtataacaacacacatcaggttttaaaaagccttgaatggcccttgtcttaaaaagaaattaggagccaggtgcggtggcacgtgcctgtaatcccagctccttgggaggctaagacaggaggattccttgagccctggagtttgagtccagcctgggtgacatagcaagaccctgtcttaaaagaaaaatgggaagaaagacaaggtaacatgaagaaagaagagatacctagtatgatggagctgcaaatttcatggcagttcatgcagtcggtcaagaggaggattttgttttgtagtttgcagatgagcatttctaaagcattttcccttgctgtatttttttgtattataaattacattggacttcatatatataatttttttttacattatatgtctcttgtatgttttgaaactcttgtatttatgatatagcttatatgatttttttgccttggtatacattttaaaatatgaatttaaaaaatttttgtaaaaataaaattcacaaaattgttttgaaaaacaaaaaaaaaaaaaa

SEQ ID NO: 29890 - DNA, 6750 bp, Homo Sapiens
caaggctggcttgacctacaaaagaagaagagagttctgcctgcccacttgggcttgtgttgacacggctgataacttgccatcacctgttgccagtgtggaaaaattctccctgttgaattttttgcacatggaggacagcagcaaagagggcaacacaggctgataagaccagagacagcagggagattattttaccatacgccctcaggacgttccctctagctggagttctggacttcaacagaaccccatccagtcattttgattttgctgtttattttttttttctttttctttttcccaccacattgtattttatttccgtacttcagaaatgggcctacagaccacaaagtggcccagccatggggcttttttcctgaagtcttggcttatcatttccctggggctctactcacaggtgtccaaactcctggcctgccctagtgtgtgccgctgcgacaggaactttgtctactgtaatgagcgaagcttgacctcagtgcctcttgggatcccggagggcgtaaccgtactctacctccacaacaaccaaattaataatgctggatttcctgcagaactgcacaatgtacagtcggtgcacacggtctacctgtatggcaaccaactggacgaattccccatgaaccttcccaagaatgtcagagttctccatttgcaggaaaacaatattcagaccatttcacgggctgctcttgcccagctcttgaagcttgaagagctgcacctggatgacaactccatatccacagtgggggtggaagacggggccttccgggaggctattagcctcaaattgttgtttttgtctaagaatcacctgagcagtgtgcctgttgggcttcctgtggacttgcaagagctgagagtggatgaaaatcgaattgctgtcatatccgacatggccttccagaatctcacgagcttggagcgtcttattgtggacgggaacctcctgaccaacaagggtatcgccgagggcaccttcagccatctcaccaagctcaaggaattttcaattgtacgtaattcgctgtcccaccctcctcccgatctcccaggtacgcatctgatcaggctctatttgcaggacaaccagataaaccacattcctttgacagccttctcaaatctgcgtaagctggaacggctggatatatccaacaaccaactgcggatgctgactcaaggggtttttgataatctctccaacctgaagcagctcactgctcggaataacccttggttttgtgactgcagtattaaatgggtcacagaatggctcaaatatatcccttcatctctcaacgtgcggggtttcatgtgccaaggtcctgaacaagtccgggggatggccgtcagggaattaaatatgaatcttttgtcctgtcccaccacgacccccggcctgcctctcttcaccccagccccaagtacagcttctccgaccactcagcctcccaccctctctattccaaaccctagcagaagctacacgcctccaactcctaccacatcgaaacttcccacgattcctgactgggatggcagagaaagagtgaccccacctatttctgaacggatccagctctctatccattttgtgaatgatacttccattcaagtcagctggctctctctcttcaccgtgatggcatacaaactcacatgggtgaaaatgggccacagtttagtagggggcatcgttcaggagcgcatagtcagcggtgagaagcaacacctgagcctggttaacttagagccccgatccacctatcggatttgtttagtgccactggatgcttttaactaccgcgcggtagaagacaccatttgttcagaggccaccacccatgcctcctatctgaacaacggcagcaacacagcgtccagccatgagcagacgacgtcccacagcatgggctccccctttctgctggcgggcttgatcgggggcgcggtgatatttgtgctggtggtcttgctcagcgtcttttgctggcatatgcacaaaaaggggcgctacacctcccagaagtggaaatacaaccggggccggcggaaagatgattattgcgaggcaggcaccaagaaggacaactccatcctggagatgacagaaaccagttttcagatcgtctccttaaataacgatcaactccttaaaggagatttcagactgcagcccatttacaccccaaatgggggcattaattacacagactgccatatccccaacaacatgcgatactgcaacagcagcgtgccagacctggagcactgccatacgtgacagccagaggcccagcgttatcaaggcggacaattagactcttgagaacacactcgtgtgtgcacataaagacacgcagattacatttgataaatgttacacagatgcatttgtgcatttgaatactctgtaatttatacggtgtactatataatgggatttaaaaaaagtgctatcttttctatttcaagttaattacaaacagttttgtaactctttgctttttaaatcttaaaaaaaaaaaagttgctgaagtactgtacagggttgtacaatgagaacccaatgccaaggcaaaaagaacgagtgatttttccttaggatacacatcaaccactttgctgttgaagctgtcagaataaattcctggtggtcagatgaaagggcagattaaatggactcatcagggtaagaggaataatatgggtaaaacaagaaatggcccgatagtttcacactattcctatacctccaggtccggaagacaggtaaaaaattctataatgtaagaatggaggtagttaccctgatttgaccctgtgtgggaaatgctgaaagcaccaggaggaagccggttcccgtgagataagttaacccggcctgacagaatcaagaaaattgagatgagatttgaaaggacccgaaaatgcaggggttggctttctgactgggaacttaaaaatcactcttcatgcttccctggtcctatgtgataacagagttagagacttgagtctgatttcagtcatcttcagggaccagtctgatgttgtagcaagaagactccctttaaaagtgttactgttcaaatcatatatcaggttgaatcacattcaacagagatatattctagaatacttttttagaagaggctaataaagggaagaattatattgaatggaattatttttgataatgagaattatttgggtagattcactgaggctatgtcaacatgatatttagaccaacaggtgatcaatgtttggaaaatacaacaatgacttatttaaaaattacccttcctgctatttagacaaaaacaactgatcagtggttctgttatgtcagctgactttgttagtatcatgttgaaatagcttgaagtaatatcttttatccccttgcaaattcttgtcttccaatcatctcccatatattttcataattagttgtttatgacacctttgtttttctccctctgttcagtatttcaaggaaaattatggatgccagtcttggctgcacaagatatccattacgtacttatacattttaaaatgagtactaattttcactgctaataattctgtaaggacacatcaaagctggccaaaataatgaattttttttaaaaagcaatacctggtttccaccttggactgactttgatcctgttccacttttgaaattttatttgttccttttccatcgtggatgttcctctactttggcaattgtggagggctaatcaatcttatgttagcaggacaacccatgaaaaacaagtcagagagtgaaggctttttcccctaatcctggcagagcagggcgtagaaaagagaggatgtccatgcttaattctagatacttttgagacaacaccttcagaaaacacataatttaatctttgccatccttagatagagaagggctatagatcacatacgttatcaaaaactactcccttggaaaaaatatctttcgaaaatcaaatttaaacatttcactctgtgctgcatatttcttttaccattgaccattattatagggacccatgaagtaaatgtcacaatcatcttactagctctctctctctcagcaaaataaaactgtgatgtgtcttctttgtaaaagtttaggtataaaatgctatgcaactttttctttatagtaagagctttattttctttaataatatagcccaacttatatgttttaatctcccttgtccctcagaataagcagaaaatataactgcagctgtatgtcgtagacacaagaattgaaactgtgcagtcagtagagctgaacttagctatgaattaatttaaattaattctaaagtgactctggtttccattttagtctattagctagagggttttggctgttgctttttttaaagttaggtccacacagtgaagggaaaagagtctgtgaaggtgatcagtgtagcagtaagacatctaaaatcaagacaatgacatgggggctttgtgtacttagctggataattcccttctactgtcctcttccccttggctgtgtagataaaattgtgcattcaaatgatggtactttgacttttgagggtttttatttctgttattcacaaaatactcattctcatttatgtatattgtatgtttaacccccagtgggatttctggctgctgaaaccactttgggccaggaagaacaaggatgaagaggttcctgtcatttcttatggggttcacagaattatttggggcttaaatggtacaatggagacagtcatgtgcaatgcttaagatggtctgacagggtcccttttgctggaggtgttcctgaagagattgaacctagtaacaggctttattttcaccttgtgtacaacatggcaaagactgctaagattaaaatccgtctcccatttgttacagcctcacctgcaccaggatagaaagcacgtgatggaatctgtgatgtctaatgtgtcttatgaaaattgccaaacaactgtccctggggattctgctttgattggcatttttagtcatgggaatgtatatttgctgatatatctgctctgtgtttgggcctctcttgctgtcattatgatgtattttgagatgattagtcaagagtcaaggttgcgagtacaggccaagaccatgggaaaaaaagccatgctcactggccaataaagagcttgatgctgcctggccaaatgaggtgactcagatagaatctgatcccattcagagcttggtaaatgtcactgtacagaagacattgaaaaggaagaggcatagtcatgatcaaaaggatatattgacagttatctatagccagggtagttgttaatacctgcttgtttggggagatatgtttgattatagagagactctgggccaccctcaaacaccgtcagatgcattagcagcccactgcatgggacaatcgcaggcagatacgaggaatgtatcccctgcctattttccttgtgtaacaaatggaaaacattctcccctgtgagaaataatgcaatttctaattatctggatgttcgttgaaaatatattagacattctccctgaggttaaaaacaaaaagtacgtgaccagtctggtaagaagtattaatgaagtagctaatattacagcttcattttctactagcacctatcataatggtcttagtcatttcacacaaatcagaacttccttccccaccagggaggacaacatcttcatgctgtgattgaagcatccattcagaacacgaggcaatattgcagtccacagggaatggatgcttcacttgatctccggaccttggctgcagaggccatcgcagcttttgaaaagtgaaggggttaattcccattggtgtctttgcttatagcatttttctctaacctataacaaggagacattacattttactttagaacatgagaatagcagttttgctcatgacttaccattccagctgcatgggaaagcaaagcagaaaacagtgccccaaatggaaaaaagatactcacacagaacaaaacagttcttggtcttgttcttggtcttgtcaaaccttgcctgatgctctttctaaagtcaaaatatgaatgctaagaaggcataacctacatccttctctgatttcttcagcagggtcaaaagacagttactagcaatggggaatgcttgtcactgtggagaaagagttttgtatatgtctgataccgttgttataacaaaacaaatttttttactatagttttttgttttctacctgcacacccaccagaagagcacaaagcaaggccattgcaacaggcatttaaaaattattatcaaacatgcacatgcttgtacacacacacacacacacacacaaacaggggcatttgtaaaggtgtccctggaatgtaagatttataatgtttaaggcaaggtgaaggcattgccaagtgtgtgtcgctcataggactagtgtatattcactgaaagttaacctgatgatttgttattgtttgaaccatatgctgatttgcttctggtttctgtttagtgtgttctctctgataaggggctgaaagattctgcatcacacatcctctgagacctaccatgtcgcacactttgttaatgacaaacttcactctacactatacagtaccttgttgatatattcagtaaagtcttattttaaaagaaaaaaaa

SEQ ID NO: 29891 - DNA, 2963 bp, Homo Sapiens
ttccgccggcgccccctcccccgcggcgccgtctcctcctcccgcctgaggcgagtctgggctcagcctagagctctccggcggcggcgcagcttcagggcagcgcgggctgcagcggcggcggcggttagggctgtgtagggcgaggcctcccccttcctcctcgccatcctactcctccctcctcgtcatcctcccccttcgtcctcctcgccttcctcctcctcgtcaggctcgacccagctgtgagcggcaagatggcggcgcccaggccgccgcctgccaggctgtcgggcgtcatggtgccggcgcccatccaagacctggaggccctgcgcgcgctcacggcgctcttcaaagagcagcggaaccgagaaacagcacccaggactatcttccaaagagttctggatatcctaaagaaatcttctcatgctgttgagcttgcctgcagagatccatcccaagtggaaaacctggcttccagtctgcagttaataacagaatgcttcaggtgtcttcgcaatgcttgcatagagtgttctgtgaaccagaattcaatcaggaacttggatacgattggtgttgctgttgatttgattcttctgtttcgtgaactgcgagtggaacaggaatctctgttgacagcttttcgctgtggcctgcagtttttaggcaacattgcctcacggaatgaagattcccagtctattgtttgggtgcatgctttcccagaactgtttttgtcttgcttaaatcatccggacaaaaaaattgttgcctactcttcaatgattttgtttacatcccttaatcatgaaagaatgaaagaactggaggagaacctcaatattgcaattgatgtcatagatgcttaccaaaaacatcctgaatcagaatggccgttcttgattattacagacctctttctgaaaagcccggaattggtacaagccatgtttcccaaactgaacaatcaagaaagagttacactgttagaccttatgatagccaagataacgagtgatgagccactcaccaaggatgacatccctgtgtttttgcggcatgctgagttgattgcaagcacctttgtggatcagtgcaagactgtgctcaagctggcctctgaggagcctcctgatgatgaggaggcactggctacaattaggcttctcgacgtcctgtgcgaaatgactgtgaatactgagctgctcggctatctgcaggttttccctggcttgctggaaagagtgattgatcttttgcgggtgattcatgtagctggaaaagaaaccacaaacatcttcagtaattgtggttgcgtgagagcagaaggtgacatctccaatgtggccaatgggtttaagtctcatctcattcgtctgattggaaatctgtgttacaagaataaagataaccaagacaaggtaaatgagctggatggtatcccgttgatcctggacaactgcaacatcagtgacagtaacccctttctgacccagtgggtgatatatgccatccgaaaccttaccgaagacaacagccaaaaccaagatttgattgcaaagatggaggaacaggggctggcagatgcatccctacttaaaaaagtgggttttgaagttgaaaagaaaggcgaaaagctgatcctgaaatctactagagacacccctaagccatgaatgaactacatccaaatacctgaatttttggaatctgtttcatggatttttcatcttctaccgtatgtgaaattgcaagtgtttgaagatttataagtacaaatttgggaacatacaaatcttttaggtagtagagtttaacgtgtataagctaaaagtgaaagtaactgagtgttctcttgtttctttgcattaatgtaactgtgtggtttgcctttgtccccctggatagaacgtgcatttaaagaatatattgtacttactgtgacagcagataataaaccagtctcttggagggcacaacccttatttgacaaaacttggatgttggcttgactgtgtttgtcccttcagatggcaagtcagcatcattctttatattcctcttctcattgggttttctgaactctggcaggcggttgaagtagtttctcactgtgattaattctagcaatctcttttcacccctctgcctttccaaaacattgacaagactcatttccagttaattaattcgagaaccctccctcttcattttgggtactgggctgtcttgtcactgagccctatccctttggaatgtggcagggagtgaggttggtgagagaacatgtgggcacttaactcttcatgttccagttcatcccagaagtagacatcccaggacccattctgtgtcaaggtgaatgcctgtgtcctccccagcttcatgcctctgtcatgggggaaggaatagcttatgttctgctctggtgcagtgccgtagattaaaggtacatttctatcttctttgatttaaaaagcaccagtctcataaaggtgccactcagttttagccatgtcttcactgaaattgcaaaagtacttttagggagcaggagtttatttgacatctagttatctgtctgtctgttcatctatctatctgtctgctgtatgagaggtaggactggattaaatgaccactgaactcactgaatccagatcattcatatcatcaacaaaagctctagggggaggtcacgttgtgaatgcttaaaacatattattttcttcaacaaccatatcgctaaactaatatatccagagattttgcacaattcgtgttgaaccttccaaaacaaaaataaagacctgtccaaaagttttgacaaaaatactgattgctcccaaataaagtgcttctaagctttgtgtagacatagtttaactgatttgtaaaaatagcttaagcatgttgagaatgaagtaaaagttttcccatgtgctgtctaatgt

SEQ ID NO: 29892 - DNA, 1308 bp, Homo Sapiens
cctccgcctccattgaaggcggggaaataccgcggcgcggacggtagttgctgtggtttccgttctgagctcgcagcttaggagctgaagatcgcggacttagcgttgccgcgtccgagtccggccatcagtggctgcagatccggaggccaggagctcaaccacccttcttcggaacagggccggcctgctgctgtgccctcgacgctcggtgcctgtatctactccggggcctaggtcggctccgggggcggcttaggagaaggccgccggcgagatgttcaaaaacacgttccagagcggcttcctctccatcctctacagcatcggcagcaagcctctgcaaatctgggacaaaaaggtacggaatggccacatcaaaagaatcactgataatgacatccagtccctggtgctagagattgaagggacaaatgtaagcaccacatatatcacatgccctgcagaccccaagaagacgctgggaattaaacttcctttccttgtcatgattatcaaaaacctgaagaagtattttaccttcgaagtgcaggtactagatgacaagaatgtgcgtcgtcgctttcgggcaagtaactaccagagcaccacccgggtcaaacccttcatctgcaccatgcccatgcggctggatgacggctggaaccagattcagttcaacttgctagacttcacacggcgagcatacggcaccaattacatcgagaccctcagagtgcagatccatgcaaattgtcgcatccgacgggtttacttctcagacagactctactcagaagatgagctgccggcagagttcaaactgtatctcccagttcagaacaaggcaaagcaataactggaattgtgactcgagggatagacccctggatgtgactcttctttttaaaaggaaactatgtggaggacgatgcaaaaacatatttatcttagtttgctctgctgtagttctgttatttatacttggtgttgcttgtcatggacaccggtgaacatgccgtaactctgtgactgcattgtaagtgcagtgggggtaagcagtcctgtgagtggcgcatgaacgctggagcttattccgccgcctgccccagtgtggggggagatacctttaccatgaacttacagaattaaagatggcccataaggaattccagaccaatatttcttcctgcggtttattctatgttttatatattatctaaatatatgtatatgctgtgtcatactcataatctggaaatgaataaagtgatatattcctggtttgtaaaaaaaaaaaaaaaaaaa

SEQ ID NO: 29893 - DNA, 3480 bp, Homo Sapiens; identical to SEQ ID NO: 22844

SEQ ID NO: 29894 - DNA, 11157 bp, Homo Sapiens
gggggccgctacggtgctgacaagatggcggctggcggagctgtcgctgcggcgcccgagtgccggcttctcccctacgcgctacacaagtggagctccttttcctccacctaccttcccgagaacattttagtggacaaaccaaatgaccaatcttcaagatggtcttcagagagcaactatcctccccagtacttgattctaaagctcgaaaggcctgctatagttcagaatatcacatttggaaaatatgagaaaactcatgtttgcaatttgaagaaatttaaagtctttggtggaatgaatgaagaaaatatgacagagctgttgtccagtggcttaaagaatgattataacaaagaaacattcaccttgaagcataaaattgatgaacagatgttcccttgtcgattcattaaaatagttccactcttgtcctggggacccagctttaactttagcatctggtatgttgaacttagtggcattgatgatcctgatatagtacaaccttgtctcaactggtatagcaagtaccgtgaacaggaagctattcgcctttgcctaaaacacttcagacaacacaactatacagaagcttttgagtcactgcaaaagaaaaccaagattgcactggaacatcccatgttaacagatattcatgacaagctggtgttgaagggtgattttgatgcttgcgaagagttgattgaaaaggctgtaaatgatggcttgttcaatcagtatatcagtcaacaggaatataagccacgatggagtcaaatcattcccaaaagtaccaaaggtgatggggaagataaccgtccaggaatgagaggaggccatcagatggttattgatgttcaaacagagactgtttatttgtttggtggctgggatggaacacaagatcttgctgacttctgggcgtacagtgtgaaggagaaccagtggacatgtatctctagagacactgaaaaagagaatggtcctagtgccagatcgtgtcataaaatgtgcattgatattcaacggaggcaaatctacacattggggcgttacttggattcctctgtgaggaacagcaaatctctgaaaagtgacttctatcgttatgacattgatacaaacacatggatgttactaagtgaggatactgctgctgatggagggccgaaattggtgtttgatcatcagatgtgtatggactcagaaaaacatatgatctacacttttggtggtagaattttgacttgtaatggcagcgtagatgacagcagagccagtgaaccacaattcagtggcttgtttgctttcaactgtcaatgtcaaacctggaaacttcttcgagaggactcctgtaatgctgggcctgaggacatccagtctcgaataggacactgcatgttattccactcaaaaaatcgttgcttatatgtatttggtggccagcgatcaaagacctatttgaatgatttctttagttatgatgtggactctgatcatgtagacataatatcagatggcaccaagaaagactctgggatggttccaatgacaggatttacacagagagcaactattgatccagaactgaatgaaatacacgtcttatctggactcagcaaagataaggaaaagagggaagaaaatgttagaaattcattctggatttatgacattgtgaggaatagttggtcttgtgtctataagaatgatcaagctgcaaaggataatccaactaaaagtcttcaggaagaagaaccatgtccaaggtttgcccatcagcttgtatacgatgagctacacaaggttcattacttatttggtgggaatccaggaaaatcttgctctccaaagatgagattagatgacttctggtcactgaagttgtgtagaccttcaaaagattatttactgaggcattgcaagtacctcataagaaaacacaggtttgaagaaaaggcccaagtggatccccttagtgctctgaaatatttacaaaatgatctttatataactgtggatcattcagacccagaagagacaaaagagtttcagctcctggcatcagctctattcaaatctggttcagattttacagctctgggcttttctgatgtggatcacacctatgctcaaagaactcagctctttgacaccttagtaaatttctttcctgacagcatgactcctcctaaaggcaacctggtagacctcatcacactgtaactgaagagtcactggacacagaaatggaaaacaggagtcgattttccgtcttttggattgcagctccactgactgacagtaaagctgcagtgattgaggactgcaccagagttctgaagggatcttaaccatcacaagtttttaccctcttccttcatgcctgacctcaaccccgctctcctcatcctattcctaaattaggctaataaagtgaaattggtatactttccagttaaatatatatatatatatattttttcttactttatcttttaagaattaatgagtataaaagaaaaattaggcagtttacccttttcagatttttatttcttttttttttaattgggggaaataagcactattaacagattcagcactacaagtattttgaatgttgttgctgttggtcatttggcctgccttttcccttcctatttcactttgcctcccatcacacaactgcgtgtaaatggtgtcacttgttcacctctttacttcattcttaacaagtgtatagttctctaggacagttgatgtatgttaaggtgatatctgtgtctgtattgacttgtcttgtgttacattaaacagtaggcagaactgaggtctcaagtttgcactcttggccatagaactaaaaatgaaacctgagattgacccaagcacctatctgagattggtatataatatttctataatgatatattttatagtagatattacaatagcatctgactttgagtcacagaaaccttaaactgaggagacaatagttcagaacctttttaagagccattctaaaagtgaccagcaggagggatctagtagtgaataatatcttaatagcaattttaggagaaaatgactctttcgtccagaagagctctgcagaaccagggctcccgtttatcttgtgctatctctgtagtattttcatttgagagaggaggctgagtttccagagctttgctttcatttatttttatacacattgtctctctatatctgcttgtggatattgttattttgaagagaaatggtttgtggttgtccagtggtatacaactgacaggcatttcattaagcacatagaccagactttgtgaatggttcagatattttttcattaaaaaacaaggtatggcagatggacttttccatgggtcaaattttttgtgtgagagatagaggtacatgtcttctgatgatgtgctgtggaatgcaatgtgggaaacctacatctggctagtgcttacatttgctcaaaaagcatgttgtatgaagctgactgccaccatgctaaagcagattcatattaagaagtgtcggtcgatccagtggctcttaagagtgaatagctttatggaatcaagtatgtccctgagtagcaagattaggcctcaccaaagaagaaattaacctgcactttcaaaaagtaccatgtataggaatgaaacattgaggtcccactttattctgtctttagtacatggttttacttattttggggatggatagaaatatatttttgctagttctaggcttgaatcatgggctccttggctttcctagcatcccaaagcagtcaacagtgatttcttaagcaatttgatctgtacctttacttgtgaaaggtatgctatataattcagcaagtaccaacttgtgtagctgcagaataaccaagtggctatccagtcaagtaaatacagtttgcttacatacttcaacagtttcataaaacgattcccctgagtgacacaagaacataaaatgttaatatcactaatatagcctgttaaatcttttgtggagacaggtgcaaatcagaagattgacaaggaagaacttgagcttgctaaataagacttcctaaatttaaaagctctagttttgcttagtgtgaattctggcactttaaaaagattaagcaagtgaaattctgctgccctccaccatttatttttacagtgctttgtaatttttttcatcagttccttaaatgttatttggaggaaactaagttcttgacctcagtaattttatttttgtttttccctaaatgtttccctactagtctttttggaaaacatgtttgttttaatttcatcttccctcactttatttaggtagaatttttcccccttcatttctgaaattttttgctcaccgccatgtttaaatggggttgaatcatagcgagccatttgctcttgccaaagtgagatagatgtactgaggagataattgaaaagtcagactctgtactgtggggctttaatcggagcactgctggaaatgattgcagagaatgtagtgcttcatatatccatgaccaagattgacatgttgctcacaacatgtcacaatttagtgaggagctacatgtatttccaagaattccagcatagattataatttaaataatcgaatttggtatttaggtacattgtttatatagccaagtgtatatgctttactacctaacaattattctagcctaggtgaatccctaattgaaacacctggctaacactttagacacataaattaagtgggatacagttttctcatttgtattatctccagcttcaacctcatttatcctttttcctagtataatacattgttttcaaccagaaattaaagtagatatccaacattattttcagtgcttgtacttcatgagaaataatctgattttcaagacacctcttaagtgcatttgcattttattttggtaatggcagagacctcatgtggccagtttgattgattgaagaatgtatcactcttattcaagcaaaggaattcagacttaaatgcctacctctgtgctgaagctgacagacagtattaactcttatcaaggccatcttttagacctgattttcatttatatgaaaacagacctgtccatgtctaataagtaaaaactgatagaatacattaaaaagtcactggtttatcatagaaaagtttgatgggtttagagctcagtgatttaagcttgtaaaactgcattcttgggcaaaatatttatattgtatataaatggttggcagcttattccagttgatctcttcacatctgccttaaaagtgctatgtagagatacattaacagagttataataaaacagtgttttaaaatctagcctataaacaaaaactagtttgaggcacccaagcatttagtgagagattgagaatgatgcttaatggatcaaaaaagcaattaggagtatgttcctgattttattctctaaattatactcaatttcatggtaattacatgaagaagttacctgcaattattcttaacactacatggaattcactgggtaattgtgggtcatttatttcctgaaagtcacgtgaaatccttagctggttgaatgttgcacagtatttgagaattacggtttgaagtgatttctgtgggagggaatcattgcaatgtatattctaaataaagtcatctaactattaaaaaaaaaacacccttcctaacccttcttttcttaaaattccacattcatccacaatctcatccctttgtagaaattcttgcctgaattctcaccaagttttgaattcctaaggtagccccgatctaggatgtgaaggctgcccagaaaaagtttatggctggaggagtatcatacagtgtctacatatgatagtacttacagattaggtctttggatgctttaacacaaaagatttttgttatccttattagtcaaataacgctattcttttgtggttctagaccctggcttctatctccctgtgatttgttttaatgctgaaatgacttggctatccaaagcttctagtctagaggtctgttggttgaaggcagacatttccaagtttgttgaaataatacgaagctgactagcttacgtgaatgatgttgccctcatttgttttgggtgaggactcattactgcagtatattgatctcttcaccaaatgctttttctttttctgaataaatgctgtattagaggttctatttatatatgatttttaaaactttggtttccttctatccaccaaatactgtgaattgtttttccatttatttttcttagctaatgtaactttattcttcacttttttttagccctagacttcctagattttctgtggcattctgtaggacattgtattgcttggaaaaaaaaagatcaaaatcattctggggcaaatgctctattatccttatttatgacaagagaataatgaaattcataagaaattaataacattcagatattgctataaatgtacttgagtcattttcatttggggatagtaataatggctgtggcagctttaatggagaaacctgtgttggcctctttttctggcattaggatctcttgtcatagaactattggtaaagtacaggtttgatagcagagttcctgaattcagcatatcatcagaatttccatttaccttttgtcttttctttttattgtattttttaacctttttgtttctattcctacctcccatgagtaacattgatttctgctgaagttagaatttgtgttaagaattgactttaaatttctgaaatagttgaatattagaagtggcttcagttgccatgaaatgattgcttttctttttctttttttttccttaaataaaaataatgcagccttatatatgtctcttcccctcaagaatgtgaatttaggctgggcatagtgactcacgcctgtaatcccagacctttgggaggctgacacgggaagattgcttgagcccaggaatttcagaccagcctgggcaacacaggaagactccatctctacttaaaatatttttgttttttagccaggtgtggtggtatgtgcctgtagtcccagctacttgggaggctgaggtgggaggatcacttgaacccaggagtttggggtgcagtgagctatgattgcgacactgcactccagcctgggcaacagagcaagaccctgtctcaaaaaaaaaaaaaaaaaaacaaaactgatttagctccaattccaaatgactaactcttaggccagtcatagccaatgaaatcatctgacggtagcttctgtagcccttaacctaaggagtcattagaggttatagtaaattagtttctctagtggtgcagagagaaatgccatcggggaaattatcactgtctttttggctaaagttttatattgtgaactggatcccacttaacagcttaaaaacacaaaaatgaaagggtagtcctagtttatcttcttaattagaatcattatttggaaataagatttgcaatgtgctgtctatccccaaacactgctgagcttgctggaaaacagaatttaacatgaatgttgtctgaaagctgtaggatcaatggcaaaaaaggggaaatgtttggtagggaattggaccagttctaaggtatcacttttaattataaaataatgtcttcctttttatctgcttttcagacagcctcagtgaactattaaacatttgtgtgcaaagtcctattttgcttatctaaggcattttgacttggaagtattaaacttcaggaacgagctagagaagacaatgagggtatgttagagaaggaaaaataggagctttttgcttatggattttagaggtccacaaatcgaaaggaaaaataaatttcttcatttctaaccctaaaataattttgttaatgagatgctgggaagaagactaccaaaaggcctcaaagctcatgcttctagaatattcagtaattctgaatagtctttgggaagtagcatttcttgggaagtagcatttcccttcttccaaataactgtttgagatcttaaaacagaaaatccagtgttaatgggctctagatcttaaactaggtgagcagcttcttacatacaaccagttccttgttaaggatccagcaggaaaaccagccataaaacatttcaacatgcagtttgggggctcccttgcttattcactgagtttaagctcttgctgcaacatagctctgtaccatctgggatgctagcagtcacagcagttagctcagatatctgagctgtctgccacacaaagcctgaggagatcatcattcttcagtttcattcattacttaatgaatgccaaattaattggcaggaagaagaaacactgtgtgatatactgaacaagcctgtgtgcatgaataaggagccactcaaaaagccaattttgagctttatttctccgttgttaacaaatctcaagaaagcctttgttacagtttagctcatgtcatttggttggttttattttctagccctttaacataggaggaaaattgtcatttcatgtataacttgtaacacagaattgaactgatactagtttccttgccttaaattaattatatgtcatcccaagggtctctgttaattctgctttgccaagcaataatgagatctgggtttggcattagaagtatttcataattttggttttttatttaggtttcctccacatctgtaaagtgattgattaaattagaggaggcgtgtagaataaatcccaatcccattgcaactggcagagctttataaatctttataaattcagttacaacaaaggagaggatcctacaccattagagccatgccatcaggtgtttgcaagtgacagctgtagtgtgttgcctcaaataataccaagttataaataataccaagtaattatcaactcactcccaaatttaataagatatcaaagtccaaaaggttacttaggagtagtcttccgtgggggaagataaatttattaaagagtcatgtactgatctttttcttgggattttttttcctttcccagaaaaaaaaattattttggtgactgatcaattgtaaacaattttcttccttacttacaaatcatccgttcagaaaaataaaagtggacttcctttcctaagcattacaattagcctgggcaagaggtgttatgattgtcttattctttaagccggcttactttttggatttgtgtgaaatgtcttttgaaaagaaagtagatagtatagtattaattaactactttgtatagtcttctgcataatttagagttgaaaataatgtaacattttcctgtgaacagattcctttatgcgtacatactttataaatatacatacatacacatacacatacatttttaaaatgctctttttaaagagattcttatcttgctcccactccaaaagctatgtacagttgagttattagcctcagaggaagagtacaggaaagtgaagatgaggacctccttttcttgtgttggtcttgggaacaaacagtattccgtctttcaaatatggcatatttctaaacagtttgggaaagatgttagaattttttaaaagtcagctcttttataaattggaagtactcagtagtcagaaattaagatcccctctgatagagatagattctcaaaaccaaaattggactgaaaattagattgagaagaaagatacaacttcctccatagccaataaaatctgtctttccaagtctgcttattaatgctgtgaatcgctccttctgtttgtgaaaacatctcctggactggaaatgtggtgctgtaaccagctgagccgaaagttggagaatgttaaatatcttatatgggacttacgataaaatgtattgatgttagtgattgtcaaaataggtttatcatttaaaaaactaggaaattactaagtataaagaagaaaaaccagtattaattaagtgatgagacctgttcattttgttttccctgacttatttccattaccaaacatagtaaaggccagaaaagattaaaaaaaaaattaacacagccattccattgttttttaccacatggagaaaggaccaggctggaagcatatgtccccccacccttatttatattcctttgagcattgccgttttctagacagacaatccgaaaataattgtgttgataggtctgtttaagcctgaactctgggtgtaaaatgttatccagaagctatagggagctgccttgctcaggtcattggaaatttcaaccctaagactcattggaatttctaagtccgttatgcaccattatgggcatatggagcatattcataccatgaggaggagtctttgtttatgatggactttttaatatggccataattaaactcacactcaaaaaggatgagctattgtcaaaagccaaaagaaaaacagacaaaatgaacatgaagcaaggagtccataaaacaagagttctttaccacgtttaagcaaatgtctctcaaaaaaaattgtatttctgtgcacattagctgagattcacacattttgcacctcagtagtatttcagatgagactcaatgtgtggagaaaactgctaacttgtttggttctactcttaccccctcttctgtggcaatgtggggtcagggccgtatcctaaagtatccacatggtcttaaatggaaatcatgggactctggaaagctggcatgagctggttggagcttttaaacagaagtgctttatgggtatcagatctcttctgacatcaattgtttcaaatcattgttgggctctgtcgtgttctgcaatcttccccattcccctcatgatctctggcttatcttttatccaatctgtatggactttttaggattttttttttcttatagtacaaataattttcagatcccagctttggtaaatgtgttaattctactttgtgaataaataaatgagtgatctgctaaaaatggcaattgtagaattatgttgtatgtaatgtacatatggagaaagaatgtattttgttcattttcttaataaaatgttatatatggatgctaaaaaaaaaaaaaaaaaaaaaa

SEQ ID NO: 29895 - DNA, 6317 bp, Homo Sapiens
tagtaagacaggtgccttcagttcactctcagtaaggggctggttgcctgcatgagtgtgtgctctgtgtcactgtggattggagttgaaaaagcttgactggcgtcattcaggagctggatggcgtgggacatgtgcaaccaggactctgagtctgtatggagtgacatcgagtgtgctgctctggttggtgaagaccagcctctttgcccagatcttcctgaacttgatctttctgaactagatgtgaacgacttggatacagacagctttctgggtggactcaagtggtgcagtgaccaatcagaaataatatccaatcagtacaacaatgagccttcaaacatatttgagaagatagatgaagagaatgaggcaaacttgctagcagtcctcacagagacactagacagtctccctgtggatgaagacggattgccctcatttgatgcgctgacagatggagacgtgaccactgacaatgaggctagtccttcctccatgcctgacggcacccctccaccccaggaggcagaagagccgtctctacttaagaagctcttactggcaccagccaacactcagctaagttataatgaatgcagtggtctcagtacccagaaccatgcaaatcacaatcacaggatcagaacaaaccctgcaattgttaagactgagaattcatggagcaataaagcgaagagtatttgtcaacagcaaaagccacaaagacgtccctgctcggagcttctcaaatatctgaccacaaacgatgaccctcctcacaccaaacccacagagaacagaaacagcagcagagacaaatgcacctccaaaaagaagtcccacacacagtcgcagtcacaacacttacaagccaaaccaacaactttatctcttcctctgaccccagagtcaccaaatgaccccaagggttccccatttgagaacaagactattgaacgcaccttaagtgtggaactctctggaactgcaggcctaactccacccaccactcctcctcataaagccaaccaagataacccttttagggcttctccaaagctgaagtcctcttgcaagactgtggtgccaccaccatcaaagaagcccaggtacagtgagtcttctggtacacaaggcaataactccaccaagaaagggccggagcaatccgagttgtatgcacaactcagcaagtcctcagtcctcactggtggacacgaggaaaggaagaccaagcggcccagtctgcggctgtttggtgaccatgactattgccagtcaattaattccaaaacagaaatactcattaatatatcacaggagctccaagactctagacaactagaaaataaagatgtctcctctgattggcaggggcagatttgttcttccacagattcagaccagtgctacctgagagagactttggaggcaagcaagcaggtctctccttgcagcacaagaaaacagctccaagaccaggaaatccgagccgagctgaacaagcacttcggtcatcccagtcaagctgtttttgacgacgaagcagacaagaccggtgaactgagggacagtgatttcagtaatgaacaattctccaaactacctatgtttataaattcaggactagccatggatggcctgtttgatgacagcgaagatgaaagtgataaactgagctacccttgggatggcacgcaatcctattcattgttcaatgtgtctccttcttgttcttcttttaactctccatgtagagattctgtgtcaccacccaaatccttattttctcaaagaccccaaaggatgcgctctcgttcaaggtccttttctcgacacaggtcgtgttcccgatcaccatattccaggtcaagatcaaggtctccaggcagtagatcctcttcaagatcctgctattactatgagtcaagccactacagacaccgcacgcaccgaaattctcccttgtatgtgagatcacgttcaagatcgccctacagccgtcggcccaggtatgacagctacgaggaatatcagcacgagaggctgaagagggaagaatatcgcagagagtatgagaagcgagagtctgagagggccaagcaaagggagaggcagaggcagaaggcaattgaagagcgccgtgtgatttatgtcggtaaaatcagacctgacacaacacggacagaactgagggaccgttttgaagtttttggtgaaattgaggagtgcacagtaaatctgcgggatgatggagacagctatggtttcattacctaccgttatacctgtgatgcttttgctgctcttgaaaatggatacactttgcgcaggtcaaacgaaactgactttgagctgtacttttgtggacgcaagcaatttttcaagtctaactatgcagacctagattcaaactcagatgactttgaccctgcttccaccaagagcaagtatgactctctggattttgatagtttactgaaagaagctcagagaagcttgcgcaggtaacatgttccctagctgaggatgacagagggatggcgaatacctcatgggacagcgcgtccttccctaaagactattgcaagtcatacttaggaatttctcctactttacactctctgtacaaaaacaaaacaaaacaacaacaatacaacaagaacaacaacaacaataacaacaatggtttacatgaacacagctgctgaagaggcaagagacagaatgatatccagtaagcacatgtttattcatgggtgtcagctttgcttttcctggagtctcttggtgatggagtgtgcgtgtgtgcatgtatgtgtgtgtgtatgtatgtgtgtggtgtgtgtgcttggtttaggggaagtatgtgtgggtacatgtgaggactgggggcacctgaccagaatgcgcaagggcaaaccatttcaaatggcagcagttccatgaagacacgcttaaaacctagaacttcaaaatgttcgtattctattcaaaaggaaatatatatatatatatatatatatatatatatatatataaattaaaaaggaaagaaaactaacaaccaaccaaccaaccaaccaaccacaaaccaccctaaaatgacagccgctgatgtctgggcatcagcctttgtactctgtttttttaagaaagtgcagaatcaacttgaagcaagctttctctcataacgtaatgattatatgacaatcctgaagaaaccacaggttccatagaactaatatcctgtctctctctctctctctctctctctcttttttttttctttttccttttgccatggaatctgggtgggagaggatactgcgggcaccagaatgctaaagtttcctaacattttgaagtttctgtagttcatccttaatcctgacacccatgtaaatgtccaaaatgttgatcttccactgcaaatttcaaaagccttgtcaatggtcaagcgtgcagcttgttcagcggttctttctgaggagcggacaccgggttacattactaatgagagttgggtagaactctctgagatgtgttcagatagtgtaattgctacattctctgatgtagttaagtatttacagatgttaaatggagtatttttattttatgtatatactatacaacaatgttcttttttgttacagctatgcactgtaaatgcagccttcttttcaaaactgctaaatttttcttaatcaagaatattcaaatgtaattatgaggtgaaacaattattgtacactaacatatttagaagctgaacttactgcttatatatatttgattgtaaaaacaaaaagacagtgtgtgtgtctgttgagtgcaacaagagcaaaatgatgctttccgcacatccatcccttaggtgagcttcaatctaagcatcttgtcaagaaatatcctagtcccctaaaggtattaaccacttctgcgatatttttccacattttcttgtcgcttgtttttctttgaagttttatacactggatttgttaggggaatgaaattttctcatctaaaatttttctagaagatatcatgattttatgtaaagtctctcaatgggtaaccattaagaaatgtttttattttctctatcaacagtagttttgaaactagaagtcaaaaatctttttaaaatgctgttttgttttaatttttgtgattttaatttgatacaaaatgctgaggtaataattatagtatgatttttacaataattaatgtgtgtctgaagactatctttgaagccagtatttctttcccttggcagagtatgacgatggtatttatctgtattttttacagttatgcatcctgtataaatactgatatttcattcctttgtttactaaagagacatatttatcagttgcagatagcctatttattataaattatgagatgatgaaaataataaagccagtggaaattttctacctaggatgcatgacaattgtcaggttggagtgtaagtgcttcatttgggaaattcagcttttgcagaagcagtgtttctacttgcactagcatggcctctgacgtgaccatggtgttgttcttgatgacattgcttctgctaaatttaataaaaacttcagaaaaacctccattttgatcatcaggatttcatctgagtgtggagtccctggaatggaattcagtaacatttggagtgtgtattcaagtttctaaattgagattcgattactgtttggctgacatgacttttctggaagacatgatacacctactactcaattgttcttttcctttctctcgcccaacacgatcttgtaagatggatttcacccccaggccaatgcagctaattttgatagctgcattcatttatcaccagcatattgtgttctgagtgaatccactgtttgtcctgtcggatgcttgcttgattttttggcttcttatttctaagtagatagaaagcaataaaaatactatgaaatgaaagaacttgttcacaggttctgcgttacaacagtaacacatctttaatccgcctaattcttgttgttctgtaggttaaatgcaggtattttaactgtgtgaacgccaaactaaagtttacagtctttctttctgaattttgagtatcttctgttgtagaataataataaaaagactattaagagcaataaattatttttaagaaatcgagatttagtaaatcctattatgtgttcaaggaccacatgtgttctctattttgcctttaaatttttgtgaaccaattttaaatacattctcctttttgccctggattgttgacatgagtggaatacttggtttcttttcttacttatcaaaagacagcactacagatatcatattgaggattaatttatcccccctacccccagcctgacaaatattgttaccatgaagatagttttcctcaatggacttcaaattgcatctagaattagtggagcttttgtatcttctgcagacactgtgggtagcccatcaaaatgtaagctgtgctcctctcatttttatttttatttttttgggagagaatatttcaaatgaacacgtgcaccccatcatcactggaggcaaatttcagcatagatctgtaggatttttagaagaccgtgggccattgccttcatgccgtggtaagtaccacatctacaattttggtaaccgaactggtgctttagtaatgtggatttttttcttttttaaaagagatgtagcagaataattcttccagtgcaacaaaatcaattttttgctaaacgactccgagaacaacagttgggctgtcaacattcaaagcagcagagagggaactttgcactattggggtatgatgtttgggtcagttgataaaaggaaaccttttcatgcctttagatgtgagcttccagtaggtaatgattatgtgtcctttcttgatggctgtaatgagaacttcaatcactgtagtctaagacctgatctatagatgacctagaatagccatgtactataatgtgatgattctaaatttgtacctatgtgacagacattttcaataatgtgaactgctgatttgatggagctactttaagatttgtaggtgaaagtgtaatactgttggttgaactatgctgaagagggaaagtgagcgattagttgagcccttgccgggccttttttccacctgccaattctacatgtattgttgtggttttattcattgtatgaaaattcctgtgattttttttaaatgtgcagtacacatcagcctcactgagctaataaagggaaacgaatgtttcaaatct

SEQ ID NO: 29896 - DNA, 3086 bp, Homo Sapiens
agttgggctgctggagtgcggcgccaccgcggaggacaggggcagctggcgggcagcgggtgagggggtggcggggacgcgagtggcggccgcggggccccggacaagggtccgcagagctgcagccttcgagggccagccctctccgagtccggggctgggtcccaccagtgacaaggcggcagccccgcgcacaccaaagagaaggcggctgtggcggcagcggcagccccagccatgctgtgttatgtgacgaggccggacgcggtgctgatggaggtggaggtggaggcgaaagccaacggcgaggactgcctcaaccaggtgtgcaggcgactgggaatcatagaagttgactattttggactgcagtttacgggtagcaaaggtgaaagtttatggctaaacctgagaaaccggatctcccagcagatggatgggctagccccttacaggcttaaacttagagtcaagttcttcgtggagcctcatctcatcttacaggagcagactaggcatatctttttcttgcacatcaaggaggccctcttggcaggccacctcttgtgttccccagagcaggcagtggaactcagtgccctcctggcccagaccaagtttggagactacaaccagaacactgccaagtataactatgaggagctctgtgccaaggagctctcctctgccaccttgaacagcattgttgcaaaacataaggagttggaggggaccagccaggcttcagctgaataccaagttttgcagattgtgtcggcaatggaaaactatggcatagaatggcattctgtgcgggatagcgaagggcagaaactgctcattggggttggacctgaaggaatctcaatttgtaaagatgactttagcccaattaataggatagcttatcctgtggtgcagatggccacccagtcaggaaagaatgtatatttgacggtcaccaaggaatctgggaacagcatcgtgctcttgtttaaaatgatcagcaccagggcggccagcgggctctaccgagcgataacagagacgcacgcattctacaggtgtgacacagtgaccagcgccgtgatgatgcagtatagccgtgacttgaagggccacttggcatctctgtttctgaatgaaaacattaaccttggcaagaaatatgtctttgatattaaaagaacatcaaaggaggtgtatgaccatgccaggagggctctgtacaatgctggcgttgtggacctcgtttcaagaaacaaccagagcccttcacactcgcctctgaagtcctcagaaagcagcatgaactgcagcagctgcgagggcctcagctgccagcagacccgggtgctgcaggagaagctacgcaagctgaaggaagccatgctgtgcatggtgtgctgcgaggaggagatcaactccaccttctgtccctgtggccacactgtgtgctgtgagagctgcgccgcccagctacagtcatgtcccgtctgcaggtcgcgtgtggagcatgtccagcacgtctatctgccaacgcacaccagtcttctcaatctgactgtaatctaatctgttgtgcttttgttggacttggcatgtttccatgaactgcactattataaactattaaaatgatagattgtggagaaagtaattattccaacacccatctgccatgcgatgttaaaaaaaaaaaaaaggaagaaaaataacacagctactcctcactgcaaaaacatatccatgcgtagaatcaacaactccagtcatgggaccaggaggagctctgggacgcagacacattccttggatgttgattttttttatgatctagtaaaggaataggtaaagtctttgatgtcagtgaagtggcaacatagccaaaaagttgggtaccttttaggaaatgatgttgtaagtctccttaatgtatcctgaggtaagtttcctactggcagcagattttgtaagaattacttttaagaatttcattctttttgtatggtcatggagctccaaccatttttaataggaaagtcttttgtaaattgttgtcgttttaatgtcatttctgtctttataacttgatcaagaatgattggaaggcaaacaggtttacaaatcaattctgtgacttttaaaaagttgacaatgttgtcagatttaaaccagtgtggctagtaaaaagcagctcactcaatgtgggtggctccctattcctttacgctccccctatccctaccccacaagcctttcgattataaaatactaccaatcttgttataagattactgtggagtagtcaagtactccccgggccttctgagctggtggaatattttatttcagactgaaaacagagagcactctccttgggaagggaaagcggagcttgctgagtgagagatggagcctcatggtgtacaactgagggtagttaactcatcacttctcccaagcactcgatcccagcttcacccactggtgttgctttgcttgaactgttcaagccttttatagccttaccataagtatttagatatggtgtccttttctgtttttggggggggagttttgttgtgtttttttaaagtaagtgcttaagtattaactttgggttgtcccctctgtatgtttcgaaggggttttggttctttttgcttctgttttcttaaacatgttttccactcccacttgggcattttggaagctggtcagctagcaggttttctgggatgtcgggagacctagatgaccttatcgggtgcaatactagctaaggtaaagctagaaacctacactgtcactttactgagatttctgagtatacttttcatattgccttaatgtagcagtaatgtgtttatgcatttgtttctttgcacagacattttgtcaaatattaaaactctacttttttatggcacatattagcatataagcctttattccaagaggtatttattttttcacttgtaaaaaaataatgtttccacgtaaagaactctgttatatcctagaggactctgtcttttatattcgggataataaagactttaaagcaaaaaaaaaaaaaaaaa

SEQ ID NO: 29897 - DNA, 2636 bp, Homo Sapiens
cacccactagaaagccacccgggttctccttcatccccaacgctcctcacctagcccctgtcctgagggtgcccctaaccctggagccagctttaaaggggcaggccccttctcctgccccagccccagccccacccaccgggcccacattctccgtcttccaggtccagcgctccctcacagaactcccccgcaccttgtctcgctcgctccgcccctccttcccagccacagctagaggtcccgggcgcacctgcagagccggaggcttgctggggcatgcgctccatgaaggctctgcagaaggccctgagccgggctggcagtcactgcgggcgaggaggctggggtcacccgagccggagccccctccttggcgggggcgtccggcaccacctcagtgaggccgcggcgcagggcagagagacgccacacagccaccagccgcagcaccaggatcatgattcatcagaaagtggcatgctgtcccgcctgggtgatttgctcttttacactattgctgaaggacaggaacgaatccctatccacaagttcaccactgcactaaaggccactggactgcagacatcagatcctcggctccgagactgcatgagcgagatgcaccgcgtggtccaagagtccagtagtggtggcctcttggaccgagatctcttccgaaagtgtgtgagcagcaacattgtgctcctgacccaggcattccgaaagaagtttgtcattcctgattttgaggagttcacgggccatgtggatcgcatctttgaggatgtcaaagagctcactggaggcaaagtggcagcctacatccctcagctggccaagtcaaacccagacctgtggggtgtctccctgtgcactgtggatggtcaacggcactctgtgggccacacaaagatccccttctgcctgcagtcctgtgtgaagcccctcacctatgccatctccataagcaccctaggcactgactacgtgcacaagtttgtgggcaaagagccaagtggcctgcgctacaacaagctctccctcaatgaggaaggaatcccccataaccccatggtcaatgctggtgccattgttgtcagctccctgatcaagatggactgtaacaaagcagagaagtttgattttgtgttgcagtatctcaacaaaatggctgggaatgaatacatgggtttcagcaatgccacattccagtcagagaaggaaacaggggatcggaattatgccatcggctattatctcaaggaaaagaagtgctttcctaagggggtggacatgatggctgcccttgatctctacttccagctgtgttctgtggaggtcacttgtgaatcaggcagtgtcatggcagccaccctcgccaacggtgggatctgccccatcacaggcgagagtgtgctgagtgctgaagcagtgcgcaacaccctcagcctcatgcattcctgcggcatgtatgacttctctggccagtttgccttccacgtgggcctgccagccaagtcagctgtatcaggagccatcctcctggtggtacccaatgtcatgggaatgatgtgcctgtcacccccattggacaagctggggaacagccatagggggaccagcttctgccagaagttggtgtctctcttcaatttccacaactatgacaacctgaggcactgtgctcggaagttagacccacggcgtgaaggggcagaaattcggaacaagactgtggtcaacctgttatttgctgcctatagtggcgatgtctcagctcttcgaaggtttgccttgtcagccatggatatggaacagaaagactatgactcgcgcacagctctgcatgttgctgcagctgaaggacacatcgaagttgttaaattcctgatcgaggcttgcaaagtgaatccttttgccaaggacaggtggggcaacattcccctggatgatgctgtgcagttcaaccatctggaggtggtcaaactgcttcaagattaccaggactcctacacactctctgaaactcaggctgaggcagcagctgaggccctgtccaaagagaacttagaaagcatggtatgagcacaggtcatggacagcccctgctcaagaaaaagcatgagctggccacacatgtaatccataaccaccaaaaatactatggagagctacactgcttcagtggggaccaagcagtcatttggtgacttaggctagtgctttctatgggagtcaaaataccccattccctcagcagacagagtacagagaagggcctcagaggacacctgcagtacagctatccagagagactgggcttcaaggtacagcctaatggcttgccccactcaaaaccatcccagctcttcacccaggtctcctcttcctctccctgaagaaaccatcatgagagagatactctggtggagggactctagctaccatgcacatgtacatatccacagaatatgggaagtgggaatggctatatacatggctttagtagtctggagaaatctactccccttggccaggacatgctgctgctactgctaacagccaattttatagacagagaaagtattttgtgttcaaataaactttaattaccaaatcaaaaaaaaaaaaaa

SEQ ID NO: 29898 - DNA, 2702 bp, Homo Sapiens
attggctctgctggtaagtggtctattcctgcccacccccgggtgactagcttggccagtagtcgaccccacccggggaccgactctgggggttggagagactcttggggccggggtcgggcactccagctttcttctagccccgagctgggattccctggcctgcgccagctgcgtacacggcgagtacaccgcacctgcccgggacttcacccgcagctgcgagactcctccattcccggagggctccccacacctgctgcggccgtgccccatctccccgcagctgcggcgctgagcacccccatgtcgagaggctgagaccaggacagcagccctgaccaacgctccaataggccgggatccagccatacttcaatggatcccaggggtatcttgaaggcatttcccaagcggcagaaaattcatgctgatgcatcatcaaaagtacttgcaaagattcctaggagggaagagggagaagaagcagaagagtggctgagctcccttcgggcccatgttgtgcgcactggcattggacgagcccgggcagaactctttgagaagcagattgttcagcatggcggccagctatgccctgcccagggcccaggtgtcactcacattgtggtggatgaaggcatggactatgagcgagccctccgccttctcagactaccccagctgcccccgggtgctcagctggtgaagtcagcctggctgagcttgtgccttcaggagaggaggctggtggatgtagctggattcagcatcttcatccccagtaggtacttggaccatccacagcccagcaaggcagagcaggatgcttctattcctcctggcacccatgaggccctgcttcagacagccctttctcctcctcctcctcccaccaggcctgtgtctcctccccaaaaggcaaaagaggcaccaaacacccaagcccagcccatctctgatgatgaagccagtgatggggaagaaacccaggttagtgcagctgatctggaagccctcatcagtggccactaccccacctcccttgagggagattgtgagcctagcccagcccctgctgtcctggataagtgggtctgtgcacagccctcaagccagaaggcgaccaatcacaacctccatatcacagagaagctggaagttctggccaaagcctacagtgttcagggagacaagtggagggccctgggctatgccaaggccatcaatgccctcaagagcttccataagcctgtcacctcgtaccaggaggcctgcagtatccctgggattgggaagcggatggctgagaaaatcatagagatcctggagagcgggcatttgcggaagctggaccatatcagtgagagcgtgcctgtcttggagctcttctccaacatctggggagctgggaccaagactgcccagatgtggtaccaacagggcttccgaagtctggaagacatccgcagccaggcctccctgacaacccagcaggccatcggcctgaagcattacagtgacttcctggaacgtatgcccagggaggaggctacagagattgagcagacagtccagaaagcagcccaggcctttaactctgggctgctgtgtgtggcatgtggttcataccgacggggaaaggcgacctgtggtgatgtcgacgtgctcatcactcacccagatggccggtcccaccggggtatcttcagccgcctccttgacagtcttcggcaggaagggttcctcacagatgacttggtgagccaagaggagaatggtcagcaacagaagtacttgggggtgtgccggctcccagggccagggcggcggcaccggcgcctggacatcatcgtggtgccctatagcgagtttgcctgtgccctgctctacttcaccggctctgcacacttcaaccgctccatgcgagccctggccaaaaccaagggcatgagtctgtcagaacatgccctcagcactgctgtggtccggaacacccatggctgcaaggtggggcctggccgagtgctgcccactcccactgagaaggatgtcttcaggctcttaggcctcccctaccgagaacctgctgagcgggactggtgacccatggctgggggtgctgaggagagccgagttggactggctacccctcctggccacccagtactccctccagcctcagctggctgaacctcgccgctccaaccaccagcttcctcagcgagcagggcccagggctctgggcctgaagcaagagccagcccggctcccagtgtctgcccggctcccagtgtctgcccagccctctcccagacaggagcaggctgccaccccttctacctcaccactgcccctcgaagaattttgcaaatggccccttgccccattttaagcaggagcaggtggctggtttgaagccccaggtatcccccttccctgctatgggaaaggccaagctgctgggtggggacagaagctgcaggggagagggaagcagccgtgctgtcaacatcatccggcaccctctggggtaggagaacagccattccacatgtgttccctctatccgtcctgcttcctgggcagctggtggtgctgggaatggggtgccccagccttggtgaggacagtgttgggaggcccaggggcccagtaaagtgcatttgacattgaaaaaaaaaaaaaaaaaaaaaaaaaaa

SEQ ID NO: 29899 - DNA, 9329 bp, Homo Sapiens
agaggccgccctgagacggtgcgcgatggaccgagggccccagccggggaggcgccgccgccgagcccgcggccagacgccccatcagtagcgtccgcaccgggagccgcggctctcgcccgagccgtgggcgcgcccgaggggcgggctcgcctcccgccgtccctcgcagctctgccgggcccgagcccgcgccgccgccgccgccgccttgccgctcgggccgcgcggcccgggaaacgcggccgcgggctgcatgggcagcgcccgcgccccgccgctgagccgtcgcggagccgcgcagccctcggagcacgaatatatacagccctgctctgggacacacctccattggatttaaaagacagtcctcgtcagcactgactttcagctatggaatcgcagacggttgatgatgaagcgccggccgtgtaaatgaagatcgggtgaggagcaggacgatgcccaagggtgggtgccctaaagcaccacagcaggaagagcttcccctcagcagcgacatggtggagaagcagactgggaaaaaggataaagataaagtttctctaaccaagaccccaaaactggagcgtggcgatggcgggaaggaggtgagggagcgagccagcaagcggaagctgcccttcaccgcgggcgccaatggggagcagaaggactcggacacagaagagaagcagggccctgagcggaagaggattaagaaggagcctgtcacccggaaggccgggctgctgtttggcatggggctgtctggaatccgagccggctaccccctctccgagcgccagcaggtggcccttctcatgcagatgacggccgaggagtctgccaacagcccagtggacacaacaccaaagcacccctcccagtctacagtgtgtcagaagggaacgcccaactctgcctcaaaaaccaaagataaagtgaacaagagaaacgagcgtggagagacccgcctgcaccgagccgccatccgcggggacgcccggcgcatcaaagagctcatcagcgagggggcagacgtcaacgtcaaggacttcgcaggctggacggcgctgcacgaggcctgtaaccggggctactacgacgtcgcgaagcagctgctggctgcaggtgcggaggtgaacaccaagggcctagatgacgacacgcctttgcacgacgctgccaacaacgggcactacaaggtggtgaagctgctgctgcggtacggagggaacccgcagcagagcaacaggaaaggcgagacgccgctgaaagtggccaactcccccacgatggtgaacctcctgttaggcaaaggcacttacacttccagcgaggagagctcgacggagagctcagaagaggaagacgcaccatccttcgcaccttccagttcagtcgacggcaacaacacggactccgagttcgaaaaaggcctcaagcacaaggccaagaacccagagccacagaaggccacggcccccgtcaaggacgagtatgagtttgatgaggacgacgagcaggacagggttcctccggtggacgacaagcacctattgaaaaaggactacagaaaagaaacgaaatccaatagttttatctctatacccaaaatggaggttaaaagttacactaaaaataacacgattgcaccaaagaaagcgtcccatcgtatcctgtcagacacgtcggacgaggaggacgcgagtgtcaccgtggggacaggagagaagctgagactctcggcacatacgatattgcctggtagtaagacacgagagccttctaatgccaagcagcagaaggaaaaaaataaagtgaaaaagaagcgaaagaaagaaacaaaaggcagagaggttcgcttcggaaagcggagcgacaagttctgctcctcggagtcggagagcgagtcctcagagagtggggaggatgacagggactctctggggagctctggctgcctcaaggggtccccgctggtgctgaaggacccctccctgttcagctccctctctgcctcctccacctcgtctcacgggagctctgccgcccagaagcagaaccccagccacacagaccagcacaccaagcactggcggacagacaattggaaaaccatttcttccccggcttggtcagaggtcagttctttatcagactccacaaggacgagactgacaagcgagtctgactactcctctgagggctccagtgtggaatcgctgaagccagtgaggaagaggcaggagcacaggaagcgagcctccctgtcggagaagaagagccccttcctgtccagcgcggagggcgctgtccccaaactggacaaggaggggaaagttgtcaaaaaacataaaacaaaacacaaacacaaaaacaaggagaagggacagtgttccatcagccaagagctgaagttgaaaagttttacttacgaatatgaggactccaagcagaagtcagataaggctatactgttagagaatgatctttccactgaaaacaagctaaaagtgttaaagcacgatcgcgaccactttaaaaaagaagagaaacttagcaaaatgaaattagaagaaaaagaatggctctttaaagatgaaaaatcactgaagagaatcaaagacacaaacaaagacatcagcaggtctttccgagaagagaaagaccgttcgaataaagcagaaaaggagagatcgctgaaggaaaagtctccgaaagaagaaaaactgagactgtacaaagaggagagaaagaagaaatcaaaagaccggccctcaaaattagagaagaagaatgatttaaaagaggacaaaatttcaaaagagaaggagaagatttttaaagaagataaagaaaaactcaaaaaagaaaaggtttatagggaagattctgcttttgacgaatattgtaacaaaaatcagtttctggagaatgaagacaccaaatttagcctttctgacgatcagcgagatcggtggttttctgacttgtccgattcatcctttgatttcaaaggggaggacagctgggactcgccagtgacagactacagggacatgaagagcgactctgtggccaagctcatcttggagacggtgaaggaggacagcaaggagaggaggcgggacagccgggcccgggagaagcgagactacagagagcccttcttccgaaagaaggacagggactatttggataaaaactctgagaagaggaaagagcagactgaaaagcataaaagtgtccctggctacctttcggaaaaggacaagaagaggagagagtccgcagaggccgggcgggacagaaaggacgccctggagagctgcaaggagcgcagggacggcagggccaagcccgaggaggtgcaccgggaggagctgaaggagtgtggctgcgagagtggcttcaaggacaagtccgacggcgactttgggaagggcctggagccgtgggaacggcaccacccagcacgagagaaggagaagaaggatggccccgataaggaaaggaaggagaagacaaaaccagaaagatacaaagagaaatccagtgacaaggacaaaagtgagaaatcaatcctggaaaaatgtcagaaggacaaagaatttgataaatgttttaaagagaaaaaagataccaaggaaaaacataaagacacacatggcaaagacaaagaaaggaaagcgtctctcgaccaagggaaagagaagaaggagaaggctttccctgggatcatctcagaagacttctctgaaaaaaaagatgacaagaaaggcaaagagaaaagctggtacatcgcagacatcttcacagatgagagtgaggacgacagagacagctgcatggggagcgggttcaagatgggagaggccagcgacttgccgaggacggacggcctccaggagaaggaggaaggacgggaggcctatgcctccgacagacacaggaagtcttctgacaagcagcaccctgagaggcagaaggacaaggagcccagagacaggagaaaggaccgaggggctgccgacgcggggagagacaaaaaagagaaagtctttgaaaagcacaaggagaagaaggataaagagtccacagaaaagtacaaggacaggaaggacagagcctcagtggactccacgcaagataagaaaaataaacagaagctccccgagaaggctgaaaagaagcacgctgccgaagacaaggctaaaagcaaacacaaagagaagtcggacaaagaacattccaaggagaggaagtcctcgagaagtgccgacgcggaaaaaagcctgcttgaaaagttggaagaagaggctctccatgagtacagagaagactccaacgataaaatcagcgaggtctcctctgacagcttcacggaccgagggcaggagccggggctgactgccttcctggaggtctctttcacggagccacctggagacgacaagccgagggagagcgcctgcctccctgagaagctgaaagagaaggagaggcacagacactcctcatcttcatccaagaagagccacgaccgagagcgagccaagaaagagaaggccgagaagaaagagaagggcgaagattacaaggagggcggtagcaggaaggactccggccagtacgaaaaggacttcctggaggcggatgcttacggagtttcttacaacatgaaagctgacatagaagatgagctagataaaaccattgaattgttttctaccgaaaagaaagataaaaatgattccgagagagaaccttccaagaaaatagaaaaggaactaaagccttatggatctagtgccatcaacatcctaaaagagaagaagaagagagagaaacacagggagaaatggagagacgagaaggagaggcaccgggacaggcatgcggatgggctgctgcggcatcacagggacgagctcctgcggcatcacagggacgagcagaagcccgccaccagggacaaggacagcccgccccgcgtgctcaaagacaagtccagggacgagggcccgaggctcggcgatgccaaactgaaggagaaattcaaggacggtgcagagaaagaaaagggcgacccagtgaagatgagcaacgggaatgataaggtagcgccatccaaagacccaggcaagaaagacgccaggcccagggagaagctcctgggggacggcgacctgatgatgaccagcttcgagaggatgctgtcccagaaggacctggagatcgaggagcgccacaagcggcacaaggagaggatgaagcaaatggagaagctgaggcaccggtccggagaccccaagctcaaggagaaggcgaagccggcagacgacgggcggaagaagggtctggacattcctgctaagaaaccgccggggctggaccctccatttaaagacaaaaagctcaaagagtcgactcctattccacctgccgcggaaaataagctacacccagcatcaggtgcagactccaaagactggctggcaggccctcacatgaaagaggtcctgcctgcgtcccccaggcctgaccagagccggcccactggcgtgcccacccctacgtcggtgctatcctgccccagctacgaggaggtgatgcacacgcccaggaccccgtcctgcagcgccgatgactacgcggacctcgtgttcgactgcgccgactcgcagcactccacgcccgtgcccaccgctcccaccagcgcctgctccccctcctttttcgacaggttctccgtggcttcaagtgggctttcggaaaacgccagccaggctcctgccaggcctctctccacaaacctttaccgctcggtctctgtcgacattaggaggacccccgaggaagaattcagcgtcggagacaagctcttcaggcagcagagcgttcctgctgcctccagctacgactctcccatgccaccctcgatggaagacagggcgcccctgcccccggttcccgcggagaagtttgcctgcttgtcgccagggtactactccccagactatggcctcccgtcgcccaaagtcgacgctttgcactgcccaccggctgccgttgtcactgtcaccccgtctccagagggcgtcttctcaagtttacaagcaaaaccttccccttcccccagagccgagctgctggttccttccctcgaaggggcccttcccccggacctggacacctccgaggaccagcaggcgacggccgccatcatccccccggagcccagctacctggagccgctggacgagggtcccttcagcgccgtcatcaccgaggagcccgttgagtgggcccacccctccgagcaggcgcttgcctctagcctgatcgggggcacctctgaaaaccctgtgagctggcctgtgggctcggacctcctgctgaagtctccacagagattccccgagtccccaaagcgtttctgccccgcggaccccctccactctgccgccccagggcccttcagcgcctcggaggcgccgtaccccgcccctcccgcctctcctgccccgtacgctctgcccgtcgctgagccggggctggaggacgtcaaggacggagtggacgccgtccccgccgccatctccacctcagaggcggctccctacgcccctccctccgggctggagtccttcttcagcaactgcaagtcacttccggaagccccgctggacgtggcccccgagcccgcctgtgtagccgctgtggctcaggtggaggctctggggcccctggaaaatagcttcctggacggcagccgcggcctgtctcacctcggccaggtggagccggtgccctgggcggacgccttcgccggccccgaggacgacctggacctggggcccttctccctgccggagcttcccctgcagactaaagatgccgcagatggtgaagcggaacccgtggaagaaagtcttgctcctccagaagagatgcctccaggggcccccggggtcataaacggtggggatgtttccaccgtagtggctgaggagccgccggcactgcctcctgaccaggcctccacccggctccctgcagagctcgagcctgagccctcaggggagccaaagctggacgtggctctagaagctgcggtggaggcggagacggtgccggaagagagggcccgtggggatccggactccagcgtggagcccgcgcccgttcccccagaacagcgcccactggggagcggagaccagggggctgaggctgaaggcccccccgccgcgtccctctgtgcccctgacggccccgccccgaacactgtggcacaagctcaggccgcagacggtgccggccccgaggacgacactgaggcctcccgtgccgccgccccagccgaaggccctcctggcggcatccagccggaagccgcagaaccaaaacccacggccgaagccccgaaggccccccgagtggaggagatccctcagcgcatgaccaggaaccgggcgcagatgctcgcgaaccagagcaagcagggcccgcccccctccgagaaggagtgcgcccccacccctgccccggtcaccagggccaaggcccgcggctccgaggacgacgacgcccaggcccagcatccgcgcaaacgccgctttcagcgctccacccagcagctgcagcagcagctgaacacgtccacgcagcagacgcgggaggtgatccagcagacgctggccgccatcgtggacgccatcaagctggatgccatcgagccctaccacagcgacagggccaacccctacttcgaatacctgcagatcaggaagaagatcgaggagaagcgcaagatcctgtgctgtatcacgccgcaggcgccccagtgctacgccgagtacgtcacctacacgggctcctacctcctggacggcaagccgctcagcaagctccacatccccgtgatcgcaccccctccctccctggcggagcccctgaaggagctgttcaggcagcaggaggccgtccggggaaagctgcgtctacagcacagcatcgagagggagaagctgatcgtatcctgtgagcaggagattctgcgggttcactgccgggcggccaggaccatcgccaaccaggcagtgccattcagcgcctgcacgatgctgctggactccgaggtctacaacatgcccctggagagccagggtgacgagaacaagtcagtgcgcgaccgtttcaacgcccgccagttcatctcctggctccaggacgtggatgacaagtatgaccgcatgaagacttgcctcctcatgcggcagcagcacgaggccgcggccctgaacgccgtgcagaggatggagtggcagctgaaggtgcaggaactggaccccgccgggcacaagtccctgtgcgtgaacgaggtgccctccttctacgtgcccatggtcgacgtcaacgacgactttgtattgttgccggcatgacaccgcgggacggccgcaggacgcaggcgagggccgcacggctgcccaggactgctgctgagccccaggggcggaggagggagcgccctgtccacccgggcggggagagaccccgagagagactgcacttggccacagcgcctccatcccttccagactggtccagacgtcggggaggtgaaacacgtctcttctctaccagctgccgcggcgggggcaaagcccccagagcctcactggccccggcgggatgaggagaccatgccgggcgcgcacacacggcagcttctgtttgaaaacggcgaccttcgggcccttttctccagcaactgcagaggcatttcaggagttggagaacggagtacatttttaaaattttttgttccattctgatcaactaaagaaaattaaggtgtccacctctcacaaacagtgacctgcaggtcggaggggcaggagccccatcccagccgtggttctgttgccgccgagctgcgacggcctcagactgggcttcagacctggtgcggagccaggcggagggacacagagccaggactcccagccgtattgaaatggagtcaaatccgcgtggtttgtatcttctttcctttaatcttgggcattttgtttctctttctgagaacgtaacttgaaacactacagagccaataatcatataaaaagtgtatccgtaaacgctgtacagttttatataccttcccaatgtacttttgctgccttttaaataatttattttgcaacccattactgcccagttgtaaataacttatgtactgtaacatcactttcagttatgtgtaaaaaaataaataaattaattaaaatgcaaaaaaaaaaaaaaaaaaaaaa

SEQ ID NO: 29900 - DNA, 4463 bp, Homo Sapiens
ctgtcccggttcctctcgagtcggctccaactgccagcccgggttggcgccatgtacgccgtgtacaaacaggcgcatccgccacccggtctggagttctccatgtactgcaacttcttcaacaacagcgagcgcaacctggtagtggccgggacctcgcagctctacgtgtaccgcctcaaccgcgacgccgaggctctgaccaagaatgacaggagcacagaggggaaggcccaccgggagaagctcgagcttgctgcctccttctccttctttggcaacgtcatgtccatggccagcgtgcagctggcaggagccaagcgggatgccctgctcctaagcttcaaggatgccaagctgtctgtggtggagtacgacccgggcacccatgacctgaagaccctgtcactgcactactttgaggagcctgagcttcgggacgggtttgtgcagaatgtacacacgccgcgagtgcgggtggaccccgacgggcgctgtgcagccatgcttgtctacggcacgcggctggtggtcctgcccttccgcagggagagcctggctgaggagcacgaggggctcgtgggtgaggggcagaggtccagcttcctgcccagctacatcatcgacgtgcgggccctagacgagaagctgctcaacatcatcgacctgcagttcctgcatggctactacgagcctaccctcctcatcctgtttgagcccaaccagacctggcctgggcgcgtggccgtgcggcaggacacgtgctccattgtggccatctcactgaacatcacgcagaaggtgcaccccgtcatctggtccctcaccagcctgccctttgactgcacccaggctctggctgtgcccaagcccataggtggggtggtggtgtttgccgtcaactcgctgttgtacctgaaccagagcgtccccccgtatggcgtggctctcaacagtctcaccacaggaaccacggctttcccgcttcgcacccaggagggtgtgcggatcaccctggactgcgcccaggccaccttcatctcctacgacaagatggtcatctccctcaagggcggcgagatctacgtgctgaccctcatcaccgacggcatgcgcagtgtccgagcgttccactttgacaaggcggccgccagcgtcctcaccaccagcatggtcaccatggagcccgggtacctgttcctgggttctcgcctgggcaattccctcctcctcaagtacacggagaagctgcaggagcccccggccagtgctgtccgtgaggctgccgacaaggaagagcctccctcaaagaagaagcgagtggatgcgacggccggctggtcagctgcgggtaagtcggtgccgcaggatgaggtggacgagattgaagtgtacggcagcgaggcccagtcgggaacacagctggccacctactcctttgaggtgtgtgacagcatcctgaacattggaccctgtgccaatgccgccgtgggcgagcctgccttcctctctgaagagtttcagaacagccccgagccggacctggagattgtggtttgctccggccacgggaagaacggggctttgtcggtgctgcagaagagcatccggccccaggtggtgacaacctttgagcttcccggctgctatgacatgtggacagtcatcgccccggtgcgtaaggaggaggaggacaatcccaagggggagggcacagagcaggaacccagcaccacccctgaagcagacgacgacggccgcagacacggattcctgattctgagccgggaagactccaccatgatcctgcagacggggcaggagatcatggagctggacaccagtggcttcgccactcagggccccacggtctttgctgggaacatcggggacaaccgctacattgtccaagtgtcaccactgggcatccgcctgctggaaggagtgaatcagctgcacttcatccccgtggacctgggcgcccccatcgtgcagtgcgccgtggccgacccctatgtggtcatcatgagtgccgagggccacgtcaccatgttcctgctgaagagtgactcctacggtggccgccaccaccgcctggcgctgcacaagcccccgctgcaccatcagtccaaggtgattacgctgtgcctgtaccgagacctcagcggcatgttcaccactgagagccgcctgggtggggcccgtgacgagctcgggggccgcagtggcccggaggccgagggcctgggctcagagactagccccacagtggatgacgaggaggagatgctgtatggggattcgggctccctcttcagccccagcaaggaggaggcccgaagaagcagccagccccctgctgaccgggaccctgcacccttccgggcagagcctacccactggtgcctgctggtgcgggagaatggcaccatggagatctaccagcttcccgactggcggctggtgttcctggtgaagaacttccctgtggggcagcgggtccttgtggacagctcctttggacagcccactacacagggcgaggcccgcagggaggaggccacgcgccagggggagctgcccctcgtcaaggaggtgctgctggtggcgctgggcagccgccagagcaggccctacctgctggtgcatgtggaccaagagctgcttatctacgaggccttcccccacgactctcagctcggccagggcaatctcaaagtccgctttaagaaggtccctcacaacatcaacttccgtgagaagaagccaaagccatccaagaagaaagcagaaggtggcggcgcagaggagggggctggggcccggggccgcgtggcgcgtttccgctacttcgaggatatttatggctactcaggggtcttcatctgcggcccctcccctcactggctcttggtgaccggccgaggggctctgcggctacaccccatggccatcgacggcccggtcgactctttcgctccattccacaatgtcaactgtccccgcggcttcctgtacttcaacagacagggcgagctgaggatcagtgtcctgcctgcctacctgtcctatgatgccccatggcctgtcaggaagatcccgctgcgctgcacggcccactatgtggcttaccacgtggagtctaaggtgtatgctgtggccaccagcaccaacacgccgtgtgcccgcatcccacgcatgactggcgaggagaaggagtttgagaccatcgagagagatgagcggtacatccacccccagcaggaggccttctccatccagctcatctccccggtcagctgggaggctattcccaatgccaggatcgagctgcaggagtgggagcatgtgacctgcatgaagacagtgtctctgcgcagtgaggagaccgtgtcgggcctcaaaggctacgtggccgccgggacctgcctcatgcagggggaggaggtcacgtgccgagggcggatcttgatcatggatgtgattgaggtggtgcccgagcctggccagcccttgaccaagaacaagttcaaagtcctttacgagaaggagcagaaggggcccgtgaccgccctgtgccactgcaatggccacctggtgtcggccatcggccagaagattttcctgtggagcctgcgggccagcgagctgacgggcatggccttcatcgacacgcagctctacatacaccagatgatcagcgtcaagaacttcatcctggcagccgacgtcatgaagagcatttcgctgctgcgctaccaggaggaaagcaagacgctgagcctggtgtcgcgggatgccaagcccctggaggtgtacagcgtggacttcatggtggacaatgcccagctgggttttctggtgtctgaccgcgaccgcaacctcatggtgtacatgtacctgcccgaagccaaggagagtttcgggggcatgcgcctgctgcgtcgggcagacttccacgtgggtgcccacgtgaacacgttctggaggaccccgtgccgggccactgaagggctcagcaaaaagtcggtcgtgtgggagaataagcacatcacgtggtttgccaccctggacggcggcatcgggctgctgctgcccatgcaggagaagacctaccggcggctgctgatgctgcagaacgcgctgaccaccatgctgccacaccacgccggcctcaacccccgcgccttccggatgctgcacgtggaccgccgcaccctccagaatgccgtgcgcaacgtgctggatggggagctgctcaaccgctacctgtacctgagcaccatggagcgcagcgagctagccaagaagatcggcaccacaccagacataatcctggacgacttgctggagacggaccgcgtcaccgcccacttctagccccgtggatgccgtcaccaccagcacacggaactacctcccaccccctttttgtacaaaacacaaggaaaaacattttttgc

SEQ ID NO: 29901 - DNA, 1807 bp, Homo Sapiens; identical to SEQ ID NO: 22631

SEQ ID NO: 29902 - DNA, 1828 bp, Homo Sapiens
acttctccctagagcaggggtgtttgccagcagcctgcactctcagaaatcagacttgagtggccggaacccttgagaccagaggcttaccatgctgctccctaggagggccaggaactgctgacgtgaccactggacagttattcgtgtctcttacaattaccaaacagaatggacaagcttaataaaataaccgtccccgccagtcagaagttgaggcagcttcaaaagatggtccatgatattaaaaacaatgaaggtggaataatgaataaaatcaaaaagctaaaagtcaaagcacctccaagtgttcctcgaagggactacgcttcagagagccctgctgacgaagaggagcagtggtccgatgactttgacagcgactatgaaaatccagatgagcactcggactcagagatgtacgtgatgcccgccgaggagaacgctgatgacagctacgagccgcctccagtagagcaggaaaccaggccggttcacccagccctgcccttcgccagaggcgagtatatagacaatcgatcaagccagaggcattccccacccttcagcaagacacttcccagtaagcccagctggccttcagagaaagcaaggctcacctccaccctgccggccctgactgctttgcagaaacctcaagtcccacccaaacccaaaggcctccttgaggatgaggctgattatgtggtccccgtggaagataatgatgaaaactatattcatcccacagaaagcagttcacctccacctgaaaaagctcccatggtgaatagatcaaccaagccaaattcctcaacgcccgcctctcctccaggaacagcttcaggtcgaaacagtggggcctgggaaaccaagtcacctccaccagctgcaccatccccgttgccacgggccgggaaaaaaccaacgacaccactgaagacaactccagttgcctctcaacagaatgcttcaagtgtttgtgaagaaaaacctatacctgctgaacgccaccgagggtcaagtcacagacaagaagctgtgcagtcaccagtgtttcctcctgcccagaaacaaatccaccaaaaacccatacctctgccaagatttacagaagggggaaacccaactgtggatgggcccctacccagcttttcatctaattccactatttcagaacaggaagctggcgttctctgcaagccatggtatgctggagcctgtgatcgaaagtctgctgaagaggcattgcacagatcaaacaaggatggatcatttcttattcggaaaagctctggccatgattccaaacaaccatatacactagttgtattctttaataagcgagtatataatattcctgtgcgatttattgaagcaacaaaacaatatgccttgggcagaaagaaaaatggtgaagagtactttggaagtgttgctgaaatcatcaggaatcatcaacatagtcctttggttcttattgacagtcagaataacacaaaagattccaccagactgaagtatgcagttaaagtttcataaagggggaaaaaaaagatcaataccattgcttcagacactttcccaaagtttctccttttgagaaaaagtcccaaaacttcatattttggattatgaatcatccagtaataaaatggaagatggagtcagctattgaagtggtcatccatttctttttaagaagctcatgtggacttgttctattgcctgacctgatgaactgttaatatctggtgaggttgagttatcatgctactaatattttccaaataaatatttttatttttaaaaataaaaaaaaaaaaaa

SEQ ID NO: 29903 - DNA, 2892 bp, Homo Sapiens
gcgccggcacacctattggcccccgcggcgtcccgtcgccgcgtcgcgttgctggcccgtcggagcgacgccgctcgggtcagtcggcggccggactgggaagatggacgcagctactctgacctacgacactctccggtttgctgagtttgaagattttcctgagacctcagagcccgtttggatactgggtagaaaatacagcattttcacagaaaaggacgagatcttgtctgatgtggcatctagactttggtttacatacaggaaaaactttccagccattggggggacaggccccacctcggacacaggctggggctgcatgctgcggtgtggacagatgatctttgcccaagccctggtgtgccggcacctaggccgagattggaggtggacacaaaggaagaggcagccagacagctacttcagcgtcctcaacgcattcatcgacaggaaggacagttactactccattcaccagatagcgcaaatgggagttggcgaaggcaagtccataggccagtggtacgggcccaacactgtcgcccaggtcctgaagaagcttgctgtcttcgatacgtggagctccttggcggtccacattgcaatggacaacactgttgtgatggaggaaatcagaaggttgtgcaggaccagcgttccctgtgcaggcgccactgcgtttcctgcagattccgaccggcactgcaacggattccctgccggagctgaggtcaccaacaggccgtcgccatggagacccctggtacttctcattcccctgcgcctggggctcacggacatcaacgaggcctacgtggagacgctgaagcactgcttcatgatgccccagtccctgggcgtcatcggagggaagcccaacagcgcccactacttcatcggctacgttggtgaggagctcatctacctggacccccacaccacgcagccagccgtggagcccactgatggctgcttcatcccggacgagagcttccactgccagcacccgccgtgccgcatgagcatcgcggagcttgacccgtccatcgctgtggggtttttctgtaagactgaagatgacttcaatgattggtgccagcaagtcaaaaagctgtctctgcttggaggtgccctgcccatgtttgagctggtggagctgcagccttcacatctggcctgccccgacgtcctgaacctgtccctagattcttctgatgtagagcgactggaaagattcttcgactcagaagatgaagactttgaaatcctgtccctttgaaaatcctggggtcgggggtggcacctgtgagagcctggggctcctggtgccgctgcgtttcatccatcccgcccgctcgcctgccgagggctgcgccccgtgctgcctccccccagagggccacccgctgtgctcgtggactgaggctgcgctgcccgggaggccttactgcttggtgtcagactgcccagctcagagtgcccgtcagggcctgtgcatccgcacgcggagccgtctgttaggagcttccagagtgttctctcgacactgccagccccgtgttagcacctgggcctcagtcccacttgctcccaggcgccggttctgtggttggtttggaattaaagtcctgtttgaagttgtcagacacagacatgaatttctgggcgctccctgagtcagagtctcagaagacctgtgcaggctggcgtgagaggagcggcagccacactgcggccccacgcccaaggactgggctgctctcgaggggggcgcgcccaccgctgtgtcctctctgcccagcctggcttaccaagggctacctcagtgggagatgaggttggaggaacgaaggcgaggttcctccttgctttggggagaaaagtattcaggaagtgggtgtgtgggaaacctgaagatggcgtgcacaggacacagcgtgggcggcctgggcagaagggcggctggctgtcctggagctgctgctggagcctgccctcagagtgtccctttccagtgctgtggcattctgtggcagcttccccaggtgtggtgacggggggggggcggggcctccacctgtgacagccaggcttgagggtggacggcgtgcctctcccaggagccttccccatgtccttgccttgctgagaattgccctcccatgccgctgaggtgttaggtggtttagggccaaaaggggaaaaccacttgagtcttgtggtgtgtggtgggcagacaccacagggtggcatcacctggtggcatttccagaacctcagccccgattccagcacccaccaccgcctgaccctgtgtaacctgctgtcccgggtcccagagtgcactctgccccgctgctctgctgcctgtcctgggaaagtatctttgccccactaggaaatgtaaacaggagggcttggggagcgtgggcacttttctcatgagcagctactgcggcgttggcaggactcgctgctgctgctgctgcttgtgtaggtcggggagccagagatccccgaggacgcgcgccggacagtcggcactgaccggcccacctggtagcagaggacacccccagccccccaagcattgaagacatagtgtatttcctcgtatcctttctcccttgggtgtagttggggtggggaagcagggaaggctggtgcgatctccattccttgggctccacgtccgagttcatggtgcgccgctgtgctgggagctgcagtggtaatgtgtgggacaccttgaccaaaggggagctttgtctcgtgtgttttgaaaaaggcttaatgaagagaatgttgttcattcttagtagtatagtttgcaattcttaatggcaaataataagtttcagtagaaaacaaaaaaaaaaaaaaaaa

SEQ ID NO: 29904 - DNA, 1646 bp, Homo Sapiens
acagaataatggcgtctcgtagccccaggcgacagcgtggaggggcgggtctgtcgattggatgaacgcagctgagattactcccagccactaaggacgaagaggtggggcggtggcgtcccacgcctcgtgcgacagtgggcggggctttgttgcctgagtaaccgtatgatggtggtggtggtggtgtcttcctgtctcaacgatacctattttctagtgctgagatcctgagacaatgaatcatagtgaaagattcgttttcattgcagagtggtatgatccaaatgcttcacttcttcgacgttatgagcttttattttacccaggggatggatctgttgaaatgcatgatgtaaagaatcatcgcacctttttaaagcggaccaaatatgataacctgcacttggaagatttatttataggcaacaaagtgaatgtcttttctcgacaactggtattaattgactatggggatcaatatacagctcgccagctgggcagtaggaaagaaaaaacgctagccctaattaaaccagatgcaatatcaaaggctggagaaataattgaaataataaacaaagctggatttactataaccaaactcaaaatgatgatgctttcaaggaaagaagcattggattttcatgtagatcaccagtcaagaccctttttcaatgagctgatccagtttattacaactggtcctattattgccatggagattttaagagatgatgctatatgtgaatggaaaagactgctgggacctgcaaactctggagtggcacgcacagatgcttctgaaagcattagagccctctttggaacagatggcataagaaatgcagcgcatggccctgattcttttgcttctgcggccagagaaatggagttgttttttccttcaagtggaggttgtgggccggcaaacactgctaaatttactaattgtacctgttgcattgttaaaccccatgctgtcagtgaaggactgttgggaaagatcctgatggctatccgagatgcaggttttgaaatctcagctatgcagatgttcaatatggatcgggttaatgttgaggaattctatgaagtttataaaggagtagtgaccgaatatcatgacatggtgacagaaatgtattctggcccttgtgtagcaatggagattcaacagaataatgctacaaagacatttcgagaattttgtggacctgctgatcctgaaattgcccggcatttacgccctggaactctcagagcaatctttggtaaaactaagatccagaatgctgttcactgtactgatctgccagaggatggcctattagaggttcaatacttcttcaagatcttggataattagtggtgtggaaagtaaagaagtcacaggttgggacatttagacaagagtgaatcacacacgaggaatgtgttcattcttttattgtccgttgttttaacctgactgaatacaagatcaacaagagcactgtactcctggcaattattacatatgttagaacatggattttgcactgtagacaacatttaacaccagtctatggggtactgcattgctttttataaagttcaaaataaagatttattttcaaacaaaaaaaaaaaaaaaaaaaaaaaaa

SEQ ID NO: 29905 - DNA, 1372 bp, Homo Sapiens
gcacgagggcgcttttgtctccggtgagttttgtggcgggaagcttctgcgctggtgcttagtaaccgactttcctccggactcctgcacgacctgctcctacagccggcgatccactcccggctgttcccccggagggtccagaggcctttcagaaggagaaggcagctctgtttctctgcagaggagtagggtcctttcagccatgaagcatgtgttgaacctctacctgttaggtgtggtactgaccctactctccatcttcgttagagtgatggagtccctagaaggcttactagagagcccatcgcctgggacctcctggaccaccagaagccaactagccaacacagagcccaccaagggccttccagaccatccatccagaagcatgtgataagacctccttccatactggccatattttggaacactgacctagacatgtccagatgggagtcccattcctagcagacaagctgagcaccgttgtaaccagagaactattactaggccttgaagaacctgtctaactggatgctcattgcctgggcaaggcctgtttaggccggttgcggtggctcatgcctgtaatcctagcactttgggaggctgaggtgggtggatcacctgaggtcaggagttcgagaccagcctcgccaacatggcgaaaccccatctctactaaaaatacaaaagttagctgggtgtggtggcagaggcctgtaatcccagttccttgggaggctgaggcgggagaattgcttgaacccggggacggaggttgcagtgaaccgagatcgcactgctgtacccagcctgggccacagtgcaagactccatctcaaaaaaaaaaagaaaagaaaaagcctgtttaatgcacaggtgtgagtggattgcttatggctatgagataggttgatctcgcccttaccccggggtctggtgtatgctgtgctttcctcagcagtatggctctgacatctcttagatgtcccaacttcagctgttgggagatggtgatattttcaaccctacttcctaaacatctgtctggggttcctttagtcttgaatgtcttatgctcaattatttggtgttgagcctctcttccacaagagctcctccatgtttggatagcagttgaagaggttgtgtgggtgggctgttgggagtgaggatggagtgttcagtgcccatttctcattttacattttaaagtcgttcctccaacatagtgtgtattggtctgaagggggtggtgggatgccaaagcctgctcaagttatggacattgtggccaccatgtggcttaaatgattttttctaactaataaagtggaatatatatttcaaaaaaaaaaaaaaaaaa

SEQ ID NO: 29906 - DNA, 2430 bp, Homo Sapiens
ctgttgcttcccgtctcctcggcggctcccctcccccgcccggctctccgcgccccttctgggcggcggggcggcggagccgtcggcgtgcggccctccttgcgttcgtgcgtgcgcccgtggcccggcgcacgtcccgcgacaccgaggccgagcggggcagggggctgaccgccatgaccccccagagcccggcgtgagggggccgagatgcggtgacctgccagcacctgccgcagccttcgtccgggagtcgccccatctctccacgcatcggggccctgtgccccttgctgctgcagccgggcaccatgtcgacctcgtccttgaggcgccagatgaagaacatcgtccacaactactcagaggcggagatcaaggttcgagaggccacgagcaatgacccctggggcccatccagctccctcatgtcagagattgccgacctcacctacaacgttgtcgccttctcggagatcatgagcatgatctggaagcggctcaatgaccatggcaagaactggcgtcacgtttacaaggccatgacgctgatggagtacctcatcaagaccggctcggagcgcgtgtcgcagcagtgcaaggagaacatgtacgccgtgcagacgctgaaggacttccagtacgtggaccgcgacggcaaggaccagggcgtgaacgtgcgtgagaaagctaagcagctggtggccctgctgcgcgacgaggaccggctgcgggaagagcgggcgcacgcgctcaagaccaaggaaaagctggcacagaccgccacggcctcatcagcagctgtgggctcaggcccccctcccgaggcggagcaggcgtggccgcagagcagcggggaggaggagctgcagctccagctggccctggccatgagcaaggaggaggccgaccaggaggagcggatccgtcgcggggatgacctgcggctgcagatggcaatcgaggagagcaagagggagactgggggcaaggaggagtcgtccctcatggaccttgctgacgtcttcacggccccagctcctgccccgaccacagacccctgggggggcccagcacccatggctgctgccgtccccacggctgcccccacctcggacccctggggcggcccccctgtccctccagctgctgatccctggggaggtccagcccccacgccggcctctggggacccctggaggcctgctgcccctgcaggaccctcagttgacccttggggtgggaccccagcccctgcagctggggaggggcccacgcctgatccatggggaagttccgatggtggggtcccggtcagtgggccctcagcctccgatccctggacaccggccccggccttctcagatccctggggagggtcacctgccaagcccagcaccaatggcacaacagccgggggattcgacacggagcccgacgagttctctgactttgaccgactccgcacggcactgccgacctccgggagcagcgcaggagagctggagctgctggcaggagaggtgccggcccgaagccctggggcgtttgacatgagtggggtcaggggatctctggctgaggctgtgggcagccccccacctgcagccacaccaactcccacgccccccacccggaagacgccggagtcattcctggggcccaatgcagccctcgtcgacctggactcgctggtgagccggccgggccccacgccgcctggagccaaggcctccaaccccttcctgccaggcggaggcccagccactggcccttccgtcaccaaccccttccagcccgcgcctcccgcgacgctcaccctgaaccagctccgtctcagtcctgtgcctcccgtccctggagcgccacccacgtacatctctccccttggcgggggccctggcctgccccccatgatgcccccgggccccccggcccccaacactaatcccttcctcctataatccagggcggaagggggcctggctccatccggctgccccattccggctccctgggagatcagtgttgtgagtgcatgtgaaatgggggatccccacccccagtgcccttccccttcctggggcccactcacactacaccctcttcctttcccaccccacctccccggagagaaactggacatggggcctggggaggggagctggccagaggaggacccctttcccgtggcattagaagggggaggggtggctggggcccccacccattccccctccctccaaactcccaacccccagtcagtgtttgagcctcctcgttcccctcacgcacccgctcacgcaccctcggtgaatccttggtgatgattttggcaactttgggaataaatggcaattcccacgggcttggcaaaaaaaaaaaaaaaaaaaaaaaaaaaaaaaaaaaaaaaaaaaaaaaaaaaaaaaa

SEQ ID NO: 29907 - DNA, 3385 bp, Homo Sapiens
ggctcccgcgggcgcgcggcggggaaggccagaggacctgggcgcgggcgatgtgcctcctgagcgtccaaaccgggggtgaggcgcggtcacgcccagcgggaaccgcaggcgccgaagcccgggtactgggcccagaatcccgcggaattttggatccgagggaggcgctggggcgcgggacctcgggcgtggggtcccgggcgctggatcggcgcggacgggaggcggcgctggtcccgcgggccagcgggtctcgggagggggcgcccgatcccgcgtctccggcgccgcttcccgggaagtttcaagtttgaaagtcctggcggagggtctgcggcttccgggaccggagtggctgagaggagggccccaagcggccggagcggcgccatggaggagggggcgccgcggcagcctgggccgagccagtggcccccagaggatgagaaggaggtgatccgccgggccatccagaaagagctgaagatcaaggagggggtggagaacctgcggcgcgtggccacagaccgccgccacttgggccatgtgcagcagctgctgcggtcctccaaccgccgcctggagcagctgcatggcgagctgcgggagctgcacgcccgaatcctgctgcccggccctgggcctggcccagctgagcctgtggcctcaggaccccggccgtgggcagagcagctcagggctcggcacctagaggctctccggaggcagctgcatgtggagctgaaggtgaagcagggggctgagaacatgacccacacgtgcgccagtggcacccccaaggagaggaagctcctggcagctgcccagcagatgctgcgggacagccagctgaaggtggccctgctgcggatgaagatcagcagcctggaggccagtgggtccccggagccagggcctgagctgctggcggaggagctacagcatcgactgcacgttgaggcagctgtggctgagggcgccaagaacgtggtgaaactgcttagtagccggagaacacaggaccgcaaggcactggctgaggcccaggcccagctacaggagtcctctcagaaactggacctcctgcgcctggccttggagcagctgctggagcaactgcctcctgcccaccctttgcgcagcagagtgacccgagagttgcgggctgcggtgcctggatacccccagccttcagggacacctgtgaagcccaccgccctaacagggacactgcaggtccgcctcctgggctgtgaacagttgctgacagccgtgcctgggcgctccccagcggccgcactggccagcagcccctccgagggctggcttcggaccaaggccaagcaccagcgtggccgaggcgagcttgccagcgaggtgctggctgtgctaaaggtggacaaccgtgttgtggggcagacgggctgggggcaggtggccgaacagtcctgggaccagacctttgtcatcccactggagcgagcccgtgagctggagattggggtacactggcgggactggcggcagctatgtggcgtggccttcctgagacttgaggacttcctggacaatgcctgtcaccaactgtccctcagcctggtaccgcagggactgctttttgcccaggtgaccttctgcgatcctgtcattgagaggcggccccggctgcagaggcaggaacgcatcttctctaaacgcagaggccaggacttcctgagggcttcgcagatgaacctcggcatggcggcctgggggcgcctcgtcatgaacctgctgcccccctgcagctccccgagcacaatcagcccccctaaaggatgccctcggaccccaacaacactgcgagaggcctctgaccctgccactcccagtaatttcctgcccaagaagacccccttgggtgaagagatgacacccccacccaagcccccacgcctctacctcccccaggagccaacatccgaggagactccgcgcaccaaacgtccccatatggagcctaggactcgacgtgggccatctccaccagcctcccccaccaggaaaccccctcggcttcaggacttccgctgcttagctgtgctgggccggggacactttgggaaggtcctcctggtccagttcaaggggacagggaaatactacgccatcaaagcactgaagaagcaggaggtgctcagccgggacgagatagagagcctgtactgcgagaagcggatcctggaggctgtgggctgcacagggcaccctttcctgctctccctccttgcctgcttccagacctccagccatgcctgctttgtgactgagtttgtgcctggtggtgacctcatgatgcagatccacgaggatgtcttccccgagccccaggcccgcttctacgtggcttgtgttgtcctggggctgcagttcttacacgagaagaagatcatttacagggacctgaagttggataaccttctgctggatgcccagggattcctgaagatcgcagactttggactctgcaaggaagggatcggcttcggggaccggactagcaccttctgtggcaccccggagttcctggctcccgaggtgctgacccaggaggcatacacacgggctgtggactggtgggggctgggtgtgctgctctacgagatgctggtgggtgagtgcccgttcccaggggacacagaggaagaggtgtttgactgcatcgtcaacatggacgccccctaccccggctttctgtcggtgcaagggcttgagttcattcagaagctcctccagaagtgcccggagaagcgcctcggggcaggtgagcaggatgccgaggagatcaaggtccagccattcttcaggaccaccaactggcaagccctgctcgcccgcaccatccagccccccttcgtgcctaccctgtgtggccctgcggacctgcgctactttgagggcgagttcacagggctgccgcctgccctgaccccacctgcaccccacagcctcctcactgcccgccaacaggccgccttccgggacttcgactttgtgtcagagcgattcctggaaccctgagggcatctcctggcacctctgtccccttcccccacagactgttagagcctctgctcgttcacccgtgcgccctgcctggaggtccaggccttgctgggtacttctgagcccttgggattcaaagtggcagccatggggccactgttgtgggctttgctcagtgtcactgggcaaagtgtgtcccttccccctccagctcgccctcttctacctcccagcgagacctggcccagaaagggtgccgcagcaaggagtgatatggtttgtctttttaagactggacttgctttatattaaatttgtaaaagtgtgcaaaaaaaaa

SEQ ID NO: 29908 - DNA, 2711 bp, Homo Sapiens
acacttcttcctggcaaagaagtgcccaggacgggagctggggagccagggctgatctaggaggctgggagccaggtgacaggatggccccaaagagagttgtgcagctgtccctgaagatgcctacccatgccgtgtgtgtggtgggagtcgaggcacatgtggacattcacagtgatgtgcccaagggtgccaacagcttcagggtctctggaagctccggggtggaggtcttcatggtctacaaccgcacacgtgtgaaagagcccataggcaaggcccgttggccgctagacactgatgcagacatggtcgtatctgtgggcacagccagtaaggaattaaaggacttcaaggtgagggtctcctactttggggagcaggaagaccaagctctgggccgcagcgtgctttacctcactggcgtcgatatttcccttgaggttgacacaggccgcacaggcaaggtgaagaggagccaaggggacaagaaaacctggcgctggggccctgagggctatggggctatcttgctggtgaactgtgaccgggacaatcacaggtccgcggagcctgacctcacccacagctggctgatgtcgctggctgacctgcaggacatgtccccaatgctgctgagctgcaatggccccgacaagctcttcgacagccacaagcttgtcttgaacgtgcccttttctgattccaaaagagtgagggtcttctgtgccaggggtgggaattctctctcggactacaaacaggtgctggggccccagtgtctgtcctatgaagttgagcgacagccaggggagcaggagatcaagttctatgtggaggggctgaccttccccgatgccgatttcctagggctggtttccctcagtgtcagcctggtggacccggggaccctgcccgaggtgaccctcttcacagacactgtgggcttccgcatggccccctggatcatgacgcccaacactcagcctcctgaggagctgtatgtgtgcagagtgatggacactcatggctccaatgagaaattcctggaggacatgtcttatctgacattgaaagccaactgcaagctgaccatctgccctcaagttgaaaatcgaaatgaccgctggatccaggacgagatggagtttggctacatcgaggcccctcacaaatccttccccgtggtctttgactcccccaggaacaggggcctgaaagatttcccctataagaggatcctgggtcctgactttggatatgttacccgggagatcccgctccctggtccctccagccttgactccttcggcaacctggacgtcagcccgcccgtcacggggggcggcacggaataccccctgggccggatcctcatcgggagcagcttccccaagtccggtgggcggcagatggccagggcagtgcggaacttcctgaaggcacagcaggtgcaggcacccgtggagctctactcggactggctctctgtgggccatgtggacgagtttctgacctttgtgcctacctctgaccagaagggcttccggctgctcctggctagccccagcgcttgccccaaactcttccaagagaagaaagaagagggttatggggaggcagcccagtttgatgggttaaaacaccaggcaaaaagaagcattaatgagatgctggcagacagacacctccagagagacaatcttcatgcacagaaatgcattgactggaaccgtaatgtgctgaagcgggagctgggcctggcagagagtgacatcgtggacattccccagctcttcttcctgaaaaacttctacgcggaagccttcttcccagacatggttaacatggtggtcttaggcaagtacctgggcatccccaagccctacgggcccatcatcaatggccgctgctgcctggaggagaaggtgcagtccctgctggagcctctgggcctgcactgcatcttcattgatgactacttgtcctaccacgagctgcagggggagatccactgtggcaccaacgtgcgcaggaagccctttcccttcaaatggtggaacatggtgccctgagcctgcccccacccgccatcctctctgccctcttgctagggaaccctgccagggtgaaggcaaggaacaaccacctggcctccattctcttgggggagtcttggcactttgcaaacatcctggccaccatgggcaccaggacacagggatggataccacctaccctcgcctctggaatggcctacccaacccgagaagaatgcacctcattcttccctggcctctttcccacccacagcccccagaggctctagatcaacaatgttagcatgttccagaatggctgtgggaggcctagggaggtgggccccacttagaattgctcccccttcattctgatgcctccctggggaacaaggataatgactttgcatctgcacctggaacggggcctgggggacctggggtctggtgtgccaggcaccaggctgcctctgctcttggaaaactaggaaaggggatcagaaacatcctctccccgctctaggtttcttctcccaaaggggacccaaggctgtgacacttacctccacccccatccagcacccttcagctgtgtgtggacaaacaaggacagaaaaacccagtgtccaagggccaatttaaatagaaaaaaaaaaaaaaaaaaaaaaaaaa

SEQ ID NO: 29909 - DNA, 2431 bp, Homo Sapiens
gcagagaggacacttccggtctcctagtctgaggttcctgctttaatgaccggggtagtttgagccatttctgcgtcttgcaggacattttgaacgaaccccctttgcttgaggctcgcaaccacccgatgatcgatgatcgtctcaggggaaaagaagccttggcgaagagcagaggtttagaggcacaattctgctttccctggaactgtgtcattcaggactctgcaaattccctaaagtaggaggaaaaatgaccatgtccaaggaggcagtgaccttcaaggatgtggcagtggtcttcactgaggaggagctggggctgctggaccttgcccagaggaagctgtatcgagatgtgatgctggagaacttcaggaacctgctgtcagtggggcatcaaccattccaccgagatactttccactttctaagggaggaaaagttttggatgatggatatagcaacccaaagagaagggaattcaggaggcaagatccaacctgagatgaagacttttccagaagcaggaccacatgaagggtggtcctgccagcagatctgggaagaaattgcaagtgatttaaccaggcctcaagactctaccataaagagctctcagttctttgaacagggtgatgcccactcccaggttgaggaaggaatatctataatgcacacaggacagaaaccttccaattgtgggaagtgtaaacaatccttcagtgatatgtccatctttgatcttcctcagcaaatacgctcagcagagaagtctcattcctgtgatgagtgtggaaaaagcttctgttacatctcagcacttcatattcatcagagagtccacctgggagagaaactctttaagtgtgacgtgtgtggtaaggaattcagtcagagtttacatctgcaaactcatcagagagtccatactggagagaaacctttcaaatgtgaacaatgtgggagaggcttcagatgtagatcagcacttacagttcattgcaaattacacatgggagagaaacattataattgtgaggcatgtgggagggccttcattcatgatttccagcttcagaaacatcagagaattcacacaggggagaagccattcaaatgtgagatatgtagtgtgagcttccgtcttaggtcaagtcttaataggcattgtgtggtccacacaggaaagaaaccaaacagcactggggaatatggaaaaggcttcattcgtaggctggatttgtgtaagcatcagacgatccacacaggagagaaaccatataattgtaaagaatgtgggaagagcttcagacggtcctcctatcttttgatccatcagcgagtccacactggagaaaagccatacaaatgtgacaagtgtgggaagagctacattactaagtcaggtcttgacttgcaccacagagcccacacaggagagagaccttataactgtgatgactgtgggaagagctttagacaggcctcaagtattttgaatcataagagactccattgccgaaaaaaaccattcaaatgtgaggattgtggaaagaagcttgtataccggtcataccgtaaagaccaacaaaaaaaccacagtggagaaaatccatccaaatgtgaagactgtgggaagcgctacaagaggcgcttgaatcttgatataattttatcattatttttaaatgacacgtaagtgttgtacatatttatggggtacagtgtgatatttaaatatatgtatatgatgtataatgatcaaatcagtgtaattagcacatttatcacctcaattatctcttttttgtgttgagaaaattaaaaattcattgttccagcagtttgaaaataaattgttgtcgatgatagtcacctttagtgctgcagaacagcagaacttcttcctcttatctacctgtacttttgcatccattggccaacctttggccatcccacctatcccttacccttccctgcctctagagccactgttctcactacttctaagaaatcagctttttaagcttccccatgtgattgaggacagtttgaagttagtgtttcagccatagctcagcataccccagtggtcgtgggactgtcagagcagagaatgctgcagggtttctaacagaagtttgacaattagttattattcaggagacaggtcttagtataagagtttgttcacacactttcaaaacactaatgatgaacatgtcaaaattgatgaccactagaatgtcagccacatgtgtctttgtatttttgctgcatccttacattgcttgagtctggaagattgaggctgcagtgacctatggtagtgctactgcactccagccagggcaacagagtgagaccctgtctccaaaaaaaaaaattaaataaatacctttctttgtttccaaaaaaaaaaaaaaaa

SEQ ID NO: 29910 - DNA, 1988 bp, Homo Sapiens
gccggccgcgtatcccccggctacctgggccgccccgcggcggtgcgcgcgtgagagggagcgcgcgggcagccgagcgccggtgtgagccagcgctgctgccagtgtgagcggcggtgtgagcgcggtgggtgcggaggggcgtgtgtgccggcgcgcgcgccgtggggtgcaaaccccgagcgtctacgctgccatgaggggcgcgaacgcctgggcgccactctgcctgctgctggctgccgccacccagctctcgcggcagcagtccccagagagacctgttttcacatgtggtggcattcttactggagagtctggatttattggcagtgaaggttttcctggagtgtaccctccaaatagcaaatgtacttggaaaatcacagttcccgaaggaaaagtagtcgttctcaatttccgattcatagacctcgagagtgacaacctgtgccgctatgactttgtggatgtgtacaatggccatgccaatggccagcgcattggccgcttctgtggcactttccggcctggagcccttgtgtccagtggcaacaagatgatggtgcagatgatttctgatgccaacacagctggcaatggcttcatggccatgttctccgctgctgaaccaaacgaaagaggggatcagtattgtggaggactccttgacagaccttccggctcttttaaaacccccaactggccagaccgggattaccctgcaggagtcacttgtgtgtggcacattgtagccccaaagaatcagcttatagaattaaagtttgagaagtttgatgtggagcgagataactactgccgatatgattatgtggctgtgtttaatggcggggaagtcaacgatgctagaagaattggaaagtattgtggtgatagtccacctgcgccaattgtgtctgagagaaatgaacttcttattcagtttttatcagacttaagtttaactgcagatgggtttattggtcactacatattcaggccaaaaaaactgcctacaactacagaacagcctgtcaccaccacattccctgtaaccacgggtttaaaacccaccgtggccttgtgtcaacaaaagtgtagacggacggggactctggagggcaattattgttcaagtgactttgtattagccggcactgttatcacaaccatcactcgcgatgggagtttgcacgccacagtctcgatcatcaacatctacaaagagggaaatttggcgattcagcaggcgggcaagaacatgagtgccaggctgactgtcgtctgcaagcagtgccctctcctcagaagaggtctaaattacattattatgggccaagtaggtgaagatgggcgaggcaaaatcatgccaaacagctttatcatgatgttcaagaccaagaatcagaagctcctggatgccttaaaaaataagcaatgttaacagtgaactgtgtccatttaagctgtattctgccattgcctttgaaagatctatgttctctcagtagaaaaaaaaatacttataaaattacatattctgaaagagcattccgaaagatgggactggttgactcttcacatgatggaggtatgaggcctccgagatagctgagggaagttctttgcctgctgtcagaggagcagctatctgattggaaacctgccgacttagtgcggtgataggaagctaaaagtgtcaagcgttgacagcttggaagcgtttatttatacatctctgtaaaaggatattttagaattgagttgtgtgaagatgtcaaaaaaagattttagaagtgcaatatttatagtgttatttgtttcaccttcaagcctttgccctgaggtgttacaatcttgtcttgcgttttctaaatcaatgcttaataaaatatttttaaaggattacaaaaaaaaaaaaaaaaaaaaaaaaaaaaaaaaaaaaaaaaaaaaaaaaaaaaaaaaaaaaaaaaaaaaaaaaaaaaaaa

SEQ ID NO: 29911 - DNA, 3163 bp, Homo Sapiens
agcaacatgcccgcagagaattcttccggaggcggtcacagacatctccgtgacgcagaacgagttagagcgtcccttggggtttccatggtgctgcccttagcctgcagtatctccacttcctctcccgcctgagcgccgggaacggaaaagcaggcggccggtcccagctgcgacgtagacgccgcgtgggggtggggttgggcgagtaggtgacgctctaggcgagctcgttggcctctctatggtgccgagcgcgcccgttcggacgttgcccctttaatcggcagagggcggtgcccaggaggtcccgcgagagctgcggggggcgggggggcggtgccgaggctgggggccggtggcggatggagcccgcgatggagccggagactctggaggcgcgaatcaatagagccacgaaccccctgaacaaggagctcgactgggccagcatcaacggcttctgcgagcagctcaacgaggactttgaggggcctccactcgccacccggctgctggcccacaagatccagtccccacaggagtgggaggcgatccaggccttgacggtgctggaaacatgcatgaagagctgcggcaagcggttccacgacgaagtgggcaagttccgctttctcaacgagctcatcaaggtcgtgtctcccaagtatctgggctctcggacatcggagaaggtgaagaacaagatcttggagctcctctacagctggacagtgggcctgcccgaggaggtgaaaatcgcagaggcctaccagatgctaaagaagcaggggattgtaaagtccgaccccaagcttccagatgacactacctttccccttcctcctccacggccgaagaatgtgatctttgaagatgaggagaaatccaagatgctggcccgcctgctgaagagctcccatcccgaagacctccgcgcagccaataagctcatcaaagagatggtgcaggaggaccagaagcggatggagaagatctcgaagagggtgaatgccatcgaggaggtgaacaacaatgtgaaactgctcacggagatggtgatgagccacagccagggcggcgcagcagctggcagcagcgaggacctcatgaaggaactgtaccagcgctgtgagcggatgcggcccacgctcttccgactggcgagtgacacagaggacaatgatgaggccttagcggagatcctgcaggccaatgacaacctcacccaggtgatcaacctgtataagcagctggtgcggggtgaggaggtcaacggtgatgccacagccggctccatccctgggagcacctcggccctgctggatctctcaggcctggatctcccgcctgcgggcaccacctacccagctatgcccacccgccctggcgagcaggccagccctgagcagcccagtgcctcagtttccctgcttgacgacgagctcatgtctctgggcctcagtgaccccacacccccttcaggcccaagcctggatggtaccggatggaacagcttccagtcgtcggatgccactgagcccccagcccctgctctggcccaggcccccagtatggaaagccgacccccagcgcagacatccctgccagcaagcagcggtctggacgacctagacctcctggggaagaccctcctgcagcagtcgctgcccccggaatcccagcaagtgcggtgggagaagcagcagccaaccccccggctcacactccgggacctgcagaataagagcagcagctgcagctcccccagctccagcgccaccagccttctccacaccgtgtccccagagccccccaggcctccgcagcagcccgtaccaaccgagctctcactggccagcatcactgtgcccctggagtccatcaaacccagcaacatcctgcccgtgactgtgtatgaccagcacggcttccgcatcctcttccattttgcccgggacccactgccagggcgctccgacgtgctggtggtggtggtttccatgctgagcaccgccccccagcccatccgcaacatcgtgttccagtcagctgtccccaaggttatgaaggtgaagctgcagccaccctcgggcacggagctgccagcttttaaccccatcgtccacccctcagcaatcacccaggtcctgctgcttgccaacccccagaaggagaaggttcgcctccgctacaagctcaccttcaccatgggtgaccagacctacaacgagatgggggatgtggaccagttccccccacctgaaacctggggtagcctctagaacagaggggctggggagaggaaggggcagagggaccggtcactgtccagcctggagggaggcattggtggccaaggacaccctttgttgcccatggccattcacccccaggcctggtgcttctccccacacccctgtaggcctcaagtgactcttccccctcctgctccggccccgcccctgctgagccaaacccagtaggaggctgggcctgggtttgtgccgctggggtctccatcaccgggacctggagagggaggggctgtgtagccttggaagaacttgggtcatggggaggaagcacagctgttggggaagggccaggacctcaggcccagccccaaccccagctggggtggggtcttccccacctgtctcttatgccttatgggaaggcccagccataactcgggggccatgctggagctggggaccagcttaggcctcctccataggaacccagtgactggggggtgacgcctacacccccagctatttgcactctggtgtgtggtttgactctgcttttcttccggattggccctgtggtcacagcctcagggggccaggctgggggaacctcacctggcccgtactcctgggggtttccctttgccattgggccccctgagggactgtgggggctcaagggtaatgccagaggcccatggccccagcgaggggctgtggggcacctagagttctcggtgtgtctccttcattcattggcctctgctggggcctcctatgggtgtcttacgtctgtccatccatctgtccgtggtcagaagtggggtcagtgtgtgagtgagagcaggagtatttatgaaaataaaacgtcgtttttcctggaaaaaaaaaaaaaaaaaaaaaaaaaa

SEQ ID NO: 29912 - DNA, 6448 bp, Homo Sapiens
cctactcggagaaaacctactttatcttatttaaattagggtcctccaagcgatcttaacatctcctaagtcccaagcaccctgtttttttcctgatactttttccgtttaccttaaggtctgtgtcaacctgacagtaagctgcacgatggcaggggtcttgcctactaggttccctgtgcacagcagcccgtcaacagtagttgaataaacatcataggtcacaataaccctgggactgcctcttggggaggtagccgcaaactctcgcaggtggcagtgacaccagtacttctccggggggttgttcgagtggaggaatactcttacgtgaaagtgctcagtacaccactgcggcaggaaggaggaagggaagaattccagatggggagaaagtaatattttgcagcacagtacagggtaaactgggtccaggtgggcgtagccgccgcgacaccttcacgtgaccgcggacagcttaaggaccccgcatccagtgcgcctgcgctggagctcccggaagttgccggacccggaacgcaggcggagcgcaagtctgtcagccagtcagtccgccagtccgccagcccagtacctctctctcctcggccctcgtaagctgtccgcggtctgtttggcccgaacggcggcggaggcgctgatcatggcgacattcatctcggtgcagctgaaaaagacctcagaggtggacctggccaagccgctggtgaagttcatccagcagacttacccaagcggcggggaagagcaggcccagtactgccgcgcggcggaggagctcagcaagctgcgccgcgccgcagtcggtcgtccgctggacaagcacgagggcgcgctcgagacgctcctgagatattatgatcagatttgttctattgaacccaaattcccattttctgaaaatcagatctgcttgacatttacctggaaggatgctttcgataaaggttcactttttggaggctctgtaaaactggctcttgcaagcttaggatatgaaaagagctgtgtgttgttcaattgtgcagccttagctagccaaattgcagcagaacagaacctggataatgatgaaggattgaaaatcgctgctaaacattaccagtttgctagtggtgcctttttacatattaaagagacggttttatctgccttaagtcgagagccgaccgtggacatatctccagatactgttgggaccctcagtcttattatgctggcacaggctcaagaagtattttttttaaaagccacaagagataaaatgaaagatgccatcatagctaaattggctaatcaggctgcagattattttggtgatgctttcaaacagtgtcaatacaaagatactctccccaaggaggtgttccctgtcttggctgcaaagcactgtatcatgcaggccaatgctgagtaccatcagtctatcctggcaaaacagcagaagaaatttggagaagaaattgcaaggttacagcatgcagcagaactgattaaaacagtggcatctcgctatgatgaatatgttaatgtgaaggatttttctgacaaaatcaatcgtgcccttgctgcagcaaagaaggataatgacttcatttatcatgatcgagttccagaccttaaagatctagatcctattggcaaagccacacttgtgaaatctaccccggtcaatgtacccatcagtcagaaatttactgatctgtttgagaagatggttcccgtgtcagtacagcagtctttggctgcctataatcagaggaaagccgatttggttaacagatcaattgctcagatgagagaagccaccactttggcaaatggggtgctagcttcccttaatcttccagcagcaattgaagatgtgtctggagacactgtacctcagtctatattgactaaatccagatctgtgattgaacagggaggcatccagactgttgatcagttgattaaagaactgcctgaattactgcaacgaaatagagaaatcctagatgagtcattaaggttgttggatgaagaagaagcaaccgataatgatttaagagcaaaatttaaggaacgttggcaaaggacaccatccaatgaactgtataagcctttaagagcagagggaaccaacttcagaacagttttagataaagctgtgcaggcagatggacaagtgaaagaatgttaccagtctcatcgtgacaccatcgtgcttttgtgtaagccagagcctgagctgaatgctgccatcccttctgctaatccagcaaagaccatgcagggcagtgaggttgtaaatgtcttaaaatccttattgtcaaatcttgatgaagtaaagaaggaaagagagggtctggagaatgacttgaaatctgtgaattttgacatgacaagcaagtttttgacagccctggctcaagatggtgtgataaatgaagaagctctttctgttactgaactagatcgagtctatggaggtcttacaactaaagtccaagaatctctaaagaaacaggagggacttcttaaaaatattcaggtctcacatcaggaattttcaaaaatgaaacaatctaataatgaagctaacttaagagaagaagttttgaagaatttagctactgcatatgacaactttgttgaacttgtagctaatttgaaggaaggcacaaagttttacaatgagttgactgaaatcctggtcaggttccagaacaaatgcagtgatatagtttttgcacggaagacagaaagagatgaactcttaaaggacttgcaacaaagcattgccagagaacctagtgctccttcaattcctacacctgcgtatcagtcctcaccagcaggaggacatgcaccaactcctccaactccagcgccaagaaccatgccgcctactaagccccagcccccagccaggcctccaccacctgtgcttccagcaaatcgagctccttctgctactgctccatctccagtgggggctgggactgctgcgccagctccatcacaaacgcctggctcagctcctcctccacaggcgcagggaccaccctatcccacctatccaggatatcctgggtattgccaaatgcccatgcccatgggctataatccttatgcgtatggccagtataatatgccatatccaccagtgtatcaccagagtcctggacaggctccatacccgggaccccagcagccttcataccccttccctcagcccccacagcagtcttactatccacagcagtaatatgtctgctcagcagctcagctgattcagatcagagggaaagaaataccaaccctgcaataagtgtactaaactctacgctctggttaatgtaatgtactctcctggactgaatgcagtgtataatttctgtctacagctagaagctgtgccccagttccacatttgattacacatgtgagatttgctgctgttgcagtataaacactaggtataataggatttgaaattgcattacagttcataaaaattgaaaatgagaaattaaacctgcaagtgaaacatttgaaacgattatactttctacataagacatggttgggacatcagatacttacaaagatggtttaagtatggatactagagaaaattaagttttctttctctttggtttattgatttggtttaatttccattatgctattttgcataatcaaggcactgtaaatcttataattttaaaataaattacttaagaacagttgtcattgttatgttttgttattgattctcattactgtctaattttttttctggtattagtctcattttgtatgtatataagttaaacagatactgtttttaagtgcatgaatagtacaagttattatcaaggatgttttacagggaaatcaaaagaatattatcatactttatctttcgtatgctgattagtaaacgatttttgacatttattttagaaagtcctataatgtggaagaaacaaacagttgctaccaaagattcttcaaataaacatacaaataaatgtgtatatttaatgttttattgttagcttctccagaaaattgatgcaaattctggtaataattcttgcattttttccccataacctggttaaaataaatacgccattggcaatacttcataatgtaatggaattgtttggggaacacttactgtaccctctcatcctttttccaccttactgtgttaacttagtgacatttaatgcccaatatgtatgaatagatctaagccatttaattttttttccttaaagattggagtattttataattcaaggagcatacaaaacaatggttgggaacatatgccaattatggaataggctatgtatttaatattaatctctgccattaggatatctactcactgtataaacctcagtaaaaatagtgaagacatgcatcatggaatgagaaaatgagaaaggaatgagttgtctaacatcacagtgggatctgttttttgtgaggttcatttctgaacacattaggcatatgagcagatttccagtgaatctatttatgtttattttctgagtttcaacgctgaccttttcttgcattattgtttcattttaatgatagtgttacttgtcccactgttgttttcattgagtttggatttatattttaaatgttcgaatgaaagtatgattgtaaaagggagtgaattggtttaaaaatatatgtatattttaaactttgttgtgtgtaggaaacatgaaggcatgttaattcaatataaatgacctttgatttcatggaatattaaagttggtttaaagtccaatagttaaaccttagcaaaaatagctttttactttatcagttgctaagatttaatactttggattcatcaaagtgtgacatgggcttgtttgacttctgtaagtggcatttaagttccacattcttattacttgaggtactttatactaacataagacagtgagagttagaggtattacaagttgctagtttataatgtcttactaatgcagaaacaaggaaaaaagcaaaattggcctgaatattctcttggggaaagagggcaccaaagaaaagggtaagtgcatctgagggccaaaagagatgtataagccttttagcccattccccatgctgggcctgctcacagagccacaggaagatcattcagaaactaggaaaggaggcccccacagctgatcctgccacagcacacctgactcactcggctctgttagtgtaaccttttaaatgtagcaacacaaaccctttccctcttgtcagttcactcatcctttggtttctttttaatcacctgtgtctgggcacagacaatcacaataaatgcagccctttattactgttaaggatcatactgttggtttggagttggaagggtactactctgtgattcaggtgtgttgtacccatatttataattaggctttattatcttcctaaatcaaggaaaggaaatcatccccagaccatttatgctgagctttggaatactattttaaactggattgtacttaaataatgaagctctgcatagaggaactagtcagaagtggggaaaacactgtctaatttttatcagtctggtataaagtattgatctaagagaactctccctgtgccccttggtctttattctcaattaagaaaaacagtcacatgtcacgacaaaccaatcaatctttatgagatattcctgtatccataccccagcttgtttgcaatttataaacctccccttcaaaactaaggagttgcagaaaaaaatggatttcacagagccttgtgtccctaaagttctgtcccagtcagcagtctttatagtccaaacagattataaaaaatgttttccatttgaactttacagtttgcaaaagtgcttttatacattttctaatttcagaaacaggataatttgttaagtgggtttcagtttgctaatagggattttttgtgttttgttttttaattttcagcatctcttgaagaatcttgctacagccaaatggcatctcactttttaaagacgtttgcaattattagttgattcacagtacagaacaaggtataaaggaaaaaaccctgctaggtagtgttataattgctagattaaaaatagactagaacaggttcattttaagatttacttggaagagcaaagaaggaaaaattatatttttaaagaaagagaatattcaggctttatttctggtatgaagtttatattttttaaaaaaatcctatattatcacaccagagattttagattcttttctggttagaaacattgctggtagttggattatatttttattgtattcatttatcttagggggaacattgtaaagaaacaaaaaggtccagatgaatgtatgctagaaataaaagttgaaagattctt

SEQ ID NO: 29913 - DNA, 2255 bp, Homo Sapiens
tacggccgtcgtgccgctcgtgtcagtcaacatggaggcagaggaatcggagaaggccgcaacggagcaagagccgctggaagggacagaacagacactagatgcggaggaggagcaggaggaatccgaagaagcggcctgtggcagcaagaagcgggtagtgccaggtattgtgtacctgggccatatcccgccgcgcttccggcccctgcacgtccgcaaccttctcagcgcctatggcgaggtcggacgcgtcttctttcaggctgaggaccggttcgtgagacgcaagaagaaggcagcagcagctgccggaggaaaaaagcggtcctacaccaaggactacaccgagggatgggtggagttccgtgacaagcgcatagccaagcgcgtggcggccagtctacacaacacgcctatgggtgcccgcaggcgcagccccttccgttatgatctttggaacctcaagtacttgcaccgtttcacctggtcccacctcagcgagcacctcgcctttgagcgccaggtgcgcaggcagcgcttgagagcggaggttgctcaagccaagcgtgagaccgacttctatcttcaaagtgtggaacggggacaacgctttcttgcggccgatggggaccctgctcgcccagatggctcctggacatttgcccagcgtcctactgagcaggaactgagggcccgtaaagcagcacggccagggggacgtgaacgggctcgcctggcaactgcccaggacaaggcccgctccaacaaagggctcctggccaggatctttggagccccgccaccctcagagagcatggagggaccttcccttgtcagggactcctgagggcctgggtggccccttccatttcctggccctgctctgcttcctgtctacctcatactagaatgatcgtgactacccgggcagacattttactgtgtttctcagaccaagtgtctactgatggcccaaacatggagttttgtgggcttccactgtccccactccgaactcctgtatgtgcctggctgagtcacctaattcatactgtcatactagcataattatgactattgcatatgcttgttttgtttgactcttggctgcctacgtctgtagggtcccctgaaaatcccacttcctgcccccagaaagggcctttatttccaactaggaggataatgcctagtccaggcaatctttctctgtttagcagtcacaggtgagggtggtattagcatcttttttatgtagaaaaaattgagttaatggggtggactgggttgggaagaaatacatttcctaatgtatttatagaaaataaaaatatttttatgtgcctttttatttttgttggtggggaggtcattggacaagttccaactttcatcttgtgttcccttcaccttcatatcctgatcttagagcccccctccccctgccacccaccttactgtttaacctggatttttttttctatttaatttttgtctaatatcttagcccagtttatcaatcagttatcttaagtcagcattttctaagccattgtttgaggaaacagtgacaataggtaataacacatcttagtattaagagttttacaggccactagtataagataggcatcgtggtagatgcatataaagggtggaatgggagccatggcaggtcatagagtcctctcaatgggaacctgattgatgatcacagtcttcagtggtgagtcagtcctcaccaagttttccagatcattcctacaaagtaaactgggagaataataagtctgaaagagtgtggagtgctcccacaattacaaagaatgcttcctgggtggagtgttgagttggaaccattgtaaaggtgggcaaagcctagtagagaaccagtgcacctcaggtgcacttacatatggtggggctgaggcaaagcagccctgtaggcttcaaagaatcagtgtaagccactaaaaggaactgaaaacctaggtgtcacaataaacagtctacacagtctcacgtagaccaaaattctgatcattttccaggctgttgcatgaagtgatagagtatgattataatttctgtttgcttgtgctgtttgtttttgtttttcatctgtcaatgtgatgatctgtgttttatagggtagagtggatttgtctactttggctgtaaaataccctaatcacattatgatcttgacaggtgcactttactggggagaataaaaaggaccatacggtaaa

SEQ ID NO: 29914 - DNA, 3658 bp, Homo Sapiens
acttccgccccaggtacgctaggccgcggccttcgttcctcccagaaaggagatggtgacattcaaggatgttgctgtggtcttcactgaggaggagctggggctgctggactctgtccagaggaagctgtaccgagatgtgatgctggagaacttcaggaacctgctcttagtagcacatcagcccttcaagccagacctaatatcccagctggagagagaagaaaagcttttgatggtggagacagaaaccccaagagatggatgttcaggaaggaagaatcaacaaaagatggagagtattcaggaagtaacagtaagctacttttcccccaaagagctttcctcccgtcagacctggcaacaaagtgcaggtgggttaatcaggtgtcaagatttcctgaaagtttttcaagggaagaattctcagttgcaagaacaaggtaattccctcggccaggtttgggcaggaataccagttcagatttctgaagataagaactatatattcactcatatagggaatggctccaattatataaaaagtcaagggtatccatcttggagggcacatcattcttggaggaaaatgtatctgaaagagtcacataattatcagtgtagatgtcagcaaatttccatgaaaaatcatttctgtaagtgtgacagtgtcagttggctctcacatcacaatgataaactggaagtacacagaaaagaaaactacagctgccatgactgtggagaagatatcatgaaggtatcattacttaatcaggagtcaattcaaacagaggagaagccctatccatgtactgggtatagaaaagccttcagtaatgactccagctctgaagttcatcagcagttccacttggaagggaagccctatacatacagttcatgtggaaagggctgtaattatagttcacttcttcatattcatcaaaatattgagagagaagatgatattgagaattcacatctgaaatcctatcagagagtgcatacagaggagaaaccatgcaaatgtggtgaatatggtgagaacttcaatcactgttcccctcttaacacttatgaacttatccacacaggtgagatgtcctataggcacaacatttatgagaaagccttcagtcatagcttagaccttaatagtatttttagggtccatactagggatgaaccccatgaatatgaggaaaatgagaatgtctttaatcagagttcatgtcttcaagtccatcaaaaaatccacactgaagagaaactatacacagatatagagtatggaaagagtttcatttgtagttcaaatcttgacattcagcatagggttcatatggaagagaattcatataattctcaggagtgtggtaatggcttcagtctggcctcacattttcaggaccttcagatagtccacactaaggaacaaccatataaacgctatgtgtgtagtaacagcttcagccataatttatatcttcaaggtcatccaaaaattcacattggagagaaaccacgtaaggagcatgggaatggcttcaactggagctcaaaacttaaagatcatcagagagtccacactggacagaagccatacaaatgcaatatatgcggcaaaggtttcaatcatagatcagttctgaatgttcatcagagagtccacacaggagagaaaccttataaatgcgaggaatgtgataagggattcagtcggagttcatatcttcaagcccatcagagagtccacactggagaaaaaccttataaatgtgaggaatgtgggaaggggttcagtcgaaattcataccttcaaggccatcagagagttcacactggagaaaaaccatacaagtgtgaggagtgtgggaagggcttcagtcggagttcacaccttcaaggccatcagagagtccacactggagaaaaaccattcaaatgtgaggaatgtgggaaggggttcagttggagctttaatcttcaaattcatcagagggttcacacaggagaaaaaccctataaatgtgaagaatgtggtaaaggcttcagtaaggcctcaacacttttggcccatcagagggtccacacgggagagaagccataccaatgtgatgagtgtggtaagagtttcagtcagagatcataccttcagagtcatcagagtgtccattctggagaaagaccatatatatgtgaggtatgtggaaagggcttcagtcagagagcatatcttcaaggtcatcagagagtccacactagagtgaaaccgtataaatgtgagatgtgtgggaagggctttagtcagagttcgcgccttgaagcacatcggagggttcacacaggagggaaaccatacaaatgtgaggtgtgtacaaagggtttcagtgagagttcacgccttcaagcacaccaaagggttcatgtggaagggagaccctataaatgtgaacagtgtggtaagggtttcagtgggtattcaagtcttcaagcccatcacagagtccacacaggagagaaaccatacaaatgtgaggtatgtggaaagggcttcagtcagagatcaaatcttcaggctcaccagagagtccacacaggagagaaaccatacaaatgtgatgcatgtggtaagggtttccgttggagctcaggtcttctcattcatcaaagagtccatagtagtgataaattctataaaagcgaagactatggtaaggactacccttcatcagagaatctacacagaaatgaagattctgttttgttttgaagtcctcaaatgggagctgaaattttccagtcactagagttctttcagtagaaaaagaatttttaaaaattaaaatgtaatgttgctgcccaacttcaacattcataatggccaggagaccacacaacagagacatttaatgagaggggtttcacgagggattttgttagaactttaacatcagtcattgcacaggagctaaggcttataaaatatgagtatggtcaggaatttaataaaagtacagtgatgagcatgcctaaatccatgttctctagaatgtaagcttggtgaaagaagggactttgttcattgctagtctacaaaactaggacatttcataacgcaatgtaggtgctcagtactttttgctaaataactaaaagtatgtaaaggtaaaaggtttgaaatttttaagcgcattttttaaaacttaaaatgtatttggaggagaaatcctgcaagtaatcttaataaaatcatttcaagtaaatatttgaaatgtagaacaataagcattatgatgatctgaaataacattaatttgattgtaaccctattggggttagttcccaccctttgttccatcttgagcagagatgtgctgcatttcttaacgtttggtctctatacattataccatctgctgaagtttagctttgtgtgtgtgtatatgtacccatgtgtgcacttgaaatatcagtacaaactgataaacaatgtttctggttaatgttgcaaaaatggaacactgtattttacataattgattttctactcctgccctgtgaattaaggcagagttttactgtaatatttgcaagtatccaaaatggttactgatgacaaatactttttaataaatgtcaaaatcacaataaa

SEQ ID NO: 29915 - DNA, 5666 bp, Homo Sapiens
aagaaaaagaagaagaaaaagaggaagaagaagaaggaggaggaggaggaggaggaggagggggccgagaagagcagctcacccttcgcagccgcgatgggggaagacgacgccgcgcttcgggctggcagcagggggctctccgacccgtgggcagactcagtgggagtgcgaccccgcaccacggagcgccacatcgccgtacacaagcggcttgtgctggccttcgctgtgtccctcgtggcattgctcgcggtcacaatgctcgctgtgctgctcagcctgcgcttcgacgagtgcggggcgagtgccacgccaggcgccgacggtggcccctcaggctttccggagcgcggcggcaacgggagcctccctggatcggcccggcgcaaccaccacgcaggcggggactcctggcagcccgaggcgggtggggtggccagtccggggaccacgtcggcccagccgccgtcggaggaggagcgggagccgtgggagccgtggacgcagctgcgcctgtcgggccacctgaagccgctgcactacaatctgatgctcaccgccttcatggagaacttcaccttctccggggaggtcaacgtggagatcgcgtgccggaacgccacccgctacgtagtgctgcacgcttcccgagtggcggtggagaaagtgcagctggccgaggaccgggcgttcggggctgtccctgtagccggttttttcctctacccgcaaacccaggtcttagtggtggtgctgaataggacactggacgcgcagaggaattacaatctgaagattatctacaacgcgctcatcgagaatgagctcctgggcttcttccgcagctcctatgtgctccacggggagagaagattccttggtgttactcagttttcgcctacacatgccagaaaggcatttccttgttttgatgagccaatctacaaggctactttcaaaatcagcatcaagcatcaagcaacctatttatctttatctaatatgccagtggaaacttccgtgtttgaggaagatggatgggttacggatcacttttcacagacccctctcatgtccacatattatttagcctgggcaatttgcaacttcacatacagagaaactaccaccaagagtggggttgtagtacgattatatgcaagacctgatgctatcagaagaggatccggggactatgctctccatataacaaagagattaatagaattttatgaagactactttaaagtgccctattccttgccaaaactagatcttttagctgtgcctaagcatccgtatgctgctatggagaactggggactaagtatttttgtggaacaaagaatactgctggatcccagtgtttcatctatttcttatttgctggatgtcaccatggtcattgttcatgagatatgtcaccagtggtttggtgaccttgtgacgcctgtgtggtgggaagacgtgtggctgaaggaagggtttgctcactactttgaatttgttggtacagactacctctatcctggctggaacatggaaaagcagaggtttctgaccgatgttctgcatgaagtgatgctgctggacggtttggccagttcccatccagtatcacaggaagtgctgcaggcaacagatattgacagggtgtttgactggatcgcatataaaaagggtgctgctttaataagaatgctggctaattttatgggccattcagttttccagaggggtttgcaagattatttaaccattcataagtatggtaatgcagccagaaatgatctctggaatacattatcggaggctttaaaaagaaatgggaaatatgtaaatatacaagaagtaatggatcagtggacactccagatgggttatcctgttatcaccatcttgggaaacacaacagcagaaaatagaataataattacccaacagcattttatctatgatatcagtgctaaaactaaagcacttaaacttcagaataacagttacctgtggcagattccattaactattgtggtaggaaatagaagccatgtgtcttcagaagcaattatttgggtgtctaacaaatcagagcaccacagaataacttatttggacaaaggaagctggctgctggggaacatcaatcaaactggctattttagagtcaactatgacctaaggaactggagattattaattgatcaattaatccggaatcatgaggttctttctgtcagtaaccgagcgggcttgatcgatgatgccttcagcctagccagggctggctatttgcctcagaatattcctctggagattatcagatacctgtctgaggagaaggattttcttccttggcatgctgccagccgagctctttatcctctagataaattactggaccgcatggaaaactacaacattttcaatgaatatattttaaagcaagttgcaacaacatatatcaagcttgggtggccgaaaaataattttaatggatctcttgttcaagcatcctaccaacatgaagaactacgtagagaagttataatgctggcctgcagttttggcaacaagcactgtcaccaacaggcatcaacacttatttcagattggatttccagcaacaggaacagaataccactaaatgttagagacatcgtatactgtacaggagtgtcactactggatgaggatgtctgggaattcatatggatgaaattccattccaccacagcagtttctgagaagaaaatattattggaagccttaacttgcagtgatgacaggaatttattaaacaggcttctaaatctgtcactgaattctgaggtggtgctggatcaagatgcaattgatgtcataatccatgtagctcgaaatccacatggtcgagaccttgcctggaagtttttcagggataaatggaagatattaaataccaggtatggagaagcattgtttatgaattccaaactcatcagtggtgtcacagaatttcttaatactgaaggtgaactcaaagagctcaagaacttcatgaaaaactatgatggggtagctgctgcttctttctcacgagctgtggaaactgtcgaagccaatgtgcgctggaaaatgctttaccaagacgagcttttccaatggttaggaaaagctctaagacactaatatatgtatcttataaacaaacaattcaactcagaagtttatgagaagacacgctttttgtggaatgaggaaaatgtactacctagaaaatggccagattttcagtgttaacatgtgggaggaattttttttttagtttttattttttggttttgggggatattttttatttgtttcattcattctgttctgtttctctactgggtgttcctctctaaagaaactcttgcaagtgaaactagccatgattgcttcagctgtacattccttgctgtacaggaccaaatatgatagtgatgcatgttgatgttacagtcaatttggaaaaacatattcagaatatctgtgcatggatatattgtcctgcctgtgttccagcatgcttatttcaaacgtccagtgttgtgtgtgaatatgtgttacacctaggatgggcattatgcaaaagcacaaagattatatatgacaatcagtattgcaatgaaagaaaaactaaaaacagaaatgatattctcaattttgggcaatgtgagaggtaaaatagcccttgacatgatgaacatcacttatttcagcacttggattgtctggcaatgattactgtgttgctaactcattttctttgagttaaagctgtgtatacattttaaaaggcatatagatagtgtatgcatatgtatatgtacatagggaagccccatatgtatatagtatgttgtacactgcacatgtacaaagaatgtcttcagatcaaagaaaatttatctctttttataaacttaaggacagttgcaaaaggcttcaaggaatttatctcaacattattctttctatgtcctaactaaatttctcaactgttatgaatttttcatctacttcttgaacagtggtctattctgctacatgaagatgaatacaaacaaaatttttgtataaactactattccagttctcctgtgtcagtcttgcctatagattttgccatcgttttctgtcaaagttccttttgcatgaaacaattatgcaaacttataattattagtgctgaaaaagagtttattttccatcttgtttgttttcctaccttatgctgagtagtccagagagttaaaaaaattctctgcatgttggtcttttaagtctgttttgctctaatcctccattaagcgagcatacctcaagtgggtctattagcatttaatgaccttttatgccagttgtgccatcccttaagatgaaaagttccttttcttgtgttaatgtacaaagcttttcttttggcactgacaactgtgttctacctgggaattttgaatagccattttcatggctgtgtgttgtgtaacacaaatgtttttaaatggtattctcacccagtaggccagctctccaaacgttgcttagatgcttcaaaattagcatattttaagtttaccagtataaaataccaatgcaactactctacatagccaaatgtttgtaaatcacgtcttattttcctgaggtttttcactccaccaaatcttacaaatcattgaaagaaatatattctaacagtacgcactgaatagtgaaaataattagacattttaagaaccagagccatagaattattttaaattagtagaaaagaggagctatttccgaatctatagaataaagtaccacctaaaactgaattttatcatataagcaagtaatacctattagtcatacctaaatttttcagcacttcattcaattaaaatacatgaattttaaatattttacatgatgtgaataggcatgataatacttttagtataaaatctaaactttttccatttatcagaaatgataaaatccagttaccacatattcacgtttataaaatccttaattaaatgagtaacttctaaaatataacaatactaaatatcacactgtgatggaggtcccaaatatgtggtctatcaccactgaattcatgtaatagataagaaaaaaattagaggtggatgtcttgttttgtgtcatgaattactaaaatctcttagtagttgtggtatatttttgagtaaaattaccatttccagatttgagtttgaagggcttttatagttgtattttcctcctcactgttaataatcataatcctttttcagtattttagtggccttgaacaactggtttatctacaatctcaaatcctaagtgtataattatgtgcaatgttcaatacctcatataatacttgctcaacagtatagtggtaccaatggcattaagatggtgtttttgttctacatatttttcaataatttattctttctaatgttgaaattatatcaggctttaccggtttttttagttgtttaaataagtaatattttcaaaagaataaaataaccaatgatatctcttggaataatctgtaaaacgtagttataaaattctattttctacttaaaaaaaaaaaaaaaaaaaaaaaaaaaaaaaaaaaaaaaaaaaaaaaa

SEQ ID NO: 29916 - DNA, 4881 bp, Homo Sapiens
gccgcctcctagcggcccgggccgcgaccacgctgcccgccccgccccgagcccggggccccgcgctccgctgcagtgaagggcgttgcatttcccggggtaccccgagctgccctcttgtgactccttggcggggcggctggtcagacaaagtgtgcctccgggccggagggcgacccagaggagggggaagatgccgccggccacgggcggaggcctggcagagtccgagctgcgtccccggaggggccgctgtggcccccaggctgctagggccgcaggccgggacgtggccgctgaggctgtggcgcgaagccccaaacggcctgcttggggctcacggcgcttcgaggcggtcggctggtgggccctgctggccttggtgacgctgctgtccttcgccacccgcttccaccgcttggacgagccgccgcacatctgttgggatgagactcactttggaaaaatgggaagttactatatcaaccgtacatttttctttgatgtgcacccgcccctgggaaagatgctgataggtcttgctggctacctgagtggatatgatggtacctttttgttccagaagcctggggataaatatgagcatcacagctacatgggaatgagaggattctgtgcattccttggctcctggctggtcccctttgcctacctcactgtactggatctgtccaagtccctctcggcagcactgctcacagctgccctcctcacctttgacacgggatgcctcactctgtcccagtacatcctccttgaccccatcctgatgttcttcatcatggctgccatgctgagcatggtcaagtacaactcttgcgccgacaggcccttctctgccccctggtggttctggctcagcctgactggcgttagtcttgctggtgctttaggggtcaagtttgttggcctctttatcatccttcaagtggggctgaacaccattgcagacctttggtacctgttcggagacctcagtctttcattggtgactgtgggaaaacacctgactgctcgtgtcctgtgcctcatagtgctgcccctggctctctatacagccacctttgctgttcacttcatggtgctgagtaaaagtggccctggtgacggtttcttcagttctgccttccaggcccggctttcagggaacaacctgcacaatgcttccatccctgaacacctggcctacggctctgtgatcactgtgaagaacctccggatggccatcggctatctgcactcccacaggcacctctaccccgagggcattggtgcccgtcagcagcaggtcaccacctatttgcacaaggactacaacaacctgtggattatcaagaaacataacacaaactcagatcccctagacccttccttcccagtggagtttgtaagacatggagacattattcgactagaacacaaagaaacttcccggaacttgcacagtcactatcatgaggcccccatgacccggaagcactatcaggtcaccggctatggcataaatggaacaggggactcaaatgatttctggcggattgaggtcgtaaacaggaaatttggaaaccggatcaaagtgctgagaagtcgaattcgcttcatccatttggtcacaggttgtgtcctgggctcctcgggaaaggttctgcccaagtggggctgggagcagttggaagttacttgcaccccatacctgaaagaaaccctcaactccatctggaatgtggaggaccatatcaatcccaagttgccaaacatcagcctggatgtgctacagcccagttttcctgagatcttgctggaatcccacatggtcatgatccgggggaacagtggcctcaaacccaaggacaatgagttcacgtccaaaccctggcactggcctatcaactatcagggcctacgcttctcaggggtcaatgacacagatttccgagtctatctgcttggcaacccggtggtttggtggctgaatctgttgagcatcgccctctacctcctctcagggagcatcattgctgtagccatgcagagaggggcacggctgccagcggaggttgcagggttgtcccaggtcctgcttcgaggaggcggccaggtcctgctcggctggacactccattacttcccgtttttcctgatgggccgggtcctctacttccaccactacttcccagccatgctcttctcaagcatgttgacaggcattctgtgggacaccctcctgcggctctgtgcctggggcttggcctcatggcccctggcgaggggcatacatgtggcgggaatcctgagcctgctcctgggaactgcctacagcttctacctcttccaccctctggcttacgggatggttggtcccctggcccaggacccccaaagtccaatggcaggactaaggtggctggactcatgggacttttgaggccactgcaaagattccagcctgggtccaggaacttcccaggagagccagctgggaagcagtactggaccatccggccatgaggaagctgcctaaggagcccgaagaattctgctgctcaccaggacccagctctgggagtgcagctggaatggaacccagcattggagagagccgggagagagccgcagctccgtccacagcaccacggagaggacagcgcctcttgggctgctccctcgtgcacagcgcaggggaggatgggtgccagagggtgggagtgggtgcgcgtgtgtgtatgtgagggcatgttgtccatatccctgtggaatacagaccgtgtaactggacagctgagtgtcataaactctaaaatagtccaggctatagtaatattttctggtatttttttctgttggatttctttggttttggtttgtaagatccatcaaaaattctcagacctctgagagggccttgagggcagagaatactgacctcaccttgggatgtcaccaaaggcagagcagatgggactgtcaaagttgtgctgccctccctcccacaaacaaatgaatccagcgtggaggaaggcgcgccgccccgagctggagggcctggctcccaccatgccccccagtggctgcaggtagctggacttcctgcctgtgacgcacagagagcagcggactccggagcgtcagcctgccttagcccttggttcctcgttttttgggattgtcacactgtgacactcgggaggaacgatgtcctatcctgggctgctcaatgttcccaggccctgtgtgccagaggccaggtctctccaagtgcatctagcctggcctggagggcaaggcagatgcattctcctggctgctgggagagcccatgggaaccttgcttagcgcccaaggtagatgagagacagggcagggaatctgcgtggtgctgggatgtggggactctggcctctccagactaatgttcctgtcacctgctgagctttcccagtgtcacttctgcagtcctcctctgctcacccctccctcactccgtgggcaattccctttctctctgtcactgcttcagcagtgaagacccatggcacctagaaatgcatgccagcttcctgcgtctaccactctgcagctcaaacaagaagctcagagctgccccttccacttcctccccaaaagggatgaagaaaaccctgtggtagaaccaaaccacccaaggccagcccttaagcctgcctccaccttcctggtgcatgacaaaatatttcttttgtctcagaggactttgatgcttcaatatttaatgatgaatccgccacactccattttccctcctctgaagctcccaacaactctgacagggtcagatctctttaaagcatcttcaggaggcggttgccacggagactggatattggtcccagggacaggctgtgctacctactgggtggtggggagggaagcttctggccatgcttgggcattcagaccaaccatcattaatgttaatagaggaaatgcagcaacgtcaaaagcaaggcaggttggttaattagatctggggcccgatgacctccctttcccactgctacagcccttttgacttcccccagcaggaagcgctgtctgtgcggctgagtctgggccacttgcttaattgcatttctggcagggaaggagaggagggatggagaagctctgctcgctgcttccacctcaccgtgtgtcctcccctcccctcccttcctctcctccccacaggcggaattgctttcttctgagccgggtgggctctcctgcagggagaatgcaggggtctgtgcttggctcttagcaaagcaggtggcccacagtgacctccaggaggtggctgattttcctttgtgccttcttatttctcagtaggaacttggaagggaagagctctgaaggagccagaggggcagccaccttgcatgagggtgaggaaggagaagcccagccagcctctacccatccctccctcccaattaggctgcactggggccgaacgcttccctgggctcccactgccttctaaggagccaaggagaattccctgcccactttctgttcctccatgcccaaactggcagatgcttctctgggagcaaggccacatgggctgatgcagctttgagtgctcaggttctgttttctggaagttgctggagaagggctgtcagggtgcttctatgaatatgggcttcagctgtagcacttggcagaaacgtgatgtgtcccacaaactgctggtggaggaagaagatgttcgtcagccaattcaacctccagccagcttcttgagcctatttggtttaaaaaaaaaaagtcttctaatcagaagccactgattttataataaataacacttgttttgaaaaaaaaaaaaaaaaa

SEQ ID NO: 29917 - DNA, 2792 bp, Homo Sapiens
aggaagcagacctgcgacgggaccgaggaatggaggggtggtcgggtgtgtggatggccagagtgacagcttagggagaagccggatgtggaaggggaggaactgtgtggtatgcccaggcccctgggcccagccctggcttggcagcccttgctccctgctgagggccctgcctttccttcccctgaaacagctcccggagccctgcctgttccctgtccatccaggccagcagctgaaggagcctcacctgcctcccttctctgagtagcacggatttgaggagaagcagcgaagatgtccagcgagcctccccctccttatcctgggggccccacagccccacttctggaagagaaaagtggagccccgcccaccccaggccgttcctccccagctgtgatgcagccccctccaggcatgccactgccccctgcggacattggccccccaccctatgagccgccgggtcacccaatgccccagcctggcttcatcccaccacacatgagtgcagatggcacctacatgcctccgggtttctaccctcctccaggcccccacccacccatgggctactaccccccagggccctacacgccagggccctaccctggccctgggggccacacagccacagtcctggtcccttcaggagctgccaccacggtgacagtgctgcagggagagatctttgagggagcgcctgtgcagacggtgtgtccccactgccagcaggccatcaccaccaagatctcctacgagattggcttgatgaatttcgtgctgggtttcttctgttgcttcatgggatgtgatctgggctgctgcctgatcccctgcctcatcaatgacttcaaggatgtgacgcacacatgccccagctgcaaagctacatctacacgtacaagcgcctgtgctaacggagctgggactcgggactcccccgcctgtcagtctggccccctgtgctttgctccctgcgctcagtggtcactttcccgctcccacttggggctgggagccgtgccaccatcccctagaagtcctgtcctcttcaccctgccctacctgagccgctgactcttctggcaaaaattctgttgggatttaaggccaagggtcagtgggtggcagggggctggcaatgagcttgtgtgttgttggtctgcttggtgtgtgtgatcgggaagataagctgggaggggtctcctgctggggtcctgatgcctctgtttccaaacaaggtacaggttcagtccagactctttccccctgggaccaacagcagccagagcagttagccagttagtccccaggcctgtggcacaggcgtttctgacctgctgggccgagaatgggtaagttgtctggagtcaggtgggcccacgtaggacagggtcacaaagcctgggtttgtttctgggtactttgcgcctctggggtgctagaggtggggcatggtggctggaagtaaaactgccaactctggccctcagaactctcaggtatagaagcccaggatgtctaataccctgtcccagtgcccgagagctgcctggtgtcaggtagagaggacactgtacctgggtgaatgatcagaccctggtagctaagaaggaacttgtccctttgagtcagtgtgcagaccccctttcaggccatgcgtctgtgaaccctgtattgctggggccggaaggagcccgtgagcctagccccttcccgtctgccctgtgtcctcactgcgtgtgggtatgacctctgcctggtggctggtgtatcccaactggggaagagatggcagagggtcccccttgtgggtgcgcttggatgtgcagagccttctccatggattttcttccctgtaagtgccgggcccctcaccccagctgacaggctgttgctgtgcctgctcacacctgctcctgcaggcacactgggctagggacgaggaaggagcagccacaagtggtagaactgccttggtggacaccagcctcgccctgtctttatttcctgaatggtttgtgaacttgctcacctggaccactgtatcctgccactgtccttcctggtctcgcactgccactgcatggcctcctgtcactgtgaatcgtggcccagtctcagtttgtagtttctcattaaattggccctttcactcccccttggccctttcactcccccgccctgggcctctgctctcttgcctggcttccttcttttttgagggaaagagggtggggctgcaggcagtctactggcaggacgggaggctgagtcctcagggtctcacaccctcagtgctgatgccatgccaactgcctgggacaacaccaacacgtaaggacctaattaaaccaaaccagagtcgggtgtagaccagccctgggatttccagctgtgactgggccagggcacacgttggtctcggcagtggctgtaaggtcaccttccttcctctgatgctggtttcaaccatctatatatggcatccacgcatgggatctgcaagctggagccctcctacccgcaggcttgagcacagcatcatccagccctggggaggcgcacccttaagcaagacagactgggctgaggctgacaggcagaagactaacagagcgcagtctgcacacgcaggttctgggcgacctctggccctggccatctctgcactaactcatctgaattatgaaggtggcagtcttggtcagtagtttaaagagtttccctactttttaaccctttttgaaataaaacttttacaggtaaaaaaaaaaaaaaaaaaa

SEQ ID NO: 29918 - DNA, 1631 bp, Homo Sapiens
gccagactggagagaagcaggcctgagcctccccaaaggcagctcctggggactcccaggaccacaggctgagacgagacgcagggtggctggaggaagtgagaggtgaactcagcctgggactggctgggcgagactctccacctgctccctgggaccatcgcccaccatggctgtggcccagcagctgcgggccgagagtgactttgaacagcttccggatgatgttgccatctcggccaacattgctgacatcgaggagaagagaggcttcaccagccactttgttttcgtcatcgaggtgaagacaaaaggaggatccaagtacctcatctaccgccgctaccgccagttccatgctttgcagagcaagctggaggagcgcttcgggccagacagcaagagcagtgccctggcctgtaccctgcccacactcccagccaaagtctacgtgggtgtgaaacaggagatcgccgagatgcggatacctgccctcaacgcctacatgaagagcctgctcagcctgccggtctgggtgctgatggatgaggacgtccggatcttcttttaccagtcgccctatgactcagagcaggtgccccaggcactccgccggctccgcccgcgcacccggaaagtcaagagcgtgtccccacagggcaacagcgttgaccgcatggcagctccgagagcagaggctctatttgacttcactggaaacagcaaactggagctgaatttcaaagctggagatgtgatcttcctcctcagtcggatcaacaaagactggctggagggcactgtccggggagccacgggcatcttccctctctccttcgtgaagatcctcaaagacttccctgaggaggacgaccccaccaactggctgcgttgctactactacgaagacaccatcagcaccatcaagtctgtggcctgggagggaggggcctgtccagccttcctgccatccctacgaccaccgcccctcacatcaccttctcatgggtccctctcccactccaaagcccccagtggctcccagatgagccacaatgctgtaacaagccatcaacgtccagggtggcctggccagcctcattcccctttcccccaccccacaccccacttccagcctgatgcctccttactccagcctgtcacccccttagggacatcgcggtggaggaagatctcagcagcactcccctattgaaagacctgctggagctcacaaggcgggagttccagagagaggacatagctctgaattaccgggacgctgagggggatctggttcggctgctgtcggatgaggacgtagcgctcatggtgcggcaggctcgtggcctcccctcccagaagcgcctcttcccctggaagctgcacatcacgcagaaggacaactacagggtctacaacacgatgccatgagctgacggtgtccctggagcagtgaggggacaccagcaaaaaccttcagctctcagaggagattgggaccaggaaaacctgggaggatgggcagacttcctgtctttgaggctaatggacccgtggggcttgtaatctgtctctttctactatttacatctgatttaaataaaccattccatctgaaaggggcaaaa

SEQ ID NO: 29919 - DNA, 3952 bp, Homo Sapiens
gggatgactcggcgacgccgccaggcgcgttacccggcgtgctccgcgcggcgccagcgaagggacgtgggggaaggggcagggaggaggaagcggtggctgctgcggatgtcggtgtgagcgagcggcgcctgaacacacggcggctgccgagcgcctgacccgggcctgcgccagagcctgcaccgagctccggggccccacacccgctacggtggccctgcgcccgttgctactgaggcggcgtgctctgcattcttcgctgtccaggcctgccggctctggtgtctgctggctcctccttgctcgcctgctccctcctgcttgcctgagtcaccgccgccgccgccgccacagccatggccgagagtggtgaaagcggcggtcctccgggctcccaggatagcgccgccggagccgaaggtgctggcgcccccgcggccgctgcctccgcggagcccaaaatcatgaaagtcaccgtgaagaccccgaaggaaaaggaggaattcgccgtgcccgagaatagctccgtccagcagtttaaggaagaaatctctaaacgttttaaatcacatactgaccaacttgtgttgatatttgctggaaaaattttgaaagatcaagataccttgagtcagcatggaattcatgatggacttactgttcaccttgtcattaaaacacaaaacaggcctcaggatcattcagctcagcaaacaaatacagctggaagcaatgttactacatcatcaactcctaatagtaactctacatctggttctgctactagcaacccttttggtttaggtggccttgggggacttgcaggtctgagtagcttgggtttgaatactaccaacttctctgaactacagagtcagatgcagcgacaacttttgtctaaccctgaaatgatggtccagatcatggaaaatccctttgttcagagcatgctctcaaatcctgacctgatgagacagttaattatggccaatccacaaatgcagcagttgatacagagaaatccagaaattagtcatatgttgaataatccagatataatgagacaaacgttggaacttgccaggaatccagcaatgatgcaggagatgatgaggaaccaggaccgagctttgagcaacctagaaagcatcccagggggatataatgctttaaggcgcatgtacacagatattcaggaaccaatgctgagtgctgcacaagagcagtttggtggtaatccatttgcttccttggtgagcaatacatcctctggtgaaggtagtcaaccttcccgtacagaaaatagagatccactacccaatccatgggctccacagacttcccagagttcatcagcttccagcggcactgccagcactgtgggtggcactactggtagtactgccagtggcacttctgggcagagtactactgcgccaaatttggtgcctggagtaggagctagtatgttcaacacaccaggaatgcagagcttgttgcaacaaataactgaaaacccacaactgatgcaaaacatgttgtctgccccctacatgagaagcatgatgcagtcactaagccagaatcctgaccttgctgcacagatgatgctgaataatcccctatttgctggaaatcctcagcttcaagaacaaatgagacaacagctcccaactttcctccaacaaatgcagaatcctgatacactatcagcaatgtcaaaccctagagcaatgcaggccttgttacagattcagcagggtttacagacattagcaacggaagccccgggcctcatcccagggtttactcctggcttgggggcattaggaagcactggaggctcttcgggaactaatggatctaacgccacacctagtgaaaacacaagtcccacagcaggaaccactgaacctggacatcagcagtttattcagcagatgctgcaggctcttgctggagtaaatcctcagctacagaatccagaagtcagatttcagcaacaactggaacaactcagtgcaatgggatttttgaaccgtgaagcaaacttgcaagctctaatagcaacaggaggtgatatcaatgcagctattgaaaggttactgggctcccagccatcatagcagcatttctgtatcttgaaaaaatgtaatttatttttgataacggctcttaaactttaaaatacctgctttatttcattttgactcttggaattctgtgctgttataaacaaacccaatatgatgcattttaaggtggagtacagtaagatgtgtgggtttttctgtatttttcttttctggaacagtgggaattaaggctactgcatgcatcacttctgcatttattgtaattttttaaaaacatcaccttttatagttgggtgaccagattttgtcctgcatctgtccagtttatttgctttttaaacattagcctatggtagtaatttatgtagaataaaagcattaaaaagaagcaaatcatttgcactctataatttgtggtacagtattgcttattgtgactttggcatgcatttttgcaaacaatgctgtaagatttatactactgataattttgttttatttgtatacaatatagagtatgcacatttgggactgcatttctggaaacatactgcaataggctctctgagcaaaacacctgtaactaaaaaagtgaagataagaaaatactcttaaagctgagtatttcctaattgtatagaatcttacagcatctttgacaaacatctcccagcaaaagtgccggttagtcaggtttgttgaaaatacagtagaaaagctgattctggttatctctttaaggacaattaattgtacagacacataatgtaacattgtctcaacattcattcacagattgactgtaaattaccttaatctttgtgcagactgaaggaacactgtagtataccccaaagtgcatttgcctaggacttctcagcttctcccataggtagtttaacaggcattaaaatttgtaattgaaatgttgctttcactgaaaaagtgtcttgatgtttcagttatttttaatcgccataaaaaaatagaactatcttttgggtttatctgttttctcatgcacaggcaatacacaaatttaaaatgagttgtgagccaattgtttctgaagtgttttggtagttctattaagaaatagttaaatattgtgcttttcagagcctcagagaaagggggacggggtgggggggtggggcagcggaatctgtcctggatggggccagcttaaataatactggcaaccaagattctgttaggatttctgtgcatatagtgtagtaaagaagtatcattcaggggtgaaaaacaaagagccgttttaatgatgttgagtacatttggctgttttatagcctttttcttccctcccccaaagaattctgtttgcctaactcccaaactgttggggtggtacattcctttaggaccaattaaaacataattgagggtcagtgatacatttggctgactctggttcagtattctcttaggtgattatattctctcatgtacagttacaggaaattaaaatgttaaagtaacctaaaatgaattcagaccaataaaatcaagggaaatacaagttgattgcattacttctgtatgttgcttgctattaaaaaggttaagaggccaggttacccaccagtccttgcactgttctgacactttccccaggaggaaaacaagtacaaaggttacggtggaggcataagtagaagagattgttaagaagggtattcatgtgtctttgctctttctgctttatgcctcagtttggtttaaaaacttctgtactggcaaatggtggtattcagtgtgggatagtgtcataactaatttgacaatttattaatcataaaataacaataaatctctagcttttacacttg

SEQ ID NO: 29920 - DNA, 6031 bp, Homo Sapiens
cttttcccatcgtgtagtcaagagtctgtgccagacttgaaggctttactttgttagccatgtgtttatgaacccccagcgctttccctagatcttttggctgataatctcaaacatggaggatgcttctgaatcttcacgaggggttgctccattaattaataatgtagttctcccaggctctccgctgtctcttcctgtatcagtgacaggctgtaaaagtcatcgagtagccaataaaaaggtagaagcgaggagtgaaaagctcctcccaacagctcttcctccttcagagccgaaagtagatcagaaacttcccaggagctccgagaggcggggaagtggcggtgggacgcaattccccgcgcggagtcgggcagtggcagcgggagaagcggcagccaggggcgcggcggggccggagagaggcggtcccctgggaggacggggtctcccctcgttgcctttgtagtggagaaggtggacaagtggcagtcggcgtgatcgcagggaagcggggccggcgcgggcggccgagggtccaggcgagcccgcgggcggacgggagatgccgctgctacaccgaaagccgtttgtgagacagaagccgcccgcggacctgcggcccgacgaggaagttttctactgtaaagtcaccaacgagatcttccgccactacgatgacttttttgaacgaaccattctgtgcaacagccttgtgtggagttgtgctgtgacgggtagacctggactgacgtatcaggaagcacttgagtcagaaaaaaaagcaagacagaatcttcagagttttccagaaccactaattattccagttttatacttgaccagccttacccatcgttcgcgcttacatgaaatttgtgatgatatctttgcatatgtcaaggatcgatattttgtcgaagaaactgtggaagtcattaggaacaatggtgcaaggttgcagtgtaggattttggaagtcctccctccatcacatcaaaatggttttgctaatggacatgttaacagtgtggatggagaaactattatcatcagtgatagtgatgattcagaaacacaaagctgttcttttcaaaatgggaagaaaaaagatgcaattgatcccttactattcaagtataaagtgcaacccactaaaaaagaattacatgagtctgctattgttaaagcaacacaaatcagccggagaaaacacctattttctcgtgataaactaaagctttttctgaagcaacactgtgaaccacaagatggagtcattaaaataaaggcatcatctctttcaacgtataaaatagcagaacaagatttttcttatttcttccctgatgatccacccacatttatcttcagtcctgctaacagacgaagagggagacctcccaaacgaatacatattagtcaagaggacaatgttgctaataaacagactcttgcaagttataggagcaaagctactaaagaaagagataaacttttgaaacaagaagaaatgaagtcactggcttttgaaaaggctaaattaaaaagagaaaaagcagatgccctagaagcgaagaaaaaagaaaaagaagataaagagaaaaagagggaagaattgaaaaaaattgttgaagaagagagactaaagaaaaaagaagaaaaagagaggcttaaagtagaaagagaaaaggaaagagagaagttacgtgaagaaaagcgaaagtatgtggaatacttaaaacagtggagtaaacctagagaagatatggaatgtgatgaccttaaggaacttccagaaccaacaccagtgaaaactagactacctcctgaaatctttggtgatgctctgatggttttggagttccttaatgcatttggggaactttttgatcttcaagatgagtttcctgatggagtaaccctagaagtattagaggaagctcttgtaggaaatgacagtgaaggcccactgtgtgaattgctttttttcttcctgactgcaatcttccaggcaatagctgaagaagaagaggaagtagccaaagagcaactaactgatgctgacaccaaagatttaacagaggctttggatgaagatgcagaccccacaaaatctgcactgtctgcagttgcatctttggcagctgcatggccacagttacaccagggctgcagtttgaaaagtttggatcttgatagctgcactctttcagaaatcctcagactgcacatcttagcttcaggtgctgatgtaacatcagcaaatgcaaagtatagatatcaaaaacgaggaggatttgatgctacagatgatgcttgtatggagcttcgtttgagcaatcccagtctagtgaagaaactgtcaagcacctcagtgtatgatttgacaccaggagaaaaaatgaagatactccatgctctctgtggaaagctactgaccctagtttcaactagggattttattgaagattatgttgatatattacgacaggcaaagcaggagttccgggaattaaaagcagaacaacatcgaaaagagagggaagaagcagctgccagaattcgtaaaaggaaggaagaaaaacttaaggagcaagaacaaaaaatgaaagagaaacaagaaaaactgaaagaagatgagcaaagaaattcaacggcagatatatctattggggaggaagaaagggaagattttgatactagcattgagagcaaagacacagagcaaaaggaattagatcaagatatggtcactgaagatgaagatgacccaggatcacataaaagaggcagaagggggaaaagaggacaaaatggatttaaagaatttacaaggcaagaacagatcaactgtgtaacaagagagcctcttactgctgatgaggaagaagcattaaaacaggaacaccaacgaaaagagaaagagctcttagaaaaaatccaaagtgccatagcctgtaccaatatctttcccttgggtcgcgaccgcatgtatagacgatactggattttcccttctattcctggactctttattgaagaggattattctggtcttactgaagacatgctgttgcctagaccttcatcatttcagaataatgtacagtctcaagatcctcaggtatccactaaaactggagagcctttgatgtctgaatctacctccaacattgaccaaggtccacgtgaccattctgtgcagctgccaaaaccagtgcataagccaaatcggtggtgcttttacagttcttgtgaacagctagaccagcttattgaagctcttaattctagaggacatagagaaagtgccttaaaagaaactttgttacaagagaaaagcagaatatgtgcacagctagcccgtttttctgaagagaaatttcatttttcagacaaacctcagcctgatagcaaaccaacatatagtcggggaagatcttccaatgcatatgatccatctcagatgtgtgcagaaaagcaacttgaactaaggctgagagattttcttttagatattgaagatagaatctaccaaggaacattaggagccatcaaggttacagatcgacatatctggagatcagcattagaaagtggacggtatgagctgttaagtgaggaaaacaaggaaaatgggataattaaaactgtgaatgaagacgtagaagagatggaaattgatgaacaaacaaaggtcatagtaaaagacagacttttggggataaaaacagaaactccaagtactgtatcaacaaatgcaagtacaccacaatcagtgagcagtgtggttcattatctggcaatggcactctttcaaatagagcagggcattgagcggcgttttctgaaagctccacttgatgccagtgacagtgggcgttcttataaaacagttctggaccgttggagagagtctctcctttcttctgctagtctatcccaagtttttcttcacctatccaccttggatcgtagcgtgatatggtctaaatctatactgaatgcgcgttgcaagatatgtcgaaagaaaggcgatgctgaaaacatggttctttgtgatggctgtgataggggtcatcatacctactgtgttcgaccaaagctcaagactgtgcctgaaggagactggttttgtccagaatgtcgaccaaagcaacgttctagaagactctcctctagacagagaccatccttggaaagtgatgaagatgtggaagacagtatgggaggtgaggatgatgaagttgatggcgatgaagaagaaggtcaaagtgaggaggaagagtatgaggtagaacaagatgaagatgactctcaagaagaggaagaagtcagcctacccaaacgaggaagaccacaagttagattgccagttaaaacaagagggaaacttagctcttctttctcaagtcgtggccaacaacaagaacctggaagatacccttcaaggagtcagcagagcacacccaaaacaactgtttcttctaaaactggtagaagcctaagaaagataaactctgctcctcctacagaaacaaaatctttaagaattgccagtcgttctactcgccacagtcatggcccactgcaagcagatgtatttgtggaattgcttagtcctcgtagaaaacgcagaggcaggaaaagtgctaataatacaccagaaaatagtcccaacttccctaacttcagagtcattgccacaaagtcaagtgaacagtcaagatctgtaaatattgcttcaaaactttctctccaagagagtgaatccaaaagaagatgcagaaaaagacaatctccagagccatcgcctgtgacactgggtcgaaggagttctggccgacagggaggagttcatgaattgtctgcttttgaacaacttgttgtagaattggtacgacatgatgacagctggccttttttgaaacttgtttctaaaatccaggtcccagactactatgacatcatcaaaaagcccattgccttaaatataattcgtgaaaaagtgaataagtgtgaatataaattagcatctgagtttattgatgacattgagttaatgttttcgaactgctttgaatacaaccctcgtaacacaagtgaagcaaaagctggaactaggcttcaagcattttttcatattcaggctcaaaagcttggactccacgtcacacccagtaatgtggaccaagttagcacaccaccggctgcgaaaaagtcacgaatctgactttgtccttctaaaggatatatttgaagaaaaacaaattgttcatgaaaatggaacattaaatcatgctgtataaagcaataacaattgattgaccacatgaaagtgtggcctgcactatattctcaattttaatattaagcactcaggagaatgtaggaaagatatcctttgctacagttttgttcagtatctaataagtttgatagatgtattggatacagtactggtttacagaggtttttgtacatttttgagatcattcatgtgtccagagatcttggaaaatattttttcacccacgatttattttgttattgatgatttttttttaaagtggtggtattaagggagagttatctacatggatgagtcttccgctatagcacagtttagaaaaggtgtttatgtcttaattaattgtttgagtacattctttcaacactacacatgaatgaatccaatcttataaccttgaagtgctgtaccagtgctggctgcaggtattaagtccaagtttattaactagatatttatttagtattgagagtaatttgtgaatttgttttgtatttataaaatttatacctgaaaaatgttccttaatgttttaaaccttttactgtgtttttattcctctaacttccttaatgatcaatcaaaaaaagtaacaccctccctttttcctgacagttctttcagctttacagaactgtattataagtttctatgtataactttttaactgtacaaataaaataacattttttcaaataaaaaaaaaaaaaaaaa

SEQ ID NO: 29921 - DNA, 7585 bp, Homo Sapiens; identical to SEQ ID NO: 22443

SEQ ID NO: 29922 - DNA, 2397 bp, Homo Sapiens
gggaacaaacttcagaaggaggagagacaccgggcccagggcaccctcgcgggcggacccaagcagtgagggcctgcagccggccggccagggcagcggcaggcgcggcccggacctacgggaggaagccccgagccctcggcgggctgcgagcgactccccggcgatgcctcacaactccatcagatctggccatggagggctgaaccagctgggaggggcctttgtgaatggcagacctctgccggaagtggtccgccagcgcatcgtagacctggcccaccagggtgtaaggccctgcgacatctctcgccagctccgcgtcagccatggctgcgtcagcaagatccttggcaggtactacgagactggcagcatccggcctggagtgatagggggctccaagcccaaggtggccacccccaaggtggtggagaagattggggactacaaacgccagaaccctaccatgtttgcctgggagatccgagaccggctcctggctgagggcgtctgtgacaatgacactgtgcccagtgtcagctccattaatagaatcatccggaccaaagtgcagcaaccattcaacctccctatggacagctgcgtggccaccaagtccctgagtcccggacacacgctgatccccagctcagctgtaactcccccggagtcaccccagtcggattccctgggctccacctactccatcaatgggctcctgggcatcgctcagcctggcagcgacaagaggaaaatggatgacagtgatcaggatagctgccgactaagcattgactcacagagcagcagcagcggaccccgaaagcaccttcgcacggatgccttcagccagcaccacctcgagccgctcgagtgcccatttgagcggcagcactacccagaggcctatgcctcccccagccacaccaaaggcgagcagggcgagagatggtggggcccacgctgcccggatacccaccccacatccccaccagcggacagggcagctatgcctcctctgccatcgcaggcatggtggcaggaagtgaatactctggcaatgcctatggccacaccccctactcctcctacagcgaggcctggcgcttccccaactccagcttgctgagttccccatattattacagttccacatcaaggccgagtgcaccgcccaccactgccacggcctttgaccatctgtagttgccatggggacagtgggagcgactgagcaacaggaggactcagcctgggacaggccccagagagtcacacaaaggaatctttatttattacatgaaaaataaccacaagtccagcattgcggcacactccctgtgtggttaatttaatgaaccatgaaagacaggatgaccttggacaaggccaaactgtcctccaagactccttaatgaggggcaggagtcccagggaaagagaaccatgccatgctgaaaaagacaaaattgaagaagaaatgtagcccccagccggtacccaccaaaggagagaagaagcaatagccgaggaacttggggggatggcgaatggttcctgcccgggcccaaggggtgcacagggcacctccatggctccattattaacacaactctagcaattatggaccataagcacttccctccagcccacaagtcacagcctggtgccgaggctctcctcaccagccacccagggagtcacctccctcagcctcccgcctgccccacacggaggctctggctgtcctctttctccactccatttgcttggctctttctacacctccctcttgggcatgggctgagggctggagcgagtccctcagaaattccaccaggctgtcagctgacctcttttgcctgctgctgtgaaggtatagcaccaccccaggtcctcctgcagtgcggcatccccttggcagctgccgtcagccaggccagccccagggagcttaaaacagacattccacagggcctgggcccctgggaggtgaggtgtggtgtgcggcttcacccagggcagaacaaggcagaatcgcaggaaacccgcttccccttcctgacagctcctgccaagccaaatgtgcttcctgcagctcacgcccaccagctactgaagggacccaaggcaccccctgaagccagcgatagagggtccctctctgctccccagcagctcctgcccccaaggcctgactgtatatactgtaaatgaaactttgtttgggtcaagcttccttctttctaacccccagactttggcctctgagtgaaatgtctctctttgccctgtggggcttctctccttgatgcttctttctttttttaaagacaacctgccattaccacatgactcaataaaccattgctcttcaaaaaaaaaaaaaaaaaa

SEQ ID NO: 29923 - DNA, 1793 bp, Homo Sapiens
tcgctctccccatcgagggacaaacttttcccaaacccgatccgagcccttggaccaaactcgcctgcgccgagagccgtccgcgtagagcgctccgtctccggcgagatgtccgagcgcaaagaaggcagaggcaaagggaagggcaagaagaaggagcgaggctccggcaagaagccggagtccgcggcgggcagccagagcccagccttgcctccccgattgaaagagatgaaaagccaggaatcggctgcaggttccaaactagtccttcggtgtgaaaccagttctgaatactcctctctcagattcaagtggttcaagaatgggaatgaattgaatcgaaaaaacaaaccacaaaatatcaagatacaaaaaaagccagggaagtcagaacttcgcattaacaaagcatcactggctgattctggagagtatatgtgcaaagtgatcagcaaattaggaaatgacagtgcctctgccaatatcaccatcgtggaatcaaacgagatcatcactggtatgccagcctcaactgaaggagcatatgtgtcttcagagtctcccattagaatatcagtatccacagaaggagcaaatacttcttcatctacatctacatccaccactgggacaagccatcttgtaaaatgtgcggagaaggagaaaactttctgtgtgaatggaggggagtgcttcatggtgaaagacctttcaaacccctcgagatacttgtgcaagtgccaacctggattcactggagcaagatgtactgagaatgtgcccatgaaagtccaaaaccaagaaaaggcggaggagctgtaccagaagagagtgctgaccataaccggcatctgcatcgccctccttgtggtcggcatcatgtgtgtggtggcctactgcaaaaccaagaaacagcggaaaaagctgcatgaccgtcttcggcagagccttcggtctgaacgaaacaatatgatgaacattgccaatgggcctcaccatcctaacccaccccccgagaatgtccagctggtgaatcaatacgtatctaaaaacgtcatctccagtgagcatattgttgagagagaagcagagacatccttttccaccagtcactatacttccacagcccatcactccactactgtcacccagactcctagccacagctggagcaacggacacactgaaagcatcctttccgaaagccactctgtaatcgtgatgtcatccgtagaaaacagtaggcacagcagcccaactgggggcccaagaggacgtcttaatggcacaggaggccctcgtgaatgtaacagcttcctcaggcatgccagagaaacccctgattcctaccgagactctcctcatagtgaaagacataaccttatagctgagctaaggagaaacaaggcacacagatccaaatgcatgcagatccagctatcagcaactcatcttagatcttcttccattccccatttgggcttcattctctaagaccccttggcctttaggaaggtatgtgtcagccatgaccaccccggctcgtatgtcacctgtagatttccacacgccaagctcccccaaatcgcccccttcggaaatgtctccacccgtgtccagcatgacggtgtccatgccttccatggcggtcagccccttcatggaagaagagagacctctacttctcgtgacaccaccaaggctgcgggagaagaagtttgaccatcaccctcagcagttcagctccttccaccacaaccccacgcgcccacgcgtccgcggacgcgtgg

SEQ ID NO: 29924 - DNA, 5647 bp, Homo Sapiens
gtagtcgctgcacagtctgtctcttcgccggttcccggccccgtggatcctacttctctgtcgcccgcggttcgccgccccgctcgccgccgcgatgccagtgtttcatacgcgcacgatcgagagcatcctggagccggtggcacagcagatctcccacctggtgataatgcacgaggagggcgaggtggacggcaaagccattcctgacctcaccgcgcccgtggccgccgtgcaggcggccgtcagcaacctcgtccgggttggaaaagagactgttcaaaccactgaggatcagattttgaagagagatatgccaccagcatttattaaggttgagaatgcttgcaccaagcttgtccaggcagctcagatgcttcagtcagacccttactcagtgcctgctcgagattatctaattgatgggtcaaggggcatcctctctggaacatcagacctgctccttaccttcgatgaggctgaggtccgtaaaattattagagtttgcaaaggaattttggaatatcttacagtggcagaggtggtggagactatggaagatttggtcacttacacaaagaatcttgggccaggaatgactaagatggccaagatgattgacgagagacagcaggagctcactcaccaggagcaccgagtgatgttggtgaactcgatgaacaccgtgaaagagttgctgccagttctcatttcagctatgaagatttttgtaacaactaaaaactcaaaaaaccaaggcatagaggaagctttaaaaaatcgcaattttactgtagaaaaaatgagtgctgaaattaatgagataattcgtgtgttacaactcacctcttgggatgaagatgcctgggccagcaaggacactgaagccatgaagagagcattggcctccatagactccaaactgaaccaggccaaaggttggctccgtgaccctagtgcctccccaggggatgctggtgagcaggccatcagacagatcttagatgaagctggaaaagttggtgaactctgtgcaggcaaagaacgcagggagattctgggaacttgcaaaatgctagggcagatgactgatcaagtggctgacctccgtgccagaggacaaggatcctcaccggtggccatgcagaaagctcagcaggtatctcagggtctggatgtgctcacagcaaaagtggaaaatgcagctcgcaagctggaagccatgaccaactcaaagcagagcattgcaaagaagatcgatgctgctcagaactggcttgcagatccaaatggtggaccggaaggagaagagcagattcgaggtgctttggctgaagctcggaaaatagcagaattatgtgatgatcctaaagaaagagatgacattctacgttcccttggggaaatatctgctctgacttctaaattagcagatctacgaagacaggggaaaggagattctccagaggctcgagccttggccaaacaggtggccacggccctgcagaacctgcagaccaaaaccaaccgggctgtggccaacagcagaccggccaaagcagctgtacaccttgagggcaagattgagcaagcacagcggtggattgataatcccacagtggatgaccgtggagtcggtcaggctgccatccgggggcttgtggccgaagggcatcgtctggctaatgttatgatggggccttatcggcaagatcttctcgccaagtgtgaccgagtggaccagctgacagcccagctggctgacctggctgccagaggggaaggggagagtcctcaggcacgagcacttgcatctcagctccaagactccttaaaggatctaaaagctcggatgcaggaggccatgactcaggaagtgtcagatgttttcagcgataccacaactcccatcaagctgttggcagtggcagccacggcgcctcctgatgcgcctaacagggaagaggtatttgatgagagggcagctaactttgaaaaccattcaggaaagcttggtgctacggccgagaaggcggctgcggttggtactgctaataaatcaacagtggaaggcattcaggcctcagtgaagacggcccgagaactcacaccccaggtggtctcggctgctcgtatcttacttaggaaccctggaaatcaagctgcttatgaacattttgagaccatgaagaaccagtggatcgataatgttgaaaaaatgacagggctggtggacgaagccattgataccaaatctctgttggatgcttcagaagaagcaattaaaaaagacctggacaagtgcaaggtagctatggccaacattcagcctcagatgctggttgctggggcaaccagtattgctcgtcgggccaaccggatcctgctggtggctaagagggaggtggagaattccgaggatcccaagttccgtgaggctgtgaaagctgcctctgatgaattgagcaaaaccatctccccgatggtgatggatgcaaaagctgtggctggaaacatttccgaccctggactgcaaaagagcttcctggactcaggatatcggatcctgggagctgtggccaaggtcagagaagccttccaacctcaggagcctgacttcccgccgcctccaccagaccttgaacaactccgactaacagatgagcttgctcctcccaaaccacctctgcctgaaggtgaggtccctccacctaggcctccaccaccagaggaaaaggatgaagagttccctgagcagaaggccggggaggtgattaaccagccaatgatgatggctgccagacagctccatgatgaagctcgcaaatggtccagcaagccgggcatcccagccgctgaggtgggtataggtgttgtagctgaggcagatgcggccgatgctgctggcttccctgtcccccctgacatggaagacgattacgaacctgagctgctgttaatgccatccaatcagccggtcaaccagcccattctggccgcggctcagtccttgcatcgggaagctaccaagtggtctagtaagggcaatgacatcattgcagcagccaagcgcatggctctgctgatggctgagatgtctcggctggtaagagggggcagtggtaccaagcgggcactcattcagtgtgccaaggacatcgccaaggcctcagatgaggtgactcggttggccaaggaggttgccaagcagtgcacagataaacggattagaaccaacctcttacaggtatgtgagcgaatcccaaccataagcacccagctcaaaatcctgtccacagtgaaggccaccatgctgggccggaccaacatcagtgatgaggagtctgagcaggccacagagatgctggttcacaatgcccagaacctcatgcagtctgtgaaggagactgtgcgggaagctgaagctgcttcaatcaaaattcgaacagatgctggatttacactgcgctgggttagaaagactccctggtaccagtaggcacctggctgagcctggctggcacagaaacctctactaaaaagaaggaaaatgatctgagtcccaggagctgcccagagttgctgggagctgaaaaatcacatcctggcctggcacatcagaaaggaatgggggcctcttcaaattagaagacatttatactcttttttcatggacactttgaaatgtgtttctgtataaagcctgtattctcaaacacagttacacttgtgcaccctctatcccaataggcagactgggtttctagcccatggacttcacataagctcagaatccaagtgaacactagccagacactctgctctgcccttgttccctaggggacacttccctctgtttctctttccttggctcccattcactcttccagaatcccaagacccagggcccaggcaaatcagttactaagaagaaaattgctgtgcctcccaaaattgttttgagctttccatgttgctgccaaccataccttccttccctgggctgtgctacctgggtccttttcagaagtgagctttgctgctacaggggaaggtggcctctgtggagccccagcatatgggggcctggattcatttcctgcccttcctcagtttaatccttctagtttcccacaatataaaactgtacttcactgtcaggaagaaatcacagaatcatatgattctgcttttaccatgcccctgagcaatgtctgtgctagggaaacttcccgtcccatatcctgcctcagcccgccaaggtagccatcccatgaacacactgtgtcctggtgctctctgccactggaagggcagagtagccagggtgtggccctgccatcttcccagcagggccactcccggcactccatgcttagtcactgcctgcagaggtctgtgctgaggccttatcattcattcttagctcttaattgttcattttgagctgaaatgctgcattttaattttaaccaaaacatgtctcctatcctggtttttgtagccttcctccacatcctttctaaacaagattttaaagacatgtaggtgtttgttcatctgtaactctaaaagatcctttttaaattcagtcctaagaaagaggagtgcttgtcccctaagagtgtttaatggcaaggcagccctgtctgaaggacacttcctgcctaagggagagtggtatttgcagactagaattctagtgctgctgaagatgaatcaatgggaaatactactcctgtaattcctacctccctgcaaccaactacaaccaagctctctgcatctactcccaagtatggggttcaagagagtaatgggtttcatatttcttatcaccacagtaagttcctactaggcaaaatgagagggcagtgtttcctttttggtacttattactgctaagtatttcccagcacatgaaaccttattttttcccaaagccagaaccagatgagtaaaggagtaagaaccttgcctgaacatccttccttcccacccatcgctgtgtgttagttcccaacatcgaatgtgtacaacttaagttggtcctttacactcaggctttcactatttcctttataatgaggatgattattttcaaggccctcagcatatttgtatagttgcttgcctgatataaatgcaatattaatgcctttaaagtatgaatctatgccaaagatcacttgttgttttactaaagaaagattacttagaggaaataagaaaaatcatgtttgctctcccggttcttccagtggtttgagacactggtttacactttatgccggatgtgcttttctccaatatcagtgctcgagacacagtgaagcaaattaaaaaaaaaaaaaaaaaaaatccctgaatgatgattagagacatcaccgctaaaaaactacatttataagctaggatttgttatatgcaaatattttctgcctcttcttttgttctgtttaaaacaataaaatgcatttgtataaaaaaaaaaaaaaaaaaaaaaaaaaaaaaaaaaaaaaaaaaaaaaaaaaaaaaaaaaaaaaaaaaaaaaaaaaaaaaaaaaaaaaaaaaaaaaaaaaaaaaaaaaaaaaaaaaaaaaaaaaaaaaaaaaaaaaaaaaaaaaaaaaaaaaaaaaaaaaaaaaa

SEQ ID NO: 29925 - DNA, 4422 bp, Homo Sapiens
cgcagagcgcgcacccaagcggccggacctccccgactcccgggccgcccccgtctcgcgccctgcctccctccttcggccttcacctacccgcctccggattggccgctaggaatcccgcccctctaaagccctgcctgctattggtcacgattttataatcaatggataaagtgggaaaaatgtggaataacttcaaatacaggtgtcagaatctcttcggtcatgagggaggaagccgtagtgaaaatgtggacatgaactccaacagatgtttgtctgtcaaagagaaaaacatcagcataggagactcaactcctcagcaacaaagcagtcccttaagagaaaatattgccttacaactgggattaagcccttcgaagaattcttcaaggagaaatcaaaattgtgccacagaaatccctcaaattgttgaaataagcatcgaaaaggataatgattcttgtgttaccccaggaacaagacttgcacgaagagattcctactctcgacatgctccatggggtgggaagaaaaaacattcctgttctacaaagacccagagttcattggatgctgataaaaagtttggtagaactcgaagtggacttcaaaggagagagaggcgctacggcgtaagttctgtacacgacatggacagtgtttccagcagaactgtaggaagtcgctctctaagacagaggttgcaggatactgtgggcttgtgttttcccatgagaacttacagcaagcagtcaaagcctctcttttccaataaaagaaaaatccatctctctgaattaatgcttgagaaatgcccttttcctgctggctcagatttagcccaaaaatggcatttgattaaacagcatacagctcctgtgagcccacattcaacattttttgatacatttgatccatctttggtttctacagaagatgaagaagataggcttagagagagaaggcggcttagtattgaagaaggggttgatccccctcccaatgcacaaatacatacatttgaagctactgcacaggttaatccattatataaactgggaccaaaattagctcctggaatgactgaaataagtggggacagttctgcaattccacaagctaattgtgactcggaagaggatacaaccaccctgtgtttgcagtcacggaggcagaagcagcgtcagatatctggagacagccatacccatgttagcagacagggagcttggaaagtccacacacagattgattacatacactgcctcgtgcctgatttgcttcaaattacagggaatccctgttactggggagtgatggaccgttatgaagcagaagcccttctcgaagggaaacctgaaggcacgtttttgctcagggactctgcgcaagaggactacctcttctctgtgagcttccgccgctacaacagatccctgcatgcccgaattgagcagtggaatcacaactttagtttcgacgcccatgacccgtgtgtatttcactcctccactgtaacgggacttttagaacattataaagatcccagttcgtgcatgttttttgaaccattgcttactatatcactaaataggactttcccttttagcctgcagtatatctgtcgcgcggtaatctgcaggtgcactacgtatgatggaattgatgggctccctctaccctcaatgttacaggattttttaaaagagtatcattataaacaaaaagttagagttcgctggttggaacgagaaccagtcaaggcaaagtaaactctccggtccccaaaggttgttaactaggtccgctttcatgtgcatcagacagtacacctatagcaagcacacgtagcagtgttaggctttttcatacagtatgtaagcttagtgttagtatctgtcagatgctacctgctgttacttattcagataaacatggtgcctattggaacaatagcggatagagctacaggtgttcagtaagactacaaaaacattttgcctatttcgctaacagtttggtttttaatggctgtggtatttgagtgaggcaactctggggcatttgttatgaagaattctatttcttactgaagaacaaattattaatattggatgagtatttcaacagtgtgactaatgtttgaaattattttttctaagagtttttctataaccttccaaaagtcgtgatgtttgtagttactataaatcaagctttggaagtccaaaaagaataaaagactgccttccttttagaaaaaaatgcaattttctggccacaagggcatagtgcagttcacttacgtgttgatgtagtttataatcagacgccttttctcttctgcaaaaggtactgttaagtaaaccagattttctaaataggcattcttaaaatttcagacttacaaagctagtagtagaattttattgaaaggcctaggtattaattttttaaatgagtgctttaacttaaaacaggcgtttggaatagctgctgcaatgtagtcttgtgtgtgatttttttttaagttgatgtgcagtctaattgttgtttcataaaagttggatctgttcctatgcccaggatgattttgtgaaccgtgaagtacgtgagactagaagacgcccaaacaagtcagataatagtaactacaatggttgctgatgttgagattattgttgaactataattaataatttggatggcagaatttatctcttttttgtaaactctcataactgaattgcttaagtataatttatagaatttcagtgcagttcattcttaatggaaaatctgaaacctaaattgcagatttaaaaggtactgtacaaccattatatctgtaaataacttagcacctttttgtcacttagaataatatgtactactacttgagtgagcgcttttggaagttatatcaagttctagtgtttgcttcttagtaactgaactgaatttacagttctgtcctagacattttgcactaaagtagccgaatccactctcatgtcttttcgttaatgtgctctgtaccactggtgagtgctccatagtttccttacctgctgctacagaatgttattttacatccctatggctattgccaaggctacaaaaaaggaaagctatatttgtatgcaacactaaccttttgactgctaatgtatgtttctgcttgctgtgccttgttatggctgctttttttgtgctaataaagtatgtttggtgttctccttgtatatctgctgttttatacatttgcaacaatttctcttgtaaatggaatggtttggggtttttaaataagcattaactaacaacctttctatagttaatgcagagttaatgaacagtctaatattgacttatcagaataagctaactctaaatttaatgctctacatcttatcagtcataattatatatactgtggaacagtatctgtagttactgcaaattactgtacagtttaggttataacagaaaactgacagagaagtaataaacctattgatttctctgcttataaatgaaagattgaaactatccaatgacatattatagtaaatgagtatctgtaacctcccactgcatcagaagcaggttaaatgaagtcttgtgaatttgtaatagatcagtaccatttattggtttggggaccatcttaattaaaaataaatgcccaaaatgtagaactttaaccaaagacttgtcccttttaaagcaaaatggggattgaagggacttataatttctgttgtttctaattaaagtccctgaagatcatataccaaagtgtttgagaacttcatccaaacctactttaaagcattatgtgcaattaagttgttatgacataattatattgcctaattgttgggtcttttttcttgagcttataatgtacctggaaaataaacctcttgagaaaaagaaaagttcatactgattattggaaaaggactatatatgtgagcaagattgtgttttagagaggaaacttgaaactccaagaaagcacttgatgtttttatatgcttgtagcaaattgatgttctaactgtagttttatagaaagtattaatgcttttatgtatttcaaaactttcatatgttaaatggaaattgttttaaatgtgtttgagtttatgtaagcatgtatacactgtgctaaaagtcacatgtttcagtttgtgtataatattaatatgcaatttttggtttaaatttttgtcttaaaatattagtggcttacattttaaaaaagaaaaatcaccagcatgaacttgcacctaagtctatattcactgtgtccttttctgaatcccattgtagcctgtcaactaaatttgagtgttaacggtctttttaaagtgcatttaaatacaaaccaggaatttctttagaagttga

SEQ ID NO: 29926 - DNA, 7184 bp, Homo Sapiens
cggcgcggcgggagcagagatctgcggccgtttgcagcttgcggtagggaggcgtggtggtctgaagcctccgagcagccgcggccatggcggatgtaaccgcccgtagtctgcaatacgagtacaaggcgaactcgaatcttgtgctccaagctgaccgttctctcattgaccggacccgccgggatgaacccacaggagaggtgctgtcccttgttgggaagctggagggcacccgtatgggagacaaggctcaacggaccaaaccgcagatgcaggaggaaagaagagccaagcgaagaaagcgtgatgaggaccggcatgacatcaacaagatgaagggttatactctgctgtcggagggcattgatgagatggtgggcatcatctacaagcccaaaactaaagagactcgggagacctatgaggtgctactcagcttcatccaggctgctcttggggaccagccacgtgatatcctttgtggggcagctgatgaagttctagctgttctaaagaatgaaaagctgcgggacaaggaaaggcgaaaggagattgacctgctgctgggtcaaacagatgataccagataccatgtgctagtgaacctgggcaaaaagatcacagactatggtggagataaggaaatccaaaatatggatgacaacattgatgagacatacggtgtgaatgtgcagtttgagtctgatgaggaggaaggtgatgaagacgtatacggggaggttcgagaagaggcatctgatgatgacatggaaggggacgaggctgtcgtgcgctgcaccctctcggctaatctcgtagcctcaggtgaactgatgagttccaagaagaaggatttgcaccctcgggatattgatgcattttggctgcagcggcagctcagtcgtttctatgatgatgccatcgtgtcgcagaagaaggcagatgaagtattggagattttgaagacggccagtgatgatcgggaatgtgaaaatcagctggttctgctgcttggtttcaacacctttgatttcattaaagtgttgcggcagcacaggatgatgattttatactgtaccttgctggccagtgcacaaagtgaagctgaaaaggaaaggattatgggaaagatggaagctgacccagagctatccaagttcctctaccagcttcatgaaaccgagaaggaggatctgatccgagaggaaaggtcccggagagagcgagtgcgtcagtctcgaatggacacagatctggaaaccatggatctcgaccagggtggagaggcactggctccacggcaggttctggacttggaggacctggtttttacccaagggagccactttatggccaataaacgctgtcagcttcctgatggatccttccgtcgccagcgtaagggctatgaagaggtgcatgtgcctgctctgaagcccaagccctttggctcagaagaacaactgcttccagtggaaaagctgccaaagtatgcccaggctgggtttgagggcttcaaaacactgaatcggatccagagtaagctctaccgtgctgcccttgagacggatgagaatctgctgctgtgtgctcctactggtgctgggaagaccaacgtggccctgatgtgcatgctccgagagattgggaaacacataaacatggacggcaccatcaatgtggatgacttcaagattatctacattgcccccatgcgctccttggtgcaggagatggtgggcagctttggaaagcgcctggccacttatggcatcactgttgctgaactgactggggaccaccagctgtgcaaagaagagatcagtgccactcagatcatcgtctgcacccccgagaagtgggacatcatcacccgcaagggtggtgagcgcacctacacccagctggtgcggctcatcattctggatgagattcatcttctccacgatgacagaggtcctgtcttagaagctttagtggccagggccatccgaaacattgagatgacccaagaggatgtccgactcattggtctcagtgccaccctacccaactatgaagatgtagccacctttctacgtgttgaccctgccaagggtctcttttactttgacaacagcttccgtccagtgcctctggaacagacatatgtgggtatcacagagaaaaaagctatcaagcgtttccagatcatgaatgaaatcgtctatgaaaaaatcatggaacatgctggaaaaaatcaggtgctggtgtttgtccactcccggaaggagactggaaagacagccagggccatccgggacatgtgcctagaaaaggacactctgggtctgtttctgagggagggctcagcctccacagaagtcctgcgaacagaagctgagcagtgcaagaacctagagctgaaggatcttctgccttatggctttgctattcatcacgcaggcatgaccagggttgaccgaacactcgtggaggatctttttgctgataaacatattcaggttttagtttccacagcaactctagcttggggtgtgaatctccctgcacatacagtcatcatcaaaggcacccaggtgtacagtccagagaaggggcgttggacagaactgggagcactggacattctgcagatgctgggacgtgccggaagaccccagtatgacaccaagggtgaaggcatactcatcacatctcatggggagctacagtactacctgtccctcctcaatcaacaacttcctattgaaagccagatggtttcaaagcttcctgacatgctcaatgcagaaatcgtgctaggaaatgtccagaatgccaaggatgcggtgaactggctgggctatgcctacctctatatccgaatgctgcgatccccaaccctctatggcatctctcatgatgacctcaagggagatcccctgctggaccagcgccgactagatctggttcatacagctgccctgatgctggacaagaacaatctggtcaagtacgacaagaagacgggcaacttccaggtgacagaactgggccgtatagccagccactactacatcaccaatgatacagtgcagacttacaaccagctgctgaagcccaccctgagtgagattgagcttttcagggtcttctcattgtcctctgagttcaagaacatcacagtgagagaggaggagaagctggagctgcagaagttgctggagagggtgcctatccctgtaaaggagagcattgaggaacccagtgctaagatcaacgttcttctgcaagccttcatctcacagctgaaattggagggctttgcactgatggctgacatggtgtatgtcacacagtcggctggccggttgatgcgagcgatatttgaaattgtcctgaaccgaggttgggcacagcttacagacaagaccctgaacctctgcaagatgatcgacaaacgcatgtggcagtccatgtgtcctctgcgccagttccggaaactccctgaggaagtagtgaagaagattgagaagaagaatttcccctttgagcgtctgtacgacctgaatcataatgagattggggagcttatccgcatgccaaagatggggaagaccatccacaaatatgtccatctgtttcccaagttggagttgtcagtgcacctgcagcctatcacacgctccaccctgaaggtggagctgaccatcacgccagacttccagtgggatgaaaaggtgcatggttcatccgaggctttttggattctggtggaggatgtggacagcgaggtgattctgcaccatgagtattttctcctcaaggccaagtacgcccaggacgagcacctcattacattcttcgtgcctgtctttgaaccgctgccccctcagtacttcatccgagtggtgtctgaccgctggctctcttgtgagacccagctgcctgtctccttccggcacctgatcttgccggagaagtacccccctccaaccgaacttttggacctgcagcccttgcccgtgtctgctctgagaaacagtgcctttgagagtctttaccaagataaatttcctttcttcaatcccatccagacccaggtgtttaacactgtatacaacagtgacgacaacgtgtttgtgggggcccccacgggcagcgggaagactatttgtgcagagtttgccatcctgcgaatgctgctgcagagctcggaggggcgctgtgtgtacatcacccccatggaggccctggcagagcaggtatacatggactggtacgagaagttccaggacaggctcaacaagaaggtggtactcctgacaggcgagaccagcacagacctgaagctgctgggcaaagggaacattatcatcagcacccctgagaagtgggacatactttcccggcgatggaagcagcgcaagaacgtgcagaacatcaacctcttcgtggtggatgaggtccaccttatcgggggcgagaatgggcctgtcttagaagtgatctgctcccgaatgcgctacatctcctcccagattgagcggcccattcgcattgtggcactcagctcttcgctctccaatgccaaggatgtggcccactggctgggctgcagtgccacctccaccttcaacttccatcccaatgtgcgtcccgtccccttggagctgcacatccagggcttcaacatcagccatacacaaacccgcctgctctccatggccaagcctgtgtaccatgctatcaccaagcactcgcccaagaagcctgtcattgtctttgtgccgtctcgcaagcagacccgcctcactgccattgacatcctcaccacctgtgcagcagacatccaacggcagaggttcttgcactgcaccgagaaggatctgattccgtacctggagaagctaagtgacagcacgctcaaggaaacgctgctaaatggggtgggctacctgcatgaggggctcagccccatggagcgacgcctggtggagcagctcttcagctcaggggctatccaggtggtggtggcttctcggagtctctgctggggcatgaacgtggctgcccacctggtaatcatcatggatacccagtactacaatggcaagatccacgcctatgtggattaccccatctatgacgtgcttcagatggtgggccacgccaaccgccctttgcaggacgatgaggggcgctgtgtcatcatgtgtcagggctccaagaaggatttcttcaagaagttcttatatgagccattgccagtagaatctcacctggaccactgtatgcatgaccacttcaatgctgagatcgtcaccaagaccattgagaacaagcaggatgctgtggactacctcacctggacctttctgtaccgccgcatgacacagaaccccaattactacaacctgcagggcatctcccatcgtcacttgtcggaccacttgtcagagctggtggagcagaccctgagtgacctggagcagtccaagtgcatcagcatcgaggacgagatggacgtggcgcctctgaacctaggcatgatcgccgcctactattacatcaactacaccaccattgagctcttcagcatgtccctcaatgccaagaccaaggtgcgagggcttatcgagatcatctccaatgcagcagagtatgagaacattcccatccggcaccatgaagacaatctcctgaggcagttggctcagaaggtcccccacaagctgaataaccctaagttcaatgatccgcacgtcaagaccaacctgctcctgcaggctcacttgtctcgcatgcagctgagtgctgagttgcagtcagatacggaggaaatccttagtaaggcaatccggctcatccaggcctgcgtggatgtcctttccagcaatgggtggctcagccctgctctggcagctatggaactggcccagatggtcacccaagccatgtggtccaaggactcatacctgaagcagctgccacacttcacctctgagcatatcaaacgttgcacagacaagggagtggagagtgttttcgacatcatggagatggaggatgaagaacggaacgcgttgcttcagctgactgacagccagattgcagatgtggctcgcttttgtaaccgctaccctaatatcgaactatcttatgaggtggtagataaggacagcatccgcagtggcgggccagttgtggtgctggtgcagctggagcgagaggaggaagtcacaggccctgtcattgcgcctctcttcccgcagaaacgtgaagagggctggtgggtggtgattggagatgccaagtccaatagcctcatctccatcaagaggctgaccttgcagcagaaggccaaggtgaagttggactttgtggccccagccactggtgcccacaactacactctgtacttcatgagtgacgcttacatgggatgtgaccaggagtacaaattcagcgtggatgtgaaagaagctgagacagacagtgattcagattgagtcctgaggcatttacttttgggtaaaggagagttgagcctgaattaggaatgtgtacattgtaggaatcctggttgtggggaccaggtctgtgggcctcaggtctggccagccagggctggtgctgtccccgcctacctccacttcctttcccttgctcactctggatccagtgacagcaggtgtcatgggtcaagcataaatcatatatagcattttcaggcatgttcctggtagttcttttgagtctgacattctaataaaataatttgtagaaaccatttgtctttgtagtgattccaaattaaaagttttctttctccaacctgagggcacggccaaaaagatctggttattttttagccaggaacgtgcttgttaatgagtatgtctggaggacagacctgctcattaggtgtgctgtcccctgtagcctcgtgagtcagcccagaggagggtacatgcgactgtggcctggcctcagtggtacccacacatcagcactaccacaagaaccaacactgagcctcggaagctagatcacaggttaggggtttctctagatgggggttctgaaatttgcagtgtctgctcctgggaggcagcaccagaaagggcactgaaatgtactagctggatgtgacccagtcttaataaacaggttttctaatccagaaaaaaaaaaaa

SEQ ID NO: 29927 - DNA, 2367 bp, Homo Sapiens; identical to SEQ ID NO: 24214

SEQ ID NO: 29928 - DNA, 2038 bp, Homo Sapiens
gcggccgcggccgtgagcctgcccccaactcgccctcagccggctggccggcgcggccatggaggtctacatcccgtcctttcgctatgaagagagcgacctggagcggggatacacggtgtttaagatagaagtgctaatgaatggaagaaaacattttgttgaaaagagatacagcgaatttcatgctttgcacaaaaagcttaagaaatgtataaaaactccagaaatcccttctaaacatgttaggaactgggtccccaaagtcttggaacagcgacgacaaggcttggaaacatacttacaggctgtcattttagaaaatgaagaacttcccaaactgtttcttgatttcctaaatgtgcgacacttgccctctctaccaaaggcagaaagttgtggatcttttgatgaaacagagtctgaagagtcaagcaaactgtcccaccagcctgtgctgctgttcctcagggatccatatgtcttgcctgcagccagcgattttccaaatgtggttattgaaggagtcctccatgggatattttaccctcatctacagcccaggtagaaatcctacatggctaaaagaagcagaagcaagtttcgaagtcacagtcaaggaaatcaatacctaccaatttaacctaaacgctatgatatataacagctctagctagtggtaaagtgcacagtcccagcttaattcagggcagggacatttccattagaatggtgctcttaaaaatagaaactgaaccggggcggtggtcaggctaaggccaagtgtttaagaagtagagtgtagctgccagcgtagaaacccatgaaaaggaggccacaggagattcctgggagcactgggtgtagcaaaacaaagccactctctgcttcagtcgcaccatttgctaattgaaaatcatatcctgaatcatactgagactgatcaactttggtagcttttttgttcagatcttatgacacactactcttctcaccgtgagattttctcagccagtgatagtacattctgaaatgctggcaccaggagacggccacagacacacactgctaaatgtgaagatggaactaaactggaaattaaattatactgacaatattatggcatttttaagatcatggcattttaatttacattagagtggagttgcatcatactcaggggttagcttccaaggtcagtacataggtaaaatgggctattaggatgatccttgaaagccctttagaagggtgccatgttggaaacctgtacatcacaacaagtagcttttcctcctatgttggaaaaaaagactgtttctttgtttgaagaccaagtgaagttgttggtgtttgtttaggggccattttgttaaaaaaaaaaagcacataacttttaacactagaatcagcccgcaagatgcttgccccgctagtggcagatgtgaactgacaaggagtgaagcgcccacccagcggatggacagcacccacctgggtttactcaagggtgtgcattcattttaggtgggatcgccacaggatttcatgttattttccttacggcttccttttcactgacctcatttgttgagttaatgtaagttaaatgtgtctatgatataactccactgtacatcatcctttgagtagtaaaggataaaagcatatatactacctatatgtatgtgctgtatgtgggcatttcattgagatctaattaatagctagcctatttatggttattcgttttagtaagttctgtgggagcaaggtatttaaaatcaaaactaataactacatcatggtttttgattaggatctaaatattcaggttttaagcctgctgcaaacttttaaaatattatgatagattctgtactacatgtgggaaacaagcaagaactaaataatcaaatgttgtcaaccaaaagtaatagttgggtattggagatttttttaaaatgtttttatgttattagctatttggagttaaataaaaacagaacaaggaaaaaaaaaaaaaaaaaaaaaaaaa

SEQ ID NO: 29929 - DNA, 616 bp, Homo Sapiens
gaccggaccatggcgcaggggcagcgcaagtttcaggcgcacaaacccgcaaagagtaagacggcagcggcagcctctgaaaagaatcggggcccaagaaaaggcggtcgtgttatcgctcccaagaaggcgcgcgtcgtgcagcagcaaaagctcaagaagaacctagaagtcggaatccggaagaagatcgaacatgacgtggtgatgaaagccagcagcagcctgcccaagaagctggcactgctgaaggccccagccaagaagaaaggggcagctgccgccacctcctccaagacaccttcctgaggacgctggccccagtgcaggccaacatcccaccccctacctccatatgggaccttgcaagtcatcccacaggctgcactgtcaggaagaggaccctgtcccccagcactgggcttcacctagaacttcagtgggggccaagggtgctgagaacccagcaatgaccaggaagatacagtcactaacttcatctgtccccgtgccccttcccaggtcctgcctccacaggtttaacccagaacaataaacctggctttgtcagtaaaaaaaaaaaaaaaaaaaaaaaaaaaaaaaaaaaaaaaaaaaa

SEQ ID NO: 29930 - DNA, 3112 bp, Homo Sapiens
agccggggattgccggcgccaggtgctgggggcgactcggacagcgggagcgtggggtggagtaggatggagtctccctcccgagctgggggtgtgggcctaggaaaggctgcttcgccgctgtgttcggagagctctggatactgcggggcttttccgcggaggagcgcccgccggcatctgcatctgggaccgacctcctgggctggctgatcaaagaggaagcagcagcaatgtctgctgtgggggctgcaactccatacctgcatcatcctggtgatagtcacagtggccgagtgagtttcttgggggcccagcttcctccagaggtggcagcaatggcccggctactaggggacctagacaggagcacgttcagaaagttgctgaagtttgtggtcagcagcctgcagggggaggactgccgagaggctgtgcagcgtcttggggtcagcgccaacctgccggaggagcagctgggtgccctgctggcaggcatgcacacactgctccagcaggccctccgtctgccccccaccagcctgaagcctgacaccttcagggaccagctccaggagctctgcatcccccaagacctggtcggggacttggccagcgtggtatttgggagccagcggcccctccttgattctgtggcccagcagcagggggcctggctgccgcatgttgctgactttcggtggcgggtggatgtagcaatctccaccagtgccctggctcgctccctgcagccgagcgtcctgatgcagctgaagctttcagatgggtcagcataccgctttgaggtccccacagccaagttccaggagctgcggtacagcgtggccctggtcctaaaggagatggcagatctggagaagaggtgtgagcgcagactgcaggactgacccctcacttgaccagtcccattcagatccggcttggacaggcacctgagatggtgccaaagtgcagctgactcttcccacgacagccctgcccttcccatgaggcaggctcttcaagcgatatctgaagtggctctgatgcctttgccacactcctcgcatctctgggacatcccttccgcactctctccctgactttcaagaggctgacaatccaggccgctgcttcccagctccttacatccctggggtgcgtccttggtgaaggtcttgggaaccacagtctcctcattcaaacagttattttggaaggtaaagcctgtcactttcagcccgggactgcccagatgactgtctaaccagacctcagaatcagaaacgtctccaaagccaggattctgaggaaagtcctgtggggagattctgaccactgtcccataggattctgattttaggatgtccatgtcctcacaggcctgctcattttcagtcctaatcgtagaatctgaaataaacaggaacaaagacgttccttaggccctgtgctcagagaaatgataagactacaaatgcgggggccagggctcaaggctcccaggatagttgcactgagcactgtgaggccccaggtggaaacgtgcaagagaaggcagagcctttgacagttctcaaaagtggtttcatactttttaccttgttcactcattcgatagcaatgaatgttcattgctggggcagggctgggttctgtgagcagagaggtccatcctacaggcactggtgtggggcacagtccatgcagaggcaaaggagacaaagcaagaccagaagggtgggaagctaccacggattgggctgcggggtcaggggctccagcatccgagctggcgaggaaacagtacagggtctgagttctgaatggagagcatggattgtgatgaggaaacaaggctggaagagctgccaagggacttactacgtgagctcagaagagcactgggcacctaggccgttcatggctactccctggggtgggcttctctgagcaggacccagccccctcagctgcctcctggctgctgctgccaacttgcacctggccacctcccctgcttctccctgggctgtgcgtggccacctctaagaccacactgacttcttccctggggctgcaagtttctggaggcccccaggaggccttccagacatctgcgttccttctggactctccaagtaagcacaggcttctgtcctactctgtaaccctagagggcacctctgctgaggtcagacatctccttgatgtctgtgatcaaaccatgacaggatgcaaccacaacacacggctatgatcatgacaaccacggtccccaccacgacacaatcacgttcacaaccacaaccacgcagccacagggtttcaccgtgttggccaggatggtctcgatctcctgacctcgtgatccgcccacctcggcctcccaaatcgctagaatggccggcgtgagccaccatgcccggctccacggcccctacttttcacaactttggactgtccaacttgcttcccgaggcccctacaagccggtggcctctgtaggacctggtcctgccctgctgcaggagtgacggtgatgacccagcagcaactgaaagggaggtgaggggcttcctttctgcagctgagatgcacgcagacccatctcccttgtcatgctgggcagcccaccggctaagcaggggagcagagcaccaggccgggcgcctgcccagcaggagctgatgccggaggcagtgggtgccctggttagggctgaggaccccaagataggctgaagtcctaacttgaagcacctcagaatgtgaccttgtttggaaacacagtcgttgcagattaattagtcaccatgaggtcactggggtggcccctaacccaccatgactggtgtccttctaaggagatggccacatgaacacagacacgcagggagaaggcagccgtgtgaaggagtcggagatcagagtgagggacgcaaccacaagccaaggaacccaaggactgccagaaaaccaccagctgcccggagaggcaggacaggatccttccctaaagccttcacaggggggcacggccctgcttgctgaccccccggtttcagatttccggcctccacagctgtgagacaataaatttctgttgtttt

SEQ ID NO: 29931 - DNA, 7062 bp, Homo Sapiens
gtgaggccctgccgggtcgggctgcgggcggccgggcgcgggcggcgggacagacgggcgcacgcgaggactgacggacggacgcaccgagggcggcgggcacgcacggcccgggccggcgctccaaggcccgcccgggagggccggggccgcgctcagaattttgatttggctgctgggctgctaccttgaaatccaagccctaaaaatgccagcttctttggacttagaagatgacctggataaatgataaaaattaagaaagagattttgaagttttcttattgtcctcttggcatatgcttctggaataatattcaccatggttttggatgaccttccaaacttagaagacatctatacttccttgtgttcatcaacaatggaagactcagagatggattttgactctggactagaagatgatgacacaaaaagtgatagtattttggaggattccacaatttttgtggccttcaaaggaaatatagatgataaagacttcaaatggaaattagatgcaatattgaaaaacgtgcccaatttgttacacatggagtccagcaagctaaaagtacagaaggtggagccctggaacagcgtgcgtgtgacattcaacatcccccgggaagcagcggagcggctacggatccttgctcagagcaacaaccagcagcttcgggatttagggattctctccgttcagattgaaggggaaggtgctattaacctggctttggctcagaaccgaagccaagatgtgagaatgaatggacccatgggagctggaaattcagttaggatggaggcgggatttcctatggcaagtggtccaggaataataaggatgaacaaccctgccactgttatgatacccccgggtggaaatgtgtcatcttccatgatggcaccaggccccaatccagagctgcagcccaggactcctcgccctgcttctcagtcagatgcaatggatccactcctctctgggctccatatacagcagcaaagtcatccctcaggatctttagctcccccacatcacccaatgcagcctgtctctgtgaacagacaaatgaacccagctaattttccccagctgcagcagcagcagcaacaacaacaacagcagcagcagcagcagcagcagcaacaacagcaacagcagcaacaacagttgcaggcaagacccccacagcaacatcagcagcaacagccacagggaattcgaccccagtttactgccccaactcaggtgcctgttcctccaggctggaaccagctgccttctggagcccttcaacctcctccagcccagggttctctgggcacaatgactgcaaaccaagggtggaagaaggctcccttgcccggcccaatgcaacagcaactccaggcaagaccatccttagccacggtacagacgccttcccaccctccccctccatatccctttggcagccagcaagcctcacaagcccacacaaactttcctcagatgagcaacccaggccagttcacagctcctcagatgaagagtttgcagggagggccctctagggtcccaactcccttgcagcagccccacctcaccaacaagtctcctgcctcctcaccctcctccttccagcagggatcccctgcatcctccccaacggttaaccaaactcagcagcagatgggaccaaggccacctcaaaataacccacttccccagggatttcagcagcctgtcagctctccgggtcggaatcctatggttcaacagggaaatgtgccacctaacttcatggtgatgcagcagcaaccaccaaaccaggggccacagagtttacatccaggcctaggaggaatgcctaaacgcctcccacctggcttctcagcaggacaggccaatccgaactttatgcaaggtcaggtgccttcgaccacagcaaccacccctgggaattcaggagcccctcagctgcaagcaaatcaaaatgtccagcatgcaggtggtcaaggagctggtcctcctcaaaaccagatgcaggtgtcccacgggccgccaaatatgatgcagcccagcctcatgggaattcatggcaacatgaacaatcagcaggctggtacttctggggttcctcaagtgaacctcagcaacatgcaaggccagccccagcagggcccaccatctcagctgatgggcatgcaccagcaaatcgtgccctcccagggccagatggtccagcaacaaggaaccttgaaccctcagaaccctatgatcctttcaagggcccagcttatgccacagggccagatgatggtgaaccccccgagccaaaatcttgggccctcgccccaaaggatgaccccacccaagcagatgctttcccagcagggcccacaaatgatggcgccacataaccagatgatggggcctcaggggcaggttttgctccaacagaacccaatgatagagcagattatgaccaatcaaatgcaggggaataagcagcagtttaacactcagaaccagtccaatgtcatgccgggaccagcccagataatgaggggaccaactccgaacatgcaaggaaatatggtgcagtttacgggacagatgtcaggacagatgctgccccagcaagggcctgtgaacaacagtccatctcaggttatgggcattcagggacaggtcctgcggccaccagggcccagcccacacatggcccagcagcatggtgatcctgctactacagcaaataacgatgtcagtttatctcagatgatgcctgatgttagcattcaacaaaccaacatggtcccccctcatgtgcaggccatgcagggaaacagtgcctcgggaaaccacttctcaggccatgggatgtctttcaatgcacctttcagtggagctcccaatggaaatcagatgtcctgtggtcaaaatccaggcttcccagtcaataaggatgtcacgctaacgagcccattgttggtcaacttattgcagagtgacatatctgcaggccattttggggtaaacaataagcaaaataataccaacgcaaataaaccgaagaagaagaaaccccctcggaagaagaaaaatagtcagcaagatctaaacaccccagatactcgcccagctggtctggaagaggctgatcagccaccgttgcctggagaacaaggaattaacttggataactcaggccctaaactgccagaattttcaaaccggccaccaggttatccttctcaaccagttgaacagaggccacttcagcagatgcctcctcaactcatgcagcatgtggcacccccaccacagccaccacagcagcagccacagccacaactgcctcagcagcagcagccaccacctcccagtcagccacagtctcagcagcagcagcagcagcagcaacaaatgatgatgatgctcatgatgcagcaggatcccaaatcagttaggcttccagtctctcaaaatgtccatcctccaaggggccccctgaaccccgactcccagagaatgcccatgcaacagagtggcagtgtgcctgtcatggtcagtctgcaaggacctgcctccgtgccaccatcacctgataaacaaagaatgccaatgcctgtgaatactcccttgggaagcaattcaaggaaaatggtctatcaggagagcccgcagaatccttccagctcgccactggcggagatggcctcactccctgaagcaagtggcagtgaagcaccatctgtcccaggaggcccaaacaacatgccttcacatgtagtacttccccagaatcagttaatgatgacagggccaaaacctggaccatcgcccctttcagcaactcaaggtgcaactccccagcaaccccctgtaaattccctgcccagctctcacggccaccacttcccaaatgtggctgcgccaacccagacatctaggcccaaaacaccaaacagagccagccccagaccctattatcctcagacacccaacaaccgccctcccagcacagaaccttcagaaatcagtctgtcaccagaaagactcaatgcctccatagcaggactcttccctccacagattaatattcctttacctcctaggccaaatttaaacaggggctttgatcaacaaggcctaaatccaacaactttgaaggccatcgggcaagcaccttcaaatcttaccatgaatccttccaattttgctaccccacaaactcacaaattagattctgtggtagtgaattctggaaagcagtctaattctggagcaacaaaacgggcaagtccaagcaacagtcgcaggtctagtcctgggtccagtaggaaaaccactccaagccctgggaggcaaaattcaaaagcccctaaacttactctggcctctcagacaaatgcagccctattgcagaatgtggagttgccgagaaatgtattggtcagtcccactcctctggccaatccccctgtacctgggagctttcctaacaacagtgggctgaatcctcagaattctactgtgtctgtggctgcagttgggggtgttgttgaggataacaaggagagcttgaatgtgcctcaggacagtgattgccagaattcccagagtaggaaggaacaggtaaacattgaactaaaagcagtccctgcccaagaagttaaaatggttgtccctgaagatcagtccaaaaaggatgggcagccttcggatcctaacaaacttcccagtgtcgaagagaacaaaaatttggtgtctcctgctatgagggaagcaccaacatcgttaagtcaacttcttgacaactctggagctcccaatgtgacaattaaaccccctgggcttacagatctggaagtaacacctccagtagtttctggggaggacctcaaaaaagcatctgtcattcccacactgcaggatctgtcttcttctaaagaaccttctaattccctaaacttacctcacagtaatgagctgtgttcatcccttgtgcatcccgaattgagtgaggtcagttctaacgttgcaccaagcatccctccagtaatgtcaagacctgttagctcttcctccatttccactcccttgcccccaaatcaaataactgtatttgtcacttccaatcccatcacaacttcagctaacacatcagcagctttgccaactcacttgcagtctgcattgatgtcaacagttgtcacaatgcccaatgcgggtagcaaggttatggtttctgagggacagtcagctgctcagtctaatgcccggcctcagttcattacacctgtctttatcaattcatcctcaataattcaggttatgaaaggatcacagccaagcacaattcctgcagccccactgacaaccaactctggcctgatgcctccctctgttgcagttgttggccctttacacatacctcagaacataaaattttcttctgctcctgtaccgcctaatgccctctccagtagtcctgctccaaacatccagacaggtcgacctttggtccttagctcacgagccacccctgttcagcttccttcccctccttgtacgtcttctccagttgtcccttctcatccccctgtgcagcaagtgaaagaattgaatccagatgaggctagccctcaggtgaacacctcagcagatcagaacactcttccctcttcacagtcaaccacaatggtttctccccttttgaccaatagtccagggtcctctggcaaccggcgaagcccagtctcgtctagtaagggcaaaggaaaagtggacaaaattggccaaattttgttgaccaaggcatgtaagaaagttacaggctctcttgagaaaggggaagaacaatatggtgcagatggagagactgaaggccaagggctagacaccacagctccggggctcatgggaacagagcagttatccacagagctggacagtaaaaccccaacgcccccagcacccactctgctaaaaatgacctctagccctgtgggcccgggcactgcctcagcaggacccagcttacctggcggtgctctccccaccagtgtacgctcgatagtaaccactctggtaccctccgagctcatctccgccgtaccgaccacaaaaagcaatcatggtggcatagcatctgagtcacttgcgggtggcctagtggaggagaaggtgggatcccatccagaacttctacccagcatagccccgtcgcagaatttagtctcaaaggaaacttcaaccacagcactgcaggcctctgttgccagaccagagctggaggtaaatgctgccatagtctctggacaaagcagtgagcccaaagagatagttgaaaagtccaaaatcccaggccgaagaaactcccgaactgaagagccaactgtggcctctgaaagtgtggaaaatggacatcgtaaacgatcttctcgacctgcttcagcctccagctctactaaagacataaccagtgcggtgcaatccaagcgaagaaaatccaagtaaacaagcaggactgcgacttgatacttggaaatgtgtgtgacttttacaaagagcaattttgagctgtgacttttttaaatcaatttctgtacagttagtaattttaataatgtggcccttttcctagtccctgcaacctgtttcataaagtgcaatggggaaagcaggactgttgagcccttttggtgttgcgagttgaagttcaaggtttctaaaatgttgtcttgtattgaaaggagctaatgccattataaatgttactagttttcacatttcctaagcagcctagagtacagggtgagcatttttagatctcctaatgatgtattgtgccgtggaagtactgtgtgtgaatagcagtagtgggggcaaaagcaatcttctcatttggaaatgttgtaaataattttattatatagtgttttggatgtatttgttgtagaaatggaccagtgaataaagagaatctaaggatttgtacaatgtgaaataacgtgttaaataaatgtcattgtcatagaacataaagttatgttattggtaaggga

SEQ ID NO: 29932 - DNA, 6376 bp, Homo Sapiens
ggtctgtcctgagccgacacctgcacagtggcgagaccaaggacccagagagaaaggtgagagtgcagccggggaggctgaggatcggcggagctggaagagtgagggtgaaggcaagaagtagagcacagaagcaaagattttaagaggaaagaagacatctgaacccaacaccaccctaaaccacaggctgcagggttggcatgctccgtgcaagaccagaggcactgatgctcctgggagctcttctgactggatccctgggtccatcgggcagtcaggacgcactctcactgccctgggaagtgcagcgctatgacggctggtttaacaacctgaggcaccacgagcgtggtgctgttggctgccggttgcagcgccgcgtaccagccaattacgccgacggtgtgtatcaggctctggaggagccgcagctgcccaacccgcgccggctcagcaacgcagccacgcggggcatagccggcctgccgtcgctccacaaccgcaccgtactgggggtcttctttggctaccatgttctttccgacgtggtgagcgtggaaacgcccggttgccccgccgagttcctcaacatccgcatcccacctggagaccccgtgttcgaccccgaccagcgcggggacgtggtgctgcccttccagaggagccgctgggaccccgagaccggacggagtcccagcaacccccgggacctggccaaccaggtgacgggctggctggacggcagcgccatctatggctcctcgcactcctggagcgacgcgctgcggagcttctcggggggacagctggcgtcggggcccgaccccgctttcccccgagactcgcagaaccccctgctcatgtgggcggcgcccgaccccgccaccgggcagaacgggccccgggggctgtacgccttcggggcagagagagggaaccgggaacccttcctgcaggcgctgggcctgctctggttccgctaccacaacctgtgggcgcagaggctggcccgccagcacccagactgggaggacgaggagctgttccagcacgcacgcaagagggtcatcgccacctaccagaacatcgctgtgtatgagtggctgcccagcttcctgcagaaaacactcccggagtatacaggataccgtcctttcctagaccccagcatctccccggaatttgtggtggcctctgagcagttcttctctaccatggtgccccctggtgtctacatgagaaatgccagctgtcatttccggaaggtcctgaacaagggttttcaaagctcccaagctctcagggtctgcaacaactactggattcgggagaaccccaatctgaacagtacccaggaggtgaatgagctgctgctgggaatggcctcccagatttcggagttggaggacaacatagtggttgaagatctgagggattactggcctggccctggcaaattctcccgtacagactatgtggccagcagcatccaacgtggccgagatatggggctgcccagctatagccaggccctgctggcctttgggctggacatcccaaggaactggagtgatctcaaccctaatgtggacccccaggtgctggaggccacagctgccctgtacaaccaggacctatcccagctagagctgctccttggggggctcctggagagccatggggaccctggacccctgttcagtgccattgtcctcgaccagtttgtacggctgcgggatggtgaccgctactggtttgagaacaccaggaatgggctgttctccaagaaggagattgaagacatccgaaataccaccctgcgggacgtgctggtcgctgttatcaacattgaccccagtgccctgcagcccaatgtctttgtctggcataaaggtgcaccctgccctcaacctaagcagctcacaactgacggcctgccccagtgtgcacccctgactgtgcttgacttctttgaaggcagcagccctggttttgccatcaccatcattgctctctgctgccttcccttagtgagtctgcttctctctggagtggtggcctatttccggggccgagaacacaagaagctacaaaagaaactcaaagagagcgtgaagaaggaagcagccaaagatggagtgccagcgatggagtggccaggccccaaggagaggagcagtcccatcatcatccagctgctgtcagacaggtgtctgcaggtcctgaacaggcatctcactgtgctccgtgtggtccagctgcagcctctgcagcaggtcaacctcatcctgtccaacaaccgaggatgccgcaccctgctgctcaagatccctaaggagtatgacctggtgctgctgtttagttctgaagaggaacggggcgcctttgtgcagcagctatgggacttctgcgtgcgctgggctctgggcctccatgtggctgagatgagcgagaaggagctatttaggaaggctgtgacaaagcagcagcgggaacgcatcctggagatcttcttcagacacctttttgctcaggtgctggacatcaaccaggccgacgcagggaccctgcccctggactcctcccagaaggtgcgggaggccctgacctgcgagctgagcagggccgagtttgccgagtccctgggcctcaagccccaggacatgtttgtggagtccatgttctctctggctgacaaggatggcaatggctacctgtccttccgagagttcctggacatcctggtggtcttcatgaaaggctccccagaggataagtcccgtctaatgtttaccatgtatgacctggatgagaatggcttcctctccaaggacgaattcttcaccatgatgcgatccttcatcgagatctccaacaactgcctgtccaaggcccagctggccgaggtggtggagtctatgttccgggagtcgggattccaggacaaggaggagctgacatgggaggattttcacttcatgctgcgggaccatgacagcgagctccgcttcacgcagctctgtgtcaaaggtggaggtggaggtggaaatggtattagagatatctttaaacaaaacatcagctgtcgagtctcgttcatcactcggacacctggggagcgctcccacccccagggactggggccccctgccccagaagccccagagctgggaggccctggactgaagaagaggtttggcaaaaaggcagcagtgcccactccccggctgtacacagaggcgctgcaagagaagatgcagcgaggcttcctagcccaaaagctgcagcagtacaagcgcttcgtggagaactaccggaggcacatcgtgtgtgtggcaatcttctcggccatctgtgttggcgtgtttgcagatcgtgcttactactatggctttgcctcgccaccctcggacattgcacagaccaccctcgtgggcatcatcctgtcacgaggcacggcggccagcgtctccttcatgttctcttatatcttgctcaccatgtgccgcaacctcataaccttcctgcgagagactttcctcaaccgctatgtgccttttgatgccgcagtggacttccaccgctggatcgccatggctgctgttgtcctggccattttgcacagtgctggccacgcagtcaatgtctacatcttctcagtcagcccactcagcctgctggcctgcatattccccaacgtctttgtgaatgatgggtccaagcttccccagaagttctattggtggttcttccagaccgtcccaggtatgacaggtgtgcttctgctcctggtcctggccatcatgtatgtcttcgcctcccaccacttccgccgccgcagcttccggggcttctggctgacccaccacctctacatcctgctctatgccctgctcatcatccatggcagctatgctctgatccagctgcccactttccacatctacttcctggtcccggcaatcatctatggaggtgacaagctggtgagcctgagccggaagaaggtggagatcagcgtggtgaaggcggagctgctgccctcaggagtgacctacctgcaattccagaggccccaaggctttgagtacaagtcaggacagtgggtgcggatcgcctgcctggctctggggaccaccgagtaccaccccttcacactgacctccgcgccccatgaggacacactcagcctgcacatccgggcagtggggccctggaccactcgcctcagggagatctactcatccccaaagggcaatggctgtgctggatacccaaagctgtaccttgatggaccgtttggagagggccatcaggagtggcataaatttgaggtgtcagtgttggtgggagggggcattggggtcaccccctttgcctccatcctcaaagacctggtcttcaagtcatccttgggcagccaaatgctgtgtaagaagatctacttcatctgggtgacacggacccagcgtcagtttgagtggctggctgacatcatccaagaggtggaggagaacgaccaccaggacctggtgtctgtgcacatttatgtcacccagctggctgagaagttcgacctcaggaccaccatgctatacatctgcgagcggcacttccagaaagtgctgaaccggagtctgttcacgggcctgcgctccatcacccactttggccgtccccccttcgagcccttcttcaactccctgcaggaggtccacccacaggtgcgcaagatcggggtgttcagctgcggccctccaggaatgaccaagaatgtagagaaggcctgtcagctcgtcaacaggcaggaccgagcccacttcatgcaccactatgagaacttctgagcctgtcctccctggctgctgcttccagtatcctgccttctcttctgtgcacctaagttgcccagccctgctggcaatctctccatcagaatccaccttaggcctcagctggagggctgcagagcccctcccaatattgggagaatattgacccagacaattatacaaatgagaaaaggcaggagactatgttctacaattgcagtgcatgatgattataagtccacctgtttatcaacggcaccattcctgcagccctccagacttcctgcccttagcaagtgcgcaaccagtcaggatctcccaaagaagataaagaccactcctcaccccagctcaagccatggcaggcgtggcaagcaaagtggggaggagacagtccctgcttgtgacaagtgtggaggtgaaaaggtacaatagtgcttgtctccgatagctccccacatctctaattgacttccacaaaatcgatgcgttgctttggtatttgcttggactgacatttgagggaggaggaggctgggatcctctggctgagaatctcctcagagcccagtgcagaagctgtgatgcttagaacctggacagcccgactgcctcaactctgtctccaggtctattccctccagctccaaaaggagcagccctacttctaccccttcccgtccccaaagtgtcagcaactttgaggagggcaccaggaaacaaagatgcctccccagccctgatattcttgatgtcaccagtgatacccactgccctgacccctgggcaggcccctctctgcatctactggagtggtccctgggctctggggctgaaggattccagcctctctgccagatattcagtactcgatctcaattcccctcttccacaagagttgggtgaccagctgtcctagtttgcccaggactctccctgttttagcactgaaagtctcttgccccaggaaaccccatcagtcccaggcagattgggacagctggtcaccttacgcaagagccaggctgaaacatcccctccatactcagctctttaacttttcttttcctttttcatcgggctctttcctaaaaagctgagctgtaaaatattttacatcgaggtataataaataatcatgtacatgttttaccaccacccaggtcaagacatagaatgtttcaacatttccatcaccccagaaactccccttgtacccccttccacttcgtctcccctagctcctagaagcaaccactgatgtgatttctaccaaatccagttttggtcctactaaatatactcttttgagactggcctcttttactcaccataatgcctttgtaattcatccatgctgttgtgtgtatcagcagtttgttccttttcattgctgagtagtattctattgtagagatgtaccacagtttgtttattcttctgttgatggacgtttgggttgtttctaattttgaatgattataaataaaaattctgtgagtgttcttgtaaaaaaaaaaaaaaaaaaaaaaaaaaaaaaa

SEQ ID NO: 29933 - DNA, 2721 bp, Homo Sapiens
gttcccgccaggtccgtgccgggcgagagagatgctgcccggcccgcctcggctttgaggcgagagaagtgtcccagacccatttcgccttgctgacggcgtcgagccctggccagacatgtccacagggttctccttcgggtccgggactctgggctccaccaccgtggccgccggcgggaccagcacaggcggcgttttctccttcggaacgggagcgtctagcaacccttctgtggggctcaattttggaaatcttggaagtacttcaactccagcaactacatctgctccttcaagtggttttggaaccgggctctttggatctaaacctgccactgggttcactctaggaggaacaaatacaggaatagcaacaactataactacaggattaactctgggaacgccagccactacatctgcagctacaacaggcttcagtttaggattcaataaacctgcagcatctgccacaccatttgctctacctattacctctacctcagctagcggtctgactctttcgtctgctctgacatcaactccagcagcatccacaggatttactctaaataatttgggtgggacaacagccacaactacaactgcatcaacaggcctctctttagggggagccttagctggtttgggaggttcacttttccagagtacaaacacaggaacatcaggacttggacagaatgctttagggttgactttgggaactacagcagctacttcaactgcaggcaatgaaggccttggtggtatagatttcagtagctcctcagataaaaagagtgataaaacgggaacaagaccagaggatagtaaagctctgaaggatgaaaatctacctcctgtcatctgccaggatgttgaaaatctccagaaatttgtgaaggagcagaaacaagttcaagaagaaattagtagaatgtcttcaaaagcaatgcttaaggtacaagaagatattaaagctctgaagcagctcctgtcgttggctgccaatggaatacagagaaacactctcaacattgacaaattgaaaatagaaactgctcaggagttgaagaatgctgaaatagctttaagaacccagaagacaccacctggacttcaacatgaatatgcagctcctgctgactacttcagaatcttggttcagcaatttgaggtacagcttcagcagtacaggcagcagattgaagaactagaaaaccatcttgccactcaagcaaataattcacatataacccctcaagatttgtcaatggctatgcagaaaatttatcaaacatttgtagctttagcggcacaacttcagtctattcatgaaaatgtaaaggttctgaaagaacagtaccttggctacaggaaaatgttcttgggagatgctgttgatgtgtttgaaacaaggcgagcagaagccaagaagtggcagaacacacccagagttactactggacccactcctttcagcaccatgccaaacgcagcagccgttgccatggctgcaacacttacacagcagcaacagcctgctacagggccacagccatctctgggagttagttttggaacgccattcggctcaggtattggcactggcttgcaatcaagtggcttaggttcttcaaaccttggaggatttggaactagctctggttttggatgcagcaccacaggggcctccacatttggatttggaacaacaaataaaccctcaggaagtcttagtgcaggctttggcagctcaagtacatctgggtttaacttcagcaatcctggcatcacggcatcagctggtttgacttttggggtgtccaatcctgcctctgcaggttttggaacaggaggacaactccttcagttgaagaaacctccagctggaaacaaaagaggaaaaagataaacatgggttgatgtgttgagagaatccatagcagcaccgttcattctatgagtctatttttctaatgatgcagtaattaaattgcatcccaggagatttataaagttttgatatttttccctactctggaatttgaactttcttcatgtttgccatactgaacatcttttttcttgtggaatttaaagtccagctgtgttttctttttaatttgattctcagtgtaagaaatgttctgattacatcactgattggtaatggttagaaaccattaacctaaaacttactatttaacctagtgtttttgttgatgaggtttacattatgtgaatacatgcacatttgtttcttatacaggtggtgtgaactctagggcctatactagaatcaatttgttccttgttaaaggccttttgaattatactgcagggcatcttgtgaatatgtatgtaaatatatacagaataatacacacagttgtgtgtgcatataaaatacatatttacgccaggcgtggtggctcacgcctgtaatcccagcactttgggaggccgaggcaggcggatcacctgaggtcaggagtttgagaccagcctgacatggtgaaaccccatctctacgaaaaatacaaaaattagctgggcatagtggcgggtacctataatcccagctactcgggaggctgaggcacgagaatcacttgaagccgggaggtgggggttgcagtgagccgagatcacaccactgcactccagcctgggcaacaagagcaaaactccgtctcaaaaaaaaaaaaaaaaaaa

SEQ ID NO: 29934 - DNA, 5418 bp, Homo Sapiens
gccttcgcggcacctgggcctgaggtgcgtgcctcccgggccctcgccagctccagatgcgtgaggaggacttcagaaacccgactgagaagtggagcgacccccagggagggtcggacctgcctcaataccgccaaggtctttcatttcttgttcgcttactttcgtgaaatcctcacatcgttttaatggtactagtcaagacaagaaaatcaacaggctttcagccttgaggcaacattggatattattgagacatctgtggaatttaagaacagtatggagctcatcagagtatatcattgaagaatatgatggctgaaaacaatttaaaaatgctaaagattcaacagtgtgtggtagccaacaaactacctagaaacaggccatatgtttgcaatatttgttttaagcactttgaaacaccatcaaaattagctaggcactatctcattcatactggtcaaaagccatttgaatgtgatgtgtgtcataaaacctttagacaactagttcatctggagaggcatcaactaactcatagtctgccttttaaatgtagtatttgtcagcgtcactttaaaaatctgaagacatttgtgaagcaccaacaacttcacaatgaaacctatcagaataatgttaaacaggtcagaagattgctggaggccaagcaagaaaagtcaatgtatggagtgtataatacttttaccacagaggaaagatgggcattacacccgtgctctaagtctgatcccatgtatagcatgaaaagaagaaagaatattcatgcatgtacaatctgtggcaagatgtttccatcacagtcaaaacttgataggcatgtacttattcatactggtcagaggccttttaaatgtgtcttgtgtactaaatcttttcgacagtcaactcacttaaaaatccaccaacttacacattcagaagaaagaccttttcaatgttgtttttgtcaaaaaggatttaagattcaaagcaaacttctgaagcataaacaaatccatactaggaataaggcttttcgggctcttttattaaagaagaggcgtacagaatctcgccccctgcctaataagttaaatgcaaatcagggtggttttgaaaatggtgagattggtgaatctgaggagaataatccacttgatgtccactcaatttatattgtcccttttcaatgtccaaagtgtgaaaagtgttttgaatcagagcagattctcaatgaacacagctgttttgctgctagaagtggcaaaattccaagcaggttcaaaagaagctacaactataaaaccattgttaaaaaaatcttggccaagcttaagcgtgctaggagtaaaaaattagataactttcaatctgagaaaaaagtatttaaaaagagtttcttgagaaattgtgatcttatttctggtgagcagagctctgaacaaacccagagaacatttgtgggttctcttggcaaacatggaacatataaaacaattggcaatagaaagaagaaaacattgactttgccattttcttggcaaaatatgggaaaaaatttgaaaggcatccttacgacagaaaacatattaagcattgataattcagtgaataagaaagacttgtcaatctgtggttcatcaggtgaggaattctttaataactgtgaggtacttcagtgtggtttttcagttccaagggaaaacatacgtactagacataagatatgtccttgtgacaaatgtgagaaggtatttccttctatatccaaactaaaaagacactatttaattcatactggacagaggccctttggctgtaatatttgtgggaaatcttttagacagtcagctcacttaaaaagacatgaacagactcataatgaaaagagtccttatgcatctctttgccaagtagaatttggaaacttcaacaatctttctaatcattcaggtaataatgttaactataatgcttcccaacaatgtcaggctcctggtgttcaaaaatacgaggtctcagagtcagatcaaatgtcaggagttaaggcagagtcacaggattttattcctggtagcaccgggcaaccctgtcttcctaatgtacttttggaatcagagcaaagcaatcctttttgcagttattcagagcatcaggagaaaaatgatgtcttcctgtaccgatgcagtgtttgtgctaaaagtttccgatctccatctaaactggaaagacactacctaattcatgcagggcagaaaccatttgaatgctcagtttgtggcaaaacattcagacaggctcctcactggaagagacatcagcttactcactttaaagaacgaccacaagggaaagtggttgccttagattcggttatgtaaattgtcgcaaccactaacaattgtggtctctggtgatcttatttttaaagcctgtattatttaaaatgcatttttattgaaaggcctgcattaaactgaatggtttcacaggcatttgcttgtcctgcatagtaaggaggtagaatacatagaaaattaatacaatgttttagaaacagccaagttaattttagaggcaagaacatgatttgatgctataaagtaggcattttaatattgtaaacatatactttggctgtattgaaaaatataaatccatgatggctgtacaaataatttagcctcattcattttttaaaggaattattccttaagacatgccatctctttttagatatactcaaaagactgagaggcaaaacttggcttttagctgcagcacatagccctgttatatttgatttattttacatttcatatgaaagcataattttgtccacatgtgactcaaattgcattggtaattttttttttttttttgtaagttaaaaaaactacagagacactaaaggtgaaaatggatgagacaattatagtattattttcattggtctttttttttgagatggagtctcactctttcgccaggctagagtgcagtggcgccatctaggctcactgcaacctccgcatcccagattccagcgattctcctgcctcagcctcctgagtagctgggattacaggtgcctgccatcacgcctggctaatttttgtatttttagtagagacgggggttcaccaagttggccaggatggtctcgatctcttgaccttgtgactcacccgcatcggcctcccaaagtgctgggattacaggcatgagccaccgcacccgacggtcttttcaaagctatttatttttaggactatgtggtaatttcaccttcaggtgataaggattttttttttctcccagctagtgctatctttctcaaaataatttaaaagtaggcgagaggctaggatgtacctatatttaccatgtttacttaccaggaatattttctaagtgccatagtctttttcataatacgtatgagttttaccttttcagaggaataatttcaagtcatttatttgctcattaatgatagcagtagtcatagacttaagactattctagagatcttcatctccataagacttttacatttattttagtaaacttttctttctatgcctctttaatggagtggttctgttatttaagcctgttctaagtttgatcaaatggcaatgactaggtctagttttagtttttatttttgcaggagtctattgctaaagaattttattttgatccttgttaaatttttattttaattaataaggtagtcattcctgtagagggataagatgcttgtagagttgtgggtatcattccaaatagaactgttatgatttgggaaatattctttactacaaaggacttatttcataattacaaattttccttcatatttgcctttgtttataaaatcttcaggaatgacattctctagcaataaaaggaatgaaccgttatgtttctaagctgaaaagaggaacaggtgggtaattatcctgccatacttaaatatagtggaaaatcctctattgagaatgtggataaatgaacaattgtaagttttgcatcataaactgagaactttcttttgacaggggggaggcgggagggatagtaggtgggggtgatctgcttgcttcttttaccacaggtgatttttaagtaacttgggtttaatttacagagatgaaacatgacagtctgagtaaaatacccagtgatgtagaagtgtgcctgtttattatgtagatacagacatccagcaaaaacaggagaatcacatgctttaaagaacactttctcttaggtttccttgagatatgttcctccagtgcaagcaagataatggtttacagaatttgctttacacaaaacttgtcaagaactcatctgttaaaagcaaggaataactagtttatattttccaataatgttcaaggttttctccttaatatgtttgaaattattgattttggcatttttctaagcaatttatgtaattttatttgaagaaaatgttttgtataatgtttttcccagcctaaacagggagagtcctaacagtgttgtgcttgtatgattctgagactttatttgcgtaagtgatactactatactttatttttgacccatgcctttttaagctgtttcatattgaaaggtggaatattgtaaaaattttgtcaaagatgtactgtagtgctatttgaagtacctgtaacaaaacagttggccctctgtatccatgtactctgcatctgtggattaaaccaattgcagatcaaaaatattagaaaaaataaaaataatacaaataaaaatacagtataacagttatttaaatagcatttacattgcattaggtattagtctagggataaagtatacaggcggatgtgcgttggttatatacaaatatgtcattttatgtaagggacttgagtatacttggatttttggtatctgtgggttggggggacggtccaggaaccaataccccatggataccaagggacaactgtacttatttacctttattgtcattgcaagcttcttatggaaactttataggaatgaaaatatacatgttaagaagattaaacattagatagtagatggtttgttgcatgctagaactgttagtattgttgaatcaattactttggtttcatgaaaaaataaacgataaatatctttaaagagaactagaagaattttttgtttgagtgattccaggctgtagtatgatcatttactgaagtagtttgattggctggctaacttagaattattgtttcttgttttgtactgcaataggggttataattgtaagataaaaatgtgtgtgtgtttaagggaagtaggtggtggttaaaattcttggaaaattttcagaatactttaaaaataaagttccaagttacaaaaaaaaaaaaaaaa

SEQ ID NO: 29935 - DNA, 4916 bp, Homo Sapiens
agaattcggagcgcggaagagccagagctgcgagcgcctggagctggatctctctccggtcgcgcacgccgaggccagtagggagagaagatggtggttctccgcagcagcttggagctgcacaaccactccgcggcctcggccacgggctccttggacctgtccagtgacttcctcagtctggagcacatcggccggaggcggctccgctcggccggcgcggcgcagaagaaacccgcggcgaccacagccaaagcgggcgatgggtcatcagttaaggaagttgaaacctaccaccggacacgtgctttaagatctttgagaaaagatgcacagaattcttcagattctagttttgagaagaatgtggaaataacggagcaacttgctaatggcaggcattttacaaggcagttggccagacagcaggctgataaaaaaaaagaagagcacagagaagacaaagtgattccagttactcggtcattgagggctagaaacatcgttcaaagtacagaacacttacatgaagataatggtgatgttgaagtgcgtcgaagttgtaggattagaagtcgttatagtggtgtaaaccagtccatgctgtttgacaaacttataactaacactgctgaagctgtacttcaaaaaatggatgacatgaagaagatgcgtagacagcgaatgagagaacttgaagacttgggagtgtttaatgaaacagaagaaagcaatcttaatatgtacacaagaggaaaacagaaagatattcaaagaactgatgaagaaacaactgataatcaagaaggcagtgtggagtcatctgaagagggtgaagaccaagaacatgaagatgatggtgaagatgaagatgatgaagatgatgatgatgatgacgatgatgatgatgatgatgatgatgaagatgatgaagatgaagaagatggagaagaagagaatcagaagcgatattatcttagacagagaaaagctactgtttactatcaggctccattggaaaaacctcgtcaccagagaaagcccaacatattttatagtggcccagcttctcctgcaagaccaagataccgattatcttccgcaggaccaagaagtccttactgtaaacgaatgaacaggcgaaggcatgcaatccacagtagtgactcgacttcatcttcctcctctgaagatgaacagcactttgagaggcggaggaaaaggagtcgtaatagggctatcaataggtgcctcccactaaattttcggaaagatgaattaaaaggcatttataaagatcgaatgaaaattggagcaagccttgccgatgttgatccaatgcaactagattcttcagtacgatttgatagtgttggtggcctgtctaatcatatagcagctctaaaagagatggtggtgtttccattactttatccagaagtctttgaaaaatttaaaattcaacccccaagaggttgtttgttttatgggccacctggaactggaaagactctggttgccagagcacttgccaatgagtgcagtcaaggggataaaagagtagcatttttcatgaggaaaggtgctgattgtctaagtaaatgggtaggagaatctgaaagacagctacgattgctgtttgatcaggcctatcagatgcgcccatcaattattttttttgacgaaattgatggtctggctccagtacggtcaagcaggcaagatcagattcacagttctattgtttccaccctgctagctcttatggatggattggacagcagaggggaaattgtggtcattggtgctacgaacaggctagattctatagatcctgctttacgaaggcctggtcgctttgatagagaattcctctttagcctgcctgataaagaggctcgaaaagagattctaaagattcacaccagggattggaatcccaaaccactggacacatttttagaagagctagcagaaaactgtgttggatactgtggagcagatattaaatcaatatgtgctgaagctgctttatgtgctttacgacgacgctacccacagatctataccactagtgagaaactgcagttggatctctcttcaattaatatctcagctaaggatttcgaggtagctatgcaaaagatgataccagcctcccaaagagctgtgacatcacctgggcaggcactgtccaccgttgtgaaaccactcctgcaaaacactgttgacaagattttagaagccctgcagagagtatttccacatgcagaattcagaacaaataaaacattagactcagatatttcttgtcctctgctagaaagtgacttggcttacagtgatgatgatgttccatcagtttatgaaaatggactttctcagaaatcttctcataaggcaaaagacaattttaattttcttcatttgaatagaaatgcttgttaccaacctatgtcttttcgaccaagaatattgatagtaggagaaccaggatttgggcaaggttctcacttggcaccagctgtcattcatgctttggaaaagtttactgtatatacattagacattcctgttctttttggagttagtactacatcccctgaagaaacatgtgcccaggtgattcgtgaagctaagagaacagcaccaagtatagtgtatgttcctcatatccacgtgtggtgggaaatagttggaccgacacttaaagccacatttaccacattattacagaatattccttcatttgctccagttttactacttgcaacttctgacaaaccccattccgctttgccagaagaggtgcaagaattgtttatccgtgattatggagagatttttaatgtccagttaccggataaagaagaacggacaaaattttttgaagatttaattctaaaacaagctgctaagcctcctatatcaaaaaagaaagcagttttgcaggctttggaggtactcccagtagcaccaccacctgagccaagatcactgacagcagaagaagtgaaacgactagaagaacaagaagaagatacatttagagaactgaggattttcttaagaaatgttacacataggcttgctattgacaagcgattccgagtgtttactaagcctgttgaccctgatgaggttcctgattatgtcactgtaataaagcaaccaatggacctttcatctgtaatcagtaaaattgatctacacaagtatctgactgtgaaagactatttgagagatattgatctaatctgtagtaatgccttagaatacaatccagatagagatcctggagatcgtcttattaggcatagagcctgtgctttaagagatactgcctatgccataattaaagaagaacttgatgaagactttgagcagctctgtgaagaaattcaggaatctagaaagaaaagaggttgtagctcctccaaatatgccccgtcttactaccatgtgatgccaaagcaaaattccactcttgttggtgataaaagatcagacccagagcagaatgaaaagctaaagacaccgagtactcctgtggcttgcagcactcctgctcagttgaagaggaaaattcgcaaaaagtcaaactggtacttaggcaccataaaaaagcgaaggaagatttcacaggcaaaggatgatagccagaatgccatagatcacaaaattgagagtgatacagaggaaactcaagacacaagtgtagatcataatgagaccggaaacacaggagagtcttcggtggaagaaaatgaaaaacagcaaaatgcctctgaaagcaaactggaattgagaaataattcaaatacttgtaatatagagaatgagcttgaagactctaggaagactacagcatgtacagaattgagagacaagattgcttgtaatggagatgcttctagctctcagataatacatatttctgatgaaaatgaaggaaaagaaatgtgtgttctgcgaatgactcgagctagacgttcccaggtagaacagcagcagctcatcactgttgaaaaggctttggcaattctttctcagcctacaccctcacttgttgtggatcatgagcgattaaaaaatcttttgaagactgttgttaaaaaaagtcaaaactacaacatatttcagttggaaaatttgtatgcagtaatcagccaatgtatttatcggcatcgcaaggaccatgataaaacatcacttattcagaaaatggagcaagaggtagaaaacttcagttgttccagatgatgatgtcatggtatcgagtattctttatattcagttcctatttaagtcatttttgtcatgtccgcctaattgatgtagtatgaaaccctgcatctttaaggaaaagattaaaatagtaaaataaaagtatttaaactttcctgatatttatgtacatattaagataaatgtcatgtgtaagataactgataaatattggaactttgctagaacaagaccctgtagtaatagtaataatagttgaagtttggccaactcttaataaagttattttggtaactaatgttttatggcacttaagaataattagcagcgttaaattttgtttgtattaagcacttttaattttatccttcctaaaaatagtttattgtatctgacaagaaacttacttaaccattgtgtccttcccatcttttttgtcatctttgttttcttcaaatgccctcctcccatctgccttgagattcccttgtcttcacttaaaagccagagtgcaagtcatgatttgcgggagggctcttgaaccacttctggctgcaccacaattctgtacttgagtatcacagtcattgtttttgagacaaacatttttataattctaatttgggttaataaagattttaaatatttaaaaaaaaaaaaaaaaaaaa

SEQ ID NO: 29936 - DNA, 3140 bp, Homo Sapiens
gatctctctccggtcgcgcacgccgaggccagtagggagagaagatggtggttctccgcagcagcttggagctgcacaaccactccgcggcctcggccacgggctccttggacctgtccagtgacttcctcagtctggagcacatcggccggaggcggctccgctcggccggcgcggcgcagaagaaacccgcggcgaccacagccaaagcgggcgatgggtcatcagttaaggaagttgaaacctaccaccggacacgtgctttaagatctttgagaaaagatgcacagaattcttcagattctagttttgagaagaatgtggaaataacggagcaacttgctaatggcaggcattttacaaggcagttggccagacagcaggctgataaaaaaaaagaagagcacagagaagacaaagtgattccagttactcggtcattgagggctagaaacatcgttcaaagtacagaacacttacatgaagataatggtgatgttgaagtgcgtcgaagttgtaggattagaagtcgttatagtggtgtaaaccagtccatgctgtttgacaaacttataactaacactgctgaagctgtacttcaaaaaatggatgacatgaagaagatgcgtagacagcgaatgagagaacttgaagacttgggagtgtttaatgaaacagaagaaagcaatcttaatatgtacacaagaggaaaacagaaagatattcaaagaactgatgaagaaacaactgataatcaagaaggcagtgtggagtcatctgaagagggtgaagaccaagaacatgaagatgatggtgaagatgaagatgatgaagatgatgatgatgatgacgatgatgatgatgatgatgatgatgaagatgatgaagatgaagaagatggagaagaagagaatcagaagcgatattatcttagacagagaaaagctactgtttactatcaggctccattggaaaaacctcgtcaccagagaaagcccaacatattttatagtggcccagcttctcctgcaagaccaagataccgattatcttccgcaggaccaagaagtccttactgtaaacgaatgaacaggcgaaggcatgcaatccacagtagtgactcgacttcatcttcctcctctgaagatgaacagcactttgagaggcggaggaaaaggagtcgtaatagggctatcaataggtgcctcccactaaattttcggaaagatgaattaaaaggcatttataaagatcgaatgaaaattggagcaagccttgccgatgttgatccaatgcaactagattcttcagtacgatttgatagtgttggtggcctgtctaatcatatagcagctctaaaagagatggtggtgtttccattactttatccagaagtctttgaaaaatttaaaattcaacccccaagaggttgtttgttttatgggccacctggaactggaaagactctggttgccagagcacttgccaatgagtgcagtcaaggggataaaagagtagcatttttcatgaggaaaggtgctgattgtctaagtaaatgggtaggagaatctgaaagacagctacgattgctgtttgatcaggcctatcagatgcgcccatcaattattttttttgacgaaattgatggtctggctccagtacggtcaagcaggcaagatcagattcacagttctattgtttccaccctgctagctcttatggatggattggacagcagaggggaaattgtggtcattggtgctacgaacaggctagattctatagatcctgctttacgaaggcctggtcgctttgatagagaattcctctttagcctgcctgataaagaggctcgaaaagagattctaaagattcacaccagggattggaatcccaaaccactggacacatttttagaagagctagcagaaaactgtgttggatactgtggagcagatattaaatcaatatgtgctgaagctgctttatgtgctttacgacgacgctacccacagatctataccactagtgagaaactgcagttggatctctcttcaattaatatctcagctaaggatttcgaggtagctatgcaaaagatgataccagcctcccaaagagctgtgacatcacctgggcaggcactgtccaccgttgtgaaaccactcctgcaaaacactgttgacaagattttagaagccctgcagagagtatttccacatgcagaattcagaacaaataaaacattagactcagatatttcttgtcctctgctagaaagtgacttggcttacagtgatgatgatgttccatcagtttatgaaaatggactttctcagaaatcttctcataaggcaaaagacaattttaattttcttcatttgaatagaaatgcttgttaccaacctatgtcttttcgaccaagaatattgatagtaggagaaccaggatttgggcaaggttctcacttggcaccagctgtcattcatgctttggaaaagtttactgtatatacattagacattcctgttctttttggagttagtactacatcccctgaagaaacatgtgcccaggtgattcgtgaagctaagagaacagcaccaagtatagtgtatgttcctcatatccacgtgtggtgggaaatagttggaccgacacttaaagccacatttaccacattattacagaatattccttcatttgctccagttttactacttgcaacttctgacaaaccccattccgctttgccagaagaggtaatttatgtggggcggtatcattatactttcaaaaagagttgtttctaccacaataatcataacttattgaaaaaattcaaatgctgtagaagtgaataaaaggataagttttcttatcaaatataccattggtaactatttggtatatgtgctcattgggcaagatggtatatgtatatgtgtatgtatatattaaggatacataaattttttctcttgaaaaatggtattatatgccgggtgcagtggctcacgcctgtaatcccagcactttgggaggccgaggtgggtggatcatgaggtcaggagattgagaccatcctggctagcagggtgaaaccctgtccctactaaaaatacaaaaaaaaaaaaaaa

SEQ ID NO: 29937 - DNA, 3996 bp, Homo Sapiens
gctgcgcggagggctcggcgatcagcggcggcggcggcagtggggaggccgcagcgccatgggggggcgttagacaggctgcggcggccgaggcgaggggcggcagcggttatctggtccgcggcgaccttcggccgggcccgggggtgggaaggcctggggcgggggtcgtccctggttgcacggggccgcggggcggggctcgccggccgtcggggtgcaggaggcctgggccgctgaaaggagaaggcgccgtcggtcgccaggccctgccgccgggccgcttgacgacgacgctcccgcgggggccccgcctgaggaggacgcggcggcggtggcggcgaggccgcgggaggccgcggaggatggaggagcggaaggaggagggcgaggccgagatccaggagcacgggcccgagcactggttctccaagtgggagcggcagtgcctggccgaggccgaacaggacgagcagctgccccccgagctgcaggaggaggcggcggccgccgcgcagcccgagcacaagcagcagaagctgtggcacctcttccagaactcggccaccgccgtggcccagctctacaaagaccgagtgtgtcagcagccaggactttctctctgggtccccttccaaaacgcagccaccgccgtcaccaatctctacaaagaaagcgtggatacccatcaacgaagttttgatattggaattcagattggctatcagcgacgcaataaggatgtgttggcttgggttaaaaaacgcagaagaactattcgtcgagaagatttgatcagcttcctgtgtggaaaagttcctccaccacgaaactctagagctcccccaagactgactgtagtgtcccctaaccgagctacttcaacggaaactagctcatctgtagagactgatttgcaacccttccgggaagccatagctctgcatggtcttagtggtgcaatggctagtataagcgtgcgttcgagtaccccaggctctcctacacatgtaagcagtggatcgaatgctagtcgaaggagaaatggactccatgatgtcgatttgaacactttcatatcagaagaaatggcactccacttggacaatggtggaactagaaagcgtacctcagcccagtgtggcgatgtcattacagactcaccaacccataaacgcaacagaatgatctaaactgcaaacattttcacacccaccatgctgcttgaaagccacttgatcctcaacatatactataattgcaaaggaaacatgaggccatcttcccttgttcactgtttaagacaagtgaattctatagtggttgccataaaaggaagttctaggtatttatagtagatgcctcttgtaattatggctttcttaaaactataatcctagcagaggacatcagatattgtgtagtcgttagcaagatcatcataggcaaacatatatccgttccaaggctaaaagtgaccttaactgtatttattctcaaagggaaaggaaatatcagatgtttatttggttatagaatgctttttttttttttgggtccatttcctgctgtgttgagtattttgcttcaacagtattgccaggttcctaaaattgtctaaaaacatgatttggcttccatttttgcagctgcactgtaccatgcacctggtttctatatagtaacagtgtgcaattctaattattggactgtgccctgtttttagttttcaaatcaatttctaattctggtgattgtgtgatgtaaagaggtgctatgatggtcatgcaattaatactaaatattgaatcaatgcccagagctttattggattcactttgtgtgtgttagtgctctaaagtagcagtattattattaaactgtccccagagtaaccctgtaggcctaaagtactcagttttaagacaaacactacttcccatgcggggtactttccttatggtaaatgtaaacatgtagactgcattcgaggtgacctaaagtagagaggtcatgaactttgagaatgggcttcctttttggttcagtattagtgagagggagagggagatggatggtggggtaggttttctagtctatcattttacatttttcatggagtccctgcttagtgcagtttccattggaatgggtggaagatgataaagctctcttttttatctactaataatgtgattgcaacttaaaatagcaaaacccaactctccctgtccctccaatccctctcctaaaaagttcagtttggaatctcattctggaaaagatggaatcgcatggagattctctagctgttaggtagacctaaataaaaagttctcaatagattcctcttttgagtaaatataagacctcttgtagctacaatgttttagagcatgtttcatcttcatttttaatatcctgaactgaatgatagtgtttttttagatgaagaactgatgtcagcctgccaggtactgtaatttattctatcatattattatattatatatcaagtaggacagtgaaaaatgtttccttgcaaacttgtagtccagtatcagttacttcctatttttatccttaaaagaccattgcaaatcagtgtaagggtttttccagtaattactcacagcactttgttaaagtttgcaatttcttcagccatttaataatatctttctgtgaagaaactttgctgagttaaccataaatgttcattcattgactgggtgggatgtgaatggaatgttagaaatgttgtgtgaattgaagttctgtattcattatagatgtagcccttatttaaaaaagtgaattccatactaaaactaggaatgaaagtgagagatttctaaacttttgcgaaagtgggtcattttttgtttgactataatagcaggaagaattatagcaatctgtcattttacctgaaacagacaagcctatgtattatgaatactttcaagcttccctttggaatatacaagacatgcgtttggagttacctttgtttttctatcgtaaatttagattctggaattggggtttggtggtgcaatgtgttgctcacaagtggccagaactcctattcctaaaaggattttgagatggaggaacacatatttaattcccctttatgccttggttcttgctcctctttccacgttggataacaattttttggttgttttgtttaagttggtgctctgaagcttaatctcagtaccctttactctgaattgtcaaattttgataaaacgtgccattttctttggtaagagaaagcaggtcttaatgtctgccagaacacaatttatatgccttattggcttcattaaacttttagaaaactttagcatttgttacttttttccattgcatttactttcaaatgcacctaatgaatttgtcacccagtcgcaacttttcccttctctgtcccattgctttctcctttccccgacgcacagaataaacatgaagctcagcagtagaagcgtaatgatttccctcaggaaaaacttctgacagctaggtttttcaagggtttccctgtgctagctgagatgcaaaacaaatcatggaagattgcatacctgtgtggtattttaaaaacaagttgactttttcagtttcttgaacggttaagggtggatttaaaaactagacagtttagttttggggaacagaagctctcttcgtcttaagccagattctctgattcttttagacgtcatagctccttagttctgctcctgtcgccctaacttggcatgggcaagttgaagttcatccttagactgcagcgttctgagcatggctgaagtattaaaatgtttaatattttttagagcaaaattgatggaaagcatttggctgaatctaaagacctgcagtcagattcttcaatgtggtttacccaactggagtagtgataaacaccttaatcataaaatgaataaaaacaaaaaaaccaaaaaaaaaaaaaaaaaa

SEQ ID NO: 29938 - DNA, 8107 bp, Homo Sapiens
tgagggaagaagaggaagcgggaggagcttggcttcctcgcgtatttgaggacagcccatctcccttcaagaaccctacggagagtcggactgcatctccgcagcgagctcttggagcgccgccggccgggaggcgaaggatgcaggcggctccgcgcgccggctgcggggcagcgctcctgctgtggattgtcagcagctgcctctgcagagcctggacggctccctccacgtcccaaaaatgtgatgagccacttgtctctggactcccccatgtggctttcagcagctcctcctccatctctggtagctattctcccggctatgccaagataaacaagagaggaggtgctgggggatggtctccatcagacagcgaccattatcaatggcttcaggttgactttggcaatcggaagcagatcagtgccattgcaacccaaggaaggtatagcagctcagattgggtgacccaataccggatgctctacagcgacacagggagaaactggaaaccctatcatcaagatgggaatatctgggcatttcccggaaacattaactctgacggtgtggtccggcacgaattacagcatccgattattgcccgctatgtgcgcatagtgcctctggattggaatggagaaggtcgcattggactcagaattgaagtttatggctgttcttactgggctgatgttatcaactttgatggccatgttgtattaccatatagattcagaaacaagaagatgaaaacactgaaagatgtcattgccttgaactttaagacgtctgaaagtgaaggagtaatcctgcacggagaaggacagcaaggagattacattaccttggaactgaaaaaagccaagctggtcctcagtttaaacttaggaagcaaccagcttggccccatatatggccacacatcagtgatgacaggaagtttgctggatgaccaccactggcactctgtggtcattgagcgccaggggcggagcattaacctcactctggacaggagcatgcagcacttccgtaccaatggagagtttgactacctggacttggactatgagataacctttggaggcatccctttctctggcaagcccagctccagcagtagaaagaatttcaaaggctgcatggaaagcatcaactacaatggcgtcaacattactgatcttgccagaaggaagaaattagagccctcaaatgtgggaaatttgagcttttcttgtgtggaaccctatacggtgcctgtctttttcaacgctacaagttacctggaggtgcccggacggcttaaccaggacctgttctcagtcagtttccagtttaggacatggaaccccaatggtctcctggtcttcagtcactttgcggataatttgggcaatgtggagattgacctcactgaaagcaaagtgggtgttcacatcaacatcacacagaccaagatgagccaaatcgatatttcctcaggttctgggttgaatgatggacagtggcacgaggttcgcttcctagccaaggaaaattttgctattctcaccatcgatggagatgaagcatcagcagttcgaactaatagtccccttcaagttaaaactggcgagaagtacttttttggaggttttctgaaccagatgaataactcaagtcactctgtccttcagccttcattccaaggatgcatgcagctcattcaagtggacgatcaacttgtaaatttatacgaagtggcacaaaggaagccgggaagtttcgcgaatgtcagcattgacatgtgtgcgatcatagacagatgtgtgcccaatcactgtgagcatggtggaaagtgctcgcaaacatgggacagcttcaaatgcacttgtgatgagacaggatacagtggggccacctgccacaactctatctacgagccttcctgtgaagcctacaaacacctaggacagacatcaaattattactggatagatcctgatggcagcggacctctggggcctctgaaagtttactgcaacatgacagaggacaaagtgtggaccatagtgtctcatgacttgcagatgcagacgcctgtggtcggctacaacccagaaaaatactcagtgacacagctcgtttacagcgcctccatggaccagataagtgccatcactgacagtgccgagtactgcgagcagtatgtctcctatttctgcaagatgtcaagattgttgaacaccccagatggaagcccttacacttggtgggttggcaaagccaacgagaagcactactactggggaggctctgggcctggaatccagaaatgtgcctgcggcatcgaacgcaactgcacagatcccaagtactactgtaactgcgacgcggactacaagcaatggaggaaggatgctggtttcttatcatacaaagatcacctgccagtgagccaagtggtggttggagatactgaccgtcaaggctcagaagccaaattgagcgtaggtcctctgcgctgccaaggagacaggaattattggaatgccgcctctttcccaaacccatcctcctacctgcacttctctactttccaaggggaaactagcgctgacatttctttctacttcaaaacattaaccccctggggagtgtttcttgaaaatatgggaaaggaagatttcatcaagctggagctgaagtctgccacagaagtgtccttttcatttgatgtgggaaatgggccagtagagattgtagtgaggtcaccaacccctctcaacgatgaccagtggcaccgggtcactgcagagaggaatgtcaagcaggccagcctacaggtggaccggctaccgcagcagatccgcaaggccccaacagaaggccacacccgcctggagctctacagccagttatttgtgggtggtgctgggggccagcagggcttcctgggctgcatccgctccttgaggatgaatggggtgacacttgacctggaggaaagagcaaaggtcacatctgggttcatatccggatgctcgggccattgcaccagctatggaacaaactgtgaaaatggaggcaaatgcctagagagataccacggttactcctgcgattgctctaatactgcatatgatggaacattttgcaacaaagatgttggtgcattttttgaagaagggatgtggctacgatataactttcaggcaccagcaacaaatgccagagactccagcagcagagtagacaacgctcccgaccagcagaactcccacccggacctggcacaggaggagatccgcttcagcttcagcaccaccaaggcgccctgcattctcctctacatcagctccttcaccacagacttcttggcagtcctcgtcaaacccactggaagcttacagattcgatacaacctgggtggcacccgagagccatacaatattgacgtagaccacaggaacatggccaatggacagccccacagtgtcaacatcacccgccacgagaagaccatctttctcaagctcgatcattatccttctgtgagttaccatctgccaagttcatccgacaccctcttcaattctcccaagtcgctctttctgggaaaagttatagaaacagggaaaattgaccaagagattcacaaatacaacaccccaggattcactggttgcctctccagagtccagttcaaccagatcgcccctctcaaggccgccttgaggcagacaaacgcctcggctcacgtccacatccagggcgagctggtggagtccaactgcggggcctcgccgctgaccctctcccccatgtcgtccgccaccgacccctggcacctggatcacctggattcagccagtgcggattttccatataatccaggacaaggccaagctataagaaatggagtcaacagaaactcggctatcattggaggcgtcattgctgtggtgattttcaccatcctgtgcaccctggtcttcctgatccggtacatgttccgccacaagggcacctaccataccaacgaagcaaagggggcggagtcggcagagagcgcggacgccgccatcatgaacaacgaccccaacttcacagagaccattgatgaaagcaaaaaggaatggctcatttgaggggtggctacttggctatgggatagggaggagggaattactagggaggagagaaagggacaaaagcaccctgcttcatactcttgagcacatccttaaaatatcagcacaagttgggggaggcaggcaatggaatataatggaatattcttgagactgatcacaaaaaaaaaaaaaacctttttaatatttctttatagctgagttttcccttctgtatcaaaacaaaataatacaaaaaatgcttttagagtttaagcaatggttgaaatttgtaggtactatctgtcttattttgtgtgtgtttagaggtgttctaaagacccgtggtaacagggcaagttttctacgtttttaagagcccttagaacgtgggtattttttttcttgagaaaagctaatgcacctacagatggcccccaacattctcttccttttgcttctagtcaaccttaatgggctgttacagaaactagttcgtgtttatatactatttcctttgatgtcctataagtcggaaaagaaaggggcaaagagaacctattatttgccagtttttaagcagagctcaatctatgccagctctctggcatctggggttcctgactgataccagcagttgaaggaagagagtgcatggcacctggtgtgtaacgacacaatcagcacaactggagagaggcattaaagaaccagggaaggtagtttgatttttcattgaattctacaagctaatattgttccacgtatgtagtcttagaccaatagctgtaactatcagctgcaataccatggtgaccagctgttacaaaagattttttcctgttttatctgaaacatactggatttatatatgtataagcgcctcaatggggaattagagccagatgttatgatttgtttgctctttttcttttatagttatagcaaaaatatggataatttctagtgaatgcataaattaggttgcgtttcttattttgctttaaatctctggtagtttttccacccctgtgacacaatcctaatagacagtgtcctgtaaatggacacaacacaataaagtcaagttattattgctgttactctggatgatatggaaaacactgccatattttaaatcaactactccacgtgtttttccatccaatcacactgctgtgattcagggatctttcttctaaaacggacacatttgaacctcaggttcatcacaaacctggtacctgttgcttcccagaggatggagaagtgtagttaatcacacctcttagtttaatctgaaatcttgacccagttatttaacaaataaatacctcattgattatatttaaaagtaatacacttcctgtaaacaaatggggacaatgcatccaaaaaatctttttaaacagattacacaaaaattatttccagaaaggctaccatttatcatcattatatttcaagcctcttatacttaataagcactttctaaaaagtcttgagatcccaccattctgaggaattcaatatgatcactttttccttctttgcctgggagaggttaagaggcggtttcgaaggtatagatgctattgttctgatggcccggctgaataaaatggaaattctagtttgttagaattatgcattctttttcaagattctcagtgtgcctaacttattggagcacatcagtttcttgggtaatggaaaacattacctagagttgccagtggcacattacaccagtacagagcacattccaaaggagacattggaccagttaattcccatacaagtcaaggtaacagaacaaaagggaatcctgatgcccttttaccattgctggttgagctcaggcactgtcatggacacccttaattttaaaaggttttaatcattcttctataaaatacatttaaaatggaaaaatacttaatatcactaaatatcagaacaatgtaacatttacaaatgacatattgaaagcaaaggctgttttatttagccaagatgattaccattaggagttactttatgtattgttgaaagcaaattttaaacatgatgttttagaagtgtttctgatttttaaacctggtttacaggtattacttctgcacttaccaaataatgccagatggaaatttattatttcttgcaattcccgtgatagctctgttctttatgcattgtctcaacactttcccttttttcccaaaatgagtagagaattaaagccacccaaaacagcttctgctactaaaatgttctcatcctttctcctccctctccttttcctgccacaaaaggtgaaaaatgagatccaatcctctcaccaaaatttcaaacctaggacactggaatgactgcagggatcagtggttctcccatatcaccatcaattaagacatataggacactgtcttccttcaagagggttacaatgtggccatcagacaggaaaccaaacggtggataaagtattaagtaactaagtgccaaataaatgctggaaatcttgacctctccttgggattatgggtgtaacaaaaatccctacatctgtttatgaaggccatattcagtacattttaaatggtaaataatctgtttatgtgaagaaaaagaattaagtctttcttccaactctctccttggatagcctagcacagtgcagcctccataaccatgacattcccgcccaagctctcagtgcctaatcctgctttgtcattcacatctcacaaaatcttgacatcttacattccaatacattatcaagcaagcacaagtatgctggtagtagcctctttaaataatatgtatagacaacaacaacgacaaaaaatagactgttttaaagtttcagggaaagttggtggctgatttaaagttgtgcaggaaacatcttctgtgtatgaagcaaatgtcgatgttttgaaaagctaggagatgactttgaatgaatgcaaggttagtgagatcctaagctctcaaaatagcatattccctagagctcaagaaagctggtccaggaggttgaaaaagctattttgttgttaaattattttctggcccttcttaatatttaaaaatgtatttccccttgtggctttcaaccacctgctcaaaaaaagagacttgttacatgaaagttttcattaaagagctgaaaacaagaatttagagagccattcctagaaaatgtcctactgccctgcatttgacaaacaagcatcctttactaacaagagcaggaattcagaggcacaagaaaaagcattggcatgagccaaagagtctgtcttaatgttacttttgaaaatctgctgagcggccaccatatgcaggctgagagctgggcacaggcgaagccattggaagcacttcaggaacaagcacacagctgtgggacttgaacatgcaagtgttcaggttgtgtcaagaagcttttctttccttctatgatggaatctgttcttttctatcctacttttttctctcttcctctcctcaccacattataccctgctcttacgcagtaaacgttttaatggcccgtttatgtctcatgcctccaaacaacactgaatttgaaaccccccattttttcttttcaccaccctgttgagcaattttcccaaaaaaagggcagcaattattaaattgaattcaagtttctagattttactaagttttattttgtcaggttttttaaattttttcagtgagcgtggtgactgcagaggttagtgctgtgaaaagctgggctaaatattctttctgtaaagtcaaacaggattccatcccctgtgaaataacacaaaatttcactctctaaaagcaacagcatgtaaactagaatgaaagaaggaaattatgtacgtatgcctaatattctttgtgaatgtctttcatttaactaaaattatattagaaaccagattgataaataaaaaattcaaagtagttttaattatcct

SEQ ID NO: 29939 - DNA, 5282 bp, Homo Sapiens
ccggcacccggagctcctgggcacacggcattggcaggggccgcttcggcagagtgatgactgatgatgagtccgagagcgtcctctccgactcccatgaagggtcggagctggagctgcctgttatccagctgtgcgggctggtggaggagctcagctatgtaaactctgctctcaaaactgagactgagatgtttgagaaatattacgctaaactggagcccagggatcagcgacctccacgattatcagaaattaaaatatcagcagcagattatgcacagtttcgaggcaggcgtagatccaaatcccggacaggtatggaccgtggggtaggcctgactgccgaccaaaaacttgagctggtacaaaaagaggttgcggacatgaaggatgacttacgacacacaagggcaaatgcggaacgcgacctgcagcatcacgaggcgatcattgaggaggctgaaattcgatggagtgaagtttcgagagaagtgcatgagtttgaaaaagatattctaaaagccatatccaagaagaaagggagtattttggccactcagaaagtgatgaaatacattgaggacatgaaccgccggagggataatatgaaggagaaattacgtttgaaaaatgtttctctcaaagttcagaggaaaaaaatgcttttacaattgaggcagaaggaagaggtgagtgaggcccttcacgatgttgattttcagcagttgaagatagagaacgctcaatttcttgagacaattgaagcaaggaatcaagaactgacccagctaaagctgtcatctggaaacactctgcaggttctcaatgcctacaaaagcaagcttcacaaggcaatggaaatatacctcaatctggacaaggagatcttgctgagaaaagagctacttgaaaaaattgaaaaagaaacactacaagtagaggaggaccgggccaaagccgaggcagtgaataagaggctccggaagcagctggccgagttccgggcaccacaggtgatgacttacgtccgggagaagatcttaaatgcggacctggagaagagcatcaggatgtgggaaaggaaagtggagatagcagagatgtccttaaaaggccatcgtaaggcttggaatcgaatgaaaataaccaatgagcagttgcaggcagattaccttgctgggaagtagccagaggcaggccacggcttacagaccactacatgacctataaaagtaatcagctcctttctagtcacgggctcctctcactgttccctgtctgcctggtgttcccaaccccccacccaggctgagtatcatctcctgggccacatctgcccatggggagtgttttcacagcctggcccctggaactgttaccactgaaagaaccacagggcactctaatggtttgacacttgttagccagcatttagttcacaagcatagtgaaagtgaccttcccacacctgggagagggatagaggagggagagccagcccagtgtatgccatgggcttatccgtggcagccccagtgtgcaactatcaaaaacagacatcaaaacagcatggtgaatgcctggcactcagcattctcagtttactcttcagtttggtggggtagctcctggactagatactgctgcaaaagaaaacaagcacgaaggaaaccaagatgatttcttcgggctgatacaacctgttctgacctgcaaaaatcctaccttcccccacctccccaccgtaatagtcatagtataagggttgtacagacgcctcaggagacctgcctgattcctttacatccttctccctaacatctagactatctctagagctgtttcctagtcgtgaatgcgtgatggtccttctttgtccctgcaagtatgatccaacatggcccagttcagaatcagaatatgtcttctgtgtcatggtggcatttggtccatggtgggagaaagaaatcaacttttcccagtggtggagtgaggacaggggagggccggccctctcagccttggatgtgatccatttgctgtagtcttccaccttggtgtacagaaacaggccagggcacgtctcaccaccgaagttcaggactcctctcagaacccacagatcgaactgctgtagctggcacatcattgggcttcctgggtccccctgtgataaaagacagaaggcttcaagtcttagaaaaactagtttttgttgtaaatctatccttgtgcaatatactgtttgttctagaaatgttttacgctggttctcactggaaatggggcaaattataggatacaatttcaaatctaggcagccaccaccacaaattccaacaagatgacttttccttttattatgcaaattagctgtggacttctgctgattgcctatagcttcctggttcatatttcattttcttgcccctttccagtcctttggccaaaccttccctctcttctggcttctcattcctgaaatgttggtgtttgtttctgttttgtcctgaaatgctcacattttcccttctctgccttgcttcaacccttagtgtaagccacttcctgccacctggcaactgcttaccagcctggctggccgtgctctgggtcttccctactcccaatggagcagtcctctgggacttgggaattctgccacatacactttatctaacttaaagtgacggagtagaagcttggcatcattagctagatatgggaccctggcaagtgaccaaatcctctctgagccaaggtgggaacacagttaatgcctgtaacacgtgctgagcacagcacagtgcctggcacacagcaaacactcaatagaatattagctaccatcatcctgatgtcgctataaaggccagcatttttctgaaaagttggggaaaatgggaaaagcaacaaggcaactagtaggtatcacttaccttacctgcccagaccccacacccctaggtctcctctcaaaggaattcctgcccctcccatggcccatcttggtccgagaagggggtggtcatccccaggctagccagccacttctgacctgtgtggcctgcctggctggaaggcccaggcaatgacatgttgctctcgcagtttggactgagacatggaatggggccgcaattaacaacaggaaacaatctgaacagactgaaccacgagcagcagaaaggcagaagagcagccgcttcagccccttaccatccgagacctgggtgtgtggtctgtcttggtcactctctctgtctctctttctctctttctttctctgtccccaaggctggagtgcagtggtgcaatcttggctcactgcaacctccacctctgggattcaagcaattctcccacctcagcctctcgagtagctggggctacagctatgcgccaccatgcccagctaattttttttttttttttttgagatggagtcttgctctgtcccccatgctggagtgcagtggcatgatctcggctcgctgcaacctcctcctcctgggttcaagcgattctcctacctcagcctccccagtagctgggattacaggcgcccaccaccacacctggctaatttttatttttagtagagatggggtttcaccatgttggccaggctggtctcgaactcctgacctcatgatccacccgcctcggcctccccaagtgttgggattacaggcgtgagccactgcacccggcctaatttctgtatttttagtagagatggggtttcacgatgttggccaggctggtcttaatctaacttcaagtgatctgcccgcctcgccctctcaaagtgctgggattaggcatgaactaccatgcccagtggggtattctctttcaataaagctcctcttttccaaggaagccacaccagaacagagatgaagaccagtgggaaaacatgggagcaactccgtgggcaggccagcggggaggccatgctgcaaagctgccgtgattccctggtgatctctcagcaggccaaggccagacatgtgaggaaggccttgaggacttcattctgtgcctctccttggatggaagggggtgctttagtgtggcactcctgacttttcaattgactggtgaagaggcccttgtgtgcacctcactatgtctgcctaggtcatgggggctccctggccaagaatgacgtggttccccctttcatcagtccgattcgcagtttgtcttaactgtagtggtatagccagagcaagaaaaagaatgtgatttaggacaaatgattggatgagtgattggtagatgtcctcagctatggcgtggttttgcaggtcactgttccacccacctgggcacagcatatacgctttttctcttccccataatcccgtaggggctgcgacttctgaagcacaagaggcagaggcgaacagctccaggtgcccctctggagctaccctacctcatctcccaagggagcggccacagcccagagtggggtctttcattttgtgatcttttcccttgacattcagcaaaagccctgacagtggtagaataaaggcaggatgggtgagtgcagagtgattctgcttttgttgggtttcagggaaacccataggcagattctgaacctggtggttgattctacatgtgggaattgtggctttgaagacctctggacatgagaacatatttccaagacagaggattctatggggacgggtcaccattaaatggtgtgcaagcataattctgttcaaaaatgaaggcatgtttagaggtgtgtcacagttaaaaaccaacctgaactttgcagttagattttaaaagatggtcagttagagtagaaatagcttagaatattccattgagtctaagatacagttagaaatcaacatctttgaaattagggtgtgtcttttaatcagttgatgtcagagtttaacgggcagcatttttttctttcttgggattacaaaaaatgatggtgcattctataattggcagcatcttagatctgaggaagtatgatacttgtttgacggaatggttgacggcagaattttgttaaaaagctatatcttcactgtattttaacacattatctaatttaagaaattgttaagatcccccacctggcagaggacccagtacaaaataggcactcaatagatgttacaccaactttggaagggcaaacatatttcttaatgagaggcagtccttcatgttttgcaataaaatgacttttaaaaaaaaaaaaaaaaaaaaaaaaaaaaaaaaaaaaaaaa

SEQ ID NO: 29940 - DNA, 2089 bp, Homo Sapiens
gcggccgctccgtgtgccctggactcgccgcccgcggctcggaagctggagagtcagcgacggggcccgactgcgggaccgagggctgcaagaagaagcgaacaaatagtccccagcgcctcctctggatgcggtcgcgtctgtggtcctggcagccgctgggcgggccaggccaggtcgggccgggccgagccgggcacatggacctgggcctgcgggctctaattgcggcgcttatgttgatgattttttttttaatcacagcagcccccagtttagcggactgatttactcccggtattggtaaatatgatcacgtgggccgcgcgaccaatggtggaggctgcagcctgcgaactagtcggtggctcgggcgccggcggggagctgctcggcggcggacagtgtaatgttgggtgggagtgcgggacgcctcaaaatgtcttccagtggcaccctcagcaactactacgtggactcgcttataggccatgagggcgacgaggtgttcgcggcgcgcttcgggccgccggggccaggcgcgcagggccggcctgcaggtgtggctgatggcccggccgccaccgccgccgagttcgcctcgtgtagttttgcccccagatcggccgtgttctctgcctcgtggtccgcggtgccctcccagcccccggcagcggcggcgatgagcggcctctaccacccgtacgttcccccgccgcccctggccgcctctgcctccgagcccggccgctacgtgcgctcctggatggagccgctgcccggcttcccgggcggtgcgggcggtggcggtggtggtggaggcggcggtccgggccgcggtcccagccctggccccagcggcccagccaacgggcgccactacgggattaagcctgaaacccgagcggccccggcccccgccacggccgcctccaccacctcctcctcctccacttccttatcctcctcctccaaacggactgagtgctccgtggcccgggagtcccaggggagcagcggccccgagttctcgtgcaactcgttcctgcaggagaaggcggcagcggcgacggggggaaccgggcctggggcagggatcggggccgcgactgggacgggcggctcgtcggagccctcagcttgcagcgaccacccgatcccaggctgttcgctgaaggaggaggagaagcagcattcgcagccgcagcagcagcaacttgacccaaacaaccccgccgcgaactggatccacgctcgctccacccggaaaaagcgctgtccctacaccaaataccagacgcttgagctggagaaagaattcctcttcaacatgtacctcacccgggaccggcgctacgaggtggccaggattctcaacctaacagagagacaggtcaaaatctggtttcagaaccgtaggatgaaaatgaaaaagatgagcaaggagaaatgccccaaaggagactgacccggcgcggtgctggcgggagcgctcaagggcagcggatttgttgttgttgctgttttcctttgtgggtgtttggtgcttgatttccagaaactctccagcgacttggacttcttcttctttttttttttctttttagatagaagtgactgtgtggttggtctctgaggtatttgggggactctgtatttgctcgtttacgtgttggaaaaaccaagtggctttggggtttcgccctatcccactccctctctttcctgctccattggttccttaagaaatgctatattttgtgagtgcaagctggcttggggagccctctcttgtgtaaatgtcccccatgtttctgaaaagtgctgtagtttagtcccctcacccccagcactgcccaaacaggggccaagtgcgccccaattccaagaatgaaggcagagcgacaacagtgcggacaccccggctgctagcccacggtgaagcccggcggggttgcccaccagttgcgaaagccccctttcctcagggagcacgcgggacctcggtggagatctccagtgaggcttagaggagcccagggcctcgggcgggttggggtttgtcctcagtgcattggacgcgctgctc

SEQ ID NO: 29941 - DNA, 1847 bp, Homo Sapiens
gggaaacgcccgcgcggtttggggcaggcgtggccgtcggggcggagggcggtggccggccgcggtccgggcgtcaggccgggcggcgggggcggcagggaggcggcgctctggggccgcaggcggacgtactctgtgagcggcgcccgggcgcctgggcaggcgcctcccgagtaccggcgcccattttgcccgcccgctaaggagacccgtgcgcggcctacacgcttgggggacagccctttaagacgacatctccgcgaacgccggcctcttgagccagggggacgctcttttgaaagtcagtcccaaaacagttaaggttttattttattttgttttatttccaagtcacagcccccgaatctcgtacaactctccctggaccacttccggttgccggcccgcgcctcataacttcggttcgagtgacctcggcccgggatgcccctcggctcaccccgggctcacgtcgcgatcctggcttgagtggcccagggtgggagacctggaagttttagcctagctgttctcaaggcggattaattagcccaagaaacattatattcatgcttaggtggagaaaagcagggctagaattggaacccaaagcccagaatggcaggagaggatgtgggggctccacccgatcacctctgggttcaccaagagggtatctaccgcgacgaataccagcgcacgtgggtggccgtcgtggaagaggagacgagtttcctaagggcacgagtccagcaaattcaggttcccttaggtgacgcagctaggccaagtcaccttcttacctcccagctacctctcatgtggcaactctacccggaggagcgctacatggataacaactctcgcttgtggcagatacagcatcatttaatggtcaggggagtacaggagctgttgcttaagcttttgcctgatgactaacctggtgctgggattctacgaagatatgctcctttgttctgttcagtatttggcaatcacttcatccactactgcagtgcacccacccttgggcctggggggagggagtgggttgaaaaactgctcaagaaacagaagtttagcaagggtcatgaagaatactgcaagtgaaactgcagagagaggttacgtaggcagaaagcaagtcaacaaaagcacttagtcaggatccgtaacttgaaattgactcctttggaaattgccatagaacccttaatggacatcatcggctggacctgggatctgatgaatcccacaaaagtcagcaccttctacagaacagatgccctgatcaccaaggacttggtactgatttagagagaagagagcagctcctagcagcatcaacatctatttgtcgcttatttgccctgcagcaattcacctgcctttccttctcccatcctttttctggatatgccgcagaaggatccgtgccagaagcaagcctgtgagatacagaaatgtttacaagccaacagctacatggaatcaaagtgtcaggctgtcatccaagaactgcgtaagtgttgtgctcagtatcccaagggaagatctgtcgtctgttcaggatttgaaaaagaagaggaagaaaacctaacacggaagtctgcatcaaagtaaagttcttctgaagtgctgctccatgtttccaccaaatgaattttttttatcctcctgactcttcaggccaggtagcagcaaatagcaaatgaaaaagtcagctacaaaagttaatgaatatgccatctatgcagaacaggcagaaatataaacacattaaaagacaaatatgtagaatgtaatatactgagctgctaaaataaacctgtttaagagaaaaa

SEQ ID NO: 29942 - DNA, 2748 bp, Homo Sapiens
agtaagttccagcgcagctagaccgcggggtagtcggcgcgaggcggagcttggcagttccgtccacttcagccgcagcgtccctcgccgggtgtctcgccgcagcctccggagaggaacagaccctcactctctctgtcagaaaaatgtctgctccagctcagccacctgctgaagggacagaagggactgccccaggtgggggtccccctggccctcctcctaacatgaccagtaacagacgactacagcaaacccaggcacaagtggaggaggtggtggacatcatacgtgtgaacgtggacaaggtcctggagagggaccagaagctgtcagagctggatgaccgagctgatgccttgcaggcaggagcatcacaatttgagagcagtgctgccaagctaaagaggaagtattggtggaaaaactgcaagatgatgatcatgctgggagccatctgtgccatcatcgtggtagttattgtaatctacttttttacttgagaatgtaccaccccttccctgttgtccattgccatccacattcatgtcctctgccctctgtttgctctctcaacacacttccccacccaccgtcctccattccagcccaggcttctccatcacccattcctcctttttcgttgcgttcatttgcactctgtccctcaacactagaaatgctgctcgtggcacaatctaagtcattacccgaagagcaacagctggcgcctcctccctgcctgctttttctgtactctcaagttcccccaaagccccaaagagttggaggccaagggaaggggcagggaggggagtggctgaggcgaagtacccatgaagctgcccagacttgggaggagaagagtatcggtgcccatggtgacttctagaaaacctggccactggtaggagctagggaggggctgggaagatggcagctcactcagtactgcctggtcatgtggagctttccttcctggaccaggcctggagagggtcctgggggtggaccaaagtccaacttggtttcagtgcagtacccttttcgaaagtaaaaacttgttttttgtagttatttctaatctgttcgtccaggattttccgtgtctttggggatcttacaactttactttgttctccagaggcctggagaacacttagggattgtgaaaatagcaggacttgtttccatcctagaagcagtcccatgtgcttctagctggaaggagctttctcttctttacattttctacagcattctgtatgagggcaccaaataaatccatctagctggtagttttatctagccaaataatttaacctagctcccagttaattgttggcataaagagagagattgcctgttagttatagagaaacagtgagtcaagtgcttaatttgaaagtaacaagctcagaggaagccactccttgccctcgttaaagagggtcctgttcctctcttcctgttgatgaaggagcgtgagggtgttagcagtgtgagatctttggacacccatggaatcctttcctccacaccacccgtgcacttgccaaagacagggatgaggcaagtggttcttcctggggcccggccgatcctcaggatgcagagaagtcatgtagacccaccagccccaccttggggggaggcgtgccagcctgtgtcaggtgtgcttgtgtattgctgtgctgtcatggggccctctccttgagagccgcctctctgttcttcctgtagtatattcccctttgaaccaccctttcctgtctgaattctactttgcctcctttctcttcctcctctttgcatggtttgtgtgtatagacagtggaacctgaggatgggatctgctcagcctatcttcggggcaattgctgagcttcaggatgggctattaatgtgggataagcccaggtgcaaggggaggagggcaggctgggaacagagcggagaatgcccatggccctttattccttcttccctcggtccacgaacaggaagaggctgaggccatgctgggcagggtctggatgcccactttccatgcagcagcatttcattgctcaaaaccatccttcctttcctttcgcccttgtttcccacattcccttcgtcctgcccaagggcgggactgaagagctggaagaaagcagtcagtaccctcccaacggcccccctcgaaggtctccactctcctctgggctcctccttgcctaatgcagggggtcaccgctggagaagaaccaccactgtcctcgatgtgtcccaagcctggagcgaatccgtcctcttggctctcccagccctatcacaggaatcattcctgggtttctgtccctctgaggctcaccaggtgtagttggccttgttctttgggggtattagcccttctactttctttctcacccaccctgtaccctcttctgtgtgtctctgctatccccctttcctcccaccacccatgtgcatgagcaaatgtgcaacaaaaccctgggactttgcagtcaaatgaagctgagcttcccacatcccgttcttcggtttgccatgagacgatgtggggtttccactgtgtgtctgtcatcacctctttgtctttttttcctaaccctgatctcatacttgtatagagtaataacaacagttgtacttccaccaaaggcatgtggcatatttaccaatgtcatgtattctgaacaaaggcaaaaaatacaaattcctaccattaaaaaaaaaaaaaaa

SEQ ID NO: 29943 - DNA, 5067 bp, Homo Sapiens
gcccggacacctgtctgcagcatggataagtatgacgacctgggcctggaggccagtaaattcatcgaggacctgaacatgtatgaggcctctaaggatgggctcttccgagtggacaagggtgcaggcaacaaccccgagtttgaggaaactcgcagggtgttcgccaccaagatggccaaaatccacctccagcagcagcagcagcagctcctgcaggaggagactctgcccagggggagtagaggccctgtcaatggagggggccgcctgggcccacaggcccgttgggaagttgtgggcagcaagctgactgtggatggtgctgccaagcctcctcttgctgcctcgacaggggcacctggggcagtcaccaccctcgctgctgggcagcccccgtacccaccgcaggagcagagatccaggccatacctgcatggcacgaggcatggcagccaggactgtggttccagggagagcctggcgacttctgagatgtctgctttccaccagccaggcccctgtgaggatccttcctgcctcactcatggagactattatgacaacctctccttggcaagcccaaagtggggtgacaaaccaggagtgtcccccagcatcggcctgagtgtagggagtgggtggcctagctccccggggagtgacccaccactgcccaaaccctgcggggaccatcccctaaatcaccgacagctctccctgagctccagcaggtcttctgagggtagcctcggtggtcagaatagtggcattggtggccgcagcagcgagaagccaacaggcctttggtccactgcctcctcccagcgggtgagccctggcctgccttccccaaacttggagaacggagcaccagctgtggggcctgttcagcccaggactccttctgtgtcagcacccttggccctgagctgccccaggcaaggaggtcttccaagatcaaactcggggctggggggtgaggtttcaggtgtgatgtccaaacccaatgtggacccccaaccctggttccaggatgggcccaaatcttacctttccagttctgccccgtcatcctcgccagctggcctggacggttcacagcagggtgcggtccctgggctggggccgaagcctggctgcacagaccttggcactggtcccaagctcagccccaccagtcttgtccatccagtgatgtccaccctgcctgagttatcttgtaaagagggtcccctgggctggtcttctgatggtagcctgggatctgtgctcctggacagccccagctcccctagggtaaggctgccctgccagcccctcgtcccaggtcctgagctgagaccctctgctgctgagttgaaattagaagccctcacccaacgtctggagcgagagatggatgctcacccgaaggctgattactttggagcctgtgtgaaatgcagcaaaggggtgtttggggctggccaggcctgtcaggccatggggaacctctaccatgacacatgcttcacctgtgcagcttgcagccggaagctgagaggaaaagccttttattttgtcaacggcaaagtgttttgtgaagaagacttcctgtactctggtttccagcagtcggctgacaggtgttttctttgtggacatctgatcatggacatgatcctgcaagccctggggaagtcctaccaccccggctgtttccgctgtgtcatctgtaatgagtgtttggatggggtgcccttcaccgtggactcagagaacaagatctactgtgtccgagattaccacaaggtgctggcccccaagtgtgcagcctgtgggcttcccatccttccacctgagggctcagatgagaccatccgtgtcgtgtccatggacagagactaccacgtggagtgttaccactgcgaggactgtggtctggagctcaatgatgaagatggccaccgctgttatccgctggaggaccacctgttctgtcactcctgccacgtgaagaggctggagaagagaccctcatctacagcccttcaccagcaccacttctagccagagccacttgcagacatcacggcaggggatgaggagccggggttgctgctgctgcttccggtggcccctggggtggaagtggggtaggggaagaggaggggcaggagggagagttcctgtgagcatgtggggggtgcctttcctttaaccagggaggtgaacactacctgcctcctgcgtgtattttccaagtgcttttctctgttgccacattttcctcaggttactcaggaaaatgctccagcatgtgcgagcacatgacctgaggttgcatcatagcaccaaaggaatcctcctgtcccctctgggaacatttcatgcttcagagggagaggtttttattgagcttgtttcacaatatccccttgaagggacagctcagctgccaatacattcaaccctttctcttccttcaggaaaatacctatacccaaatgttccctcccccgacatatatcatggcatgacttaaggcttcttttcacctgagagcttcagttcttctgcagaatggctgcaaatttaattgcattaaggcaagaaggaagctctaatgtgtgctttgtatcctaagataaatttgcttagaaaaccagagtcaagatttgaaataggtgaggcagggtttcctccttagacactgacagcattctccgtaccccttcaaatccttactctcctaaaggcagctgagtccgcgacagaaatttgccctatgggagtaaaacatactttgggagaagaacttggtgcaggcaccaggatttttttttttgcccacgtgtttgcgctgtttttctctggagttctcaagagttggtgacttggaaggccgcttctgcaaggcaagtctcaggaacccatgcaggtacatcgcttgcacctgtttttagcttatttaatgacgggcttttgggaagagctgcccgcatactgagagacagcttcttataaacaaggagagtttttgtgtgtgcgagatctctaagccagcgtgggagggagcgcctcaggataagttattatattcatttcgttggtttctctcctgcccaattcttggcacaggcattatgtttgaagaaaccaggataaggtacactgcttttgtctgtttaatttttttagttgtttcccttcactttcagtcttccacacacaaaaaatacctcacagagcttcaccaaatcacagattcaggaggaatttggctttcacactggactcagataccttcttcagtgtgttggaaatcactggcttcacacaggcccaactccaactggtcagggcagagtgatcgtaactaaaggtcagtggggaatagatccgattcagtgcttttgccttatgcatttcagcatcctggctccccagggtggcaggagctgaggaagggccacacactggcaagatttcaagaccactctctgcactgaagaggtaaaatttgcactgcaagtcacatccctgaggccagaggtcagtaccctttggtatttcgattagaagaagctgcaaaagaaaggcagcccattttaccattgccagccaggccggggacacaggagccggtgtgtgcactctgcctcctaacattgcacccagagcaagaggactgggtgctgggctgcagaggccggtcagtggagcccctagcacgtgtgaactcaggcttttcattgggcccggctccacttctaggccatgttttgactcatttggtaaccattgcctgtaagcagcacagaattggtgccatggattatcttttccatgttgatggaattcattctgttggaatcctttggccagatgtcacttcagccagggtgtgcatcatcattggttctttttcacaggctgagcctcctgaaaacccatgaacgctggggctggggaagtgaaccctgaggtggggaccctctcttcccatcaaatcatccagctcagtgtggggcgtggcaggggggtaaatgaagccagccaatgtgttaacctgtctctgtcaacctaagaatgttggccttactgacacacctttgctccatgttcaagaccagaagtagctgggatttgtttgcaaattgggtaattagtttaaaaatctgtgattacatttttaaatgaaattttcaaagtggcctagattgaggtgattcagataggtttgcgaatataccattttatattgttgagaaagaacaaaaagggaatttccagatgtcctagaaatcctagcaacagatttctctggttgtcagtttccctggagaaggcgccagataggaatctccaatcagttgtttttctcttcgcttcaggcccttacacaaaagccatgaagagatgttcacctacccggtattttaaatgttctgtaaattattagccaaatagaactgtaatggggttgtatttatgggcgcctagaaagaaaacacaaggacttggtaggccaggaagaaaagattttaaaatttagaatgaatagcccttctgggttttctttttgacaattcttggacttgaggtaaaacaaggaggattgtggccggatttcagatcccaaagccagcctccatcttaggcctttgcctcattgtgccttttaggttttcttacccaccgtctcctgttttgtcttttttttcttttctcctacccctatcttgggacattcagaaactgcctgggtggtttgagaagagacaacccagtttgatctgcaatacaaggatccattcgtaatctctctctcactgatgttattcccccatctgccgtcttggttcatctcaccacagaagggcatttagtcctacccagccatcggctgcggtatgacagcaggatggcacttcccatttctctgtggttagtgctcgagtgaaaacctctttcagctgagtcctctgaggttctgctgttgagtcctgggtggctgatggaatgattgaggaggtctggtcaccctcaagcgccgtcatcgccttgtttccatgggcttct

SEQ ID NO: 29944 - DNA, 2893 bp, Homo Sapiens
acccagaagcgtgtgtgtggagggaacacagccccagtagttacccccagacctcaggggctgaagtcaccgctggggctgaagtcatccttcatggatgcccaggcctgctccagttcccgccttttgccctcctcctcccagtttctccctcttattccacactagaccagctttgtccactcagcactcttctctctccatctctccttcctccccctccctccccttcccccctttcctctccctccctctcggctcccgcatttcccctcggctgccggcggctccgacatcatgctccggctcctccggccgctgctgctactgctgctgctgcctcccccggggtcccctgagccccccggcctgacccagctgtccccgggggcgcccccgcaggcccccgacttgctctacgctgacgggctgcgcgcctacgcggccggggcttgggcgccggccgtggcgctgctgcgggaggcgctgcggagccaggcggcgctgggccgggtgcggctggattgcggggcgagctgcgcggccgatccgggcgccgcgctccccgccgtgcttctcggggccccggagcccgactccgggccgggacccacgcaggggtcctgggagcgacagcttctccgtgcagcgctccgccgcgcagactgcctgacccagtgcgcagcacggaggctgggccccgggggcgcggcgcggcttcgcgtggggagcgcgctccgggacgccttccgccgtcgggagccctacaactacctgcagagggcctattaccagttgaagaagctggatctggcagctgcggcagcacacaccttctttgtagcaaaccccatgcacctgcagatgcgggaggacatggctaagtacagacgaatgtcgggagttcggccccagagcttccgggacctggagacgcccccacactgggcagcctatgacactggcctggagctactggggcgccaggaggcaggactggcactgcccaggctagaggaggctcttcaggggagcctggcccagatggagagctgccgtgctgactgtgaggggcctgaggagcagcagggggctgaagaagaggaggatggggctgcgagccaggggggcctctatgaggccattgcaggacactggattcaggtcctgcagtgccggcaacgctgtgtgggggaaacagccacacgccctggtcgcagcttccctgtcccagacttccttcccaaccagctgaggcggctacatgaggcccatgctcaggtgggcaatctgtcccaggctatagaaaatgtcctgagtgtcctgctcttctacccggaggatgaggctgccaagagggctctgaaccagtaccaggcccagctgggagagccgagacctggcctcggacccagagaggacatccagcgcttcatcctccgatccctgggggagaagaggcagctctactatgccatggagcacctggggaccagcttcaaggatcctgacccctggacccctgcagctctcatccctgaggcacttagagaaaagctcagagaggatcaagagaagaggccttgggaccatgagcccgtgaagccaaagcccttgacctactggaaggatgtccttctcctggagggtgtgaccttgacccaggattccaggcagctgaatgggtcggagcgggcggtgttggatgggctgctcaccccagccgagtgtggggtgctgctgcagctggctaaggatgcagctggggctggagccaggtctggctatcgtggtcgccgctcccctcacaccccccatgaacgcttcgaggggctcacggtgcttaaggctgcgcagctggcccgggctgggacagtgggcagtcagggtgctaagctgcttctggaggtgagcgagcgggtgcggaccttgacccaggcctacttctccccggaacggcccctgcatctgtccttcacccacctggtgtgccgcagcgccatagaaggagagcaagagcagcgcatggacctgagtcacccagtgcacgcagacaactgcgtcctggaccctgacacgggagagtgctggcgggagcccccagcctacacctatcgggactacagcggactcctctacctcaacgatgacttccagggtggggacctgttcttcacggagcccaacgccctcactgtcacggctcgggtgcgtcctcgctgtgggcgccttgtggccttcagctccggtgtcgagaatccccatggggtgtgggccgtgactcggggacggcgctgtgccctggcactgtggcacacgtgggcacctgagcacagggagcaggagtggatagaagccaaagaactgctgcaggagtcacaggaggaggaggaagaggaagaggaagaaatgcccagcaaagacccttccccagagccccctagccgcaggcaccagagggtccaagacaagactggaagggcacctcgggttcgggaggagctgtgagtggctgagccagctccttgaggatgtggccacttgacttgtggaaggccatcttgatgccaggacacacaggaagcccctgtgtgacatcaggagcagaacagcaagctctctgtccctgcacccccaccatcttggggacctacaagggcctggactcagaggacagtgcacaggctagcctggagctcaccaggcctggggagctgggacggggccccgctgccggacctgcagccctggacagatggggaacactgtgcctccctgaacagaaatggcaggggaggaggctgatgctttaaatgaagaggatggtggggttgggaggtataaccctgctcctctctcccagtctgtgcaataaaggtcgtgaagatctctc

SEQ ID NO: 29945 - DNA, 3066 bp, Homo Sapiens
ccatctgagcgagaagagcagacaccgtgctcctggaatcacccagcatgttgcaaggtctcctgccagtcagtctcctcctctctgttgcagtaagtgctataaaagaactccctggggtgaagaagtatgaagtggtttatcctataagacttcatccactgcataaaagagaggccaaagagccagagcaacaggaacaatttgaaactgaattaaagtataaaatgacaattaatggaaaaattgcagtgctttatttgaaaaaaaacaagaacctccttgcaccaggctacacggaaacatattataattccactggaaaggagatcaccacaagcccacaaattatggatgattgttattatcaaggacatattcttaatgaaaaggtttctgacgctagcatcagcacatgtaggggtctaaggggctacttcagtcagggggatcaaagatactttattgaacctttaagccccatacatcgggatggacaggagcatgcactcttcaagtataaccctgatgaaaagaattatgacagcacctgtgggatggatggtgtgttgtgggcccacgatttgcagcagaacattgccctacctgccaccaaactagtaaaattgaaagacaggaaggttcaggaacatgagaaatacatagaatattatttggtcctggataatggtgagtttaaaaggtacaatgagaatcaagatgagatcagaaagagggtatttgagatggctaattatgtcaacatgctttataaaaagctcaatactcatgtggccttagttggtatggaaatctggactgacaaggataagataaagataaccccaaatgcaagcttcaccttggagaatttttctaaatggagggggagtgttctctcaagaagaaagcgtcatgatattgctcagttaatcacagcaacagaacttgctggaacgactgtgggtcttgcatttatgtctacaatgtgttctccttattctgttggcgttgttcaggaccacagcgataatcttcttagagttgcagggacaatggcacatgaaatgggccacaactttggaatgtttcatgacgactattcttgcaagtgtccttctacaatatgtgtgatggacaaagcactgagcttctatatacccacagacttcagttcctgcagccgtctcagctatgacaagttttttgaagataaattatcaaattgcctctttaatgctccattgcctacagatatcatatccactccaatttgtgggaaccagttggtggaaatgggagaggactgtgattgtgggacatctgaggaatgtaccaatatttgctgtgatgctaagacatgtaaaatcaaagcaacttttcaatgtgcattaggagaatgttgtgaaaaatgccaatttaaaaaggctgggatggtgtgcagaccagcaaaagatgagtgcgacctgcctgaaatgtgtaatggtaaatctggtaattgtcctgatgatagattccaagtcaatggcttcccttgccatcacgggaagggccactgcttgatggggacatgccccacactgcaggagcagtgcacagagctgtggggaccaggaactgaggttgcagataagtcatgttacaacaggaatgaaggtgggtcaaagtacgggtactgtcgcagagtggatgacacactcattccctgcaaagcaaatgataccatgtgtgggaagttgttctgtcaaggtgggtcggataatttgccctggaaaggacggatagtgactttcctgacatgtaaaacatttgatcctgaagacacaagtcaagaaataggcatggtggccaatggaactaagtgtggcgataacaaggtttgcattaatgcagaatgtgtggatattgagaaagcctacaaatcaaccaattgctcatctaagtgcaaaggacatgctgtgtgtgaccatgagctccagtgtcaatgtgaggaaggatggatccctcccgactgcgatgactcctcagtggtcttccacttctccattgtggttggggtgctgttcccaatggcggtcatttttgtggtggttgctatggtaatccggcaccagagctccagagaaaagcagaagaaagatcagaggccactatctaccactggcaccaggccacacaaacagaagaggaaaccccagatggtaaaggctgttcaaccccaagagatgagtcagatgaagccccatgtgtatgatctgccagtagaaggcaatgagcccccagcctcttttcataaagacacaaacgcacttccccctactgttttcaaggataatccaatgtctacacctaaggactcaaatccaaaagcatgaagcaacagctaagcaagaactaatggctaaattatcaacttggaaaactggaaaatctggatggcagagaaatatactatctcaccagtatttgctctcgactcaagaaggttaacattttctgattcatgttagactttgaagagactaaagaaaattttcaagaggaacatatgcctgagaacctttgcatgaatttaaaatttcaattatccattcttataagaaggaagatgattgtaaagaaatatctccgaagttaaaatctgtaataggaattgattcattctctaatgaaaacaaaacataaaaacatcacactaatcttggaggaataagaaaaattgtacatccattaaatgtacaattgattgcaacatcttgattgttttaaccattaacttgtcaaattacaatcacagttaagaaaatgatgtaaaattctgttttgtggatctctttcctagattagcttctgaaatcattattagctatatcatttgaggttttctacaatttggtataactaagaatttaaaaatgttttatcatatatatttgtataattaattactggcatggttaaagtggttttcactttttaaatggagaaaatttcagttaaattaataggataaaccaggttgcgaactggtgacctgtaggccatgttagcactgcaaaaaaaaaa

SEQ ID NO: 29946 - DNA, 3737 bp, Homo Sapiens
agcagcggcccgaggctcccggagcatcgcgctgggagaagacttcgccgctcggggccgcagcctggtgagctcagcccccttcgggccctcccctgcatcccagccggggcctctccgagccggcgctgatcgatgccgacacaccccggggaccctatcgcgactccatcgcgccatatcgcgacaccatcgtgccctgtcgagactccattttgtcacagcccttttcaatatatatctttttttttttaatttgccctgtcatctttgggggctgtctcccatgtcgtgattttgacgtgatctctccgtgacatcaccgcgccatcgtgaagtgtgatctcatcgccgccctgtcgtgacttcatcaatgtcgtgttgtgacctggctgcggcgggacagttgggcaaggcgagcatcatggcctcggattgcgagccagctctgaaccaggcagagggccgaaaccccaccctggagcgctacctgggagccctccgtgaggccaagaatgacagcgagcagtttgcagccctgctgctagtgaccaaggcagtcaaagcaggtgacatagatgccaaaactcggcggcggatcttcgatgctgtcggcttcaccttccccaatcgtctcctgaccaccaaggaggcgccggatggctgccctgaccatgttctgcgggctttgggtgtggccctgctggcctgcttctgcagtgaccctgaactggccgcccatccccaagtcctgaacaagattcccattcttagcaccttcctcacagcccggggggacccggacgatgctgcccgccgctccatgattgatgacacctaccagtgcctgacggctgtagcaggcacacccagagggcctcggcacctcattgctggtggcaccgtgtctgccctatgccaggcatacctggggcacggctatggctttgaccaggccctggcactcctggtggggctgctggctgctgccgagacacagtgctggaaggaggcggagcccgacctgctggccgtgttgcggggcctcagtgaggatttccagaaagctgaggatgccagcaagtttgagctctgccagctgctgcccctctttttgcccccgacaaccgtgccccctgaatgctaccgggatctgcaggccgggctggcacgcatcctgggaagcaagctgagctcctggcagcgcaaccctgcactgaagctggcagcccgcctggcacacgcctgcggctccgactggatcccggcgggcagctccgggagcaagttcctggccctgctggtgaatctggcgtgcgtggaagtgcggctggcactggaggagacgggcacggaggtgaaagaggatgtggtgaccgcctgctatgccctcatggagttggggatccaggaatgcactcgctgtgagcagtcactgcttaaggagccacagaaggtgcagctcgtgagcgtcatgaaggaggccataggggctgttatccactacctgctgcaggtggggtcagagaagcagaaggagccctttgtgtttgcctcggtgcggatcctgggtgcctggctggccgaggagacctcatccttgcgtaaggaggtgtgccagctgctgcccttcctcgtccgctatgccaagaccctctacgaggaggccgaggaggccaatgacctttcccagcaggtggccaacctggccatctcccccaccaccccagggcccacctggccaggagacgctctccggctcctcctgcctggctggtgccacctgaccgttgaagatgggccccgggagatcctgatcaaggaaggggccccctcgcttctgtgcaagtatttcctgcagcagtgggaactcacatcccctggccacgacacctcggtgctgcctgacagcgtggagattggcctgcagacctgctgccacatcttcctcaacctcgtggtcaccgcaccggggctgatcaagcgtgacgcctgcttcacatctctaatgaacaccctcatgacgtcgctaccagcactagtgcagcaacagggaaggctgcttctggctgctaatgtggccaccctggggctcctcatggcccggctccttagcacctctccagctcttcagggaacaccagcatcccgagggttcttcgcagctgccatcctcttcctatcacagtcccacgtggcgcgggccaccccgggctcagaccaggcagtgctagccctgtcccctgagtatgagggcatctgggccgacctgcaggagctctggttcctgggcatgcaggccttcaccggctgtgtgcctctgctgccctggctggcccccgctgccctgcgctcccgctggccgcaggagctgctccagctgctaggcagtgtcagccccaactctgtcaagcccgagatggtggccgcctatcagggtgtcctggtggagctggcgcgggccaaccggctgtgccgggaggccatgaggctgcaggcgggcgaggagacggccagccactaccgcatggctgccttggagcagtgcctgtcagagccctgaggggtgtccaccggggacagacccaggggcgggcagagagggaaggagggaggaggcatcttccctgaagcccccaatctggcccccccctccccagacttcctccccaaaacaccccagctttctggcttttctgagggcaagggcatggtgcccacccctcaagtgtaaggaactgcgttccgcccctcaggcccccatgggggcagggatcggcttggaaatcaacgtggttgtccccgccaggccggggaaggttggagcagcccccagggaggggggcactaggtgtcattgtgcccgatgtctggctcccctgcaggagggaggctccagggtaagacagggctggcaggagcagactgcctcagcccatgtgccctgccggccagggcgtgggctcccctcggctgtggtgcctcctctggccccccaggtccacgtcctttaaattggccctttggctcttgcccttggctcccttgggcagacagcaggcttaggccattgatatcgcagttcttcctatcagcttcagtgacccagggtctgaactgcctccatcctagggcaacctggggcagacaggcctggtggggggtggggaaacctccttccacctgagcttgcttgaagggacccagagtctttgggcccagatctttaaacctttgtgtcgtgttgcagcagagtgacgatgggggttggggggttatttattttgcctgtccttatccctgcttggacacctgagcatctgattcctgtccccctggtgccatctggcctggctggagccaggaacaggagggacacttccccagaatccgcatgtttccccagtgattacactccactgccaccgtggtgcctggctttaactcccacccctgctatgactcctctctgcagagacgcgactggcggctccagcagggactacctttcttataaacccagggggaccacacacacacacacacacacacacacacacacacacacacacacacacacacacacacactcttgatcccttgcttccctcccccagtgcgttctgtgatcgccaagttcaaagctgtgcacatgtggacactcaataaatgttcattggtgaaaaaaaaaaaaaaaaaaaaaaaaaaaaaaaaaaaaaaaaaaaaaaaaaaaaaaa

SEQ ID NO: 29947 - DNA, 4341 bp, Homo Sapiens
ccggcccggcccgcccggcccagccgctcctgctgggcgccccaaccgggtccggcccgggggggcgggggccgcggccgccgaggatggggaaatccaacagcaagttgaagcccgaagttgtggaggagctgaccaggaagacctactttaccgagaaggaggtccagcagtggtacaaaggcttcatcaaggactgccccagtgggcagctggatgcggcaggcttccagaagatctacaagcaattcttcccgttcggagaccccaccaagtttgccacatttgttttcaacgtctttgatgaaaacaaggacgggcgaattgagttctccgagttcatccaggcgctgtcggtgacctcacggggaaccctggatgagaagctacggtgggccttcaagctctacgacttggacaatgatggctacatcaccaggaatgagatgctggacattgtggatgccatttaccagatggtggggaataccgtggagctcccagaggaggagaacactcctgagaagagggtggaccggatctttgccatgatggataagaatgccgacgggaagctgaccctgcaggagttccaggaggggtccaaggcagacccgtccattgtgcaggcgctgtccctctacgacgggctggtatagtcccaggctggagctggatgcctgggaaccactcacctccttctgtgccatgaggccacctcagccctgacaccaaccccgtgcgtccacccagccttcttccgcatccacacacagccggctgcccttgacccgggaggccccggctctcctctcccctgtcctgcacccatcccccgcctgaagccaccggctccaattgccagcaacctctgcttgtccggaaaacgacaacacgaaatggaaaaggctacagccctctgcataaaccaaggacttggctgcctcgcaggcagcctccgttcctcccgctctcttgcgcgtgtgcttttgttttttattttgaacagacgttttaaaagaaaaaaaaacaactaccttctgtcctagaagacacagactgacagatggggtgaaggcctggggacctcagagaactctgccttgccctcgtccctcgtccttcggcagccggagaggctgtgggtgggccgagggtgtctaggggttctgcctagtcaacgttatttgtcgtcccatcttttggcagcaaaaccacctgcgtggctaggatgattaattatgaggatgatgattttttttgtgataacagtattgtgctttttgtggggaaagtgaggttttttttttatatacatatataattgatatctttaatttattggttgttaactgttgctgctgcctggtgtgtcctcagctcccagggctgcgggcccaccgtttacatgtgcacgccctgacccacctgcccacgccgacttgggaggatggtggcctgcagcggccaagaagccaaaaaaaattttttttttttcagatactgtgcttgatttttggagaggggagaggtggaaattcctaaatggctaatgcactgttccctccagcccgaatgcctcctgccaaaccccttttccctgctgcctctgtccccgcatccttgttctcccctgggtccgtaacattttttccgaggatgaacaggggacatctttaggtttctcaactcttgctttggtgtttgccgcagcatggaaaacagggcgcctaaggctgggagctggaagaaggggcattgggtacccaggcagagtcaggagaggtggtctttgaagtaagttagcagaaatcaaggggacccccgcctccttgggctggggaggggatttcaagatagttcataactctctcccgctctgccttccctccttcctatctgctttttccagtaaactgcatggtgtccttccctggccttctcttggctcaaaggctgggagggagggaaggagagaagagttccaggcaatcccatcaatatagtccctacacctggggctgcggcccacatgtcttcacggaggcttccagcggtgcctgccactgaggcaggtgcggccccaggaccatcaccaggaatgcgaggccaccctggaccagaggtaggagcccaaggtccggcccttgctctttgattgtgggcagcctcctgccctctctgggtctcagttgccccatctgcagagcgaggaggcccgggctggttggtcttgaaggcccttttccatgccgacatcatgtcactctaggcctggggttcagtttcctgtggctggtgatgctgtggttaagtttgcttgaccccagcagcccgagggactgtctgagtcacagcacagcccctattgcgtggctgctggtgtgtggggtcagttccagcagatgaatgtgtcatgtggcacaccttgtcccttcccgcagcatttcctggttccccccagacccttgagcgctctttgggacccagaaggagtccttgcacagggaaggcttgaggtgagaagccgcttcccagactgtcagggccaggcctgggtctagaattcttgctgctgctttgcagagtcaacagcccatcagcccatgttttagaggggacactttggtcctcggttcccaccctcagcaagcaggcctccagcccgaggaaggcctctgccgtagtgacgttgccgtgtggggctgcgtggctgttccccttggctggagcattcagccaaccccagcgtcccccctgaggcgttcattggcagccccctaggactgcacgctggccccacggtaaccccccctcccccaccaacatcctgcagggatggggtcagtggttccaccttcacaggccactttgaagggtggattctttgaggcccctgccagtcggctccctgctcagctgctggcccgggcgacctgggactcagcaccaacggctgaagtttctcagctgggctctgacctggggtctggggcagggaacgaacatggtggctttgggctgagaggatgagggaggtctttcccaggtcaaattactttcctttggcctctgcctgaggctcgatttgcctctctggtccaatgggactgacactgttgtacaacctgacctgtggctgagggtgtctgggcttaagcatgtggaccccttcggtgtgtctggccttcctccatcgtcctgccctttggccttttggtttgaagccacaggtgtggcttctggccttagcagatggtatgcttgcggaccgcagcccagcatgccggtgggcccacagcccgagccagcccagagctgccggaagggccgcccttcccggccctggcggggtgctggacactggccattttcactagagtttgcctggcagggaccgatctctgccccctcctctccccaggcctctggctgcagtgatgccgcagaatcctgagccaggtgcctcctgagcagcccgtgcgcctctccacagcggcgtttgccacccaatgcggctcgcttcagatgctctgatgcagagggcacgcccatagtccctctgcagagcctcgcactggggccagggcaggcaccagccccaggcggccagtcggccacggcctgtcctcttcctcgtagcgtctgctcctcactttgtgttgatggtgacttaggagaatgttccgattttccatgatctaagcaggccacgtttaaaataacatcaaggcaagcgtacgtgtcaccctctgtactgacatctcctcccctgaaatgcttttcagtttgacagcccgtttcctagacaagtgcacctggggtttcaggaactttgtgttttttcggagggggttggtggggaggtcgggatgcctgggatcccttcctggagaggcaggctgtctctggaaaaagcctccattgcccacccgccaggcggaaagtcaccctgttcccagcgcggtttcagcatttaattttaagggagctaaggaagcgcggcgcgccccctggtggtggtaagccgccaacgcacctgggggctgcaaccccaccggacgggtggtccggagggaggctggagcggggaggcgaggagggggctgtgagtcctcagaggccctgggccaccacatttctggcagcgtttcccagacacccctctgctaggccatccctggatagcaagtgaattaacttaagggcactgtgatgggaagccttgcccccctctttttttttttttttttaatatctgcggaataaacccaatggttaatttttgaatgaataaaaggcttttgttgaataaaaaaaaaaaaaaaaaaaaaaaaaaaa

SEQ ID NO: 29948 - DNA, 3568 bp, Homo Sapiens
atagttttcaggttaagaaagccagaatctttgttcagccacactgactgaacagacttttagtggggttacctggctaacagcagcagcggcaacggcagcagcagcagcagcagcagcagcagcagcagcagggctcctgggataactcaggcatagttcaacactatgggtcctcctctgaagctcttcaaaaaccagaaataccaggaactgaagcaggaatgcatcaaagacagcagacttttctgtgatccaacatttctgcctgagaatgattctcttttctacaaccgactgcttcctggaaaggtggtgtggaaacgtccccaggacatctgtgatgacccccatctgattgtgggcaacattagcaaccaccagctgacccaagggagactggggcacaagccaatggtttctgcattttcctgtttggctgttcaggagtctcattggacaaagacaattcccaaccataaggaacaggaatgggaccctcaaaaaacagaaaaatacgctgggatatttcactttcgtttctggcattttggagaatggactgaagtggtgattgatgacttgttgcccaccattaacggagatctggtcttctctttctccacttccatgaatgagttttggaatgctctgctggaaaaagcttatgcaaagctgctaggctgttatgaggccctggatggtttgaccatcactgatattattgtggacttcacgggcacattggctgaaactgttgacatgcagaaaggaagatacactgagcttgttgaggagaagtacaagctattcggagaactgtacaaaacatttaccaaaggtggtctgatctgctgttccattgagtctcccaatcaggaggagcaagaagttgaaactgattggggtctgctgaagggccatacctataccatgactgatattcgcaaaattcgtcttggagagagacttgtggaagtcttcagtgctgagaaggtgtatatggttcgcctgagaaaccccttgggaagacaggaatggagtggcccctggagtgaaatttctgaagagtggcagcaactgactgcatcagatcgcaagaacctggggcttgttatgtctgatgatggagagttttggatgagcttggaggacttttgccgcaactttcacaaactgaatgtctgccgcaatgtgaacaaccctatttttggccgaaaggagctggaatcggtgttgggatgctggactgtggatgatgatcccctgatgaaccgctcaggaggctgctataacaaccgtgataccttcctgcagaatccccagtacatcttcactgtgcctgaggatgggcacaaggtcattatgtcactgcagcagaaggacctgcgcacttaccgccgaatgggaagacctgacaattacatcattggctttgagctcttcaaggtggagatgaaccgcaaattccgcctccaccacctctacatccaggagcgtgctgggacttccacctatattgacacccgcacagtgtttctgagcaagtacctgaagaagggcaactatgtgcttgtcccaaccatgttccagcatggtcgcaccagcgagtttctcctgagaatcttctctgaagtgcctgtccagctcagggaactgactctggacatgcccaaaatgtcctgctggaacctggctcgtggctacccgaaagtagttactcagatcactgttcacagtgctgaggacctggagaagaagtatgccaatgaaactgtaaacccatatttggtcatcaaatgtggaaaggaggaagtccgttctcctgtccagaagaatacagttcatgccatttttgacacccaggccattttctacagaaggaccactgacattcctattatagtacaggtctggaacagccgaaaattctgtgatcagttcttggggcaggttactctggatgctgaccccagcgactgccgtgatctgaagtctctgtacctgcgtaagaagggtggtccaactgccaaagtcaagcaaggccacatcagcttcaaggttatttccagcgatgatctcactgagctctaaatctgcaatcccagagaatcctgacaaagcgtgccacccttttattttccgtcaggtgccaggtcttagttaagattcacaatctttagaaagaatgagattcacaataattaactcttcctctcttctgataaattccccatacctcccaatccaagtagcatctgtagctacataacctatatacctccagcagctggacatggggaggcgacagtcctatctagacatcatacacatttgccaagaaaggatctctggggcttccgggggtgagattcaagcaggacaataacaagaggctggacaccctacagatgtctttgatgttttcagttgtttgatatatctcccctgtagggcatgttgaggaaggaggagggctgatcaaggccaagctggtctagcctgacatcctagctcctgactgaacactatagacttcccagcagcatttcacccagcagccagagccggctttaagtccccaacccttacagacaccactgccaccaccaccaaccacgaccaccaccaccaccaccactcaccaccatcatcacctccggaaagtgtagtcctgccctaacccaagtcacccccgacagtaaattttaccttcatgttgagaaagcttcctggtgcttaatcaagagctggagttcaatgagtcctagacagtgagaggggcctgagcttcagctcaatggaagcctgctgtgtgccacaagacggaaaagtggaagaagctgcagtgggagacaaagcctcggtcccccacccatccacacacacctacactcacacacgcgcacatgggcgcgcacgaactaccattcaggcagtcagtgggcaagaggaaagataagtaagtaccatacacacctaaaagatgagagaattcatccagacatattacagccagtttggggcccctgactgcaatgtgaaacctctcgctgctgctaggtttacaaacaagcccattgtcctgtgcctcctaatatcatttgtactgaagaccccatctggggacttgagactttggtcccagcccagactcctcagacttttctctcagttgggatgcttcactcgctgggggtgtttgtttgccctctcatttttcagtacttctacagaattttctctagagtcagtcattatgaaatgtacttccctccatcttaacctatcaactttctgcccctccttcaaggcccagtataaatgccacctcctccatgaagccttccctaattccaccccaaacccccaccttcaacaatatttcaacgcttctgcaatgatgaaaaagaaacatagttgtagtacttagcctacctagaccagcaagcattcatttttagctcgctcattttttaccatgttttccagtctgtttaacttctgcagtgccttcactacactgccttacataaaccaaatcacaataaagttcatattcagtaca

SEQ ID NO: 29949 - DNA, 3255 bp, Homo Sapiens
aagcttactcagcgcatctgctacagcattttatcttcccaagagccccatgaggcgatgacccaggatgcagccaggggccacgacatgcacggaggaccgcatccagcatgccctggaacgctgcctgcatggactcagcctcagccgccgctccacctcctggtcagctgggctgtgtctgaactgctggagcctgcaggagctggtcagcagggacccgggccacttccttatcctccttgagcagatcctgcagaagacccgagaggtccaggagaagggcacctacgacctgctcaccccgctggccctgctcttctattccactgttctttgtacaccacacttcccaccagactcggatctccttctgaaggcagccagcacctaccaccggttcctgacctggcctgttccttactgcagcatctgccaggagctgctcaccttcattgatgctgaactcaaggccccagggatctcctaccagagactggtgagggctgagcagggcctgcccatcaggagtcaccgcagctccaccgtcaccgtgctgctgctgaacccagtggaagtgcaggccgagttccttgctgtagccaataagctgagtacgcccggacactcgcctcacagtgcctacaccaccctgctcctgcacgccttccaggccacctttggggcccactgtgacgtcccgggcctgcactgcaggctacaggccaagaccctggcagagcttgaggacatcttcacggagaccgcagaggcacaggagctggcatctggcatcggggatgctgcagaggcccggcggtggctcaggaccaagctgcaggcggtgggagaaaaagctggcttccctggggtgttagacactgcaaaaccagggaagctccacaccatccccatccctgtcgccaggtgctacacctacagctggagccaggacagctttgacatcctgcaggaaatcctgctcaaggaacaggagctactccagccagggatcctgggagatgatgaagaggaggaagaggaggaggaggaggtggaggaggacttggaaactgacgggcactgtgccgagagagattccctgctctccaccagctctttggcgtcccatgactccaccttgtcccttgcatcctcccaggcctcggggccggccctctcgcgccatctgctgacttcctttgtctcaggcctctctgatggcatggacagcggctacgtggaggacagcgaggagagctcctccgagtggccttggaggcgtggcagccaggaacgccgaggccaccgcaggcctgggcagaagttcatcaggatctataaactcttcaagagcaccagccagctggtactgcggagggactctcggagcctggagggcagctcggacacggccctgcccctgaggcgggcagggagcctctgcagccccctggacgaaccagtatcacccccttcccgggcccagcgctcccgctccctgccccagcccaaactcggtacccagctgcccagctggcttctggcccctgcttcacgcccccagcgccgccgccccttcctgagtggagatgaggatcccaaggcttccacgctacgtgttgtggtctttggctccgatcggatttcagggaaggtggctcgggcgtacagcaaccttcggcggctggagaacaatcgcccactcctcacacggttcttcaaacttcagttcttctacgtgcctgtgaagcgaagtcatgggaccagccctggtgcctgtccaccccctcggagccagacgccctcacccccgacagactcccctaggcacgccagccctggagagctgggcaccaccccatgggaggagagcaccaatgacatctcccactacctcggcatgctggacccctggtatgagcgcaatgtactgggcctcatgcacctgccccctgaagtcctgtgccagcagtccctgaaggctgaagcccaggccctggagggctccccaacccagctgcccatcctggctgacatgctactctactactgccgctttgccgccagaccggtgctgctgcaactctatcagaccgagctgaccttcatcactggggagaagacgacagagatcttcatccactccttggagctgggtcactccgctgccacacgtgccatcaaggcgtcaggtcctggcagcaagcggctgggcatcgatggcgaccgggaggctgttcctctaacactacagattatttacagcaagggggccatcagtggacgaagtcgctggagcaacctggagaaggtctgtacctccgtgaacctcaacaaggcctgccggaagcaggaggagctggattccagcatggaggccctgacgctaaacctgacagaagtggtgaaaaggcagaactccaaatccaagaagggctttaaccagattagcacatcgcagatcaaagtggacaaggtgcagatcatcggctccaacagctgcccctttgctgtgtgcctggaccaggatgagagaaagatcctgcagagtgtagtcagatgtgaggtctcaccgtgctacaagccagagaagagcgacctctcctcaccaccccagacgcctcctgacctgccggcccaggccgcacctgatctctgctcccttctctgcctgcccatcatgactttcagtggagctctgccctagtgtgggcccagcgccagactggacagaagccctggggcaacctcctcggccacccctccaggacagtccctctctgtggagaactgaatggccctgtgcagagccatagtcccactgtgggtcctgcaatgagcaggggctgggagtagagggtttctggggcctcagggttctgggaaagcaacagctatcagagagagaagggccagaccccatagcctcttagattcctggcagtagaaggagaaggatgggtaaattgacctctgaagtccctgaccattagcatggtctaggatcctttctagaaggaagatctgaggctctggtgctcagggggatggcttgggccttttctctcaaccttggctgagcctaccccttactttgccaaagacttgaggaccctgtatgtctggagttcagtcccctcctctgtggggctcaggtgattgaaatgtggatgaaacatttctctacttcaagaccacctctccctgcaaacaccacacacacatggcatgcatgtacgcacatgcgcaccg

SEQ ID NO: 29950 - DNA, 1876 bp, Homo Sapiens
ctctaaagaagaaacattagaaagaaaaaggaaggaaaacggtataaagagagatcaattacccacccttaaatagctagattggggggggaggggggtggaaaagaaagctgtggaggtgtgccccagcacggctgctttgaaaggtttatcatctatccgtttggtttatggagaaaaagaaaatggtaactcagggtaaccaggagccgacaacaactcctgacgcaatggttcagccttttactaccatcccatttccaccacctccgcagaatggaattcccacagagtatggggtgccacacactcaagactatgccggccagaccggtgagcataacctgacactctacggaagtacgcaagcccacggggagcagagcagcaactcacccagcacacaaaatggatctcttacgcagacagaaggtggagcacagacagacggccagcagtcacagacacaaagtagtgaaaattcagagagtaaatctaccccgaaacggctgcatgtctctaatattcctttccgcttccgggaccctgacctccggcagatgtttgggcagtttggcaaaatcctagatgtagaaataatctttaatgaacgtggctctaagggattcgggttcgtaactttcgagaatagtgctgatgcagacagggccagggagaaattacacggcaccgtggtagagggccgtaaaatcgaggtgaataatgctacagcacgtgtaatgaccaataagaagatggtcacaccatatgcaaatggttggaaattaagcccagtagttggagctgtatatggtccggagttatatgcagcatccagctttcaagcagatgtgtccctaggcaatgatgcagcagtgcccctatcaggaagagggggtatcaacacttacattcctttaatcattcctggcttcccttaccctactgcagccaccacggcagccgctttcagaggagcccatttgaggggcagagggcggacagtatatggtgcagtccgagcggtacctccaacagccatccccgcctatccaggggtggatatgcagcctacagatatgcacagcctgctactgcaaccgcagccaccgctgctgcagccgctgcagccgcttacagtgacggttatggcagggtgtacacagccgacccctaccatgcccttgcccctgccgctagctatggagttggcgctgtggcgagtttataccgaggtggctacagccgatttgccccctactgaagtgacgtgagacccctgcaaatgggacagccccccagttcatgaggcctggctattgcaatatttactagtagaggaactctatagcaagatgaagaggaaaaacaaacaaacaaacaaaaaaaaacacaaaaaaagaaagaatacttttttatacctcactatgttctttgaatatgtatttttcctttaaatttctgcctttaattcttttgttccaaagattgtgcatttttttctttttttttttaaactgtggtaaaaaaaaaaaaaaataatgcatttccatgtctgtatgtccgtgcttagcttattctatcaatcacggaagaggcagtcaaggaggaaggagagacattaggagccgataaatgcatctgatcagaaatcagcagacagaattaccaaagtgtatctggtgctgaatgactgggggacaagcagaagtggaagagatctttctgcaacaggatattcttctagtcttctgagtttctggtctttgacaggcaattctggttggctgtggctggaatccacatgctgatagataggaatttgtgcttacaaagcaggagaattaaaaagacgctttcctctcctcctttagag

SEQ ID NO: 29951 - DNA, 4372 bp, Homo Sapiens
tagttattaaagttcctatgcagctccgcctcgcgtccggcctcatttcctcggaaaatccctgctttccccgctcgccacgccctcctcctacccggctttaaagctagtgaggcacagcctgcggggaacgtagctagctgcaagcagaggccggcatgaccaccgagcagcgacgcagcctgcaagccttccaggattatatccggaagaccctggaccctacctacatcctgagctacatggccccctggtttagggaggaagaggtgcagtatattcaggctgagaaaaacaacaagggcccaatggaggctgccacactttttctcaagttcctgttggagctccaggaggaaggctggttccgtggctttttggatgccctagaccatgcaggttattctggactttatgaagccattgaaagttgggatttcaaaaaaattgaaaagttggaggagtatagattacttttaaaacgtttacaaccagaatttaaaaccagaattatcccaaccgatatcatttctgatctgtctgaatgtttaattaatcaggaatgtgaagaaattctacagatttgctctactaaggggatgatggcaggtgcagagaaattggtggaatgccttctcagatcagacaaggaaaactggcccaaaactttgaaacttgctttggagaaagaaaggaacaagttcagtgaactgtggattgtagagaaaggtataaaagatgttgaaacagaagatcttgaggataagatggaaacttctgacatacagattttctaccaagaagatccagaatgccagaatcttagtgagaattcatgtccaccttcagaagtgtctgatacaaacttgtacagcccatttaaaccaagaaattaccaattagagcttgctttgcctgctatgaaaggaaaaaacacaataatatgtgctcctacaggttgtggaaaaacctttgtttcactgcttatatgtgaacatcatcttaaaaaattcccacaaggacaaaaggggaaagttgtcttttttgcgaatcagatcccagtgtatgaacagcagaaatctgtattctcaaaatactttgaaagacatgggtatagagttacaggcatttctggagcaacagctgagaatgtcccagtggaacagattgttgagaacaatgacatcatcattttaactccacagattcttgtgaacaaccttaaaaagggaacgattccatcactatccatctttactttgatgatatttgatgaatgccacaacactagtaaacaacacccgtacaatatgatcatgtttaattatctagatcagaaacttggaggatcttcaggcccactgccccaggtcattgggctgactgcctcggttggtgttggggatgccaaaaacacagatgaagccttggattatatctgcaagctgtgtgcttctcttgatgcgtcagtgatagcaacagtcaaacacaatctggaggaactggagcaagttgtttataagccccagaagtttttcaggaaagtggaatcacggattagcgacaaatttaaatacatcatagctcagctgatgagggacacagagagtctggcaaagagaatctgcaaagacctcgaaaacttatctcaaattcaaaatagggaatttggaacacagaaatatgaacaatggattgttacagttcagaaagcatgcatggtgttccagatgccagacaaagatgaagagagcaggatttgtaaagccctgtttttatacacttcacatttgcggaaatataatgatgccctcattatcagtgagcatgcacgaatgaaagatgctctggattacttgaaagacttcttcagcaatgtccgagcagcaggattcgatgagattgagcaagatcttactcagagatttgaagaaaagctgcaggaactagaaagtgtttccagggatcccagcaatgagaatcctaaacttgaagacctctgcttcatcttacaagaagagtaccacttaaacccagagacaataacaattctctttgtgaaaaccagagcacttgtggacgctttaaaaaattggattgaaggaaatcctaaactcagttttctaaaacctggcatattgactggacgtggcaaaacaaatcagaacacaggaatgaccctcccggcacagaagtgtatattggatgcattcaaagccagtggagatcacaatattctgattgccacctcagttgctgatgaaggcattgacattgcacagtgcaatcttgtcatcctttatgagtatgtgggcaatgtcatcaaaatgatccaaaccagaggcagaggaagagcaagaggtagcaagtgcttccttctgactagtaatgctggtgtaattgaaaaagaacaaataaacatgtacaaagaaaaaatgatgaatgactctattttacgccttcagacatgggacgaagcagtatttagggaaaagattctgcatatacagactcatgaaaaattcatcagagatagtcaagaaaaaccaaaacctgtacctgataaggaaaataaaaaactgctctgcagaaagtgcaaagccttggcatgttacacagctgacgtaagagtgatagaggaatgccattacactgtgcttggagatgcttttaaggaatgctttgtgagtagaccacatcccaagccaaagcagttttcaagttttgaaaaaagagcaaagatattctgtgcccgacagaactgcagccatgactggggaatccatgtgaagtacaagacatttgagattccagttataaaaattgaaagttttgtggtggaggatattgcaactggagttcagacactgtactcgaagtggaaggactttcattttgagaagataccatttgatccagcagaaatgtccaaatgatatcaggtcctcaatcttcagctacagggaatgagtaactttgagtggagaagaaacaaacatagtgggtataatcatggatcgcttgtacccctgtgaaaatatattttttaaaaatatctttagcagtttgtactatattatatatgcaaagcacaaatgagtgaatcacagcactgagtattttgtaggccaacagagctcatagtacttgggaaaaattaaaaagcctcatttctagccttctttttagagtcaactgccaacaaacacacagtaatcactctgtacacactgggatagatgaatgaatggaatgttgggaatttttatctccctttgtctccttaacctactgtaaactggcttttgcccttaacaatctactgaaattgttcttttgaaggttaccagtgactctggttgccaaatccactgggcacttcttaaccttctatttgacctctgcgcatttggccctgttgagcactcttcttgaagctctccctgggcttctctctcttctagttctattctagtctttttttattgagtcctcctctttgctgatcccttccaagggttcaatatatatacatgtatatactgtacatatgtatatgtaactaatatacatacatacaggtatgtatatgtaatggttatatgtactcatgttcctggtgtagcaacgtgtggtatggctacacagagaacatgagaacataaagccatttttatgcttactactaaaagctgtccactgtagagttgctgtatgtagcaatgtgtatccactctacagtggtcagcttttagtagagagcataaaaatgataaaatacttcttgaaaacttagtttactatacatcttgccctattaatatgttctcttaacgtgtgccattgttctctttgaccattttcctataatgatgttgatgttcaacacctggactgaatgtctgttctcagatcccttggatgttacagatgaggcagtctgactgtcctttctacttgaaagattagaatatgtatccaaatggcattcacgtgtcacttagcaaggtttgctgatgcttcaaagagcttagtttgcggtttcctggacgtggaaacaagtatctgagttccctggagatcaacgggatgaggtgttacagctgcctccctcttcatgcaatctggtgagcagtggtgcaggcggggagccagagaaacttgccagttatataacttctctttggcttttcttcatctgtaaaacaaggataatactgaactgtaagggttagtggagagtttttaattaaaagaatgtgtgaaaagtacatgacacagtagttgcttgataatagttactagtagtagtattcttactaagacccaatacaaatggattatttaaaccaaaaaaaaaaaaaaaaaaaaa

SEQ ID NO: 29952 - DNA, 4785 bp, Homo Sapiens
gagaaaatggcggcggcagcagcttcggcgcctcagcagctctcggatgaggagcttttctctcagctccgccgttacggcctgtctcccggaccagtgacggagagcacccgcccggtctacctcaagaagctgaagaagcttcgagaggaagagcagcaacagcaccggtcagggggccgcggcaacaagacgcggaacagtaataacaataacacggcagccgccacggtcgcagccgcgggaccagcggcggcggcggccgcggggatgggggtccggccggtctcgggcgacctctcctacttacggactcctgggggcctgtgccgaatctcggcctctggcccagagagcctcctgggagggcccgggggcgcctccgccgcccccgcggctggcagcaaagtgctgctgggcttcagctcggacgagtcggacgtggaggccagtccccgggaccaggccggcggcggcgggaggaaagaccgggcttcgctccagtaccgcgggctcaaagcgccgccggcgcccctggccgccagcgaggtgactaacagcaactctgcagagcgaaggaagccccactcgtggtggggggccaggaggccggcgggccccgagctgcagaccccgccggggaaagatggagcagtggaggacgaggaaggggagggagaggacggtgaggagagggacccggagaccgaggagccgctctgggcgagccggaccgtgaatggcagccggcttgtcccctacagctgccgggaaaactattcggactcagaggaagaggacgacgacgacgtggcctccagcagacaggtattaaaggacgactccctttcccggcatcggcccagacgaacccatagtaagcctctccccccgctgactgctaaatcggccggcggcaggctggagacttcagttcagggagggggaggactcgcgatgaatgacagggcggcggctgccgggagtctagacaggagccgaaacctcgaagaggcggcggccgcggagcagggaggagggtgtgatcaagtggactccagccccgttcctagataccgtgttaacgctaagaaactgacccctctcctgcccccgccacttactgacatggactcaaccttggattcgtcaacaggctcccttctgaaaaccaataatcatattggcggtggggccttcagtgtggactcccccaggatttattctaacagtctccctcccagtgcggcggtggccgcctctagttcactcaggatcaatcacgccaatcatacgggctccaatcatacctacctgaaaaacacatacaacaaaccgaagctttccgaacccgaagaggaacttctccagcaatttaaacgggaggaggtgtccccaacagggagtttcagtgcccactacttgtcgatgtttctcttaactgctgcctgcttatttttcctaatactgggactgacttacctaggaatgagagggacaggagtatctgaggatggagaactcagcatagaaaacccctttggtgaaacatttggaaaaatacaagaaagtgaaaaaactcttatgatgaacacattatataagcttcatgatcgattggcacagcttgcaggagatcatgaatgtggcagttctagtcaaagaacgctttctgttcaagaggcagctgcgtatttaaaagatttaggtcctgaatatgaaggtatatttaacacttcattgcagtggatcttagaaaatggaaaagatgttggaataaggtgtgttggttttggccctgaggaagaattgacaaatataactgatgtgcagtttttacagtccacaagaccactgatgtctttttggtgtcgttttcgacgtgcttttgttactgtaactcacagattattgttgttatgcttaggtgtagtgatggtttgtgtcgttctgcgttacatgaaatatcgatggacaaaagaagaggaggaaacaaggcagatgtatgatatggtggtaaagattatagatgttttacgaagtcataatgaagcctgccaggaaaacaaagatttacaaccttacatgcctattccacatgtacgcgattccttaatacagcctcatgacaggaaaaaaatgaagaaagtctgggatagagctgttgacttccttgctgctaatgagtctagagttcgcacggaaacacgaagaataggtggtgcagattttctggtttggcggtggatccagccttctgcatcctgtgacaaaatattagttataccttctaaagtatggcaaggtcaagcatttcatttagatagaagaaattcaccaccaaatagtttgacaccgtgtctaaagattcggaatatgtttgatcccgttatggaaataggggatcagtggcatttggcaattcaagaagcaattttagaaaaatgcagtgataatgatggcattgttcacattgcagtagacaaaaattcacgtgagggttgtgtatatgttaaatgtctgtctccagaatatgctggaaaggcttttaaagcattgcatggctcttggtttgatgggaaattggttacagtaaaatatttacgactagatagataccaccatcgctttccccaggctctcacttccaacactccattgaagccatcaaataaacatatgaactccatgtctcatcttcgtcttcggactggcctaaccaattctcaaggaagttcctgaaaagattttcttccatttctaagactgttatttacaataggaaaattcctgtttggctttttgtcttcctttttaaatgctttttgtatgtaatatttttattgatgaatacatctctgaacgttccagaagtcttaaggttccaaagggatttagcagtgaggcagcaatgctgagtaggtaggataattatttcattcagtttttggagctcagttaagccaatacatttaaagttttgcatgaggaacactgactttattaagcattttcagatgtggtggttgtatttttgccccaagaagtgtttggataaccacacaaaagcatgatgaaaaggcttcttgtagtcccataatttcttgtgaactaatgttgtgaatttttgtatacagtcacctgcatagttcctacaggctaatgtggtaaaactgttgatttcccaatttaaccttaggtttctgttgcttataagcgattcatttgctacggctggaatatgggaaaattaatttgggcttagtggttacaaatatgtgtaagtggatgtatatgtacttaaactggctttgtatatatgtataaatgctggtggtggtgaaagtagtcttgttttatgaggatgtctgcattaaagcagtaaaataagctttccattttattcataatctaatgtgtgtgtatatatgtatgtgtgtatgtgtgtgtatatatagatgtatatatatacacacacagagatatatacatatggctgtacttttgcatagatcaaacagccaaacacctggaagtattagatacaagtttaaaatatcttttataggttttatataaaaatgtctgagtatgattttgtgtgaaagttctgataccagttgtaatagagtcaaatttatgtgagcaataaagaagaaattggcagatattggaaaaatattttgtgaaaagctgtatttattataaatactagggccatgacatagtaccattggggttaagtcattttcccaatctatttataatttaatgatatgttagtgcctctgttatatgtcaagtttaaagcagggcacattgttgcagcaaaatgtgtatttgacaaattatacttgcaattttgggtcatgaaagtttgcaatatagtaaatgcacgattgactgttgctttgtgcctcagtatttaatttgtttcagtaaacttactttattactgtttatgatttcagataaaaatagttgctgagtaaattttacttgtaatctacaattggctttttaaaaataacctgttgatatataattgtcagtccaaatgaatatgtgaaacagctggaattgtacaaattttggttgtatttaaagctcagtttcctttttgttttattgtatgcgttgggtttgcagcatgaacttgcacagataatgcacgttttctggttaagtaaacatgatgcacactattctgtaacagaaagccctattgtgccttacctgtgtgcttttgtgggcaccttgtttatgaagaataaaaaatgatttgttatctgaagagaataaattttaaattctcagtttatgtctcagatgctaacgtgtgaaaatataaatatatataatatataaagtaaccagtcttcctgtattttatgtgcatcatagtgatttatctgagcttagtgacccccatcttgtaacctgttgcaagagtgaatgtaaaaaatagttgtggcattttaaaaggtcgcctttgatgcagatgcatctttttcttgcttctaaaacatatttcatgtaaacattgtacatttattattgtaatatatactattatgcagcttattttacctgaaactgttaagccgaccaagatccctccctgcaagacagatgggaatgtgtataataactaggtatttgagaagttctgaagtttgatgtaatctgttacttgtcctgttaaaaaaaggaaaaaattctaattaaaaatttattagtttttaaaaaaaaaaaaaaaaaaaaaaaaaaaaaaaaaaaaaaaaa

SEQ ID NO: 29953 - DNA, 1282 bp, Homo Sapiens
ggcgggccgaagcgaggtgcggctccctgtcgccgcggaggggcgggggcaggacgcgcaactccggccggagctgtccggggtcgtgagccggccccgccttggtggcggcgccccctcgcggtccagaggcagacgcatcgggtgggctcgggtctccagcccggccgggaggagggaccgggtctgcggagcggggactcggggcctcggcggggcgcgcacacgcaggcggggcggcccggggtgcggggcctctgcgcggctgaccaggctcccagagcgtcagcgccgcccatggccgagccgctccagccagaccccggggcggccgaggacgcggcggcccaagctgtggagacgccgggctggaaggccccggaggacgccggcccccagcccggaagttatgagatccgacactatggaccagccaagtgggtcagcacgtccgtggagtctatggactgggattcagccatccagacgggctttacgaaactgaacagctacattcaaggcaaaaacgagaaagagatgaaaataaagatgacagctccagtgacaagctacgtggagcctggttcaggtccttttagtgagtctaccattaccatttccctgtatattccctctgaacagcaatttgatccacccaggcctttagagtcagatgtcttcattgaagatagagccgaaatgactgtgtttgtacggtctttcgatggattttctagtgcccaaaagaatcaagaacaacttttgacattagcaagcattttaagggaagatggaaaagttttcgatgagaaggtttactacactgcaggctacaacagtcctgtcaaattgcttaatagaaataatgaagtgtggttgattcaaaaaaatgaacccaccaaagaaaacgaatgagaaaaatgaaaggaagttctgctgtcagaggcaaaacatctgtttatcatagacatcaacatgacctataagtaaagtgcgtgtctagtgtcttctattgagagtactactattaattaagcttatttccaatgtgcctttttaatgcttgaagttttatctacatacacaggtaacagaggacagtagtctgtaaacatataaatcggtcataactatcgtggtctttatttctgtgaggatctagggaaatttcatgtcacttccctccttcactgcatcacaatcatattcccttttttttttcttggatttgtgtcagttggatgatatcccctccagatagtatcaataaaatgttaaaatt

SEQ ID NO: 29954 - DNA, 3828 bp, Homo Sapiens
cagtgccaggctggaggcggcagcggttggaggcttcgcccggctttgcagcggggacttcggcggcggcgcctcaggcacctcggcccggacacgatgaggcgagtggtacgacagagcaagtttcggcatgtatttgggcaagcggtgaaaaatgaccagtgctatgatgacatccgggtttctcgtgtgacctgggatagttccttttgtgctgtcaatcccagatttgttgccataatcatagaggcaagtgggggaggagcgttccttgtcctccctctgcacaagactggtcgaattgacaaatcttaccctacagtatgtggccacacaggaccagtgctggacatagactggtgcccacataacgatcaggtcattgccagcggttcagaggactgcacggtcatggtatggcagatcccagaaaatggactcaccctttccctgactgaacctgtggtgattttggaaggccactcaaagagagtcggcatcgtggcttggcatccaacggcccgcaatgtgcttcttagtgcaggctgtgataatgccattatcatctggaatgtgggaacaggggaagcccttataaacttggacgatatgcattcagacatgatttacaatgtgagctggaaccggaatggcagtctgatctgcacagcttccaaagacaagaaagtgagagtcattgatcccaggaaacaagagattgttgctgagaaggagaaagcacatgaaggagcaagacccatgagagccatcttcctggccgatggcaatgtcttcaccactgggttcagccgcatgagcgagcggcagctggctctctggaatccgaaaaatatgcaggaaccaattgctcttcatgagatggacactagcaatggggtgttgctgcctttctatgaccctgacaccagcatcatttacttatgtggaaagggtgacagcagtattcgctattttgagatcacggatgaatccccgtacgtccactacctcaacacattcagcagcaaggagcctcagagagggatgggttacatgcccaagaggggacttgatgttaacaaatgtgagattgccagattcttcaaacttcatgagagaaagtgtgaacctattattatgactgttcccaggaagtctgaccttttccaagatgacctgtatcctgacacagcggggccagaggccgcgctggaggcagaagagtggttcgaaggcaagaatgcagacccaatcctcatctccttgaagcacgggtacattccaggcaaaaacagggatctcaaggtggtcaagaagaacattctggatagcaagcccactgcaaacaagaagtgcgacctgatcagcatccccaagaaaaccacagacacggccagtgtgcaaaatgaagccaagttggatgagattttaaaagagatcaaatctataaaagacacaatctgcaatcaagatgagcgtatttccaagttagaacagcagatggcaaagatagcagcctgaaggtcccacccccacccctacagaaaaaatgggagcaagaacttgtgcttgggagctggttattggtgtggtcctagggagggcggaaagggaggcactgccatttggagacattccatttcagatttgtcaaccagcgataggccacattccagtaagaactcaatttgtctcccaaatttgcagaaacaaaacgtgatttaaaagctgagctttttatcagaaagcttttttgatgttttaagtgttatgtgacttgttgaactttttaaaaagtgctacttttaaaatcccagatactctgaattttagaaaacaaactaattctgattgtgtcgtgcccaagtacccttttttttttaatgaatagggaccaatgccacattgctttttatatttctttcttttttaatgttgccaaaaccaaaagtagctttgttttcctttgtattttgctactttgcagtatttgtgtgtgtggttttttttccttaatttgaaagggacagcactgtgtatgtttataaactaaatgaagataagatattattttgtataaacattcatctgagaacaatcaaagcagtagccacatggtgctggctcctttgcagcacaaacctggtcattttgatgactgtacaacaggaagacttgaaaaatcacgtggattcatattaccaccgctctcatttcatggagtcttctgatcaaaaaagctcacgtcgtatttcttcttttcctttctcttttctagaaattgggtgtttgtaccagaatggaattttgcttctcggttatcctgtgcttcagatgattataatctaacccaaactagcatgtgtttctgcagtttgttacacacctaggatcatattgcattcatcactttaaacatcatgtttcaggttttggtcaatacttgacaagggtgcccaggacaggaagacgtgtactgctgagtgttccttcttgcccttttcagcagcttgcccagctcttgagtacagtggtggggactaaaaatgtgggcatgtggagaggggtatttgccctgggtgatcctgtttccctgtgctgtccccatgctgtgttggaggaggaagtggctctccttccaccaacaaagctcctgctctaccctcttcctcacatgtgctgcgacctctctcagggctcccccagccattccttctttccttcctgccttttagctctaaccacattaagctaagacaaggccagagggtgcgattgaatgagtattgagactgaggagaatgatagagagtgaagcagaaacaggagcacagacctctgctgtagctttaatgcatacaaacatgtccctccgcacaactaacctgccctgcctctccatctctcaccaaggctgcgtcaaagcacagaggctccccggactcggagggggccagagactgagctctggtcacctgttcattcctcggttagctggaactttgccccgtttccagtttcttatagtgcatgcttgggaaacaagatttaaggagcctctgttttggaagggctgtctgtgattgaacgtgaaatgtgtagtgccattgggaccacgaagggaattcttgcacatgctcgtgctggtgtgggcatgggactggctggaaacgtctgtatgcagggagccagggtgagggcagagtgtggtgacagccgaacttggagtaatgtccgtgtagaaaaaggaccatgttcttatccagccaatactgggagtgctgtctccacaatttcagggcatctgaatgtttgatgtggttttgtgtgtgtgtatgtatgtgtttaatattgaagtggatcatgagatgtaaagaaaacaataatggcaatgacttatattcaaatctgtatttgtttctttatcaatgtaatctgctgaggaccttttgtctaagattcagtagtgttttaaggttctgatatcgaattaatgaagtaaagttgttgatggtggtgaaacaccgtagggcatgtggttcaaagagaagcaggagggcaagggaaagttaccctgatcttagtttgtagcttatgacttatttaatgaatggatgcccagccaagctcagagtaggcgcccaaagcattgtggattattttcctgttttgtctttttttttttttttttttaagccatgacatcccagaagaggacagtgaattactcctaggtcggctcttatagagtggccatagtgttctgtcaaaacacttgcttccattttcagagataaaaatcattgattacaaaaaaaaaaaaaaaaa

SEQ ID NO: 29955 - DNA, 2644 bp, Homo Sapiens
gaccgcggcagctcagcctcccgccgattgtatgttccaggcctcaatgaggagtccaaacatggagccattcaagcagcagaaggtggaggacttttatgacatcggagaggagctggggagtggccagtttgccatcgtgaagaagtgccgggagaagagcacggggcttgagtatgcagccaagttcatcaagaagcggcagagccgggcgagccggcgcggtgtgagccgggaggagatcgagcgggaggtgagcatcctgcggcaggtgctgcaccacaatgtcatcacgctgcacgacgtctatgagaaccgcaccgacgtggtgctcatccttgagctagtgtctggaggagagctcttcgatttcctggcccagaaggagtcactgagtgaggaggaggccaccagcttcattaagcagatcctggatggggtgaactaccttcacacaaagaaaattgctcactttgatctcaagccagaaaacattatgttgttagacaagaatattcccattccacacatcaagctgattgactttggtctggctcacgaaatagaagatggagttgaatttaagaatatttttgggacgccggaatttgttgctccagaaattgtgaactacgagcccctgggtctggaggctgacatgtggagcataggcgtcatcacctacatcctcttaagtggagcatcccctttcctgggagacacgaagcaggaaacactggcaaatatcacagcagtgagttacgactttgatgaggaattcttcagccagacgagcgagctggccaaggactttattcggaagcttctggttaaagagacccggaaacggctcacaatccaagaggctctcagacacccctggatcacgccggtggacaaccagcaagccatggtgcgcagggagtctgtggtcaatctggagaacttcaggaagcagtatgtccgcaggcggtggaagctttccttcagcatcgtgtccctgtgcaaccacctcacccgctcgctgatgaagaaggtgcacctgaggccggatgaggacctgaggaactgtgagagtgacactgaggaggacatcgccaggaggaaagccctccacccacggaggaggagcagcacctcctaactggcctgacctgcagtggccgccagggaggtctgggcccagcggggctcccttctgtgcagacttttggacccagctcagcaccagcacccgggcgtcctgagcactttgcaagagagatgggcccaaggaattcagaagagcttgcaggcaagccaggagaccctgggagctgtggctgtcttctgtggaggaggctccagcattcccaaagctcttaattctccataaaatgggctttcctctgtctgccatcctcagagtctggggtgggagtgtggacttaggaaaacaatataaaggacatcctcatcatcacggggtgaaggtcagactaaggcagccttcttcacaggctgagggggttcagaaccagcctggccaaaaattacaccagagagacagagtcctccccattgggaacagggtgattgaggaaagtgaaccttgggtgtgagggaccaatcctgtgacctcccagaaccatggaagccaggacgtcaggctgaccaacacctcagaccttctgaagcagcccattgctggcccgccatgttgtaattttgctcatttttattaaacttctggtttacctgatgcttggcttcttttagggctacccccatctcatttcctttagcccgtgtgcctgtaactctgagggggggcacccagtggggtgctgagtgggcagaatctcagaaggtcctcctgaaccgtccgcgcaggcctgcagtgggcctgcctcctccttgcttccctaacaggaaggtgtccagttcaagagaacccacccagagactgggagtggtggctcacgcctataatccctgcgctttggcagtccgaggcaggggaattgcttgaactcaggagttggagaccagcctgggcaacatggcaaaactcagtctgtacaaaaaatacaaaaaattagccaggtgtaggggtaggcacctggcatcccagctactccaggggctgaggtgacagcattgcttaagcccagaaggtcgaggctgcagtgagctgagatcacgccactgcactccagtctgggtgacagagagagaccatatccaaaaaaaaaaaaagttgccagagacgagtatgcccatgctccctctacctcactgccaccactcctgcttttaggagctgagtgtgtctccctaaaatttctatgttgaagtcttaacccttggtaccacagaatatcactgtatttggagatggggtctttagaaaggcacttaaattaaaatgagctcactgatatgggccccgatgcaatataattggtgtccttataagaaggggaggttaggacacgcaggaaagaccacatgaaggcccaggagtgggagggggaatagccatcgacaaactaagggggcctcagaggaaaccaaccctgctgacacctcaatcttagactctggcctcaaaaattgtaagaaaataaacttctgtcttttaagccaaaaaaaaaaaaaaaaa

SEQ ID NO: 29956 - DNA, 2096 bp, Homo Sapiens
gcctttgcgcacgcgcacgaacgcacggccgcgcagcatctgtcttgctggaagctttttcctagaggttgagcggtttgcacaatgtcggaaatggctgagttgtccgagctgtatgaagagagcagtgacctgcagatggatgtgatgcctggcgagggtgaccttccgcagatggaggtaggcagcgggagccgggagctatccctgcgtccctcccgcagcggggcccaacagctcgaggaggaaggcccaatggaggaggaggaggcccagccaatggcggcgccagaggggaaacggagccttgctaacgggcccaacgctggggagcagccaggccaggtggcgggcgcagacttcgagagcgaggacgagggcgaggaatttgatgactgggaggacgactacgactatcccgaagaggagcagctcagtggtgccggctacagagtatcagccgctcttgaagaagccgacaagatgtttctgagaacaagagaaccagccctggatggcgggtttcagatgcattatgagaagaccccgtttgatcagttagcttttatcgaagagcttttttcactgatggttgtcaatcgtctgaccgaagaactcggctgtgatgagattattgatagagagtagttagatgctgttaaaagaggaggaaactacttgaggagggacccaactttccgctatcttttgggttcattccaaatagttttgtgccattgaaaaacttgaccttcaaaaaaatttgtttttcagaatagaacacaataggacagtgactgcacagttgtgaaaaaggaagagaatcattaaagaaaaagaaaaaagattttaagaccgttgaaatcaattatcaagaacgtcctaaaacacctatggctttgactttgttattgatccagattattttccttgcattggggaaaatatctttcatatttgtttgctgtaaagatggttttgcaagaataagtcatgaccaagacaaactgccaatacaaaagcccactgatactaattatataatgagaaaaaaatgtatccaactaggacacatatcttttgagttatttggactgaaagcttaagaaaacttggaaaattctattttgtgatctagtcaagccacagttatcaaaggctacattttcagtgtaagataaatggatgagtaaactcaaatatgtatcacgtgtgctttgtatcttaagatgtgtttccaagagcatctgaaattttgtttgtacatgtatcttgatcatttataaagccactgtgatctataaatcaagaaaatccattgtcataaccatttttaaaagtcaaaaattaagacatccttaattaaaaagtttcaaatctagacactaaatgtgtgtgaatgtacaaagaaaacaaaccattgcttatgctgttatatactagagaaattttgttttgcttgctgttttaacttgacagatgaaggactttagttgaacttcatattgtaagaactgttaataaaagttgtcaagtaaaaagcgctatatctaaaaagactttatgaacagttattctatcaacttttaaaggttttaaacctgcccagaaattaccttggtatctgaagtttccctctgtctcctcctctaattaagcttgttatttgtcatgcaccagcattggagataataaaatttcttgttctgtgtattttgtttggctaatagtattgcatacatactttctctgtatactactttctattgtatgtgttaaccagtattaagggaaaatgatccagcttcagctatctaattcacaaattaatttctggaaattaaactttgtaaattaagtttttgcctataagaatttgctggtctgggaaaacctgccctatcaatgagtatgttgccgtggttaccttactaagatgctgaagttctaggagagtaatgattacatcagaaggctaggttcagcaaaataagtgtatcagcaggttttatcatgatcagtaaaaatgttccaaatgcttctgctccattatagcagtaaagaacgaatatccaatgcaacaggacaattaaaaa

SEQ ID NO: 29957 - DNA, 8046 bp, Homo Sapiens
ctgcggcggcgcgctccgagcctgcgtctagggcgcccccgggtcagagctgtcgccgtggccgccgctgcaaagaacaatgtaccgcaagcagcgctcgctcctccgtttcttcccaccggcctaaagacgacggcgggggcggcccgcgcagcggccgcagctctggctcctcttcaggcccggctcgccgcagctcaccgccgccttccgccctccggctcctcgtcgcggaccccggctcgccgaccccgctcgccctcaaggcaccgcggccgccgggcctcgccgtccccgccacgggttcgtcgcgtctccccgtccccgcctcgggcccgtcgcggctccccgtcgccaccgcggggccgacgactcttcccgccgggcccggccggcttcagaggcagcagccgaggggagtcccgcgccgactatgcccgggacggccgcggagaccatccaggcgacagcggcagccggagacgctctcctggtctgtgttctgactctttggaaaagagcttaaggatcactgttggcaatgaccacttctgtgttagcacaccagaacggcgacggcttagtgatcggctggggtcaccagtggataatctggaagacatggacagggatgacctgactgatgattctgtcttcactcgaagctcccagtgctctcggggtcttgagcgatatatttcccaggaggaagggcctctcagtcccttcttgggacaacttgatgaggactaccgaacaaaagaaactttcctgcatcgatctgattatagtccccatatcagttgtcatgatgagctgttgcggggaacagaacggaatcgagaaaaactcaaaggctactccatacgatctgaagaaaggagccgggaggccaaaagaccccgttatgatgacacagtgaagataaacagcatgggaggggatcacccaagttttacatcaggaactcgcaactatcgacagcgtagaagaagcccaagtcctaggtttctcgaccctgagtttcgagaactggatcttgccagacgaaagcgagaggaagaggaggagcgaagtaggagcttgagtcaggagctggttggggttgatggtggtggtactggctgttccatccctggattgtcaggtgtcctaacagcatcggagccaggatattctttgcatcggcctgaggaagtatctgtgatgcccaagaaatccattttgaagaagcggattgaggtggacataatggagccctccatgcagcttgagagtttttccagcagtaccagctccagccaggatcaccctctctactctgggcacccatcccttccactaagtggtgctattgctgcttttgcctcagagattgaaaacaaggggactatggtagagactgccttgaaggaacctcagggcaacctctaccaatggggtccccttcctgggattcccaaagacaacagtcctctcagagaaaaatttggaagttttctatgccacaaggataatttggatttgaaggctgagggacctgagcgacacacagacttcctgctgccccatgagagagctagccaggatggcagtggtttttcccgcattctgagcatgttggctgattctaccagtacacaggaaaaaaggcgacgtagctttcccgacattgaagatgaggagaaatttctctatggggatgaagaagaggatttaaaggcagaatccgtaccaaagccccttgggagctctgagagtgaagttatgaggcagaaggcaagctccctgccgtcttcagctccagctgtaaagctagaatcactagaagagaccaatccagaatatgcgaagatccatgacttgctcaagacaatagggctggatattggagtagcagagattagtcaattggctgcacgcacccaggaacgacttcatggcaagaagccatcattacgctcctcagctgaccgccgttcctcagttgaccgatacttttcagctgaccactgttcctcagttgaccaccgcttctcagctgaccgctgttcctcagttgaccactgcttctcagctgatcgacgttcctcagatccccacagactagagagcagggaggcacatcatagcaatacccactctccagaggtgtcccatccacacccaccttctcctgtggatccttacctgctcacaaaaaacagccctccattcctaaagtctgaccatccagtgggtcatatttcaggaccagaggtggttggtagtgggtttcagtcatctgttgcagtcaggtgcatgttgccatcagccccatctgccccaattagacttccacacactgctgctttatctcagtttcacatgccaagggcctctcagtttgctgcagctcggatacctccgaactaccagggacctgccattccccctgcctcttttgatgcctataggcactacatggcatatgcagcctccagatggcccatgtatcccacctctcaaccgtcaaaccaccctgtacctgaaccacacaggataatgccaataaccaaacaagctactcgtagccgtcccaatcttcgtgtgatccccactgtgactcctgataagcctaagcagaaagagtctctgcgaggctcaattcctgcggcccaagtgcctgtccaggtgtccattccatcactcataagatataatccagagaagatctctgatgagaagaaccgtgcttcccagaagcaaaaggttattgaagagagggaaaaactaaagaatgaccgggaagcccgccagaagaagatgtactatcttaggaccgagttagagcggcttcataaacaacaaggagaaatgctgcgcaagaaacgaagggagaaggatggccacaaagatcctctcttggtggaggtgagtcggcttcaggataacattatgaaggacattgcagagctacggcaagaggcagaagaggcagaaaagaagcaatctgaactggacaaagtggctcagatcttgggaattaacattttcgataaatcccagaagtctttaagtgacagtagagagcctacagagaagcctgggaaagcagaaaaatctaagagcccagaaaaagtgtcatcgttctcaaactcctcctccaacaaggaatcaaaagtaaacaatgagaagttttgtattaagagccccaagcctgccgaaagcccccagtcagccactaagcagttggatcagcccactgctgcttatgagtattatgatgctggcaatcactggtgcaaagactgcaacaccatctgtgggaccatgtttgatttcttcactcatatgcacaataagaagcacacacagacactggatccctacaacagaccttgggcttcaaagacccagagtgaggccaagcaagatgccataaagcgcactgacaagataactgttcctgcaaaaggctctgagtttctggttcccatcagtggattttattgccagctctgtgaggaatttttgggggatccaatttctggggagcaacatgtgaagggtcaccaacacaatgagaaatacaagaaatatgtggatgaaaacccattatatgaggagcggcggaatctggaccgccaagctggcttggctgtggtcctagagacagaacggcgacggcagagtgagctaaagcgcaaacttagtgagaaaccaaaggaggagaagaaagaaaaaaaggcaaaggctgtgaaagaagtaaaggaggatgacaaggtctctgagaaattagaagaccaactctctgagggtaggaactcccctgaaaaagctgaaaataaaaggaacactggcatcaaactccagtttaaagaagaagtaaagaaggaatcaccaacatcatcttcttttgggaaattcagctggaagaagcccgaaaaagaagaggagaaaagttccttggtgaccccaagtatctctaaagaagagattctagaaagtagtaaggacaaagaggatggcaaaactgaagctgggaaggcaaagcctatcaaaatcaagctctctgggaaaactgttgttgcacataccagcccttggatgcctgttgtgacaacttccacacagactaagatcggacccaacctgcctattccatccacagtactccgcaagtcatgttcagccacaatgagcaagccagctcctcttaacacctttctgtctattaagtcctctggaaccactgctaaacctctgccagtggttaaagagtcttcagctgatctcctcttacctccagacatcatctccaaagcatttggaggggaagaggtgattctaaaagggtctccagaggaaaaagtggtgttggctgaaaagagtgagccatctcatttacctgaacaaatactaccacctcctccaccacccccacctccaccacctccaccaccccccgttatacctcatccagctgccccgtctgctgctcaagcaaatgctatcttggctccagtaaaatcaaacccagttgtatctcaaactctcagccctggcttcgtgggtcctaacattttgaacccagtgttgcctgtagccatcatggcctcagcacagccagctgccattccttctgatgagacagctcctggggtgagtgagagtgaccgagaccagaccctgttctctgtgttagtacgtcctccaccacccctctcaagtgtgttcagtgaacaagccaaaaaattagagaagcgaaattcatgcttagccacagccaatgctaaggacctgtatgacatattctatagtagtggtggaaagggggcccctgagactaagggggcccctgagactaagctaagtggtggtccattggccaatggggaaaatagcaacctctctagaaccaaaagttcagacacctcttctacttctcctttgaacagcagtgcatcccaagaggagttgcatcaagatgagggtttggtcgctgctcctatagttagcaactctgaaaagcccattgcaaaaactctggtggccctagggaaatggtcagttgtagaacatgtaggcccaaaaagcacaggcagcacctatggcttcctacagcctctgacaaggttgtgccaaagcaggccttatgaaacaattaccccaaagacagacactttggccatatggacctctagttccttccagagtgacactagtagggatatatctccagagaagagtgagcttgacctgggagagccaggaccacctggtgtagaaccacctcctcaactgttagatatacagtgcaaagaatctcagaagttggtagaaatccacctcagagaatctgttaaccaggataaggaaagccaagagctccgtaaatctgaggattgtagagaaagtgagatagagacaaacactgaactaaaagaaagggtaaaggagctgtctgaggggatagttgatgagggagcaagtaccagcattggaccccacagcatagatgattctaatttgaaccatggaaacagatacatgtgggagggagaagtaaaacagcccaacttgctaatgattgacaaagaggctgaacagtccaataaattgatgacaggaagtgaaactccaagtaaagtagtgatcaaattgagtccacaggcttgctctttcacaaaggcaaaattagactcatttttatcagaagctaggtctttactcaacccacaagatacacctgtgaaaatttctgccccagagttgctgcttcattccccagccagatcagctatgtgtttaacaggtagtccacaagagcaaggagtttcagttgttagtgaggaggggctagagaattcagctccagaatcagcttctagaacttctaggtacagaagtctcaaactcaagagagaaagatcaaaagactttcaagttaaaaagatctatgagttggctgtttgggatgaaaacaagaagaggccagagacctgggagagcccagagaaaccaaaaacagaagcactggagctacaagatgtccatccagagttaacagtgacaatagaaagcaaggccctagaagactttgaagctacagacttaaaggtagaggagcttactgccctggggaatctgggggatatgcctgttgatttctgcactactcgggtaagcccagcacatagatccccaactgtcttgtgtcagaaagtgtgtgaagaaaattctgtatcacctatagggtgtaattcctccgatcccgctgacttcgaaccaatcccatctttttctgggtttccgttagattctcccaaaaccttggtgcttgactttgagacagagggtgaacgaaactcacctaatcccaggagtgttaggatcccttctcctaacattttgaaaactggacttacagaaaatgttgaccgtggcttggggggcctagagggaacacaccaggcccttgacctgttagcaggaggaatgatgcctgaggaagtaaaagaatcttcccaattagacaaacaagagtcactcggattggaattaaaaacaattaattttgcaggccttgggccatctccttgccttccagaccttgttgactttgtcacacggacctctggagttcaaaaagataaactgtgttctccactctctgagccaggtgacccttctaaatgtagttccctggagttggggccattacagctagaaatatcgaatgcatccaccacagaggtggcaattctgcaagtagatgatgacagtggcgaccctctgaatttggttaaagctccagtgtcaaggtcccctccaagggagcaggtaattgaagacaatatggtccctcagggaatgcctgaacaggaaactacagttggtgccatccaggaccacacagaatccagtgttcacaactaagaataaatacctagagctacttgtgagtgaatcattggcttctagaaatcagatgcccagatgatccaagactagtttgttatctcatctggaacctacaccaagagatgcagtcagcatcttaaagtaaatgttcatggaagctaaaaaatttacctcctttccttttccctttccccttaaaacaccagacaaatcgataacaacttatatatatatatatatatatctgtaaaaatgtattttgttaatttttttggccaatttattttctcccactttgtcattaaaatcacatgtctaactggctcaccacatagtgtgctttgattgtattttggctttgactctgccatttctgaaatgtgggggaggatggaggcagctgacctctccagttgctgtgttgtattcctacccaatttcctgggcagttgatgcatctctgggaaaaacaccagaaagcttgctgaaatggaaaacttggaagaattgttcatctcttaggcttccatttggatgggcctgccttaacattgtttgaaatgcagcgtgagtagctcttttgtttactgtttacaccccttattggcatgtcaactcctgtacttcccttactctgttgcctttcttgagatgcattgtcctgctaacccacaaacctgtttggaaataaacatggaagaatatctggcaggcttacttttagaagacgacaaatcggtaaggcttattcatggttcattgccaggagcagatatgcttttgagatcacttttatttttgaaatggcctttgttcattgtattgtgatccaataacactttgtattaaattgtttagcagccatttgtgttgtgaaggggtagaagatctctgaaacttgtctttagattgaactcattccctgttccacaaacccatatgtatcctttcctcaacctcctcctttcccaattaatttcaaccatagtacgatgtttggggttgtatattttgttaaaaagattaaagaatttatgagttggcttggacaagtttaactttatttttaatgtgttaattacttggaataaatgcattaatttcagaaaaaaaaaaaaaaaaaaaaaaaaaaaaaaaaaa

SEQ ID NO: 29958 - DNA, 3000 bp, Homo Sapiens; identical to SEQ ID NO: 22852

SEQ ID NO: 29959 - DNA, 1744 bp, Homo Sapiens
cggcggtgggcggggctcacgcgaggcgctggaacggtccgggagattctcgctctgctgctttagcttcggagtgtttggcgatggggcagcgcgagatgtggaggctcatgtcgaggtttaatgcattcaaaaggactaataccatactgcaccatttgagaatgtccaagcacacagatgcagcagaagaggtgctattggaaaaaaaaggttgcacgggagtcataacactaaacagaccaaagttcctcaatgcactgactcttaatatgattcggcagatttatccacagctaaagaagtgggaacaagatcctgaaactttcctgatcattataaagggagcaggaggaaaggctttctgtgccgggggtgatatcagagtgatctcggaagctgaaaaggcaaaacagaagatagctccagttttcttcagagaagaatatatgctgaataatgctgttggttcttgccagaaaccttatgttgcacttattcatggaattacaatgggtgggggagttggtctctcagtccatgggcaatttcgagtggctacagaaaagtgtctttttgctatgccagaaactgcaataggactgttccctgatgtgggtggaggttatttcttgccacgactccaaggaaaacttggttacttccttgcattaacaggattcagactaaaaggaagagatgtgtacagagcaggaattgctacacactttgtagattctgaaaagttggccatgttagaggaagatttgttagccttgaaatctccttcaaaagaaaatattgcatctgtcttagaaaattaccatacagagtctaagattgatcgagacaagtcttttatacttgaggaacacatggacaaaataaacagttgtttttcagccaatactgtggaagaaattattgaaaacttacagcaagatggttcatcttttgccctagagcaattgaaggtaattaataaaatgtctccaacatctctaaagatcacactaaggcaactcatggaggggtcttcaaagaccttgcaagaagtactaactatggagtatcggctaagtcaagcttgtatgagaggtcatgactttcatgaaggcgttagagctgttttaattgataaagaccagagtccaaaatggaaaccagctgatctaaaagaagttactgaggaagatttgaataatcactttaagtctttgggaagcagtgatttgaaattttgaggtgacaggcttttaaggtatattttgtagcatgggttggcaatctacagcatgtgggccaaatccagcctgctgcctgtttttatataccctgtaagctaagaatggtttccgcatttttaaatggttgggaaaagaaatcaaagactaataattcatgacgtgaaaattatcagaattcacaaataaagctttattggaactagctatactcatctgtttatatattatctgtggctgctttgaaatgagtagttgcaatagagatggtaaagcctacaaagcctaattatttactgtctggtttttgtcagaaaaaagtttgtcaatccttgttttagaagatggaaaaatgtgaagatctttggagattctcttgagtggtatatctaattgaaatgggatcttcgtttggcttgtatgttgatgaaatcaacttaggtatacaatataaaaaataaagaccctgaaaattgttttggaaaaaaaaaaaaaaaaaa

SEQ ID NO: 29960 - DNA, 2647 bp, Homo Sapiens
gcaacttcctggtggaaaaccgcgactcttgcaagtgggcaaacttgacgttttcgctatgggcaaacgcgggagccggagccagagccagctactcaacaccctaactaaaaagcagaagaaacatcttcgagatttcggcgaggagcatcccttctatgacagggtttccagaaaggaagcaaagccacagatttgtcagctgtcagagagttcagattcttcagattctgaaagcgactcagagagtgaaccacaacaagtttctggctaccacagactacttgctacattaaagaatgtttctgaggaagaagaggaagatgaggaggaggaagaggaagaagacagtattgtagatgatgcagaaatgaacgatgaagatggtggtagcgatgtcagtgtggaagaagagatggctgcagagtctactgaaagtccagagaatgtagctttatctgctgaccctgagggaaaagaagatggggaagagccaccgggcacatcacaaacatcccccgaagagttcacagatgcaaaacacgagtcactgttcagcctggaaaccaattttctggaagaggaaagtggagacaactcttctttgaaagcctctcaagatccatttcttcaacatgtgaacaaagaactgaaagaaaaagcaattcaggctgttgccacaaatcccaaaactacccacgagcttaaatggcctattctgggccagcttttcttttcctctaagtttcagaagttggaaacatttaaacccccaaaggatattgacttaaagtcacttcatctccagaagcctctggaatccacctggactaagaccaacagccagttcctatctggtccccaaaaatcaagcagcccattcacccccctccagaaagaactcttcttaattatgaattcttaccgggacctgttctacccggaaaggactgctctgaagaacggggaagagatccgccatgtgtattgcctgcatgtgataaatcacatcctcaaagccaatgcccaggtgcttggcaacaatagcagacgccgaagccagaagtttggagtgggtgatgatgatgacttcagagaccaagggttaacaaggcccaaggtactgatagtggtgccattccgggaagctgctttgcgggtggtgcagctcttcatcagcctcctcgagggtgacagcaagaagaaaatcattgtgagcaacaaaaagaggtttcagggagaatatggatcagatcccgaggagagaccacccaacttgaagaggcctgaggattatgaagccgtatttgtgggcaatattgatgaccacttcaggattggagtggcaatacttcagagaagcatccgactctatgccccgttttactcctcggatatcctcattgcttcccccctgggcttgaggaccatcattggtggagaaggagagaagaagagagattttgactttctgtcttctatcgagcttctcatcattgatcaagctgacatttacctgatgcagaactgggagcatgtcctgcatttgatgaatcacatgaacctactacccctggactcacatggggtagacttttctcgagtgcggatgtggagcctcaataattggtccaagtactatcgccagacactgctatttggggcccttcaggatgcccagatcaactcagtgttcaacaagtactgtgtcaacatgcaaggccaggtggccgtgaggaatgtcccaatgacaggctctatcagtcatgtcctggtgcagctcccacatgtcttccagaggatggaagctgaaaacctagcttcagtgattgatgccaggtttaacttttttgtgaacaagattttgccacagtatcgtgatgcagtcatgtctcacacgctcatctatatcccctcctactttgacttcgtgcgtcttcgaaattacttcaagaaggaggaattgaattttacccacatctgcgagtacacgcagaagtctggtgtctccagggccagacacttcttccttcaaggagagaaacagtttctacttttcacagagcgcttccatttctacaaaaggtatacaataaaaggcatcaggaacctgattttctatgaactgccgacatatccacacttttacagtgaaatctgtaatatgctgagagccaccaacagaggagaagaggccacgtggacctgcactgttctctactccaaatatgatgcccagaggttagctgccgtggttggtgtggagcgggcggcacagatgctacagtccaacaagaatgtccacctcttcattactggagaaaaatgaaattttgttgggcaggaagtggtatttggcatgatacataatgtttgattctatgccatttggacccaattctgattacttacagaagaaggactgatacaaagaaagtgcatgaggcaatgtcagtattatctgacatctttcttttcaggtcatgtgtccctgaaaagttaaatgtaaaccagattttggtaaatcccatctttcagaagtgaagagggggctagaaggactctgagaagttggtagaagaaaactcccacttgtgaatatttttgtgagacataaattcttttattacgaaaaaaaaaaaaaaaa

SEQ ID NO: 29961 - DNA, 4058 bp, Homo Sapiens
ccaatgttggagccgtctgcaaagtgtccccggcaagaagaggctgcctaccacaaggactttagcttactttttaaagattgaagaaaaaaaagaagacagaaaaagaagaactcaaagatacacaaagtaatttgaaccaaggctcagaagtttttggagccgtgagggatacagcagtttggtcaatattgtcttaacatgcttcaaataaatcagatgttctcagtgcagctgagtcttggtgagcagacatgggaatccgaaggcagcagtataaagaaggctcagcaggctgttgccaataaagctttgactgaatctacgcttcccaaaccagttcagaagccacccaaaagtaatgttaacaataacccaggcagtataactccaactgtggaactgaatgggcttgctatgaaaaggggagagcctgccatctacaggccattagatccaaagccattcccaaattatagagctaattacaactttcggggcatgtacaatcagaggtatcattgcccagtgcctaagatcttttatgttcagctcactgtaggaaataatgaattttttggggaaggaaagactcgacaagctgctagacacaatgctgcaatgaaagccctccaagcactgcagaatgaacctattccagaaagatctcctcagaatggtgaatcaggaaaggatatggatgatgacaaagatgcaaataagtctgagatcagcttagtgtttgaaattgctctgaagcgaaatatgcctgtcagttttgaggttattaaagaaagtggaccaccacatatgaaaagctttgttactcgagtgtcagtaggagagttctctgcagaaggagaaggaaatagcaaaaaactctccaagaagcgcgctgcgaccaccgtcttacaggagcttaaaaaacttccacctcttcctgtggtggaaaagccaaaactattttttaaaaaacgccctaaaacaatagtaaaggccggaccagaatatggccaagggatgaaccctattagccgcctggcgcaaattcaacaggccaaaaaggaaaaggagccggattatgttttgctttcagaaagaggaatgcctcgacgtcgagaatttgtgatgcaggtgaaggtaggcaatgaagttgctacaggaacaggacctaataaaaagatagccaaaaaaaatgctgcagaagcaatgctgttacaacttggttataaagcatccactaatcttcaggatcaacttgagaagacaggggaaaacaaaggatggagtggtccaaagcctgggtttcctgaaccaacaaataatactccaaaaggaattcttcatttgtctcctgatgtttatcaagagatggaagccagccgccacaaagtaatctctggcactactctaggctatttgtcacccaaagatatgaaccaaccttcaagctctttcttcagtatatctcccacatcgaatagttcagctacaattgccagggaactccttatgaatggaacatcttctacagctgaagccataggtttaaaaggaagttctcctactcccccttgttctccagtacaaccttcaaaacaactggaatatttagcaaggattcaaggctttcaggtatgaattaaaagcaaaaacaaaaaacaaaacaattcattagcctcagattcttcatctgtatacatcacaaggctcattcttgcctgctagtatggcctacatgccacttacgttttaagttatttaggaacacaaaggacagacaaaaaagccatatgcacatgcctcattttctcttatttttgatctatctagtaattcttttgctgcctgtctcttctccattttccttcttcttttttaagcatttttcatattcttcactgtcttctatttggtcttgattaggtgcatctatctcttcgctctgtcttccacaaacaaaaattctgccttcagacatttggtgttagtatttcacactcagttctccctttttttacataaggattgagtttctttttatgatgattttacctttatagcaattttgaattttgcattctgttgctagtattgattcaggtacaccattaagatacaacattctagaagtctattaccttaggagttaattaaacatgatatttgaagaataatgaaatgctttatagttgtttgaggcataacaatgtgtatttgttttactggatcatgttttgaactgactagggagggtagcacctgcctcagatagtaccaacaattctgtttcactgggtagtctaaaactagcttatagtttaacttaacttgttgtgtatgtgaatttagggatggaaactttttttcccctatttattctttgtttccttctgggaaaaaaccccacaaaaatcagcactcctttatggatacattggagcttttgaaagaattgtaaactctaggaaggggaaatatctgtgtcttgatttcttagttgccttgaaaatcatgtactgaactgtaaccgctaacttgactggatgaactagtttgcttgtgtgtagagagtgtattgcttcctcagatttcactgttttcatctccttttccatcttagtctttattccttaagaccaaaaactgtaatatcctttagaaatgctctagaagatctgtattgtgtagaatgatcatgtatttataaatattttacaagtttagattataaaatgaaaaagaaggtcatgtgttttggggggtattttgcatgttcggatttttttttcccttcaccgaacccttctgattctttcaaactattgccaggtagttgttagtgtttctaattggactcttaatatgaacttcaagaagctgttaccagttatcggctctgtcatctgaaattttaaccacttaatttaaagttacaattttagaatttgtttttgttgttttaccttaagaaacacaataaatcactgtttaaaaaagatctcaatttatataaagtactggaaaaaagctaagtaatttttagttctatctataatctccgtaggatgaattagaaataaattgtgatgaaaagaaattaactgcttatttatgaatctaatcatttagaaatgtctgagagtaacactgcattcttatagaaacaaagcacaaattgcattcaagctctgaattgattttttgcttggagctgttgttacagtagctgtaattttgctaccagaatgtcttaattttttaaatttgtttttatttctaagctcttggcaatgacaataattataattttaacatatcttcactgtagtcaacatgtagagtctgcttccctcattattgcattgctaaggcctttttaaaaagcttatgcttacataatatactcttttttatggacacgttatatgtttccaaatctgtgtattgtgatttttacatactaatgaatataaacaggtgattttaaaatattactgtgcttctttggttgaatgagctggtattgatgtaaaatactctgtcattgatggaccactacctgcagctaagcagtgagcagaatctccgggaaatgacttagtctggccacatgcatagcccatcttcataatgtcgcagcagaaggttctttgtggttaaaagttttaaagcctatttctttataggtaaccctctcaggtatatttacctggtagaaaaacatgtagattgtttctattacttaaatgttttaattggactgtagtttagaaattacaggaccagcttgttacagattatacactattctgttacttttatttctgaaacttaaaaacaataaattctttttctgtgtttctaggttagaacttttttattttattgcacactgaacagatactgttgcttattgaatattgtgtaaacccttctttggctttccttgcccattgcaatttgatttaagcctactagagccattgtatgtgacagctatattgtattacaaagtaaaaatatatgagtgtattgaaaaaaaaaaaaaaaaaaaa

SEQ ID NO: 29962 - DNA, 2374 bp, Homo Sapiens
gtcatgcagtgcgccggagaactgtgctctttgaggccgacgctaggggcccggaaggaaactgcgaggcgaaggtgaccggggaccgagcatttcagatctgctcggtagacctggtgcaccaccaccatgttggctgcaaggctggtgtgtctccggacactaccttctagggttttccacccagctttcaccaaggcctcccctgttgtgaagaattccatcacgaagaatcaatggctgttaacacctagcagggaatatgccaccaaaacaagaattgggatccggcgtgggagaactggccaagaactcaaagaggcagcattggaaccatcgatggaaaaaatatttaaaattgatcagatgggaagatggtttgttgctggaggggctgctgttggtcttggagcattgtgctactatggcttgggactgtctaatgagattggagctattgaaaaggctgtaatttggcctcagtatgtcaaggatagaattcattccacctatatgtacttagcagggagtattggtttaacagctttgtctgccatagcaatcagcagaacgcctgttctcatgaacttcatgatgagaggctcttgggtgacaattggtgtgacctttgcagccatggttggagctggaatgctggtacgatcaataccatatgaccagagcccaggcccaaagcatcttgcttggttgctacattctggtgtgatgggtgcagtggtggctcctctgacaatattagggggtcctcttctcatcagagctgcatggtacacagctggcattgtgggaggcctctccactgtggccatgtgtgcgcccagtgaaaagtttctgaacatgggtgcacccctgggagtgggcctgggtctcgtctttgtgtcctcattgggatctatgtttcttccacctaccaccgtggctggtgccactctttactcagtggcaatgtacggtggattagttcttttcagcatgttccttctgtatgatacccagaaagtatcaagcgtgcagaagtatcaccaatgtatggagttcaaaaatatgatcccattaactcgatgctgagtatctacatggatacattaaatatatttatgcgagttgcaactatgctggcaactggaggcaacagaaagaaatgaagtgactcagcttctggcttctctgctacatcaaatatcttgtttaatggggcagatatgcattaaatagtttgtacaagcagctttcgttgaagtttagaagataagaaacatgtcatcatatttaaatgttccggtaatgtgatgcctcaggtctgcctttttttctggagaataaatgcagtaatcctctcccaaataagcacacacattttcaattctcatgtttgagtgattttaaaatgttttggtgaatgtgaaaactaaagtttgtgtcatgagaatgtaagtcttttttctactttaaaatttagtaggttcactgagtaactaaaatttagcaaacctgtgtttgcatatttttttggagtgcagaatattgtaattaatgtcataagtgatttggagctttggtaaagggaccagagagaaggagtcacctgcagtcttttgtttttttaaatacttagaacttagcacttgtgttattgattagtgaggagccagtaagaaacatctgggtatttggaaacaagtggtcattgttacattcatctgctgaacttaacaaaactgttcatcctgaaacaggcacaggtgatgcattctcctgctgttgcttctcagtgctctctttccaatatagatgtggtcatgtttgacttgtacagaatgttaatcatacagagaatccttgatggaattatatatgtgtgttttacttttgaatgttacaaaaggaaataactttaaaactattctcaagagaaaatattcaaagcatgaaatatgttgctttttccagaatacaaacagtatactcatgaattgctaagtgtttttttatttttgcatatttattgaactgtctaattgaatacagcttgctcttgtcacctcttcaagctttcaagcctttatagaaaagcttctttgtggcttacactggaaattatgaaagcagtttttctcctaagacttttggtttctcgcattgcctctcagactaagcactaaaaagcaaagcaaaacagaactagttctgtcttaatgaaatatatcaacccaaaagtgtaatgaggaaaatgcttcattagtttcccctagcagacttttacttctcttacactgctacaccattactttcttgagacatttgtaagtcctttgatacagaagagttatatttaggaggctttaatgaaggg

SEQ ID NO: 29963 - DNA, 4914 bp, Homo Sapiens
ctgtcaggtgactctcccgtggcgccatggcggaagcagtggagcaggaaactgggtcccttgaagaatctacagatgagtctgaggaagaagagagcgaagaggaacccaagctgaagtatgaaaggctttccaatggggtaactgaaatacttcagaaggatgcagctagctgcatgacagtccatgacaagtttttggcattgggcacacattatggcaaggtttatttacttgatgtccaggggaacatcactcagaagtttgatgtaagtcctgtgaagataaatcagattagcttggatgaaagtggagagcacatgggtgtgtgttcagaggatggcaaggtgcaggtatttggactgtattctggagaagaatttcacgagacttttgactgtcccattaaaattattgctgtgcacccacatttcgtgagatccagttgcaagcagtttgtgaccggagggaagaagctgctactgtttgaacggtcttggatgaacagatggaagtctgctgttctgcatgaaggggaagggaacataaggagtgtgaagtggagaggccatctgattgcttgggccaataatatgggtgtgaagatttttgacatcatctcaaagcaaagaatcaccaatgtgccccgggatgatataagtcttcgcccagacatgtatccctgcagcctctgctggaaggacaatgtgacactgattattggctgggggacttctgtcaaggtgtgctcagtgaaggaacggcatgccagtgaaatgagggatttgccaagtcgatatgttgaaatagtgtctcagtttgaaactgaattctacatcagtggacttgcacctctctgtgatcagcttgttgtactttcgtatgtaaaggagatttcagaaaaaacggaaagagaatactgtgccaggcctagactggacatcatccagccactttctgagacttgtgaagagatctcttctgatgctttgacagtcagaggctttcaggagaatgaatgtagagattatcatttagaatactctgaaggggaatcacttttttacatcgtgagtccgagagatgttgtagtggccaaggaacgagaccaagatgatcacattgactggctccttgaaaagaagaaatatgaagaagcattgatggcagctgaaattagccaaaaaaatattaaaagacataagattctggatattggcttggcatatataaatcacctggtggagagaggagactatgacatagcagcacgcaaatgccagaaaattcttgggaaaaatgcagcactctgggaatatgaagtttataaatttaaagaaattggacagcttaaggctattagtccttatttgccaagaggtgatccagttctgaaaccactcatctatgaaatgatcttacatgaatttttggagagtgattatgagggttttgccacattgatccgagaatggcctggagatctgtataataattcagtcatagttcaagcagttcgggatcatttgaagaaagatagtcagaacaagactttacttaaaaccctggcagaattgtacacctatgacaagaactatggcaatgctctggaaatatacttaacattaagacataaagacgtttttcagttgatccacaagcataatcttttcagttctatcaaggataaaattgttttattaatggattttgattcagagaaagctgttgacatgcttttggacaatgaagataaaatttcaattaaaaaggtagtggaagaattggaagacagaccagagctacagcatgtgtatttgcataagcttttcaagagagaccaccataaggggcagcgttaccatgaaaaacagatcagtctttatgctgaatatgatcgaccaaacttacttccctttctccgagacagtacccattgcccacttgaaaaggctcttgagatctgtcaacagagaaactttgtagaagagacagtttatcttctgagccgaatgggtaatagccgaagtgccctgaagatgattatggaggaattacatgatgttgataaagcaatcgaatttgccaaggagcaagatgatggagagctgtgggaagatttgattttatattccattgacaaaccaccatttattactggcttgttaaacaacattggcacacatgttgacccaattctactgattcaccgtattaaggaaggaatggagatccccaatttgagagattccttggttaaaattctgcaagactacaatttgcaaattctgcttcgtgaaggctgcaagaagattctcgtagctgactctttgtccttactgaagaaaatgcaccgaactcaaatgaaaggtgttcttgttgatgaggagaacatctgtgagtcgtgcctttcccctattcttccatcagatgcagctaagcccttcagcgtggtggtcttccattgccggcacatgttccacaaggagtgcctgcccatgcccagcatgaactctgctgcacagttctgcaacatctgcagtgctaagaaccgtggaccaggaagtgcaattttggagatgaaaaaatagctcatttctccttgtcagtctccttgtcaccactctttttgagactgtttttgcaacaacaaaagcatttgttgacactcgtgctgttaagagatttgtttatgtttatattatactcaaaaacaatttcttcatctattcctgtactaatggtttctctttgcagttcacagagaatttggggctctcttcatgccttgaaattttggggtccatagtgaatattttgttatttatttgtttggctcattctttatatagtaatggaaacataagtctaggagttagaaatgaattttttagaccttagtaaaaccatttaaccataaaatggacaactgagaattctcccagctgcctgaaagcgtcgccaactgtggttatcctgcaagctgctacctgcaacttggacgttgtttccacgtgctctgctggctacgattcttgcattctgggtttggcttttttctgtgtcatcaactatggttatcctctaaataggcatttaatgaaacattgtacaaattgtcactcatttgatgacacctgggaataacattagcaggctgatgtcctgcaccattatgtttactaatcacatgttctgtgtgctgtgacgactgtcaaagagtatctggccatggcggacactcagcatttgttgattgaataaatgttagctcttctcattgtgaaggactcacttttactgggataaacaaatgcagttaagaattctggcacccttgtaaggaagaaaagagagttcaacaccttcgagtctgagcgcttgtggctagagtttgccaggagggaggaaaccagtgaccctgaaaactgagggtgcctcaggagcagtgggaccacctgatgctgaaggacggactaatgatgtttcctcttgccttctctggtgcctccattgccctcatggaacagagcatatcatagagggagaaaagtcaaacttgtaattgtgtcttacagttactggcttcatcttccttgggatatatggtcatcctctaatgagtgtaaaagtgcgcaaaacacatccttattgttcctgatctcttagtcccataaatgggaacaaatacagctttctgcttctttctttttggggaaaggacagggtgctagtgagtactgacagcatgccagctaccgaagtcacccagccattcccatgagcagcagttcatttaattgtcacagcgtcgccaggaagaagatctgataaacctaggtttacagataaagaaagcaaaatgtagagatgttgttgaggtcacagaggtgactgcctaacttcagagcagggcttctgatccctttaagaaattacagggccagccgggcatggtggctcacgcccgtaatcccagggctttgggaggccttggcaggtggatcacctgagatcgcacgttcgagaccagcctgaccaacatggagaaaccccatctctactaaaaacacaaattagccaggcgtggtggtacatgcctgtaatcccagctactcaggaggctgaggcaggagaatcacttgaccccaggagacgtaggttgtggtgagctgagatcgcgccattgcactccagcctgggcaacaagagcaaaactccgtctcaaaaaagaaaagaaaagaaaagaaatcatagggccaagttcaaaggaaatgcacagaacatatcttcacattagagttaagaattctctagcaaacaacagatttttttgttgttgttagtcacaaatacttagaactggaaggctctttgttattattgaatgtacccctcagccttctcagcatttccttatcccaagactagtgtgctttctgctacactgctagttttcagttttgttcttacccaattgttttttcttttcaacattaccaatttacagattcagtttattacatttacattaatcctcacttatgatttgagcaagctcatttccagaaaagtttactttaagatcatcaataggatttgctaatttcagtgaagtcattttgcttcaggggtaaattatcctagttaccaagtcctatttggacataaagaaaatcctacttatagaaaaggagaaaataattaaacagtcttcatttttaagtaactgatttaaaaggaaaataataaaatatgttcgtttatcatttcagaaattgctgtaacacactggaaaattcctgaacaatatagattttatcgttaataaaaaacactagctttcgttccttagaatgtcttttcttttgaataaacagtattgggtgatttaaaaaaaaaaaaaaaaaaaaa

SEQ ID NO: 29964 - DNA, 3065 bp, Homo Sapiens
gagtgagaccctgcggcagagacgacggaggcggaagcaacccgatcccggaggcggcggcggcggggggagccggagccgcctgggatgttcagtcatgaaacgagtgcgtaccgagcagattcagatggcagtgtcctgctacctcaaacgccggcagtacgtggactcagatggtcccctgaagcaaggactgcggctgtcacagactgctgaagagatggcggccaatctaacagtgcaatcagaatctggttgtgccaacatagtgtctgcagccccttgccaggcagaaccccagcaatatgaagtacagtttggacgactgcggaattttctcactgattctgattcccagcatagccacgaagtgatgcctctcctctatcctctctttgtctacctccatctcaacctggtccaaaacagtccgaagagcacagtggaaagtttttacagccgcttccatggaatgtttctgcagaatgctagccagaaggatgtcattgagcagctacagaccactcaaaccatccaggacatcctatctaacttcaagcttcgagcattcctagataacaagtacgtggtccgtctccaagaagacagctacaactaccttatccgctacctccaaagtgacaacaatactgccctgtgcaaagtcctcaccttacatattcatcttgacgtgcagcctgccaagagaacagactatcagctgtatgccagtggcagctcctcccgcagtgagaacaacggtttggagccccctgacatgcccagccctattctgcagaacgaggctgccctagaggtcttacaggagagcattaagcgcgtcaaggatgggcctccctccctcactaccatctgcttctatgccttctataacacagagcagctgttgaacactgcagaaatctcccccgatagcaagctgcttgctgctgggtttgacaactcctgtataaaactttggagtttacgatccaagaagttaaaatcagagccccaccaagtagacgtgtcccgcatccatttggcttgtgatattctggaggaggaggatgatgaggatgataatgcaggcacggagatgaagatactgcggggccactgcggaccagtgtacagcacgaggttcctcgcggacagctcagggttgctctcttgttctgaagacatgtccatcagatactgggatctggggagtttcaccaacactgtgttgtaccaaggacatgcctatcctgtgtgggatctggacatcagtccatatagcctgtacttcgccagcgggtcccacgaccgcaccgccaggctgtggtcatttgatcggacgtacccgctgaggatatatgcaggacacctggcagatgtggactgtgtcaaattccaccctaattcaaactacttggccacgggctcaaccgacaagaccgtccggctgtggagcgctcagcaggggaactcggtgaggcttttcacaggccaccgtggccccgtgctttctctcgccttttctcccaacggtaagtacttggcgtctgctggcgaggaccagcggttgaagctgtgggacttggcctctgggaccctttataaagagttgagaggccacacagacaatatcaccagcctcaccttcagtccagacagcggcttgattgcctctgcctccatggacaactcggtgcgcgtctgggacatcaggaacacttactgcagtgcacctgccgacggctcctccagcgagctcgtgggcgtgtacaccgggcagatgagcaacgtcctgagcgtgcagttcatggcctgtaaccttcttctggtgactggaattacacaagaaaatcaggaacattaattttttaactttgttggaacggactggggtaacagtggaaagcctccagttgcaatccttcaatgagctgagattgaatcattgactgtgaaagagccccctcctcccctctctcctgggccctcattccgggcaggtcccccttcactcagccccccagtgtcgaaggccaaggttggggaggggaacaggagagaggcaatgatgagtgatcaagaattagagtgccctggaggtcactcacaagtcctcatggagactctgccgtgacctcgcgcatgcgagcaccttcctgtctctcattttcaccatctgactggggctaggtttggttagagggcggctgtagagcaccctcaggagaagtggcgccgcaggggtcacgcatggtccagccctcaggtgggagggaagtccttgttggcagagggatgtggggcgggaatgaggaaaggggagggcatgatcctggcaaatagtctttccttttccgtaattacagagaaccaggattttttttaattattgttattataattataattattattattattgacatgaggaaacctagcactggcagagggcaccttctctgcttttaatctttcaggtttgactcctggcactggttttgatacttggaattttgaggttcagggaattcagagaatttggtagcacagtgtattgggagaaagggaaatttcgggtgacagattgatcaccctggctgacatgtttctggaagtgggtgggtgggtttgattgagaacactttgggctcctgcagtgatggtgggaaagaaaaattctttccaaagctgcacttctcttaataattctctcccctcaaaagaaagattatgataaagaataatttggagtaataagtaacaagatagaattagaaaaatgttgaatttctgaatgaccattcagaggtgtggctttttccacgtctttttctcctgcaatgaactgctcccacgtcctgcactgcaataccagtctaatgaacactttgtgaaacaaatcgtaagtatgtacgcacgcatatcaaactatgctctgaggataaagcaagttctaatttgtggaaaaaggattaaatatttctgttttctgaaaagagttattttgtattttgttttctattaaaatgtatttagtttcaaaaaaaaaaaaaaaaaaaaaa

SEQ ID NO: 29965 - DNA, 2435 bp, Homo Sapiens
gcagcgccgcgactcgtgcgggtaggcgtctgcgctcggtttgagggctcggcgcggggtttcctgttcctccttctgcgcggctgcagctcgggacttcggcctgacccagcccccatggcttcagaagagctacagaaagatctagaagaggtaaaggtgttgctggaaaaggctactaggaaaagagtacgtgatgcccttacagctgaaaaatccaagattgagacagaaatcaagaacaagatgcaacagaaatcacagaagaaagcagaacttcttgataatgaaaaaccagctgctgtggttgctcccattacaacgggctatacggtgaaaatcagtaattatggatgggatcagtcagataagtttgtgaaaatctacattaccttaactggagttcatcaagttcccactgagaatgtgcaggtgcatttcacagagaggtcatttgatcttttggtaaagaatctaaatgggaagagttactccatgattgtgaacaatctcttgaaacccatctctgtggaaggcagttcaaaaaaagtcaagactgatacagttcttatattgtgtagaaagaaagtggaaaacacaaggtgggattacctgacccaggttgaaaaggagtgcaaagaaaaagagaagccctcctatgacactgaaacagatcctagtgagggattgatgaatgttctaaagaaaatttatgaagatggagacgatgatatgaagcgaaccattaataaagcctgggtggaatcaagagagaagcaagccaaaggagacacggaattttgagactttaaagtcgttttgggaactgtgatgtgatgtggaaatactgatgtttccagtaagggaatattggtgagctgcatatataaatttgacagatagctatttacatagccttctaagtaaaggcaatgaattctccatttcctactggaggatttatttaaataaaatatgcttattaaacactcctgcaaagatggttttattagtaccctggtcattttgttcaaggaagggttatattgcattctcacgtgaaatataaaaagcaagtcttgcccaataaaaacgctacattgtgtgtattttttgttcagctaagaattggaaaagtatttgcttgccttttaagttactgacatcagcttccaccagtgtaaaaattgagtaaaacctgaagttttgcataaaatgcaaatcggtgcctgtgcttgaaggttgctgtagagcatctgaccccttattaccaccttaagcaatgtatatgccatgcattaccatgcactaattcaatcacaggtgtttctatctagatttaaatatatttgtcaatgaatgtggaatagaaaatctaaacatgacaataatagacatatctttgtatggtaccagttagttttgccgtggatcagatggtttataaaagtaataaccataaagcaaaaaataatttgaaagcccgtctattcctatgctcaataaagttaagtttttcttcattagaacagttttatgatttatttgtctaggagtatgtcagaaaaatcaggcttttagtaggaattactcctattccccctgaagtcaggaccagtgcctgtgatctccattactttattttcctggaggtattagccaacacagttagatcagagaaagcaattgaagccaggcatgaaggctggcgcccgtaatcccagctactaaggctggaggatcacttcagcccaggagtttaaggctgcagtgagctatgatgatgccactgtactgcagcttgggtaacagattgagaacctgtctcattaaaaaaaaaaaaaaaaaaaaagccgttagacacacaggaaaaatccagaagggtaaactaaactaaagctacaattaatatgggaatttggaagaagtggtaggatttaaaatacagaaacagtttatgtataggatagctataagtaaatactgaaacacattatgcctctgtaattggggttgacacatgaacagaatagcagacacaatgcatatgaaagttacagaatatggtaaaagtggggtaaagatgggtttttaatgatactaagataactgaaaataggcatatagatatattccaagccgcctgacgatctaattgtaaaaagtaaagcatacaaatactagaagaaaatggaggaaaacgacattatatgtgacttaaaacctagaagaaataaataaaactattgatcaattttaactacataaaaatgtttataggacaagaaaaaccccaccataacccaaggcaaacaatgtattgacaggattccaataattaagaatacttcatacaaaaagaaatgtaaatgacctttaacatgtaaagatgctcaccttgttcagaagagaataaaccagtgtttttacctttc

SEQ ID NO: 29966 - DNA, 4263 bp, Homo Sapiens
acatgtccttaaccttggcacaacaaatctctaaatcgattgagacctgtctcagatacttcttggtttacaagatggaggctgaaattaaagagaaagatcctcactcaactcacagaggagcagaatgggaagaggacttagtgagaattccctgaacacaggagaaaaccgaagcccagagagtggatggccaagtccaaggtcacacagccaagtgcatccgagcagcgcaggatccaggtttcctgccccagtgctctttctgcagcccatgccacctgttttcatgctatctcagttcaccttccagctacacacctgcaatcagaaacagaaagtctgagagtgtgtgtggagccaaagaggggacagcagtggtgaggccagtttcatgtcttgtgatttattttctccctttctttttggactttaatcttaagtggacagcaatttggaacagtgtcagcaccttgttggattgtgctgtttgggagaggtgacacagagtattttaaaagagcaggttaagaacttttcacaaggaatcaattgagagaaaataaaatagaaacagactgtcccacatttgggctgagcaccaaacacatttttttttttttttttgagactgagtcttgctctgtcactcaggctggaatgcagtggcgcgatctcggctcactgcagccttcacctcccgggttcaagtgattcttctgcctcagcctcccaagtagctgggattacaggtgcccaccaccatgccaggctaatttttgtatttttagtagagacgaggtttcaccatgttggccaggctggtcttgaactcctgaccaagtgatccacctgcttcggcctcccaaagtgctgggattacaggcacgagccaccgcacctggcctcaaacaagctttttaattgcattcagaagtgcaccaactaggcacagacctctggcatggagacagaatgggaggttcttggtgtctggcctggtcttgcagaaatcagggagttgtggggaccaggcagccactgtgcatcagataggagtttcagcagcaggcaacagaaagcctgccaatgtagctgaaataagaagggcttatttttatccctgaacagaagcttccagcactggttcatcagatcagggcactgagctggcatccccatttatacagttttcctttccttcacctttgtaagatgcctggcacagctctgagcatcaaatatctgtgccatgtgggagcacacgaggggacaagtggggaatagggtctcctctgtcctctgtccccaggctggcttctctcgtggtagaaggacccccacagcaccaggcctcataactaccctgctggtaaactgcaggtgctgtcacggcttcctgccttcgtatatgaaatgttccttggcagctggactgctgtttgtttaccgcacgcacagctctgctgcctcttggttacaccagtgagctattgctccatgacaagccacaccgaaatgtagcaagcacttattgttgcccacatgtgtcaagtcagttgagtgtttctgccaaccggggcctggcttggcccaccttggctgagcttgctctggtgctagggtcagctagacaggtcggcaggagaccagctgctctagaagagcctggacaggatgaattggttctccttccacgtgcatcttgcatccctccagccaaggatttgaacccaggtctcgtctgactccaaatgcaccaagaggatggagcccagagtgacacagaggaagaggcccctggatggatgcatggggaagatcacgggaattacaagtgacatcctgaagtatgatcacaaatgtttcaaattaagccttcctgctaagtttccagaggtgtgtggctcggacgaagtgtttccagaccctgatctactgcatgtcctgcctgttgctggttctttgcagcagtccattgaccaatgctgtctacagcttgagagcctctgcaggccagggctgctctgtgcacatcctacgttactattcaaactgcacagcagcatgaaaaacaggcccttcttttctctcatttacacatatgtgaagaagacacagcaagtgagaaaacgtgaccgaaagccacgcggacaggtggccgcagggccaaacccaacttccgtgatgtgatctggctacagtttggagcccacatatttcaatagttatccccaggcctggcacgtcaaagaggctccagaaatgtttgctgagtgagtgatgaatcagcaatttctgattttctcctaaacttagagaataagtggcttgtctgcagtcacccagggcgtccctgacagaggtacaagtaaagcccagatctctgcatctctggttcaaggccttttgtactacacaccgctgtctctttgtcatcattaaaagcaaggctcaagggacatgttttctagccttagttccccatctacaaaatgggcctcatggaatggaatgtctccacttcactccagcatcaacaagtggggaattctgatggattcaattcgacttctttccatgggcgtgttctaagcagcctctttgttccagaagctgccctcagccagagttggataagccaatcctcactccccagcctcctctggatagggatgaagaccccactggggttggaagtgcagaggcagacaggtgtatggagtcacctgtaaattgattcaagtgagccaggaaagcagcaaaggaaagagaaacctgagtgacgacgtggtggaggaacagggctggaaagaggctgctggctgtctggcttcgcagctctggcctcctaatcagcctcgctcttgtctctggtgttctctggctcttgtccatctgtctgtgtttctttttgccagctattgactaatctttgctgaagctgagctagaattctggtgtttataagcaggtaactagctgagcactagttgataactttggagttagtggataaccacagggctgggctactaagctttttcagttgaaaaataaataaataaataaataaacaccacacccagctaatttttgtatttttagtagagacagggtttcaccgtgttagccaggatggactccatctcctgacctcgtgatccgcctacctcggcctcccaaagtgctgggattacaggcgtgagccaccacgcccggtcacctttgtcctgttttctacaggttagaagcaaggcacaagtcatacctacattcaaggagaggggaccatgcaaaggataaactgcagaaaggacgtggatgaagcagagaggcacgtgcctgtctcattcgcctctggatctgctgcatccaggactgtgccagcacaaagtgggagcccgataaatatttattgaagaaatgaaaggtgacaaaaggcagaaggagggagaccccaaaaagagttacactggaagaagagcccctccttccttcaagccaagtcatccccttgggctctcaccacttcagtttataccttgcctgtagtccagtctctccagcatcaattccatcagcacaaagacataatttaattccttctaccttaaaaaaaaaaaaaaaaaaaaaacagctctccctctcttagggtgagatgaagtggttggcaacaggccaatgctactttcagaggcgtttgaatcagagtgactccattttgaataggggttgagtaaaataaggctgagacctactgggctgcattcccatgagcttaggcattctaagtcacaggatgagacaggaggtcagcacaagatacacgtcacaaagaccttgctgataaaacagattgtgataagaaaagccagtcaaaacccaccaaaaccaagatggcgacaaaagtgatctctggttgtcctcactgctgattattcactaattataaaattaacatgataaaagacactcccaccagcaccgtgacagtttacaaatgacatggacacatcaggaagttaccctatatgtctaaaaggggaggagccctccattccaattgtccacccctttcctggaaaactcatgaataatccaccccttgtttagcatataatcaagaaataaccatgaaaatagccaaccagcagccctcagggctgctttgcctatggagtagccattctatattcctttactttcttaataaacttgctttcactttaaaaaaaaggaaaaaaaaaaaaaaaaaaaaaa

SEQ ID NO: 29967 - DNA, 4235 bp, Homo Sapiens
cgccagcggacggggcggggatcctggtgccaggtcttcgttaacccgcccccgcctgcctcagtcagctgtcccagcccgggcccgaccgtcatggagcggtgcggggcctacgcctgttccgtgtgaggcgcatcgctgccgccgccgccgacgccgccttcgtttgtcgaggcctccggaacccccgccgcctcccggagcccctcgcccttggcagcctgtcaccgccccctgggcgggctcgaatgcgcgtccggtgaaggtgcaggcccggcgccgccactgccgcagccaggagatggttcgggcctagcggagccgggactggagcaacatgaaccgtgaagaccggaatgtgctgcgtatgaaagaacgggaaaggcggaatcaggaaattcagcagggcgaagacgccttcccacctagctctcctctctttgcagagccatacaaagttactagcaaagaagataagttatcaagtcgtattcagagtatgcttggaaactacgatgaaatgaaggatttcataggagacagatctataccaaagcttgttgcaattcccaagcctacagtaccaccatcagcagatgaaaaatctaacccaaatttctttgaacagagacatggaggctctcatcagagtagcaaatggactccagtaggacccgcacccagcacttctcagtctcagaaacggtcctcaggcttacagagtggacatagtagccagcggaccagcgcaggtagcagtagtggcactaacagtagtggtcagaggcacgaccgtgagtcatataacaatagtgggagcagtagccggaaaaaaggccagcatggatcagaacactccaaatcacgttcttccagccctggaaaaccccaggctgtttcttcattaaactctagtcattccaggtctcatgggaatgatcaccatagcaaggaacatcaacgctccaaatcacctcgggaccctgatgcaaactgggattctccttcccgtgtacctttttcaagtgggcagcactcaactcaatctttcccaccctcattgatgtcaaagtccaattcaatgttacagaaacccactgcctatgtgcggcccatggacggacaggagtccatggaaccaaagctgtcctctgagcactacagcagccaatcccatggcaacagcatgactgagctgaagcccagcagcaaagcacatctcaccaagctgaaaataccttcccaaccactggatgcatcagcttctggtgatgtgagctgtgtggatgaaatcctaaaagagatgacgcattcatggcctccccctctaacggctattcatacaccatgcaaaacagaaccttccaaatttccttttccaactaaggagtctcagcagtccaattttggcactggagaacaaaaaagatataatccttctaaaacttcaaatgggcaccagtctaaatctatgttaaaagatgacttaaaactaagcagcagtgaagacagtgatggggaacaggattgtgataagacaatgccgaggagtacaccaggaagtaactctgaaccttcacaccataatagtgaaggagcagataactccagggatgattctagtagccacagtggatctgaaagcagctctggatctgactcagagagtgaaagtagttccagtgacagtgaggcaaatgagccatcccagagtgcatctcccgagcctgaacccccgccaacaaacaaatggcaacttgataattggctgaataaagtgaacccacataaagtgtcacccgcctcttcagtggacagtaacatcccatcatctcaaggctacaaaaaggaaggccgagagcagggcactgggaatagctacactgatacaagtggacctaaagaaacgagttccgctactccgggacgagactccaaaaccatccaaaagggatcagaaagtgggcgtgggaggcagaaatctcctgcacagagtgacagcacaacacagagaagaactgtaggcaaaaaacaacccaaaaaggctgagaaggcagctgctgaagagcctcgtggaggcctgaagatagaaagtgaaacccctgtagacttggctagcagcatgccctccagcagacacaaagcagccaccaaaggctcaaggaaacccaatataaagaaggagtctaagtcttcccctcgacctacagcagagaaaaagaaatataagtcaacaagtaaatcttcccagaaatcaagggaaatcatagaaacagatacctcatcctcagattcagatgaaagtgagagccttcctccttcctcacaaactcctaagtaccccgagagcaataggactcctgttaaaccctcctcagtggaggaagaagatagcttttttcggcaacgaatgttctctcctatggaagagaaggaacttctttcacccctcagtgagcctgatgacaggtacccacttattgtgaagattgacctgaatcttttgactagaataccaggaaagccttacaaagaaacagagccgcccaagggggaaaagaaaaatgtgccagaaaagcacacgagagaggctcagaaacaagcctcagaaaaagtttccaacaaaggcaagaggaagcataagaatgaagatgataaccgagccagtgagagcaagaaacccaaaacggaggacaagaattcagcaggccataagccatccagcaacagagagtcatctaagcagagtgctgcaaaagaaaaggatttgttgccttctcccgctgggcctgttccttcaaaagatccaaaaacagagcatggctctcggaagaggactattagtcagtcttcttccttaaagtcaagcagtaacagcaacaaggagacgagtggcagcagcaaaaacagttcctccacatcaaagcagaagaagaccgaagggaagacttccagtagctccaaggaggttaaggaaaaggctccaagtagctcctctaactgtcctccatctgcaccaactcttgattcttctaagcctcggagaacaaagcttgtctttgatgacagaaattattcagcagaccattatttacaagaagcaaaaaagctaaagcacaatgcagatgcattgtctgataggtttgagaaagctgtatactatcttgatgctgtggtatctttcattgaatgtgggaatgcattagagaagaatgctcaggaatccaaatccccattccctatgtattcagagacggtggatctcatcaaatacactatgaagctaaagaattacttggcaccagatgctacagctgcagataaacgactcacagtactttgcctgcgatgcgagtctttgctgtacctgaggctgttcaaactgaagaaggaaaatgctctgaagtactcaaagacactgacagagcacctgaagaattcttataataattctcaagcaccatcgcctggcttgggaagcaaagctgtggggatgccttcccctgtttctccaaagctgtcaccaggcaattcaggaaattattcatctggggccagtagtgcttctgcaagtggttcttcagtgaccattccacagaagatccaccagatggcagccagctatgttcaggtcacatccaacttcctctatgccaccgaaatttgggaccaagctgaacagctttccaaagagcaaaaagaattctttgctgaactggataaagtaatgggccctctcatctttaatgcaagcatcatgacagatctagttcgttatacccggcagggactgcactggcttcgccaggatgccaagttgatatcttgaactgaacacattctcgttgcctctgattttctccacaacactgtgtcacatcacgaaggaaaactgccataacataccacctagtcgacactaagaatgaggaatagttttctcctcgttggttcatgtgttgttgtttttgataatccaaagcgatcatgtcagttggccctttaatatttccaatgtgaaagattatttaaatgcttttaaatctgcagcacattgataagatggtttccgtgagctatgataagattgaaattccagttgcaattcataactaatgaattgaaattttatttattttaatttttttaagttcccagattggggctagtttaagacttagttatttctgcctataaatttactctgttgaatatttagcataaatttaatgtag

SEQ ID NO: 29968 - DNA, 3880 bp, Homo Sapiens
gaactacaattcccagaaggatgtgcggccgaaagcctcgggcggccttttgaggggctcggctagcttcagcgccgtggggtctgacctggctggatatagtgtaccggcccggcaggaggggcggcccggtccgggttgcgcctcctggagccgcccccgggacgtcagtcctggaggaggcgagggttgctccggttgctaagaagactatgaacaagtcagagaacctgctgtttgctggttcatcattagcatcacaagtccatgctgctgccgttaatggagataagggtgctctacagaggctcatcgtaggaaactctgctcttaaagacaaagaagatcagtttgggagaacaccacttatgtattgcgtgttggctgacagattggattgtgcagatgctcttctgaaggcaggagcagatgtgaataaaactgaccatagccagagaacagccctccatcttgcagcccagaagggaaattatcgtttcatgaaactcttacttacacgcagagcaaactggatgcaaaaggatctggaagagatgactcctttgcacttgaccacccggcacaggagccctaagtgtttggcacttctgctgaagtttatggcaccaggagaagtggatacacaggataaaaacaagcaaacagctctgcattggagtgcctactacaataaccctgagcatgtgaagctgctcatcaagcatgattctaacattgggattcctgatgttgaaggcaagatcccacttcactgggcagccaaccataaagatccaagtgctgttcacacagtgagatgcattctggatgctgctccaacagagtctttactgaactggcaagactacgagggtcgaactcctcttcactttgcagttgctgatgggaatgtgaccgtggttgatgtcttgacctcatatgaaagctgcaatataacgtcttatgataacttatttcgaaccccactgcactgggcagctttattaggccatgcacagattgtccatctccttttagaaagaaataagtctggaactatcccatctgacagccaaggagccacacctttgcactatgctgctcagagtaactttgctgaaacggttaaagtgtttttaaaacatccttcagtgaaagatgattcagacctggaaggaagaacatcctttatgtgggcagctggcaaaggcagtgatgatgtccttagaactatgctgagcttaaaatcggacatagatattaacatggctgacaaatatggaggtacagctttgcatgctgctgctctttctggccatgtcagcaccgtgaagttattactggaaaataatgctcaagtagatgctactgatgttatgaaacatactccacttttccgagcctgtgagatgggacacaaagatgtgattcagacactcattaaaggtggagcaagggtagatctagttgaccaagatggacattctcttctacattgggcagcactgggaggaaatgctgatgtttgccagatattaatagaaaataagatcaatccaaatgtccaggattatgcaggaagaacccctttgcagtgtgcagcatatggaggctatatcaactgcatggcagttctcatggaaaacaatgcagaccctaacattcaagacaaagagggaagaacagctttgcattggtcctgcaacaatggataccttgatgccattaaattactgctagactttgctgctttccctaatcagatggaaaacaatgaagagagatacacaccccttgattatgctttgcttggtgagcgccatgaagtgatccagttcatgttggagcacggtgccctgtccatcgcagccatacaagacatcgccgccttcaaaatccaagctgtctacaaagggtacaaggtcagaaaagccttccgagacaggaaaaatctcctcatgaagcatgaacagttgagaaaagatgctgctgccaaaaagcgagaggaagaaaacaaacgaaaagaggcagaacagcaaaaaggaaggcggagcccagattcctgcagaccccaggcccttccctgtctgcctagcacccaggatgtgcccagcaggcagagccgggcccccagcaagcagcctcctgctggcaacgtggcccaaggccctgagccaagagacagcagaggatctccaggagggtctctaggcggagccctccagaaggagcagcatgtttcctcagatttgcagggaacaaactccagaaggccaaatgaaacagccagagaacattctaaaggccaatctgcttgtgtccacttcagacccaatgaaggcagtgatggaagcaggcatccaggagttccctctgttgagaagtccagaggtgagacagctggcgatgagcggtgtgcaaaggggaaaggcttcgtgaagcagccctcctgtatcagggtggctgggcctgatgagaaaggagaggactccaggcgggcagctgcaagccttccaccgcacgatagccactggaagcccagcaggcggcatgacacagaacccaaggccaaatgtgccccccagaaaaggcgcactcaagagctcagaggaggaaggtgctctccggctggttctagccgccctggcagtgcccggggggaggcggtccatgctgggcagaatcctccccaccatcgtacaccaagaaacaaagtgacacaagccaagctcacaggagggctctattcacatttgccacagagcacagaggagttgaggtcaggagctaggaggctggagacatctaccctgtccgaggactttcaggtatctaaggagactgatccagcacctggtcccctctctgggcagagtgtgaatattgaccttctccccgtagagctccgactgcagataattcagagagaacgaaggaggaaggagctgtttcgcaaaaagaacaaggcagcagcagtcatccagcgcgcctggcgaagctaccagctcaggaagcacctgtcccaccttcggcatatgaagcagcttggagctggagatgtggacagatggaggcaagagtctacagcattgctcctccaggtttggaggaaggaactggaactaaaattcccccaaaccactgcagtaagcaaggcccccaagagtccatccaagggcacctcaggcacaaagtccaccaagcactcagtgcttaagcaaatctatggttgttctcacgaagggaaaatacatcatcctacaagatctgtaaaagcctcttctgtgctgcgtctcaactcagtgagcaacctacagtgtatacatctccttgagaacagtggaagatcaaagaacttttcttataacctgcaatcagctactcagccaaaaaacaaaacaaaaccttgactgcctatggaggaagactgtgttcgggggagctggcatagctagtgcagagttcagattttctgctgataatcttttacaccttgggaaaactttaatatccgtacctgaaggctgattcacctaaaaatgtgttaactgaaagaaaatgtcagaatgtttcctttctgctcttacacagcattgttttgtcaatcaacacagcctgcactgaaaggacctgcatagactatgtctgtgcaaagtgcctgagtgtctgctttcacctcagtctgtacagttggaaatgagaattcataattaacagcaaaatctaaggaaaactacggctgctgggttgggatttctgccagctagctggtactggcttcttgtttcaagagatgaacctaaatgagataggaagcctgtcccatagcagccttcctctcactactttcctggcatctaatgcaacaaacttatcacac

SEQ ID NO: 29969 - DNA, 926 bp, Homo Sapiens
acgtcacgtcgtttaatccggaaacggcggcggcggcgacaggaccgaggggccttagttggtgggcaagtcggggatcccagaaagagaagcgtgacccggaagcggaaacgggtgtccgtcccagctccggcctgccagtgagcttctaccatcatggacctattgttcgggcgccggaagacgccagaggagctactgcggcagaaccagagggccctgaaccgtgccatgcgggagctggaccgcgagcgacagaaactagagacccaggagaagaaaatcattgcagacattaagaagatggccaagcaaggccagatggatgctgttcgcatcatggcaaaagacttggtgcgcacccggcgctatgtgcgcaagtttgtattgatgcgggccaacatccaggctgtgtccctcaagatccagacactcaagtccaacaactcgatggcacaagccatgaagggtgtcaccaaggccatgggcaccatgaacagacagctgaagttgccccagatccagaagatcatgatggagtttgagcggcaggcagagatcatggatatgaaggaggagatgatgaatgatgccattgatgatgccatgggtgatgaggaagatgaagaggagagtgatgctgtggtgtcccaggttctggatgagctgggacttagcctaacagatgagctgtcgaacctcccctcaactgggggctcgcttagtgtggctgctggtgggaaaaaagcagaggccgcagcctcagccctagctgatgctgatgcagacctggaggaacggcttaagaacctgcggagggactgagtgcccctgccactccgagataaccagtggatgcccaggatcttttaccacaacccctctgtaataaaagagatttgacactaaaaaaaaaaaaaaaaaaa

SEQ ID NO: 29970 - DNA, 1629 bp, Homo Sapiens
tctttggtgctgggaggcgggcgcagggtagctgttggcgccgccgcgtttctgggcctggccaactcacgtgaccgacgcgggctctgaagcggtgggccgcaccgaggcggcggcggcggcgacgactgcagctcgggaggtagcggcctggcgagggacgggccggctgccctctcggacggccgcggcggagggcaaaaatggcggaggcttcggcggccggggcggactcgggcgccgctgtagccgcccaccggtttttctgccacttttgcaagggcgaggtcagccccaaactaccggaatatatatgtcccagatgtgaatcaggctttattgaagaagtgacagatgattccagttttttaggtggtggcggcagtcggatagacaataccacaacaacacattttgcagagctttggggccatttggatcacacgatgttttttcaagattttagaccctttctaagtagcagtccactggaccaagataatagagccaatgaaaggggtcaccagactcacactgacttctggggagcaagacctccacggttgccattgggtcggagatacagatctcgaggaagttctcgtcctgacagatctccagctattgaaggaatactacaacacatctttgcaggattctttgcaaattctgccattcctggatctccacaccctttttcctggagcgggatgctgcactccaaccctggggactatgcctggggtcagacagggcttgatgccattgtaacccagcttttaggacaactggaaaacacaggccctcccccagctgacaaggaaaagatcacatctcttccaacagtgacagtaactcaggaacaagttgatatgggtttagagtgtccagtatgcaaagaagattacacagttgaagaggaagtccggcagttaccttgcaatcacttctttcacagcagttgtattgtgccgtggctagaactgcatgacacatgtcctgtatgtaggaagagcttaaatggtgaggactctactcggcaaagccagagcactgaggcctctgcaagcaacagatttagcaatgacagtcagctacatgaccgatggactttctgaagctaaagaccacacctgaatcagggctgtggtaatcatcttaccatagctgtaaattgtatcaaaacaaaaaattagtagatggatttaggaatatgtaagaaactcaacacataatataaatgcaatgaatgtttttcttctttaaatttaaagttagtatctacagatggaattgtatctacaaccaaatgcctcttatccctgaattcagagtgataattttataagtgtgaaacttaattatgtagggctccccccgtctgaatagaattaattccttaaagtctagttagggtcctgctgtctgtcatgttgccttgtaacggatgtttccacctccttctccaacctctaccccaccattagtgtattttactataaaaacagtggaaccacagccctaaagtcctgctgatataaagtccttttgtcttaattgtatttaaaaaaaaaaaaaaactactcttgatcacattagctatgaggcgaggtcaaattcaggtaaaaa

SEQ ID NO: 29971 - DNA, 3591 bp, Homo Sapiens
cgaccacccggcctcggccaataagcgccgccctctcgcccccgtgttactgggtagaagaaaacaaaaacaaacagagcgagaagggccagagactctccgaggcggcggcagagacagaagagcggggtcggggccggctgaccaggaacctgggcgagcagcggcgggggcccgagggattctgaaggaagatttccattaggtaatttgtttaatcagtgcaagcgaaattaagggaaaatggatgtagaaaatgagcagatactgaatgtaaaccctgcagatcctgataacttaagtgactctctcttttccggtgatgaagaaaatgctgggactgaggaaataaagaatgaaataaatggaaattggatttcagcatcctccattaacgaagctagaattaatgccaaggcaaaaaggcgactaaggaaaaactcatcccgggactctggcagaggcgattcggtcagcgacagtgggagtgacgcccttagaagtggattaactgtgccaaccagtccaaagggaaggttgctggataggcgatccagatctgggaaaggaaggggactaccaaagaaaggtggtgcaggaggcaaaggtgtctggggtacacctggacaggtgtatgatgtggaggaggtggatgtgaaagatcctaactatgatgatgaccaggagaactgtgtttatgaaactgtagttttgcctttggatgaaagggcatttgagaagactttaacaccaatcatacaggaatattttgagcatggagatactaatgaagttgcggaaatgttaagagatttaaatcttggtgaaatgaaaagtggagtaccagtgttggcagtatccttagcattggaggggaaggctagtcatagagagatgacatctaagcttctttctgacctttgtgggacagtaatgagcacaactgatgtggaaaaatcatttgataaattgttgaaagatctacctgaattagcactggatactcctagagcaccacagttggtgggccagtttattgctagagctgttggagatggaattttatgtaatacctatattgatagttacaaaggaactgtagattgtgtgcaggctagagctgctctggataaggctaccgtgcttctgagtatgtctaaaggtggaaagcgtaaagatagtgtgtggggctctggaggtgggcagcaatctgtcaatcaccttgttaaagagattgatatgctgctgaaagaatatttactctctggagacatatctgaagctgaacattgccttaaggaactggaagtacctcattttcaccatgagcttgtatatgaagctattataatggttttagagtcaactggagaaagtacatttaagatgattttggatttattaaagtccctttggaagtcttctaccattactgtagaccaaatgaaaagaggttatgagagaatttacaatgaaattccggacattaatctggatgtcccacattcatactctgtgctggagcggtttgtagaagaatgttttcaggctggaataatttccaaacaactcagagatctttgtccttcaaggggcagaaagcgttttgtaagcgaaggagatggaggtcgtcttaaaccagagagctactgaatataagaactcttgcagtcttagatgttataaaaatatatatctgaattgtaagagttgttagcacaagttttttttttttttttttttaagcacttgttttgggtacaaggcatttctgacattttataaacctacatttaaggggaatttttaaaggaaatgttttttcttttttttttgtttttcgagggggcaaggagggacagaaaagtaacctcttcttaagtggaatattctaataagctaccttttgtaagtgccatgtttattatctaatcattccaagttttgcattgatgtctgactgccactcctttctttcaaggacagtgttttttgtagtaaaatcactggtttatacaaagctttatttagggggtaaagttaagctgctaaaaccccatgttggctgctgctgttgagatactgtgctttgggagtaaaaaaagaaagttatttctttgtcttaaagaatttttaaaaaattagtcatgagacttattcatctttccagggaacatactgattggtcttaaaagactagacagttaagtaaaaggtggctggaacatctatttttctacaaaactggaaaaatgaacctggttctagaagaatgtacaccaaaataaaacatgtgaagcagtattgattctttattgggagtacatttttttaggtctcttaaactttaatttcacacagtaaattttgaatctcataaggaagcatatttgaacctagtcaatttaatcttagtgttcccttgaaaactttttttccctacaaaattttaagtgaaaaatacaatagtaaattaagattacactggggaaaaaaatgcaggtatcactttactccattgttatctgacctagagcttaattaagttttagaaatatgtaataccttccatcattccatcatccttaaattctgttaccaaataatggctaatgttacaaaaagttatactccagagacccaaagcttgacatttacctaatgtatgagaaaatattaccaattaacaataaagaatgatcatatttttaacctcttttacatagcctaataactcagcaaggcctcaacgtctgtgctaatttaaactgccaaatattgactgcagcaaacaagaattatattcagaatttatgagggtactgttaggagtatactgcttacaggtttagatatagtctgttagaattaaaaccaagtttagtgttcatatttacctcatgggctttatcaagcccatattacctcagcttatatatagttaccatttttaggtttttaattgtttgacacttggatgataaatgcagtcattttattctcaagtgcttaaaattaatgtaattaaaagcttagctgactacagaataggtgagggtttcttaaaaatgagatttaagggctgggcacggtggctcatgcctgtaatcccagcactttgggaggccgaggtgggcggatcacttgaggttgggagttcatgaccagcttgaccaacatgaagaaaccctgtctctattaaaaatacaaaagtagccaggcatggtggcgcatgcgtgtaatcccagctacttgggaggctgaggcaggagaattgcttgaacctgggaggcagaggttgcagtgagtcgagatggtgccattgctctcgtttgggcaacaagagtgaaactcttgtctcaaaaaaaaaaaaaaatgaggtttaagacagttttgtcattactggtgggatctggtcacacaagatagcattaaacgtgacatggcacataaaattggttaaaaaattttgttttttaattacgtaatgtaaaagcccaacaaacactttatgcaagattggaatgtatcttcaaattcagatttaataaacatgtaaagatcctctgtaaaaaaaaaaaaaaaaaaaaa

SEQ ID NO: 29972 - DNA, 2380 bp, Homo Sapiens
cacacacacacacacacaatcttccagacccatcccctgcctgccagctccacgagccagagagagacagagcgcggacgccgcaggaggcagtgcctggaccccagctgcccaggagagacggagcccgtggctggtgaggccgcagagcagggccaggccgggccctgcccgcaaggacgaccaaacccctcaccggcccctgggccccagagcccaccaggctctcctgctggccccaccatgacttcagagtcgacgtcacccccagttgtgcccccgctccactcccccaagtccccagtctggcccaccttccccttccacagggagggcagcagggtctgggagcggggtggtgtcccacctcgggacctacccagccctctgcccaccaagcggaccaggacctattcagcgacagcccgggcctcagctggccccgtgttcaagggcgtctgtaagcagttctcacgctcacagggccatggcttcatcacccccgagaacgggtccgaggacatcttcgtacatgtgtctgacatcgagggggagtacgtgccagtggagggcgacgaggtgacctacaagatgtgccctatccctcccaagaaccagaagttccaggccgtggaggtggtgctcactcagctggccccccacactccccacgagacgtggtctggccaggtcgtgggctcctaggctgagtggttcacaggccagctggccgggggttggggagccacacagggtgaacgggcagcagccggctccatgccccactgccctggctgatgagtccttcggtggcctcagtgtgcacgtctgtctgtccgtctgtgcttgtggctatgagcgtgtgcctccacccaccccacgacccgtgactactgtgcaagctggccaggaggtaggtggagggcaaggccaccagacctggcttcgcgctgtccactgcctctctcctcccctccctgccgcagacacgcaggacccgctcgccctcctgcttacccgtccccacggtgactgagctgcgagagcctgcgctgggctcactccctggcctccgcccctgagctgtcccgtgtcagtccctggcccggagccaggctctctgtgctacttacatctccctcccttggctgaggtcccccgccacagcctggacccttccctcagaagcctggccgatgggtgcttttggggagcctctcagcctggcagtggcgctgggctccttcccctgggctgtactgagccgagcccaggggtttgcagagggtgggggtccatctctccagcttggctgcagacctcctttaccctgactcacaagccccactgatgctctgggccatgcccggctgacggctgctgtggatgccgcgagggacggacacacgtccggggcacccacgaggagggcccccagcctgggagactggccctgcggcctccacgtcaaactctcttcccaaagccctaacagaccagtggccgaggtgtggctcttattgcatccatccctgaagatgtgtggctgttgctgtcacctggagtccttttggggccaagatgtgtgtgcacccggggtcgtggccattcactcccaggcaggggtgagggtggcctggcccaggaggccaggaaggagggccctgtctgcctccacctctgggtgcaccccctgcctaccaccctcccttctagagagcacatcgcctgaccggggagaagtggggccgtggttcgagggagggctggccaggggtgggacccttatgagactcagtctgtgagtaaaactgggggctcaaatgcccaggatgaggggatcagtgactgtctaggaggatcccttgccttgtaggtgccccaagaccgcagggtagaaatcagccgggatgcctgcatcccacccccggccccagggcccaccacataaaatctgggagcccagagctgctgaggtgtggtcagctcccctaaaatgggcacggcccagcctgtcccatgaggaataaaggcccctggcccccttgagagagggcttgttggtgagggctgactcctgggggcccccaaggctcccctcctgtggggaggccaccttttaaggcaccactagcagtcaggatatggtggcatcagccctggggcctcctgggtggcaggggggcagcagctctcctccccactcacaggccctgcagtgctcatttggaattcctcccaagacccctggccacccagaccccccattcttcctaacactggcaataaaccctcaactgtgaaaaaaaaaaaaaaaaaaaaaaaaaaaaaaaaaaaaaaaaaaaaaaaaaaaaaaaaaaaaaaaaaaaaaaaaaaaaaa

SEQ ID NO: 29973 - DNA, 1681 bp, Homo Sapiens
agttggagggaggcagggaatctggcttgattggcgtgctgagacgcacctggcgcaaccctcccttctgaatcgaagttcaagtcccgcggacactgcaaccatgaaggagagacgggccccccagccagtcgtggccagatgtaagctcgttctggtcggggacgtgcagtgtgggaagaccgcgatgttgcaagtgttagcgaaggattgctatccagagacctatgtgcccaccgtgttcgaaaattacacagcctgtttggagacagaggaacagagggtggagcttagtctctgggatacctcaggatctccctactacgataatgtccgtccactctgctacagcgactcggatgcagtattactatgttttgacatcagccgtccagagacagtggacagcgcactcaagaagtggaggacagaaatcctagattattgtcccagcacccgcgttttgctcattggctgcaagacagacctgcgaacagacctgagtactctgatggagctgtcccaccagaagcaggcgcccatctcctatgagcagggttgtgcaatagcaaagcagctgggtgcagaaatctacctggaaggctcagctttcacctcagaaaagagcatccacagcatctttcggacggcatccatgctgtgtctgaacaagcctagcccactgccccagaagagccctgtccgaagcctctccaaacgactgctccacctccccagtcgctctgaactcatctcttctaccttcaagaaggaaaaggccaaaagctgttccattatgtgaagtggaaattggaggggggagacaaccccctacttcctcccttggggtgcagaggcacggggagagggaggatgagacaatttaggacactggacatgagtttttcagatggccacggtgagggcttggaaggagacaggaatggggcgaggaaggagccaggcccggcatgaggacctgacgctgagagagaaccatcataccccaagccaggcactagattttggagggggcgactaccccagtgccccccccgctccagaggaaggaaagctgtgggggacggggggcatgctggcctcatgggcttgggggcctacagcagcctcaccttcagcttcatgcctcttccacacagcgtttccatgcaggtcaggggatgggaggggtccctgagcccttcccttcccctctaaggaggcagcaacggagagtggggaagtggagcggcagctcccttgggggcttagcccaggtgcttcgtaactgcaatcggaagtgcaggggctggtcagagccaatgagaaggaaacctcatctttgcatagcccatgcctcatggagaggtgacatcatacattcacatgcttctcacctaagtccccagggtccaagggagaagccccagacccccttctcttgcagagtgtgggggtggtggtgctgcaggggcagggctgggtgggggtcaccagactttttctgcccttagggtagtacagctggcatttgttttatagactcttgtctttggaattggggggagggggggagtgtttcaatctgttatatgttctgtgtttaatgaagaaaacctatttattaatgaaaaatataatacatataaagaaaaaaaaaaaaaagaaaaaaaaaaaaaaa

SEQ ID NO: 29974 - DNA, 1102 bp, Homo Sapiens
ccacgcgtccgctggagggaccgaaggtgccgagggctccgcatcgcaaccatggcgctgcgctggggcatcgtgtctgtcggcctcatctccagcgacttcacagccgtgctgcagacgctgcctcgctctgagcaccaggtggtggcggtggcggcccgcgatctgagccgtgcgaaggagtttgcacagaaacacgacatccccaaggcctacggctcctatgaggagctggccaaggacccgagcgtggaggtggcctacattggcacccagcacccccagcacaaggcggcggtgatgctgtgcttggcggcgggcaaggccgttctgtgcgagaagcccacgggcgtgaacgcggcggaagttcgcgagatggtcgcggaggcccgatcccgagccctcttccttatggaggccatctggacccgcttctttcctgcctccgaggctctgaggtctgttttggcccagggaactctaggagacctccgggtggctcgggcagaatttgggaagaatctcatccacgttccccgggccgtagaccgggcccaggctgggggggccctgctggacatcggcatctactgtgtccagttcacctccatggtctttggagggcagaagccagagaagatttctgtcgtgggaaggcgtcatgaaacaggtgtggatgacactgtcacggtgctcctgcagtacccaggggaggtccatggcagcttcacctgcagcatcaccgtgcagctctccaacacggcctccgtgagcggcaccaagggcatggtacagctcctcaacccctgctggtgcccgaccgagctggtggtgaagggggagcataaggagttcccgctgcccccagtcccaaaggactgcaattttgacaacggggcaggcatgagttatgaggccaagcacgtctgggagtgcctacgcaagggtatgaaggaaagtcctgtgattcccctgtcggaaagtgagctcctggctgacatccttgaagaggtgaggaaggccattggagtcaccttcccccaagacaaacgctgatgtatccccgaataaataaagacatcttaaaaaaaaaaaaaaaaaa

SEQ ID NO: 29975 - DNA, 6570 bp, Homo Sapiens
gcatgcgtgcagctctttggaggcggtagctttttcggcgtcgagactggaggctgagtgctaaactgtgtggggcgcggatgggatccagctgttagtcgggtaggcatagctttgtgttattcttggaaaatttcgcaccacttgtgaattccttgaacctgggcattgcaaacccacttctgttgggcccatctcctttgcactttgctcagattaagactcagttggcgcttcagcagctgaatgccgttgcctcacatggttcaacaccaccttatactttattaaatcaggctttcttgaaaatagccatgtcgagacccaggtttaatcctcgaggagactttccacttcaaaggccacgagcacctaacccttctgggatgaggcctccaggaccatttatgaggcctggatctatgggtctcccaagattttacccagcagggagagcacgtggaattccacacagatttgctggccatgaatcttatcagaacatggggccacagagaatgaatgttcaggtaactcaacacagaactgatccaagattgaccaaagaaaaactggattttcatgaagcacaacagaagaaggggaagcctcatggtagccggtgggatgatgagcctcatatatctgcatcagtggcagtgaaacagagttctgtaacacaggttacagagcagagtcccaaagtacagagccgctatacaaaagagagtgcctcaagtatcttagcaagttttggattatctaatgaagacctagaagaacttagtcgctatcctgatgaacaactaactcctgaaaatatgccattaattttgagggatataagaatgcgaaaaatggggcgccgattacctaatttaccttctcagagcagaaataaagaaacacttggtagtgaagcagtttcaagtaatgtgatcgattatgggcatgcaagcaaatatggctacacagaagatccacttgaagtacgtatttatgatcctgaaattccaactgatgaggtcgagaatgaatttcagtcacagcagaacatttctgcatctgttcccaatccaaatgtgatatgtaattctatgtttcctgttgaagacgtatttcgccaaatggacttccccggtgagtcctccaataatcggtcctttttctcagttgagagtggaaccaagatgtcaggcttacacatttcaggaggacagtcagtccttgaacccataaaatccgtcaaccaatccattaaccaaacagttagccagacaatgagtcaatctctgattcctccatctatgaaccagcaacctttttcgtcggaattaatttcatctgtaagccagcaagagcggatcccacatgaacctgtgattaattcatctaacgtacatgttggatcaagaggaagtaaaaagaattaccagtcacaggctgacattcccattcggtctccctttggtattgtgaaagcatcctggctaccaaagttttcacatgctgatgcccagaagatgaagagacttccaactccttctatgatgaatgattattatgcagcatctccaagaatatttccacatttgtgttctctgtgtaacgtagaatgtagtcatttgaaggattggattcagcatcaaaatacatctactcatattgagagctgtcgacagttacgtcaacagtatcctgattggaatcctgagatcctcccatcgagaagaaatgagggcaatagaaaagaaaatgaaactccacgaagacgttctcattcccccagtcctaggcgttctagaagatcaagctcaagtcacagattccgtcggtctcgaagcccaatgcattacatgtataggccgagaagtcgaagtccaagaatttgccatcgtttcatttctagatacagatccagatccagatcccgttcaccatatcgaattagaaatccatttagaggtagtccaaaatgctttcgatcagttagccctgagaggatgtcaaggagatcagtgagatcatcagatagaaaaaaagcattagaagatgtagtacaacgatctgggcatgggacagaatttaataaacagaagcatcttgaagctgctgataagggacattcaccagcacaaaagcctaaaactagcagtggaacaaaaccatcagttaaacctacaagcgctacaaagagtgattcaaatctaggaggacattctattcgttgtaaatcaaagaatcttgaagatgacactttgtcagaatgtaaacaggtgtctgataaagctgtttctctccagcgaaagcttcggaaagaacagtcattgcattatggttcggttcttcttataactgaattaccagaggatggttgtactgaagaagatgtgagaaaattatttcaaccatttgggaaagtgaatgatgtcctaattgttccatatagaaaagaggcttacctagaaatggaatttaaagaggcaattactgcaattatgaagtacattgaaacaacacctcttacgataaaaggaaaaagtgtgaaaatatgtgttccaggaaagaaaaaagcacagaacaaagaggtgaagaaaaagactttagagtcaaagaaagtatctgcatctaccttaaaaagagatgcagatgcttcaaaagctgttgaaattgttacttcaacttctgctgccaaaactggacaagccaaggcatctgtagccaaagtaaacaaatctacagggaaatcagcaagttctgtaaaatctgtggtaacggtagctgttaaaggtaataaagcttcaatcaaaacagcaaaatctggtggaaagaagtctctagaagccaaaaagactgggaatgtcaaaaacaaagactctaacaaacctgtgactataccagaaaactctgaaataaagaccagtattgaagtcaaagccactgaaaactgtgctaaagaagctatttctgatgctgctttggaggccacagagaatgaaccacttaacaaggaaacagaagaaatgtgtgtgatgcttgtctctaatttgcctaataaaggatattctgtagaagaagtttatgacttagcaaaaccatttggtggtttaaaggatatcttgattttatcatctcataaaaaggcatatatagaaataaatagaaaagctgctgagtctatggtaaaattttatacctgcttcccagtattgatggatggaaatcaactctcaataagtatggctcctgaaaacatgaatataaaagatgaggaagctatatttataaccttggtaaaagaaaatgacccagaggcaaacatagatacaatttatgatcgatttgtacatcttgataatttaccggaagatggacttcagtgtgtactttgtgttggacttcagtttggaaaagtggatcaccatgtattcataagtaatagaaacaaggcaattcttcagttagatagtcctgaatctgctcagtcaatgtatagctttctgaaacaaaatccacaaaatattggtgaccatatgttgacctgctcattatctccaaagatagacttaccagaggtgcaaattgagcatgacccagaattagaaaaagaaagccctggcttgaaaaacagtccaattgatgaaagtgaggtgcaaacagcaactgatagtccctctgttaaacctaatgagcttgaagaagaaagtactcccagcattcaaacagaaactttggtacagcaggaagagccttgtgaggaagaagctgaaaaagcaacatgtgattctgactttgctgttgaaactttggagcttgaaactcaaggagaggaggtcaaagaagaaattcctcttgtagcatccgcttcagtcagtattgaacaattcactgaaaatgccgaggagtgtgctttaaatcagcagatgtttaacagtgacttggagaagaaaggggcagaaattattaaccctaaaacagcattgttaccatctgacagtgtgtttgcagaagaaaggaacctcaaaggaattctagaagaatctccatctgaagcagaagatttcatttctggaattacacagactatggtagaagctgtagctgaagtagaaaaaaatgaaactgtttcggaaatattgccatcaacttgtattgtgacgttagtaccaggaattcccactggggatgagaagacagtggacaaaaagaatatttctgaaaaaaaaggtaacatggatgaaaaggaggagaaggaatttaatactaaggaaaccagaatggatcttcaaataggaacagagaaggctgaaaagaatgaaggtaggatggatgcagaaaaggtggaaaagatggcagcaatgaaagaaaagcctgcagaaaacactttattcaaggcatacccaaataaaggagtgggtcaggctaataagcctgatgaaactagtaaaactagtattctggctgtatcagatgtatctagcagtaaaccaagcatcaaggctgttatagtctcttctcctaaggcaaaagctacagtttcaaaaactgaaaatcagaaaagttttccaaaatctgtgcccagagatcaaataaatgctgaaaagaaactttcagccaaggaatttggtctgcttaaacccacaagtgccaggtcaggcttggcagaaagcagcagtaaattcaaacctactcagagcagtcttaccagaggaggcagtggaaggatctcagccctgcaaggcaagctttctaaactggattacagagatataacaaaacaatctcaggaaacagaggctagaccttccatcatgaaacgggatgacagcaacaataagactttggctgagcaaaacactaagaatcctaaaagcactactggtagaagttccaaatctaaagaggagccattatttccatttaatttggatgaatttgttactgtggatgaggttatagaagaagtgaatccttctcaggccaagcagaatccactaaagggaaaaaggaaagaaactctcaaaaatgttcctttctctgaacttaacttaaagaagaaaaaggggaaaacttccactcctcgtggtgttgagggagaactatcttttgtgacattggatgagattggggaagaggaagatgcagctgcacatctagcacaagctctagtcactgtggatgaagtaattgatgaagaagaactaaatatggaagaaatggtaaaaaattcaaattcactttttacattagatgaattaattgaccaagatgattgcatttcccacagtgaacctaaagatgttactgttctgtcagtggctgaagaacaagatctcctcaaacaggaacgcttggtaactgtggatgaaattggagaagtggaagagctacctttgaatgagtcagcagacataacttttgccactttaaatactaaaggaaatgaaggagatactgtaagggattccattggcttcatttcttctcaggtgcccgaagacccttctactttagttactgtagatgaaatacaagatgacagcagtgatttgcatttagtgactttggatgaagtaactgaagaggatgaagactctctggcggattttaacaaccttaaagaagagcttaattttgttactgttgatgaagttggagaggaggaagatggagataatgatttaaaagttgagttagcacaaagcaaaaatgaccatcccacagataaaaaagggaatagaaagaagagagctgtggacacaaaaaagacaaaacttgaatccttgtcccaagtgggtccagtaaatgagaatgttatggaagaagatctaaaaaccatgattgaaagacacttaacagctaaaactccaaccaagagagttagaattgggaaaactctgccatcagaaaaagctgttgtgacagaaccagcaaaaggtgaagaggccttccagatgagtgaagttgatgaggaatctggattaaaggattcagaaccagagcgaaaacgcaagaagactgaagactcttcttcaggcaaatcagtggcgtctgatgtccctgaggaattagactttcttgtacctaaggctggattcttctgtccaatttgttccctcttctactcaggtgaaaaagcaatgacaaatcactgcaagagtacacgtcataagcaaaatactgagaaattcatggccaagcaaagaaaggaaaaggagcagaatgaggctgaagaaagaagctctaggtgattgggggaaaggaaagaattcactagaaatttgtttagggtccagttgatttgtgtatttttgttatcatttaatttgtaattttcgtttcagaagcaaatattcgtgttgtacaaatttctgattgccctaaatgtagagagactgatggggaaagtatgatgggtttgatttttatatcaaatcatcaggcatggagaaatatcttttagaagtgttaaaataaatgttcctactgtatatttaaaaaaaaaaaaaaaaaaaaaaaaaaaaaaaaaaaaaaaaaaaaaaaaaaaaaaaaaaaaaaaaaaaaaaaaaa

SEQ ID NO: 29976 - DNA, 6570 bp, Homo Sapiens; identical to SEQ ID NO: 29975

SEQ ID NO: 29977 - DNA, 3513 bp, Homo Sapiens
ggggcggcagaggcaccagccgacccgtcagtgacaccgctgtgccgtccccaaaaccagccgagacagctggcccccacccttccacccattgggcaggccgcacgggggcgcggcccggagtcctggtccctttgttgggcgcgcaccccctcccttaggtggcaacaaagtcgtgcagtgggagccgccgcgatagggcggggagtggccagggcgggactccaagaactgcccgggggcagcggggccaaaaagtgggaagaaggaaaaaaggcaggaggcatctggggacaggcgcgagggcagccggctctgaagtatgcggagggcctcctcccggccccgggcattcgcggagaacgagcctcgcagaagtttggctgcagctgcccgggcggcgtcgatggctgcgcgccccgcgccgcgcgggggctgagcgggcgccacttcccctccgggccggcttttgtgtctggcatctcctcctcatgctgcgtctggccacctactgcggcggccgctgctgagacgctcgctcggaccaaggggaggagacggcgggggcggccgcggctttgggtccaggcgggactatgggaaacgggatgtgctcccgaaagcagaagcggattttccagacgctgctgctgctgaccgtcgtgttcggctttctctacggcgcgatgctctactacgagctgcagacgcagctgcggaaagccgaggcggtggcgctcaagtaccagcagcaccaggagtccctctccgcccagttacaagttgtatatgaacacagatcaagattagagaaatccttgcaaaaagaaagacttgaacataaaaaagcaaaggaagattttcttgtttataagttagaagcacaagaaacattaaataaaggaaggcaagattccaatagcagatacagtgcactgaatgtccaacatcagatgttgaaaagccaacacgaggagctaaagaaacagcacagtgacttggaagaggaacatcgcaaacaaggggaagacttcagtagaacatttaatgaccataagcaaaaatacttgcagctccagcaagaaaaagaacaagaactttctaagctaaaagagactgtatacaatttgagagaagagaatagacaactaaggaaagcacaccaagacatacatacacagcttcaagatgtcaagcaacagcataagaatttactctccgagcatgaacaacttgtagtgactttggaagaccacaagagtgcactagctgctgcacagactcaagttgcagaatataaacaactgaaagatactctgaataggattccaagccttcgaaaacctgatccagcagaacagcaaaatgtgacccaggtggcacattctccacaaggttacaacacagcaagggagaagccaacccgagaggtgcaggaggtgtctcgaaataatgatgtgtggcagaaccatgaagcagttcctggaagagcagaagacacaaaactctatgctcccacccataaggaggcagaatttcaggctcccccagagccaatccaacaagaagtggaacgcagagaacctgaggagcatcaggtggaagaggagcacagaaaggccctggaggaggaagaaatggagcaggtcgggcaagcagaacatcttgaggaggaacacgatccatcaccagaggagcaggatcgggagtggaaagagcagcatgagcaacgagaagcagccaacctcctggaagggcacgcgcgtgctgaggtgtacccttcagccaagccaatgatcaaattccaatcaccctatgaggaacagttggaacagcagagactggcagtgcagcaggtggaggaggcccagcagctgcgggaacaccaggaagctttgcaccagcagaggctgcaggggcacttactacggcagcaggaacagcagcagcagcaggtggcaagagagatggccctgcagaggcaggctgagcttgaggagggccggccgcagcaccaggagcagctccggcagcaagctcattatgatgctatggataatgatatcgttcagggagcagaggaccagggaatccaaggagaggaaggagcctatgaaagagacaaccagcaccaagatgaagcagaaggagatccaggtaatagacatgagcctcgtgaacaaggaccccgagaagccgacccagaatctgaggcagatagggcagctgtagaagatataaacccagcagatgaccctaataatcaaggtgaggatgaatttgaagaagccgagcaagtgagagaagaaaatttgccagatgaaaatgaagagcaaaaacaaagtaatcaaaagcaagagaatacagaagtggaggaacatttggtgatggcaggaaatccagaccagcaggaggacaatgttgatgaacagtaccaggaagaggcagaagaggaggttcaggaagatttgactgaagagaaaaaaagggaactggagcataatgctgaagagacctatggtgaaaatgatgaaaatactgatgataaaaataatgatggagaagagcaagaagttcgagatgacaaccgccccaaaggccgagaggaacactacgaggaggaagaagaggaggaagaagacggggctgcagttgctgagaaatcacatcgaagagctgaaatgtagcggcacccaatttctagacaacgctcagccaacggattcttttcaagctgctcaaacataaatctgcctactgaactctaggatatttaattacaaaaattaagaacttagacttttttaaaacttttgtattagaaatgcgcatacatttatatgaatatattttgataacgtaggtctagagcttcttttatattcaagctaaacatgaaaaagaagaaaaacaataaagtaaacctgagcccccacgtcccaatttttttaatagattatgtgatgttggaaagctcattgattttgtatatgtttcagcgtgttacctttctggcttccagttcccaggtgttctttgtttgcctttgataaaatacaggatttaagaacagagagtactgcaaaatgccatgcagactttaaagagaatggcctgtttactaattgctgcccttctgatgtctttatgtatagctctgatagaattttcaccagtctatgtatctctggagtgagatctatgtacaaagtgacatacaattggaaatccatttttgttgtaaagacattgtttttcagacttttcagatcaattagaaaaatgtcattgctttaaaatcatagctgttctgtttaagaggaattgaatttaaaaatgagagagtattaaaactcatgtggcagtatcctggtcttaatcaggtattgcagtgttcaaacaaggtatggacacatcaacatattcaccttttggaaggactagtgacttggttaaaaactaatgagtgtttgcgtgtggtgtttctatgcgagcacccattctcaatttttt

SEQ ID NO: 29978 - DNA, 9017 bp, Homo Sapiens; identical to SEQ ID NO: 23885

SEQ ID NO: 29979 - DNA, 2774 bp, Homo Sapiens; identical to SEQ ID NO: 23562

SEQ ID NO: 29980 - DNA, 2945 bp, Homo Sapiens
gccccggccacggcgccgcccctgttctcccggccccgctccaccggggctgacggactgacggccaacacagccggctccgggatgagcgcacggacggtattctgaagtctcaggaaactggaccatttaaatgtgcatggcccatgagaaaggcttataagaagccatggcactcccctttcaaaaagagctggagaaatacaagaacattgatgaagatgagcttcttggcaaactctcagaagaggaactgaaacagttggaaaatgttctagatgacctagatcctgagagtgccatgctgccagctggatttcgacagaaagaccagacacagaaggcagccaccggcccctttgaccgcgagcacctcctcatgtacctggagaaggaggctttggaacagaaagacagagaggactttgtgcccttcactggagaaaagaaagggagagtctttatccctaaagaaaagcctatagaaactcgtaaagaagaaaaagtgacccttgacccagaactggaagaagctttggccagtgcctctgacaccgaactctatgatcttgcagctgtccttggagtacacaatttgctcaacaatccaaagttcgatgaagaaacagccaacaataaaggtggcaaaggacctgtcagaaatgttgtcaaaggtgaaaaagtaaagccagtatttgaggaaccaccaaatcccacaaatgtggaaataagcctgcagcagatgaaagccaatgatcctagcttgcaagaagtcaacctcaacaacattaagaacattccaattccaaccctgagggaatttgcaaaggctctggagaccaacactcacgtgaagaagttcagcctggccgcaactcgcagcaatgaccctgtggccattgcttttgcagacatgctgaaagtaaacaagaccttgacaagtctaaacatagaatccaattttatcactggaactgggatcctggccctggtagaggcactgaaagaaaatgacaccttgacagaaatcaagattgacaaccagaggcagcagttgggaacagctgtagagatggaaattgcccagatgctggaggagaattcaaggatcctcaagtttggataccagtttaccaagcaagggccacgaacaagggtggcagctgccatcacaaagaataatgacctggttcgtaagaagagagttgaagcagaccgaaggtaaacttccttgaggagaagtgaagtttcactgtggtatggccattgaaaaacaaaaactcttcttcttccccatcaggaccattttatcaaagttcgttcatttccgttaaccacataactaataatttaattgttattcttttttagcactacttatttatcttggattttgtaatatatgcaattgttttatttgctcatgggcacttctggcaacttgacaaatggaccgatgcagattttagagagtgacgacatggaaaatgaatttaaccactttcttattgggttgtcttgctttcttacatgaacttgtttttttaatcactgaaaggaatttagtgtataatatgtgtttgtaactgtgattatgatagaggcctatctctgtttacatgcatagctttgagttaggctaaatacatcagaagtgttctactgaccacataagaagttagtattgccaatctttcactgcatgtgaaaatgtgaccaatttagcacaaattctctcttagttccagaaaaatcagtaaatgcacatgccctgttgattggagatcagtagtgtcatcttcataaagcaagacaacattatgacactttaaaacagtagcaaagaagtctatttattaacccacaaatgtagcatcaagccagactcacaggtagcaaaatgaattacacacctacttttactgactattcaacataaattgaatctttaacatgaccttaaaggctatttacaaagctgttttaaagtttttcaaacatgatagaaattttctaaattttagtaagagagaagcttttaaaacagtacattcctgaataaaacaacaatattgtatcttaatcaaggctgtctgatgcagatgattgcattttttggcaaattttagaagcatttattgctttgtctttagtgtaacaagatcacaggattaaatataaacattcaggttaattatctagatttttgtccacagtatatgatccatccagacatttgcaaacgtcaggagaaaaatgtgaattatttatccagatgcatgtcatctcaaggacaaagcctgtgaaagtacaagtgagatggttgcattgtagtatgcattaatctttcaatgtagtggtgtaaaaatgcagtgctaaactaatgaagcaggtgactgcagcctttggctcaagctcacaactctgataactgtcagtgcctgaggttgtgattggtgacattctgacactgcccaaggcaactcaccctctattcctcctttctcccctccctttcttccaattcattgtcttttttttcctcttttctctgtaatttgttactaaacaaattccagaatttgtttagtagctgagtgttcctgagttgcctagtagcaataaaacaagtgaataggaaaataattaatatattattctatttagcttgtaaaacacatggaatctgtttaagatagcccttgtaaaattgaacatttacctgtattgtaagtacccacatctgtgtctctgaagtcctttgaaacatctcattatcttgaaatttttttaatgtttgagaacaccataagcagaatattctaacacctttggcccctgaaaatcctttaattagtttatggcttcatctccttatctatttaaaaaacatagtaaataatgttttatggttttcaaaaaaaaaaaaaaaaaaaaaaaaaaaa

SEQ ID NO: 29981 - DNA, 4909 bp, Homo Sapiens
ttcggagcgcgaagccgccgctgggacctcggcgcgccccgcgtctgcgcttgctgccgcgccccggtcggcgcgctgggagttccagccatgctcttctggcacacgcagcccgagcactacaaccagcacaactccggcagctacctgcgtgatgtgctcgctctgcccatcttcaagcaggaggaaccccagctgtcccccgagaacgaggcccgcctgccacccctgcaatatgtgttgtgtgctgccacgtccccagccgtgaagctgcatgaagagacgctgacctacctcaaccaaggtcagtcttatgaaatccgactactggagaatcggaagctgggagactttcaagatctgaacacaaaatatgtcaagagcatcatccgtgtggtcttccatgaccgccggctgcagtatacggagcaccagcagctggagggctggcggtggagtcggccaggggaccggatcctggacatcgatattccactgtctgttggtatcttggaccccagggccagcccgacccagctgaatgcagtcgagtttttgtgggaccctgcgaagagagcttctgcattcattcaggtacactgcatcagcacagaattcacccccaggaagcacgggggcgagaagggagtgccctttcgagtccagattgacacgtttaagcagaacgagaatggggagtacacggagcacctgcactcagccagctgccagatcaaggtgttcaagccgaagggagccgatcggaaacagaagactgaccgggagaagatggagaaaagaactgcccaagagaaggagaaataccagccgtcctatgaaaccaccatcctcacagagtgctctccatggcccgacgtggcctaccaggtgaacagcgccccgtccccaagctacaatggttctccaaacagctttggcctcggcgaaggcaacgcctctccgacccacccggtggaggccctgcccgtgggcagtgaccacctgctcccatcagcttcgatccaggatgcccagcagtggcttcaccgcaacaggttctcgcagttctgccggctctttgccagcttctcaggtgctgacttgctgaagatgtcccgagatgatttggtccagatctgtggtcccgcagatgggatccggctcttcaacgccatcaaaggccggaatgtgaggccaaagatgaccatttatgtctgtcaggagctggagcagaatcgagtgcccctgcagcagaagcgggacggcagtggagacagcaacctgtctgtgtaccacgccatcttcctggaagagctgaccaccttggagctgattgagaagattgccaacctgtacagcatctccccccagcacatccaccgagtctaccggcagggccccacgggcatccatgtggtggtgagcaacgagatggtgcagaacttccaagatgaatcctgttttgtcctcagcacaattaaagctgagagcaatgatggctaccacatcatcctgaaatgtggactctgagcagcagtggacctcatacctgtctccagctcccagccctgtggatccccgtggatgtagacattgccccactgtaagctgtggcctcaccaggcaagctgaggccaggagggaccctgcccagtctgtgaaagctacagagcaccaaccagcagaagcctgtggacaccaagtacggtgtacagaaagccagtggctcctttctcccttcctcttggcctccagattttgaatggttccttgttcttttctattggtccaaccctgacgttctaaaagggcaaacagtggagacgtctgctctgaaatccctcatcccttagttggaagctgattgggtatcttggtgctgcctgtattggtcccttctgaccactctcctgcctccagagaaagctctgcttcaccctgaaagctggtacctttacctcctcctctgggagttggctgcatggccagcactgccgacttgatgggagcagtttgccctcattctcctgtttcaggtttgcttcccttctcagtgaccctggtgagcatccgcctttcctgttcttggatgaattgatgggagtggggctattctgtgccttctacctctttcttctctacgttgtttctaaggatctgctgctgcggaacccaaagatgtgctcctgtctctgcactggcgcattggcatggtagatgccacaatgtatgtgcacggcctttctcagagacattagttctgaggccctttgtggggaggttagggggatggtaatagaaaaagactattttatttcctggcaatcacgggtaaggaggattaggaatgagtattccattcctaggtgtcatcagatgaccttgaccaccacaataccaggccctcttggatggacttatagaaagttagagaagaccttgttgaaccgctgctaaacttgccacaggagcgatgtgttttctctgagtgcccctcacttacatgtttatctttgtttgtagaggctatgtttaggatattttgcctgcatcagaatgggtgcatcatctttcttaatggcctatcgggaaatttgagtgtcagtaactgtggtagactcagaaattcgtctttgtcttgcctctggttcctgggatccagtgatctctactggcccagggcttcagctcttggttaatttaggttcatggggaaccctctgaccacctgaatgggatgtcatagcttctaaatggagcttctgtggaatgaagtgctagactgaaggactaccagaataaaacagggtctacaatggggagaacttgttttatagatgaggaaaccaaggctcagaggggcaaagtcacctgcatggtagcacatagtgatagggtagcgatataaatttatcatataaaccaggacatctcggaataaaaggggctctgttagtcattatgttgggtaatagccatggcattcctacagaacagagtgaggacaggctcctgattcctcttccttctttagagagaagcggggagtgggttaactaacagctttattgagatgtcattcacatgccattcagtttacccattgctagtgtccaattgtattcacagaaccaccatcaattcacagaattacagtcaacgttggtacattttcatcacccccagtaaaaccccgtacccttggtctgtcactcctgctttcctaactcctgcagtccaaggcagccatgaatctactttctatgtaagattaacctactctggacatttcatatatctggaatcatgtgatatctcttttgtgactggcttcttccactgaatgttttctagggccgtccaagttgaggatgtatcagtacttcattcttttgtattgctgaataatacttcattgtatagatagaccacatttgtttattgattcatcagttgatggacatttgtgtgtttttactttttggctactctgaatgatgctgctatgaacatatttctacaagattttgtgtggacatatgttttcatttcttttagcaatatacataggagtggaattgctaggtcttacagtaactccgtgttttaactttttgagaaactgccagactgttttctatagcagctgtaccattttacattcccaccagcaatgtatccaggtttcaatttgtctacatcctcatcaacacttgctattatctgtctttttgcttttagcatcctaatgagtatgaaatgctatcttgtggttttgatttgcattcccctgatggcaactgatgctgagtgtcttttcctgtgcttacgggccatgcgtatttctttggagaaaggtctatccaggtcctttgcctatttttaattgagttgtcttttttttttaagttttctgttttcctaaccactagactaccagggatgagccttctttttattattgagttgggtgagctatttgtatattctagacgccagtcttttatcaggtatatgactggtaaaaatgttctccccttctgtggattgttttcagtttcttgttggtgtcctttgagacacaaaactttttaactttgatgatttccaagatacgtattttttttctattgtcacttgtgcttttggtgccatatctagaaaaccattgcctaatccaaggtcaagaagattaatgcctgtgttttcttctaagaacttgtatagttttagttctcacaatggtctttgatccatttcgagtatatttttatatatgatgtgatgtaggggtccagcttcattcttttgcttgtggatctccacttgtcccactgctgattattgagaaaaatatcctttctccacggaattgtcttggcatccttgctaaaggcctctgcttcttactggatcttctttcctgggacatggtgtcgttgggaagcttacctttttttttttttacttagtctgtgtttggttccaccagttttatgctgcctttctactctgttcttgctgtctccctctttacctgagtcaacggtactgagtcctatctctctctgatgttccccagtcttccttggtgcatgttctagctccacacactagtccttggaggaaggttgagaccaatgatttcctgttatgagtcatgaggaaactgaatcacctagaagtggaataatgtgctcagggtcaccatagcccattagtggaaggaccaggactagacctttagtcttctgaggtccagccccttaggctgtctgtcatcactgtacccaagtgatgtcactaccaaggccaaatgatggtgggctaaattttaattctcaaaagtgtaggaggctaatattgtcttctaagttccaaaagaagatgtaataaaagtctgttacct

SEQ ID NO: 29982 - DNA, 3913 bp, Homo Sapiens
gaggccaccatgcaggatgtccaaggcccccgtcccggaagccccggggatgctgaagaccggcgggagctgggcttgcacaggggcgaggtcaactttggagggtctgggaagaagcgaggcaagtttgtacgggtgccgagcggagtggccccgtctgtgctctttgacctgctgcttgctgagtggcacctgccggcccccaacctggtggtgtccctggtgggtgaggagcagcctttcgccatgaagtcctggctgcgggatgtgctgcgcaaggggctggtgaaggcggctcagagcacaggagcctggatcctgaccagtgccctccgcgtgggcctggccaggcatgtcgggcaggccgtgcgcgaccactcgctggccagcacgtccaccaaggtccgtgtggttgctgtcggcatggcctcgctgggccgcgtcctgcaccgccgcattctggaggaggcccaggaggattttcctgtccactaccctgaggatgacggcggcagccagggccccctctgttcactggacagcaacctctcccacttcatcctggtggagccaggccccccggggaagggcgatgggctgacggagctgcggctgaggctggagaagcacatctcggagcagagggcgggctacgggggcactggcagcatcgagatccctgtcctctgcttgctggtcaatggtgatcccaacaccttggagaggatctccagggccgtggagcaggctgccccgtggctgatcctggtaggctcggggggcatcgccgatgtgcttgctgccctagtgaaccagccccacctcctggtgcccaaggtggccgagaagcagtttaaggagaagttccccagcaagcatttctcttgggaggacatcgtgcgctggaccaagctgctgcagaacatcacctcacaccagcacctgctcaccgtgtatgacttcgagcaggagggctccgaggagctggacacggtcatcctgaaggcgctggtgaaagcctgcaagagccacagccaggagcctcaggactatctggatgagctcaagctggccgtggcctgggaccgcgtggacatcgccaagagtgagatcttcaatggggacgtggagtggaagtcctgtgacctggaggaggtgatggtggacgccctggtcagcaacaagcccgagtttgtgcgcctctttgtggacaacggcgcagacgtggccgacttcctgacgtatgggcggctgcaggagctctaccgctccgtgtcacgcaagagcctgctcttcgacctgctgcagcggaagcaggaggaggcccggctgacgctggccggcctgggcacccagcaggcccgggagccacccgcggggccaccggccttctccctgcacgaggtctcccgcgtactcaaggacttcctgcaggacgcctgccgaggcttctaccaggacggccggccaggggaccgcaggagggcggagaagggcccggccaagcggcccacgggccagaagtggctgctggacctgaaccagaagagcgagaacccctggcgggacctgttcctgtgggccgtgctgcagaaccgccacgagatggccacctacttctgggccatgggccaggaaggtgtggcagccgcactggccgcctgcaaaatcctcaaagagatgtcgcacctggagacggaggccgaggcggcccgagccacgcgcgaggcgaaatacgagcggctggcccttgacctcttctccgagtgctacagcaacagtgaggcccgcgccttcgccctgctggtgcgccggaaccgctgctggagcaagaccacctgcctgcacctggccaccgaggctgacgccaaggccttctttgcccacgacggcgttcaggccttcctgaccaggatctggtggggggacatggccgcaggcacgcccatcctgcggctgctaggagccttcctctgccccgccctcgtctataccaacctcatcaccttcagtgaggaagctcccctgaggacaggcctggaggacctgcaggacctggacagcctggacacggagaagagcccgctgtatggcctgcagagccgggtggaggagctggtggaggcgccgagggctcagggtgaccgaggcccacgtgctgtcttcctgctcacacgctggcggaaattctggggcgctcccgtgactgtgttcctggggaacgtggtcatgtacttcgccttcctcttcctgttcacctacgtcctgctggtggacttcaggccgcccccccagggcccctcagggcccgaggtcaccctctacttctgggtctttacgctggtgctggaggaaatccggcagggcttcttcacagacgaggacacacacctggtgaagaagttcacactgtatgtgggggacaactggaacaagtgtgacatggtggccatcttcctgttcatcgtgggtgtcacctgcaggatgctgccgtcggcgtttgaggctggccgcacggtcctcgccatggacttcatggtgttcacgctgcggctgatccatatctttgccatacacaagcagctgggccccaagatcatcgtggtagagcgcatgatgaaggacgtcttcttcttcctcttctttctgagcgtgtggctcgtggcctacggtgtcaccacccaggcgctgctgcacccccatgacggccgcctggagtggatcttccgccgggtgctctaccggccctacctgcagatcttcggccagatcccactggacgagattgatgaagcccgtgtgaactgctccacccacccactgctgctggaggactcaccatcctgccccagcctctatgccaactggctggtcatcctcctgctggtcaccttcctgttggtcaccaatgtgctgctcatgaacctgctcatcgccatgttcagctacacgttccaggtggtgcagggcaacgcagacatgttctggaagttccagcgctacaacctgattgtggagtaccacgagcgccccgccctggccccgcccttcatcctgctcagccacctgagcctgacgctccgccgggtcttcaagaaggaggctgagcacaagcgggagcacctggagagagacctgccagaccccctggaccagaaggtcgtcacctgggagacagtccagaaggagaacttcctgagcaagatggagaagcggaggagggacagcgagggggaggtgctgcggaaaaccgcccacagagtggacttcattgccaagtacctcggggggctgagagagcaagaaaagcgcatcaagtgtctggagtcacagatcaactactgctcggtgctcgtgtcctccgtggctgacgtgctggcccagggtggcggcccccggagctctcagcactgtggcgagggaagccagctggtggctgctgaccacagaggtggtttagatggctgggaacaacccggggctggccagcctccctcggacacatgagctgcttggcctgccacgtgtggggccacctctcttcagttggccaccctgcacgttgtgcactgacctttgccgacctccagcggaaccccccagggggcaccagccccccagcagacaatggccctcctggtgcctcaccacagaccctcacccaaaggaaccgctccttgtccctcctggcctccccggaggcacagcagtgtcatggggctgtctcccctgacaggcacaactccccgggcagaaaacgtgccccaccgcatccctacctggaaactgaccagcctgcactgtggaaaagctggccctgtggcgtgacgggggagcacccccatccagactgcgaagctgctctgggtctgcacccacccctgccctgacttgtgttgcctgacaagagact

SEQ ID NO: 29983 - DNA, 2176 bp, Homo Sapiens
gatcaatcttcatcaggctacatttccaatcacctaaacaaccgagcaagacaagccactccgacaaggttggctgcccggcgggtctctgtgagagatccaggtagatggtgaacggccccggcagctgagggcaggccaggcccccagacgcatcagaccctgaaggactgcgtggtgggagccctgcaccgctcctggccccgggccccctggatccgtcggggcgcctccacccagctgttagcatgatgtcttacctcaaacaacccccatacggcatgaacgggctgggcctggccgggcccgccatggacctcctgcacccatccgtgggctatccggccactccgcggaagcagcggcgggagcgcaccaccttcacgcgttcacagctggacgtgctcgaggcgctcttcgccaagactcgctaccctgacatcttcatgcgggaggaggtggcgctcaagatcaacctgccggagtctagagtccaggtctggttcaagaaccgccgcgccaaatgccgccagcagcagcagagcgggagcggaaccaagagccgcccagccaagaagaagtcctctccagtgcgggagagctcgggctccgaaagcagtggccaattcacgccgccagctgtgtccagctctgcctcgtcctctagctcggcgtccagctcttccgccaacccagcggctgcagcggctgcgggactaggtgggaacccggtggcggccgcgtcgtcgctgagtacaccagctgcctcatctatctggagcccggcctccatctcgccaggctcagcgcccgcgtccgtgtcggtgccggagccattggccgcgcctagcaacacctcgtgtatgcagcgctccgtagctgcaggcgccgccaccgcagcagcctcttatcccatgtcctacggccagggcggcagctacggccaaggctaccctacgccctcctcttcctactttggcggcgtggactgcagctcatacctagcgcccatgcactcacatcaccacccgcaccagctcagccccatggcaccctcctccatggcgggccaccatcatcaccacccacatgcgcaccacccgttgagccagtcctcaggccaccaccaccaccatcaccaccaccaccaccaaggctacggtggctctgggcttgccttcaactctgccgactgcttggattacaaggagcctggcgccgctgctgcttcctccgcctggaaactcaacttcaactcccccgactgtctggactataaggaccaagcctcatggcggttccaggtcttgtgagcccaggaatgaaagaggagaagaaacgcaactacctgcgccctccgtggtcccgatcctgttgctgctgctgcaccgcccgcctttgcctcgtcttctccaaaactgaattttcaccccccaaaaagatgtccattgcctgcactgccgcccccatttttgtgccacttgcttggggggatgtgcaaacccaccctgccccttggatggggggaccggtgcttcggcttggcctacacattctatacaggagagatgtattatttccccccttcagcccctactaaactcttaagcctccccttccagtctttctggacagctattaagcacttgcagccttcggaggctctgcgctctgatccgctgtttgagcccaacactttaatttattctttctggacactggagtcactaactggcgtgtttctgcccattggagcacccgcacactactccaaatcaaaaccactaagagttcctcccgcgcagactgctgccccttcagctgccctcgattttgctccacgcctgccggccagagcctcccggcgtttcttccgccccagcggagtgcgctggggcgcgccagggctaggcccgccggaggagcgcgtccccagccttccgcgcacagagccgcatcccgccccgccctgcgctggactggttcaagcttccgcctcggcgggaacgctgtacatagtcaggtccgttccagggaccacttaaactttttagttgctgttggttggttgaactgaacatatcttgtcttagcacccaggaaacagaactttaagatatatacagcacatatatatatatatacatatatatatacacatatataaaaaacaaaa

SEQ ID NO: 29984 - DNA, 2708 bp, Homo Sapiens
tcggcgttctggctacaggttcggggcgcgggtctcttccgcggaaactgacattgcgtttccgttgtcggcctcccactgcaggagccatatattgaagaccatgtctgggagcttctactttgtaattgttggccaccatgataatccagtttttgaaatggagtttttgccagctgggaaggcagaatccaaagacgaccatcgtcatctgaaccagttcatagctcatgctgctctcgacctcgtagatgagaacatgtggctatcgaacaacatgtacttgaaaactgtggacaagttcaacgagtggtttgtgtcggcatttgtcactgcggggcatatgaggtttattatgcttcatgacataagacaagaagatggaataaagaacttctttactgatgtttatgatttatatataaagttttcaatgaatccattttatgaacccaattctcctattcgatcaagtgcatttgacagaaaagttcagtttcttgggaagaaacaccttttaagctgaatgcagaaaattccaaaataaatgatgtcaccacaatggtgtatactcaggaatgtgtacattgtaagttacttgattaaatagcctggaaaacttttgtgtattctcagcttatctaaacctaatgaaattccttttatatttaaaaatagtacattctgtctcatgtcacgtatcaatagatcaattggtatttccttgtgaacagtgttatttataaagagttcattatcaataatcatgttttttttttttttttttttctgatacagagtctcactctgttgccaggctggagtgcagtggcgcaatcttggctcactgcaacctccgcctcccaggttcaggcgattctcctgcctcagcctccaagtagctgggactacaggcgcgtgccaccacgcccggctaatttttgtatttttagtagagacagggtttcaccatattggtcaggctggtcttgaactcctgacctcgtgatctgcccgccttggcctcccaaagtactgggattacaggcgtgagccaccgtgcccaaccatgaaatatttttacttaaaaattgggaataagctcgctttttttttttttgagatggagtcttgctcctgttgtgcaggctgtagtgcagtggcacgatcttggctcactgcaacctccacctcccgggttcaagcaattctccttcttcagcctcccgagtagctgagattataggcgtgcaccaccacacctggctaatttttgtatttttagtagagacagggtttcaccatattggtcaggctggtcttgaactcctgacctcgtgatccacccacctcaggaagtgctgggattacaggcgtgtgagccaccacgcccggccatgaaatatttttacttaaaaattgggaataagctttttggttttttgtgggtttttgtttttgttttttgttttttgtttttttgagatggagtcttgctcctgttgtgcaggctggagtgcagtggcacagtcttggctcactgcaacctccacctcctgggttcaagcaattctccttcttcagcctcccgagtagctgggattacaggcatgcaccaccacacctggctaatttttgtgtttttagtagagacggggtttcgctattttggccgggctggtttcaaactcctgacctcagttgatccacccgcctcagcctcccaaagtgctaggattacaggcatgaaccaccgtgcccggccaggaataagcttttgacttacccaattcagataggttgatctttggggttttttttttttttttgagatggagtttcgctctgttgtccaggctggagtgcaatggcagttgtttcaccgtaacctctgcctcctgacttcaagcaattctcctgcctcagcctcccaaagtgctgggattacaggtgtgagccaccgtgcccggcccagataggttgatcttaatgtaacaacccaaaaataaatgtcatagtcaagatttggtagataaatttaaaattaaaatattctgcagttgggagtgaaatgtgatagcacatacgttgacattatgcatttagagatgttataaaaatgtataggcagtatacacagcactactcaagaagccaaagaaacacttgtgcagtgctaagtgtcacatgtctgcttccaccagaggctaggaatagtgatcctgctataatgtgagaacccaaatcatgtttataaaataggacgctgggagcagttgcaggccacagtgaagtgtgttgcttctgtcactttatattcttatatttcctttccctcagacagtaaactgttgatactcgtacttgtaaaaaattgtaaggcaatttttagtattgttgtcaaagaaaagcttggattacattaacatttgtattcagtcttttaggtgatacaccagagggggctgggaattgtctctttgttcctataagtagatcttaatgtaaaatagtaaatgtccattgaaaagcaagtaatacagcctgtgctaattgggagcacttgaacaattttgttccattctgagtaacttttgagcaagtaattctaagctttgtcttgtatccttgtgtgaaattgcataatttttaccctatttgatttcttaaataaagatgtttgctcaagaaaaaaaaaaaaaaaaaaa

SEQ ID NO: 29985 - DNA, 4312 bp, Homo Sapiens
gggctgtttgaatggctttgggatggagcaggggagagagtggctccgtttgcctccccgctttggtgatgctgtgcgagcggcttcgggggccctggagacgtccgagtcactgagggtgggctgggactcggggcccgcgtcccatctccccgccgattggtccgccccccgtgcgagtgtaacacagccagcctcgaagacttccctctgagttggaatgataatgaccgaatcccgagaagttatagacttagaccccccagctgagacttcccaggagcaggaagaccttttcatagtgaaggtggaagaagaagactgcacctggatgcaggagtacaacccgccaacgtttgagactttttaccagcgcttcaggcacttccagtaccatgaggcttcaggaccccgggaggctctcagccaactccgggtgctctgctgtgagtggctgaggcccgagctgcacacgaaggagcagatcctggagctgctggtgctggagcagttcctgaccatcctgcctgaagagttccagccctgggtgagggaacatcaccctgaaagtggagaagaggcggtggccgtgatagaaaatatacagcgagaacttgaggaacgcagacagcagattgttgcctgccctgatgtgcttcctcggaagatggcaacacctggagcagtgcaggagtcctgcagcccccatcccctgaccgtggacacccagcctgagcaagcgccacagaagcctcgtctcctggaggaaaatgcccttcctgttctccaagttccttcccttcccctgaaggacagccaggagctgacagcttcacttctctcaactgggtcccagaagttggtgaaaattgaagaggtggctgatgtggctgtatccttcatcctggaggaatgggggcatttggaccagtcccagaagtccctttatagggatgacaggaaggagaactatgggagtattacttccatgggttatgagtccagggacaatatggagctcatagtgaagcagatttctgatgactctgaatcacactgggtggcgccagaacacaccgaaaggagcgttcctcaggatccagactttgcagaagtcagtgaccttaaaggcatggtacaaaggtggcaggtcaaccccactgtggggaaatcaaggcagaatccttcccagaaaagggatctggatgcaatcacagacatcagccctaagcaaagcacacatggcgagagagggcacagatgcagcgattgtggcaaattcttcctccaagcctcaaactttattcagcatcggcgcatccacactggagaaaaaccgtttaagtgcggagaatgtgggaagagctacaatcagcgggtgcacctcacccagcaccagcgcgtccacacaggggagaaaccctacaaatgtcaggtgtgcggaaaggctttccgggtgagttcccacctggttcagcaccacagtgtccacagcggagagaggccctatggctgcaatgagtgtgggaagaacttcggtcgccattcgcatctgatcgaacacctaaaacgccacttcagggagaaatcccagagatgcagtgacaaaagaagtaagaacacaaaattaagtgttaagaagaaaatttcagaatattcagaagcagacatggaactatctggaaaaacccaaagaaatgtttctcaagttcaagattttggagaaggctgtgagtttcaaggcaagctggatagaaagcagggaattcccatgaaagagatactaggacaaccatcttcaaagaggatgaactacagtgaagtcccatatgtccacaaaaaatcctccactggagagagaccacataaatgtaacgagtgtgggaaaagcttcattcagagtgcacatcttattcaacatcaaagaatacacactggggagaaaccattcaggtgtgaggaatgtgggaaaagctacaaccaacgcgtgcacctaactcagcatcagcgcgtccacacaggtgagaagccctacacctgtcccttatgtgggaaagccttcagagtgaggtcccaccttgttcagcatcagagcgtgcacagtggggagagacccttcaagtgtaacgaatgtgggaaaggctttgggaggcgttcccacctggctggacatcttcgactccactcccgagagaaatcccatcagtgtcgtgaatgtggggaaatcttttttcagtacgttagcctaattgaacatcaggtgctccacatgggtcagaaaaatgaaaaaaatggcatctgtgaggaagcatatagttggaacttgacagtgattgaagacaagaagattgagttacaagagcagccttatcagtgtgatatctgtggaaaagcctttggttatagctcagacctcattcagcattacagaactcatacagcagagaagccctatcaatgtgatatatgtagagaaaatgttggccagtgttcccacaccaaacaacatcaaaaaatctactccagcacaaaatcccatcaatgtcatgaatgtggcagaggcttcactctgaagtcacatcttaatcaacatcagagaatccatactggtgagaaaccttttcaatgtaaagaatgtggaatgaatttcagctggagttgtagcctctttaaacacctgagaagccatgagaggacagatcccataaataccttaagtgtagaggggtctctgttgtagaatagctcttaattttagagaaaccttcctggagggaaaccatactcctataatgagcaaagtaacaacttcaagcatttttccagcgttaccatcaaactcacaaataggttgaaatcctttagttataactcagcctttaggaacaccggagaacccacaataatagaaatcttttcgtgttccccattgagaaatgctttagttagcatcttcatgcttggaaatctagacaagaagagaatccatggatggacatggtcgaggaattcggaaagcctgcagttgacattcagtcttcacttgaaactcaaaactgacactaggaacagcttcatgagttcagtagaagtaagctttatttgtagcttctgccttgtttgacggcgtatctattcagggaagcgcacagtaaaagaattccttagcatgatgtctgttttggtacctcagcaatgaaccttttctagaaattattattccaaccactagaataccctagtcactattcccactttgagcattaacccctttgaaaagaaatggacttaaagtatctctgttttggcaaaattcaggttcaggggctggatggtatgtgtttctgctgccttattcaatccaccacttctctgtgaaacactctaccttgtttttggtttgattctactgatgtcagggtttagccggtagaaggagtagttcagtttgtcaattcaggagaaactgtactggtcagtcacatcttacggcgaagggagagggaccttaggggagcagagaagacaggcaaagttgtggactgtttgatcttgtattacccacaggaatgagggcagctaaacccatagaaggagttggaccaaggcgaattacgagtcctggtcccagcagtatgtgtgctgacttctgggtgccccagaaatagacctctcctgtagagtggtgatatacagaatgagtttcagtttgcattgcagctgggattgaaagtaatcagtcgtgagcaggcaggcaggaggtcctgttagccctgccttccaggaaggttggggtgggagttttgagtgggaaagaggatgacatgtgtgagagagttctgagcctgtttgctagggagagtgagtgagtgctcttgggcactgctcaggccgtttctgctgacttgcctggcttacaataaatgcccaataaatatttgttgaccatatgtgttgtacactgtggtgccctgtccagtcccctctaccaagctgagacccccatccccagctgctctgagtttgggctgcaagtgctcacagctcttgttctccagaaactggagaattgccctcaggagatgagagccatctcacctcacccaggagtcacttcctctctacaccccaacacctggttcatttgattaaagcggagaaaactccagggtgctatgactgctctggcacccttggatcaggccaagctagactttttctgagccttcatccgtgctaagctctctcccttctctatcctgtttcattccctccctcaaaggcgtttcccaaataaatcacactgtcaatc

SEQ ID NO: 29986 - DNA, 3416 bp, Homo Sapiens
accaggcagcctgcgttcgccatgaagcgacccaaggagccgagcggctccgacggggagtccgacggacccatcgacgtgggccaagagggccagctgagccagatggccaggccgctgtccacccccagctcttcgcagatgcaagccaggaagaaacgcagagggatcatagagaaacggcgtcgagaccgcatcaacagtagcctttctgaattgcgacgcttggtccccactgcctttgagaaacagggctcttccaagctggagaaagccgaggtcttgcagatgacggtggatcacttgaaaatgctccatgccactggtgggacaggattctttgatgcccgagccctggcagttgacttccggagcattggttttcgggagtgcctcactgaggtcatcaggtacctgggggtccttgaagggcccagcagccgtgcagaccccgtccggattcgccttctctcccacctcaacagctacgcagccgagatggagccttcgcccacgcccactggccctttggccttccctgcctggccctggtctttcttccatagctgtccagggctgccagccctgagcaaccagctcgccatcctgggaagagtgcccagccctgtcctccccggtgtctcctctcctgcttaccccatcccagccctccgaaccgctccccttcgcagagccacaggcatcatcctgccagcccggaggaatgtgctgcccagtcgaggggcatcttccacccggagggcccgccccctagagaggccagcgacccctgtgcctgtcgcccccagcagcagggctgccaggagcagccacatcgctcccctcctgcagtcttcctccccaacaccccctggtcctacagggtcggctgcttacgtggctgttcccacccccaactcatcctccccagggccagctgggaggccagcgggagccatgctctaccactcctgggtctctgaaatcactgaaatcggggctttctgagctgccccttcaccaccccgccccaaggaataaggaaggttcttttaccaggagcccaaaaaagggcactgccttttctgctttgcttcgtggactggctcatatgtgaaggcacgttctccagccatcagaggccccctcctcctccaacccatctctccttctcactgttatcccagcttatccacccagctctcctggagctgttctggtctcagaggcttggttccatttctcacctgaacagatgagtcctgggagagaccctcagagatccgcccagacccctctcctgccctctgcacaccagcagcaggcatgaaccttgggtctgggaaaaagctttaacctgcagggcaccaggacccaaggcaggctgttccttggggcggtcagaccccagtcaggagcaatgactgactggctgcagccttcccacgccaagaggctggaacatagtgtctgcctcgcttcctggagatagtaactgagcaggggctacaaagaggtctcctgggaaccctgtctgccccttcccacctgtccttgggccacaccatcacactgaaccacaggacagaccctttctccaccacagccaaggcctggagactgggggcccagcagagcctgctcccaccctcctcccagcagcagacacccaccctctcactgactaacaggtccctgcacacagctggcctggtaaacccagctgggaggtttctaggcagcagcaaaactctgtgacagggtgtcctcacaccaggccttggacagctctcccagacaggagccagggttgagcaatggagagcccagcccccacgtcttacagtcgccatcctccaggcgtgtggtccctccccattgggtgcacagtgcagaggggccgtggccccatgtgatggtgcgcagagaggaacctcttgggattcagcaccagacgtctgtgctgcctggtttgcatccggctcacagagcccagactgctggaacagccaaggactgtcaggctggacaaaaataactgcaaggaggggcaagagaaaggatgattcgaggcaccttggcccttcaaggtcatgcagtgggtcgagcgcctgagatcctgttcaccaggactccacagagctggctctgctcagaagccatttcattccccggctccaccctaggccactttttctaacagaggaaacaaatggtccagcagtcgttcccagcagaacagcggagcctggactgacacccagtgggaccagtgttgccacaccagttgataaaatgcagaaacccttctgtactcgttggtaaatatctactcccccaagtgactccaggtgccccccaccgcctggcacttcccccaggactcctacgatctggttactgcctggccgatccaaggctgtggagtcccagagccagcagttcactggtgctcattccacactggttagatacttcagttgtcacccctgggaagattctcccacctcctccctttgatggaaccaccctccccagaggctgcattgaggagactccacagactgaaaagtgagtttgcagaaaccttggggaaaagggccctttcaaagaagtggataagagggaggagatcattgagtgacccagaaagctcttttgaaaagacagactcctcaaggagagataaagaggaaagcacctctttcattttttagtgtgagctaattccatcagactgctgtcctcctggacccatctgagatgtgcagtagcaaggagaggggggatcattttagagagtgggtcattggcagggagtgctccggagggaggcagaggggagactgtggtagaaggaagacagaactcacacatgctcccaggattggggacagggacagaggaggtaacagaaggcaaaggccagtttccccgttatcatgaaggggcccactcaggacaggaacaaggacaactcctcctcctcctcctcctctcctgctgctcctgggataccaggtcagtgatgtagtcttgcagtttggcaacttcctagcctgagaatccctagtggggctgtgggaaacacatttccacgttgcaagcatgcaactccaaagaatctgtgatgccactgaaatgagatgggaatgatccagctctttcagcatcttggttgaacttgctttcattgtccctgggatattgtggaaggaaaggtgactgtgtgatctgattctgtggtcaaggacttgcatcttgtgtttctatccccaagccttcctggtgtctccaactcctaccccattgcatgggttgttgcggacatccaataaagatttttttagtgcttctggaaaaaaaaaaaaaaaaaaaaaaaaaaaaaaaaaaaaaaaaaaaaaaaaaaaaaaacc

SEQ ID NO: 29987 - DNA, 1111 bp, Homo Sapiens
ctgggtctctgcgccgcagccgcccgcccgcccgctcagcgcccggccccgggatgacggcggcccaggccgcgggtgaggaggcgccaccaggcgtgcggtccgtcaaggtggtcctggtgggcgacggcggctgcgggaagacgtcgctgctgatggtcttcgccgatggggccttccccgagagctacacccccacggtgtttgagcggtacatggtcaacctgcaagtgaaaggcaaacctgtgcacctccacatctgggacacagcagggcaagatgactatgaccgcctgcggcccctgttctaccctgacgccagcgtcctgctgctttgcttcgatgtcaccagcccgaacagctttgacaacatctttaaccggtggtacccagaagtgaatcatttctgcaagaaggtacccatcatcgtcgtgggctgcaagactgacctgcgcaaggacaaatcactggtgaacaagctccgaagaaacggattggagcctgtgacctaccacaggggccaggagatggcgaggtccgtgggcgcggtggcctacctcgagtgctcggctcggctccatgacaacgtccacgccgtcttccaggaggccgccgaggtggccctcagcagccgcggtcgcaacttctggcggcggattacccagggcttttgcgtggtgacctgagcggctcggggcgtcccagcgacgcgggaaggggcagggcgctgacctgctgctgagctggctgggctggacccggtccctaggctgtgaccgccgaactccactgcaacagacgggcgccaccaaagccaggccctgaggcctgggagtcctggactgagaaagggggttcctgggcccacctgctctgtgtagggctcgtcctgcggtgcccgagaatcactcgctaacccctatgcccggtcccggaccgacatcctggagccgcctgtgcagcctgatgccccctcgtggctgctcccagggctgcacctgccaggacctaatgttcttaggtccctctggccagaacccacacccggccccttcccacctgtcatactggtaactgtaacaagaaaaacgacatcaaaaaaaaaaaaaaa

SEQ ID NO: 29988 - DNA, 2154 bp, Homo Sapiens
ggcacgaggggcggttcaggcgccagagctggccgatcggcgttggccgccgacatgacgcccgaggacccagaggaaacccagccgcttctggggcctcctggcggcagcgcgccccgcggccgccgcgtcttcctcgccgccttcgccgctgccctgggcccactcagcttcggcttcgcgctcggctacagctccccggccatccctagcctgcagcgcgccgcgcccccggccccgcgcctggacgacgccgccgcctcctggttcggggctgtcgtgaccctgggtgccgcggcggggggagtgctgggcggctggctggtggaccgcgccgggcgcaagctgagcctcttgctgtgctccgtgcccttcgtggccggctttgccgtcatcaccgcggcccaggacgtgtggatgctgctggggggccgcctcctcaccggcctggcctgcggtgttgcctccctagtggccccggtctacatctccgaaatcgcctacccagcagtccgggggttgctcggctcctgtgtgcagctaatggtcgtcgtcggcatcctcctggcctacctggcaggctgggtgctggagtggcgctggctggctgtgctgggctgcgtgcccccctccctcatgctgcttctcatgtgcttcatgcccgagaccccgcgcttcctgctgactcagcacaggcgccaggaggccatggccgccctgcggttcctgtggggctccgagcagggctgggaagacccccccatcggggctgagcagagctttcacctggccctgctgcggcagcccggcatctacaagcccttcatcatcggcgtctccctgatggccttccagcagctgtcgggggtcaacgccgtcatgttctatgcagagaccatctttgaagaggccaagttcaaggacagcagcctggcctcggtcgtcgtgggtgtcatccaggtgctgttcacagctgtggcggctctcatcatggacagagcagggcggaggctgctcctggtcttgtcaggtgtggtcatggtgttcagcacgagtgccttcggcgcctacttcaagctgacccagggtggccctggcaactcctcgcacgtggccatctcggcgcctgtctctgcacagcctgttgatgccagcgtggggctggcctggctggccgtgggcagcatgtgcctcttcatcgccggctttgcggtgggctgggggcccatcccctggctcctcatgtcagagatcttccctctgcatgtcaagggcgtggcgacaggcatctgcgtcctcaccaactggctcatggcctttctcgtgaccaaggagttcagcagcctcatggaggtcctcaggccctatggagccttctggcttgcctccgctttctgcatcttcagtgtccttttcactttgttctgtgtccctgaaactaaaggaaagactctggaacaaatcacagcccattttgaggggcgatgacagccactcactaggggatggagcaagcctgtgactccaagctgggcccaagcccagagcccctgcctgccccaggggagccagaatccagccccttggagccttggtctgcagggtccctccttcctgtcatgctccctccagcccatgacccggggctaggaggctcactgcctcctgttccagctcctgctgctgctctgaggactcaggaacaccttcgagctttgcagacctgcggtcagccctccatgcgcaagactaaagcagcggaagaggaggtgggcctctaggatctttgtcttctggctggaggtgcttttggaggttgggtgctgggcattcagtcgctcctctcacgcggctgccttatcgggaaggaaatttgtttgccaaataaagactgacacagaaaatcaggtcagtgtctctgggctttgtgcaagctcagtttgaaaagggtttattcccatcactgcccaggacaccctgtggctttacttgctcatggtcagccaagcttacccttcacactgagaagtcatttctggctacttccttgggctcagttccctgggtcatcagccatcaaatcttgttgagtttaaaaaataaacagcaaaaaaaaacaaaccaaaaaaaaaaaaaaaaaaaaaaaaaaaaaaa

SEQ ID NO: 29989 - DNA, 7385 bp, Homo Sapiens
ggcgccgccggaccgcgccccaccccgcgcgcccgagcagggcgactgtcattagcttcctggacgggacccggggcgggatcctggtgtcctgaaaggggcccgggcgaccctaagaggaagaacttttgggggcggggtccccggtcccgcgtcccctgggcagccgctattgtctacgcgcctcgctgggcggcgcggggggcgtgatcgcggcggccccgggctctgggtgcggagacccaggcggggctgggcccagggcggcggcgggagaagccggggaagccgaagagcctggggaggaggagctgcgagcgcgggagacgagcaggagccgcgcgggccgcggcgagcgcgatgccggcggcggcgggggacgggctcctgggggagccggcggcgcctgggggcggcggcggcgcggaggacgcggccaggcccgcggcggcctgcgagggaagtttcctgcctgcctgggtgagcggcgtgccccgcgagcggctccgcgacttccagcaccacaagcgcgtgggcaactacctcatcggcagcaggaagctgggcgagggctcctttgccaaggtgcgcgaggggctgcacgtgctgaccggggagaaggtggccataaaagtcattgataagaagagagccaaaaaggacacctatgtcaccaaaaacctgcggcgagagggtcagatccagcagatgatccgccaccccaatatcactcagctccttgatattttagaaacggaaaacagctactacctggtcatggagctgtgccctgggggcaacctgatgcacaagatctatgagaagaagcggctggaggagtccgaagcccgcagatacatccgacagctcatctctgccgtagagcacctgcaccgggccggggtggtccacagagacttgaagatagagaatttgctactagatgaagacaataatatcaagctgattgactttggtttgagcaactgcgcagggatcctgggttactcggatccgttcagcacacagtgtggcagccctgcctacgctgcacctgaactgctcgccaggaagaaatacggccccaaaatcgatgtctggtccataggtgtgaacatgtatgccatgttgaccgggacgctgcctttcacggtggagcctttcagcctgagggctttgtaccagaagatggtagacaaagaaatgaaccccctccccactcagctctccacaggtgccatcagtttcctgcgctctctcctggaaccggatcctgtgaagaggccaaatattcagcaggcactggcgaatcgctggcttaatgagaattacacgggcaaagtgccctgtaatgtcacctatcccaacaggatttctctggaagatctgagcccgagcgtcgtgctgcacatgaccgagaagctgggttacaagaacagcgacgtgatcaacactgtgctctccaaccgcgcctgccacatcctggccatctacttcctcttaaacaagaaactggagcgctatttgtcagggaaatctgacatccaggacagcctctgctacaagacccggctctaccagatagaaaagtacagggcccccaaggagtcctatgaggcctctctggacacctggacacgagatcttgaattccatgccgtgcaggataaaaagcccaaagaacaagaaaaaagaggggattttcttcatcgaccattctccaagaagttggacaagaacctgccctcgcacaaacagccctcaggctcgcttatgacacagattcagaacaccaaagccctcctgaaggaccggaaggcctccaagtccagcttccccgacaaagattcctttggctgccgcaatattttccgcaaaacctcagattccaattgtgtggcttcttcttccatggagttcatccccgtgccaccgcccaggaccccgaggattgtgaagaaaccggagccccatcagccagggcccggaagcactggcatcccccacaaggaagaccccctgatgctggacatggtgcgctccttcgagtctgtggatcgcgacgaccacgtagaagtgctgtctccctctcatcactacaggattctgaactccccggtcagcttggctcgcagaaattccagcgagaggacgctgtccccgggtctgccatccggaagcatgtcgcctctccatactcctttgcatccaactctggtctcttttgctcacgaagataagaacagccccccaaaagaggagggcctgtgttgcccacctccggttcccagcaatggccccatgcagcctctggggagccccaattgtgtgaaaagccgaggccggttccctatgatgggcatcggacagatgttaaggaagcgccatcagagtctgcagccatctgcagataggcccctggaggccagcctgcccccactgcagcccctagcccctgtgaaccttgcctttgacatggccgatggggtcaagacccagtgctaacttgggccagcggggtttggggtatctctagaaaacagcaactgaacagagctccacacatctgtcagggtgtgagcactccaaggcctcgcgtggagcatccttagtcccacctgtagctgaatccacagacccaaagcctgcacaacccaacctcgcttagggacccccagagatgctggaatcgctaggagggttggctccaggggcagccaattcctatcattcagatcttccttcctcccaagtactcaccaaccccttccacttcccacttcccccaggcttggggggaaaacagggcatgagccttctggggcactcagattatggactgttaccagatctttcttcacgctgtgctacatgtgtgcctctcacagcagttggccacagttacagggagagaacaatatcacagtcattcatccaggccacgtttcctctgcggagtgtagcagccctgcctttcatagcagggattacctgaaggccagcaggagccgggggcaggcccaggatcctcagaggaagatggagaggagcttcggaccaagatcaaaccaaacagtggggaccccaacagaagagaaagactgaaggagacactcatttcccaagcaagattttgatagatttttgttgttgttgttgttgaaacatgctaatgattgaattatcttttccaaagattttttttaaatgtgatgtcggtaaattgaaataacataattttttaaaacttggatggagagatgagaagcaattccaccaaactcatgttttcacaggagggttcagtgtggagagcaaaaaagctgactgtggtgatttgctgagtgctgtggcccacaggcagggcaagtctcggtggccctgtgttcatcctgttgtttaaggcatagccctgatccttctggaaggcatagaacacggttacagctggttctgtagaaagagggaaaagatgattgtgacaattcagagcataactcagatggcgagaaggcagcattatctctgtgcgatgctgatttcaagctgcccacagaactggtgcggctcagagctcggcgagtttgctgggagctgggagcaggcttgcctggcagagaacctgttcagatacaggccagtttcttcttcgaggaaagccaagctcctcaaacagggttcagtccacgttgtgttttcacacctttctccaaggatcgaaccaaagatgtgtctccagtattgtgtctgtgcccctgtgtgtgttttgtggacagccgtgttgtctgactgtatccagctggcacttgacagggtgcagtcattggtgagaagaatcagaaaaagaagacccatcagcacaggttggataggggttagtgtaggagaccagttacagaatggcctggagtcttcaacttttgaccggtgcaggtgtgaccagagaccacctctgtggccacctcagatagtcatctcagtccaaggatcccaaaacacaaatctagaattgcaaagccagcctttatttccctggcaggcagccttgccagaaggcagagaggcagttctgaatcattctctcattcaccagtggtgacatccttcagtccctcacatctctgacagagcgggacagaatggatatttggctgaccttggtgagacctggagctgcctgtttcttccctaggggatcaccacggctctagggcattctaggatgaggtcagaccccttggccattggtgttattttttgtatagcttcagactgggttccagaacttaccattgaaaacagagcttttaggccaggtgtggtggctcacacctgtaatcccagcactttgggaggccgaggcaggtggatcgcttgagctcaggagttcgagagcagcctgggcaacatggtgaaagcccgtctctaccgaaaaatacaaaaaaaaatagctgggtgtggtggtacgtgcctgtagtcccagctacttcggggactgaggtgggaggatcacttgaacctaggaggtcgaggctgcagtgagccaagatcatgctactgcactccagcttaggtggcaaagtgagaccctgtctccaaaaaaagaaaatagagctttataagcagagagaagaaaataatcatctaagaccatctctccattcgacatgaagtgtaccttttctaaagacggtttccagctgcaacggctccactttgcaggcttgcagggtgtatacctgcgcattgggaacttgctggaacccctgatgcattttccttgagagcaggggtacttccgccttgccgttagcttgtggagaacgtgcttcttattcctggcaggcttcaagaacagctgcacatgtgccgctaactgaccgcgttgccattggcgacctggactctgaactcaggtttattctaaacccagtgagaggtgagggggagtgatgaaaggggatcagctgtatttgtgtgtgtgtgtgtgtgtgagcacctgacaaatctatgaaaccgagtgaaaggagaaatgttagattctttattattttattatatttatatggaaagctcgactctccctttggtaagtccgaagcatgttgtctgttcgaccgtgactgtcttcctcagtctgtgcctgtgattccagtcaccctgtagttactgacagaaattgactggactgtcattgtgtgaagtctaggaggaaatgtccattttaattgtatgatttggtcataagtaaggactatatttatgtcaccattattagatatatgtacttttgtaatgactgtgaaatacacttttccctcactacgactgcttctttatttgctgataaatcttaaaacaactaagtacgttgcaaataatagtacaggtaccatcttttatgtgaagttctttttctttttttgagacagggtcttgctctgtcacccaggctggagtgcagtggcacaatcacagttcactgcagcctcaacctctccagattcaagtgatcctcccatctcagcctcccaagtagctgggactacagttgtgcaccacaatgcctagctaattttttttgtattttgtagaaatggggtttcgccatgttgctcaggctgatctcaaactcctgggctccaacgatctgcccaccttggcctcccaaagtgctgagattacaggcgtgagccactgtgcctggccttatgtaaagctcttgacctagcatctgactggaaacaagcgggaattgcattggggggcattttctgggccagtttccctgccttattttacctgcaataggtgtgcctacaaaagtctttctgacatacacactgcaggtggcagttcaagaagaatcaacctttttcatttggggatattaggatcttccttggagactctgaaaatggcacacaaagaatggcagttatgaacgtgacttctagattttgtccttgtaggaggccttggtcatggataggggaagagggatgatgggatggaatgggagggtgggatctagatgacctcttgaaattgtcccagttactgcttccttcataactgttcacaaaacgtttttcatatataccaccttgtttcccctgggaagtgaggggacgaagccttagagggtgacatagctagaaagtggagaagctcactgttcactgtgcaaagccccagtagtcggattccggggaaaagaacaagtatctagttttgatgacaatgttttcttgtaagaatcccaacactttagaatagaaaaggacctaagattctctggctcagccccagcctttctgaagaagggaaaactagggacccagatggtttaaggacaccccagagtccccagatgagctggcatttgagctggtctggagcagagtttctccctcaaagaacacagagaaatcagagagtggctgccatggtcagagggggatgtcaacaacagatcaagccgtcatcacaacaggtatttctgaagttcctgcagggactaggtcttgcatttttaagtccttttcaaaactgtgcagcttcctgaaccttatgctgtttgtcccatccactcttgaagctggggaaagacagctttctttgggaactctgtctttctcagttgacttcccaagtaagcagcaaacccctggatagccttgttatctactttaggtattaagaggctattgggttttactagattaaatcaataaaacatttcctatagagccatatcatacactgaagcaaattcagaaagaatgcaaaactgctatcttttgggggagtctggaagcctgttggttagtgtatttattttctttgtggggtcttctgtgagctacaggcacagtaagaataattcagagcggtactgggagttggttcaatttcatgtcatcacttttcaatgaagggagtgcatttcctgagtagtaaatgagtatattatttgtggcagcttttctgttaagggagctttccagacatctggttgcaaagacaaataggatatatatttgtacttcttctctgtggacatgtttttgtgacacacagttatctctaggagttgacgtctgtgggcactaagggactgaggttgggggagaaagctgaggaggctttggaagagaaggtgaggagcatttcaggatttgcagtccccctccacatgtatccacatctgagctggtggtgttccaataatgaggcatttggggcaaccaattttggaaggatagaatagctttatgtggagcaaacttgaggatcaattggagttgagtggtttaaaacttaaagatggcacaggaagctgtatcatttacaggtgaaaaaaataaatgggtctgacttca

SEQ ID NO: 29990 - DNA, 3517 bp, Homo Sapiens
gacgggaccgcgagcacaggccgctccgcgggcgcttcggatcctcgcgggaccccaccctctcccagcctgcccagcccgctgcagccgccagcgcgccccgtcggcagctctccatctgcacgtctctccgtgaaccccgtgagcggtgtgcagccaccatgttcagctggctgaagcggggcggggcacggggccagcagcccgaggccatccgcacggtgacctcggccctcaaggagctgtaccgcacgaagctgctgccgctggaggagcactaccgctttggggccttccactcgccggccctggaggacgcagacttcgacggcaagcccatggtgctggtggccggccagtacagcacgggcaagaccagcttcatccagtacctgctggagcaggaggtgcccggctcccgcgtggggcctgagcccaccaccgactgctttgtggccgtcatgcacggggacactgagggcaccgtgcccggcaacgccctcgtcgtggacccggacaagcccttccgcaaactcaaccctttcggaaacaccttcctcaacaggttcatgtgtgcccagctccctaatcaggtcctggagagcatcagcatcatcgacaccccgggtatcctgtcgggtgccaagcagagagtgagccgcggctacgacttcccggccgtgctgcgctggttcgcggagcgcgtggacctcatcatcctgctctttgatgcgcacaagctggagatctcggacgagttctcagaggccatcggcgcgttgcggggccatgaggacaagatccgcgtggtgctcaacaaggccgacatggtggagacgcagcagctgatgcgcgtctacggcgcgctcatgtgggcgctgggcaaggtggtgggcacgcccgaggtgctgcgcgtctacatcggctccttctggtcccagcccctcctcgtgcccgacaaccggcgcctcttcgagctggaggagcaggacctcttccgcgacatccagggcctgccccggcacgcagccttgcgcaagctcaacgacctggtgaagagggcccggctggtgcgagttcacgcttacatcatcagctacctgaagaaggagatgccctctgtgtttgggaaggagaacaagaagaagcagctgatcctcaaactgcccgtcatctttgcgaagattcagctggaacatcacatctcccctggggactttcctgattgccagaaaatgcaggagctgctgatggcgcatgacttcaccaagtttcactcgctgaagccgaagctgctggaggcactggacgagatgctgacgcacgacatcgccaagctcatgcccctgctgcggcaggaggagctggagagcaccgaggtgggcgtgcaggggggcgcttttgagggcacccacatgggcccgtttgtggagcggggacctgacgaggccatggaggacggcgaggagggctcggacgacgaggccgagtgggtggtgaccaaggacaagtccaaatacgacgagatcttctacaacctggcgcctgccgacggcaagctgagcggctccaaggccaagacctggatggtggggaccaagctccccaactcagtgctggggcgcatctggaagctcagcgatgtggaccgcgacggcatgctggatgatgaagagttcgcgctggccagccacctcatcgaggccaagctggaaggccacgggctgcccgccaacctgccccgtcgcctggtgccaccctccaagcgacgccacaagggctccgccgagtgagccgggcccccctcccatggccctgctgtggctccccagctccagtcggctgcacgcacacccctgctccggctcacacacgccctgcctgccctccctgcccagctgtaaggaccgggggtctccctcctcactaccgccagacaccccggtggaagcatttagaggggaccacgggagggacaaggcttctctgtccgcccttcacacctccagcctcacgttcacttaggcacatcacacacacactggcacacgcaggcatccatccatccgtcattcattcaaatatttattgagcacctactatgtgcccagccctgttctaggcactgggcattaccatagagaacaaaatagacaaatacatctgccctcatggaaggtgacgttcccaggagagggcacctacacagtcacgcaaacacacactaattcctggcagggcccccagcccctcccctggctgagcagccctgtggctgaaatgactagcagataaacagacccccttctgctccgcttcctcctgcccagccaggcaacaccctcaaccggctccatcacatcctcaggtctcgggaccatggggggctcagaggggagacacacctactgcttcctcagatgggcccctccgcagccccttcccttgctcggggaaagcccccaattctgcccacacccatttatttccttccttccttccttcttttctttccttccttccttcttttttgtttttgcccccaattctgcccatacccatttctttctttccttccttccttcttttttgtttttgcccccagttctgtccacaccccttccctttcctgtcctgtcctttctttctttcttttttgatagaatcttgctctgtcgcccaggctggagtgcagtggtgagatctcagctcactgcaacctccacctcctgggttgaagtgattctcgtgcctcagcctcctgagtagctgggactgcaggcacgcgccaccacgcccagctaatttttgtatttgagtagagacggggtttcaccatgttggccaggctggtctcgaactccgcatctcaggtgatctgctcgcctcggcctcccaaagtgatgggattacaggcatgagccaccgtgcccggcttcacacccatttctttaaaaaggatcccgtagcaggcagaaaagccccttccatcctgctcctctgatactgtgcccccttggagatatttccgtcctccacccacgtgtctgtggctggaactgcccagcctgctcctggccccctggaagcctccccacagctggtaatctggacttaaggattgctgggccaccgcctctctgcctaccaccattccatatttaagtggagcccctacgtagaaaggccccggggctttattttagtctccttttcagggatgtcgtgggcgggggagggggttcttggtgctacagccctctccccacccctaaagggacgccgacgctgtttgctgccttcaccacatattagtgcttgaccctggcaggggaccccatggaaaagatggggaagagcaaaatacatggagacgacgcaccctccaggatgctcgctgggattcccacgcccaccactgtcccccaccccatggctgggaggggcctctgaacggaacagtgtccccacagagcgaataaagccaaggcttcttcccaaaaaaaaaaaaaaaaaa

SEQ ID NO: 29991 - DNA, 3540 bp, Homo Sapiens
aagatgcagcggcggctccggttgtcgccgggcgggccaggagcagcgcggacccgagccgggcagggggcgcccgccacggcacccgcgcgctcctagcgccccagacccgcctgcgggcccggatcctccttgccactgtcccacccgccgtccctgcccctccaccctttgtgtcgccgcagcccggtgcccccggctctgcgggaccccggccgggccggaccctggcaaagcgccaggccccgcgtgggctcccggcgagcggttgatggcgagggggcgcggcgcgggctctgtagcccgagttcccgacgctggaggcccggcccgcctcagccgcattgtcccgggccgcgcgcaccggccctgagctgcgccgccgcagcacccgcccgccgcccgcggggccatgcggagagccgccgggatggaggacttctccgcggaggaagaggagtcctggtacgaccagcaggacctggagcaggacttgcacctagctgcggagctggggaagactctgctggagaggaacaaggagctggaggggtccctgcagcagatgtactccaccaatgaggaacaggtgcaggagatcgagtacctaaccaagcagctggacacgctgcggcacgtgaacgagcagcacgccaaagtctatgagcagctggacctgacagcccgggacctggagctgaccaaccacaggctggtgctggagagtaaggctgcccagcagaagatccatgggctgacggagaccattgagcgcctccaggctcaggtggaggagctgcaggcccaggtggagcaactgagaggcctggaacagctgcgagtgctccgggagaagcgggaacgcaggcgtaccatccacaccttcccctgcctcaaggagctgtgcaccagcccccggtgcaaggatgctttccgcctacacagttcctccctggagctgggcccgcggcccctggagcaggagaacgagcggctgcagaccctggtgggggcgctgcgctcccaggtgagccaggagcggcagcgcaaggagcgggcggagcgcgagtacaccgcggtgctgcaggagtactcggagctggagcgccagctgtgcgagatggaggcctgtcgcctgcgtgtgcaggagctggaggccgagctgctggagctgcagcagatgaagcaggccaagacctacctactgggtccggacgaccacctggccgaggccctgctcgcacccctcacgcaggcccctgaggccgacgatccccagcccggccgcggggacgacttgggcgcccaggacggggtctcctcaccggcagcctctccaggccacgtggtgcgcaagagctgcagcgacactgcgctcaacgccatcgtggccaaagacccagccagccggcacgcgggcaacctcacactgcacgccaacagcgtgcgcaagcggggcatgtccatcctgcgggaggtggacgagcagtaccacgcgctgctggagaagtacgaggagctgctgagcaagtgccggcagcacggggccggagtgcggcacgccggcgtgcagacctcgcgccccatctcccgggacagctcgtggagggacctgcgcgggggtgaggagggccagggtgaggtcaaggcaggagagaagagcctgagccagcacgtggaggccgtggacaagcggctggaacagagccagcccgagtacaaggcgctcttcaaagagatcttctccaggatccagaagaccaaggctgacatcaacgccaccaaagtcaagacgcacagcagcaagtgacccttctccggcctgcagcctcccccagggtggaagccgtggggtccctcaggcctgggcggtgcagcttccagagagcgagcgccctttagcggcctgccaccacagcacgcggcctcctgatccggaagcacgcagcatgttccctgctgagcggaggcagcccacctgtcctgcctcccaggagcccttggccacctcgcgccagcccaaaggcgcagctctgagttcaaagccaaatgtccccactaccccagggatcccccagctcccccagcccctggcttcctgaccctgcgcctcaccctcagactggtgaccaggcttctgaaagccattctggatcagttggcttttttttttttttggttaagtttgttttttctaagagatttgcaatgcaaggtctccttgaccccttgccacaactggaaacacttgaaaggggaccccagggccagctgtttcaggggtttcctggaccacccactgcttctccccaaccctgatgcgctgacattcccttagcaccagctgtcccacctccagggtcctgaccaggtcagagatgtcccctgccatgcagagcaggaagcctcagctgggcctggagtgtccctgctccagccctgccagggacaggtttctccctggatactcttggcccaccgcagatctgtagccagtcagaggaggaggagaaggagcccctcagcagagtggtgcagtttcgctcagagcttgtctccttggcttccaaccccagaaatgcctgctgggccttaagctttccaggggccggggcagtggggagcccccatcccttcacaccgccaccaactaaccaagcttggcctctgactcccgtctctgtgcttgcccccatctcagggaccatgatgtctcagtcactccacgctccccacaggccaaccctggcacaggtcatgtctgcagcccccagaatgttctggacatgcaccaccagccggtggtcccaatgtccacccctgcctccccttcactggggactggggttttcgccccatgctgcatcgtgttgtattgggatggggctgaggaacatgctccctccctccctcccataaaatgcctgctcttcacctcccacctttgtggggggcttttgaggacccagctgcgtcaggagttttgcttcaagatgtcagaaagtcaagttcagctaagagacacctaggtccccagcttgccctgagcagcccttcagggcttctggttccttctgccgcccttcctgagaccttagaaaccagaagagccatacagtcagtggaaggcgggggggccctggcctctgcaccgggatcccagtgggaaccttcatgccttatttatttctaatgggtaaaggggttttcttaccaagcatccctgacctcctggagacaccacctgctttccgggcggcactgtgatgggagctggtggcgactgagtccttctgtacgtgcaactgggaaacttttgtcctttgaggctaggcagctccctgccctccgtgtgtgtctgttatctgggggagaggagtgtggaagggttgggggaagagctccagcctgtctgctccccagctctgtagtggcagaccagcgtcacctttgaagtatacgtgagagaaatatatttacaaatgctttattctcttctttaataaaaaatgcaccagtattctaaaaaaaaaaaaaaaa

SEQ ID NO: 29992 - DNA, 17400 bp, Homo Sapiens; identical to SEQ ID NO: 23822

SEQ ID NO: 29993 - DNA, 6605 bp, Homo Sapiens
gggcttcgtcccgcagaaggagatcgtctacaacaagctgctgccctacgcggagcggctagacgccgagtccgacttgcagctggcccagatcaaatgcaacctgggccgggccgtgcagctccaagagctgtggcccgggggcctcttctggaccaggaaactctccacatatattcgactttatgggagaaaatttagcaaagaagatcatgttctttttattaagttattgtatgagctggtatcaattccaaaactggaaatcagcatgatgcagggatttgcccgccttttgatcaacttgttaaagaaaaaggaacttctttcaagagctgatttggagttaccctggagaccactttatgacatggtagaaagaatattatattccaagacagagcacctaggattaaattggtttcctaattctgtagaaaatattctcaaaacactcgtgaaaagctgccgaccatattttccagcagatgccaccgctgagatgctagaagaatggcgacctttaatgtgcccttttgatgtaaccatgcaaaaggccatcacttattttgaaatatttcttcctacctcccttcctccagaacttcatcataaaggttttaaactttggtttgatgaattaattggcctttgggtttcagtgcaaaatctcccacaatgggaggggcaactagtaaatctctttgctcgattggctacagataatatagggtacatagattgggatccatatgtaccaaagatatttacaagaattctgagaagcttgaacctcccagtgggaagcagtcaagtgttagtcccaagatttttaacaaatgcttatgatataggacatgctgtaatatggatcaccgccatgatgggtggaccaagtaagctagtgcaaaaacacttagctggtttgtttaacagcatcacatctttttaccatccttcaaataatgggcgctggctgaacaagttaatgaaactacttcagcggttgccaaacagtgttgttagaagattgcatcgtgaaagatacaagaagccctcttggttaactcctgtgcctgatagccacaagcttactgatcaagatgttacagactttgtacaatgcattattcagcctgtcctcttggctatgtttagcaaaaccggtagtctagaagcagcccaggctttgcagaatcttgcactcatgagacctgaattggtaataccccctgtacttgaaagaacatatcctgcattagagacattaacagaacctcaccagctcacagctactttaagttgtgtaattggagtagcccgcagtttggtatcaggaggcagatggtttcctgaaggtcctacacatatgctacctctgttgatgagagcattgcctggggtggatccaaatgactttagtaaatgcatgatcacattccagttcatagcaacattttctactctggtgcctttagtagattgttcatctgtactacaagaaagaaatgacctcacagaagtggaacgagaactttgttcagccacagctgaatttgaggatttcgtcttacagtttatggacagatgttttggacttatagaaagtagcacattggagcaaacaagagaagagacagaaactgagaaaatgacacacttggagagtttggtcgaattaggtctgtcttctacgtttagtacaatcctcacccaatgttccaaagaaatatttatggtggcccttcagaaggtttttaatttttctacttcacatatatttgaaacaagagtagcaggtcgcatggtggcagacatgtgccgcgctgctgtaaagtgctgcccagaagaatctttgaagctctttgttccccactgctgcagtgttataactcagcttacaatgaatgatgatgtattaaatgatgaagagctagacaaggaattactatggaatcttcaacttttgtctgagattactcgagtggatggaaggaagttgcttctttatagggagcagcttgtaaagattctccaaagaaccctacatttaacctgtaagcagggttacactctgtcttgtaaccttttgcatcatcttctccgttctaccacacttatctaccctacagaatactgcagtgtgccaggtggctttgacaagcctccttctgaatactttcctatcaaggactggggcaaacccggggacttgtggaatctgggaatccagtggcatgttccttcttcagaagaagtgtcttttgccttttatcttttggactcctttcttcagcctgagctcgtcaaactccagcattgtggggatggaaaacttgaaatgtctagagatgatattctacagagtctgactatagtgcacaactgtttaattggctctggaaacctcctacctccgttgaaaggagagccagttactaacttagtaccaagtatggtgtccttggaagagacaaagttgtatactggacttgaatatgatctgtctcgagagaaccaccgagaagtaattgctacagttataaggaaacttcttaaccacatacttgataattcagaagatgatactaagtcattgtttcttattataaagattattggagaccttttacaattccaaggatctcacaagcatgaatttgactcccgatggaaaagcttcaacttagtaaagaaatcaatggaaaatcggctccatgggaaaaaacaacatatcagagcactgttgattgatagagtaatgttacagcatgagctacggacactaactgttgagggttgtgaatacaaaaagatacatcaagatatgatcagagatcttcttcgtttatctacaagttcatacagtcaggtgagaaataaggctcagcaaacattttttgctgccttgggagcatataacttctgttgcagagatatcattcccttggttttggagttcttaaggcctgatagacaaggtgttacacagcaacaattcaagggtgccttgtactgtctccttggaaatcacagtggtgtgtgcttggcaaaccttcatgattgggactgtattgtacagacgtggccagcgattgtttcttcagggcttagccaagcaatgtccctggaaaagccatcaatagtgagattgtttgatgatcttgcagaaaagattcataggcagtatgaaacaattggcttggacttcacaattccaaagtcatgtgttgaaatagcggaattacttcaacagtcaaaaaacccctctatcaaccagatattgcttagcccagaaaaaattaaggaaggaattaaacgccaacaggaaaagaatgccgatgccctaaggaactatgaaaatttggtagacaccttgctagatggtgtggagcaaagaaacctgccctggaaatttgaacatataggcattgggcttctgtctctactgctgagagatgaccgagtgttgcctcttcgtgccatacggttttttgttgagaatctcaaccatgatgcaattgtagttcgaaagatggctatctcagctgttgctggtatccttaaacagctaaaaagaacccacaaaaagctgaccattaacccctgtgaaatcagtggatgccctaaacccacccaaattattgctggtgataggcctgataatcattggttgcattatgacagcaaaactataccaagaactaaaaaagaatgggagtcaagttgctttgtggaaaaaactcactggggatactacacctggccaaagaatatggttgtttatgctggtgtggaagagcagcctaagcttggcagaagcagggaggatatgacagaggcagaacagattatatttgatcatttttctgatcctaaatttgttgagcagttaattacttttctatcattagaagacagaaaaggaaaagataagtttaatccacgacgtttttgcctctttaagggtatattcaggaattttgatgatgccttcctgccagttctgaagccccatttagaacatttggttgcagattcacatgaaagcacccagcgatgtgttgcagaaattatagctggtttaatcagaggttctaagcactggacatttgaaaaggtggagaagctttgggagcttctgtgccctctgcttagaacagcactgtccaatattaccgtagaaacttataatgactggggagcttgtatagcaacatcctgtgaaagcagagatccccggaaacttcactggctttttgaactgctgttggaatcaccattgagtggtgaaggaggatcctttgtagatgcatgtcgactttatgtactacaaggtggccttgcccagcaagaatggagagtgcctgaactattgcacagactactgaagtacttggaacccaaactcacccaggtttacaaaaatgtcagagaaagaataggaagtgtgctgacctacatattcatgatagatgtatctttgccaaataccacaccaaccatatcgcctcatgtccctgagtttactgctcgaattctggagaaattgaaacctctcatggatgtggatgaagaaattcagaaccatgttatggaagaaaatggaattggtgaagaagatgagcgaactcagggcattaaactcttgaaaaccatattgaaatggctgatggcaagtgcaggaagatccttttctacagcagttacagaacaacttcagcttctacctttgtttttcaagattgccccagtggaaaatgacaatagctacgatgaactgaaaagagatgcaaagttatgtttatcattaatgtctcaggggttgctttaccctcatcaagtgcctttggtacttcaggtgctaaaacaaacagcaagaagcagttcttggcatgcacgatacacagtactgacctacctccagaccatggtattttataacctctttattttcctaaacaatgaagatgcagttaaagatatcaggtggctggttataagtcttttggaggacgaacaactggaggttcgagaaatggctgctactaccttaagcggtctgctacagtgtaactttcttaccatggacagtcctatgcagattcattttgagcaactttgcaaaacaaaactacctaagaaaagaaagcgagaccctggttctgtaggagataccattccttctgcagagttggtcaaacgccatgctggggtgctaggacttggtgcatgtgttctttctagtccttacgatgttcccacctggatgccccagctcctcatgaatctcagtgcacatctaaatgatcctcagcctattgagatgactgtaaaaaaaaccttatccaatttccgaaggactcaccatgacaactggcaggaacataaacagcaattcactgatgaccaactgcttgttctcaccgatcttcttgtgtcaccatgctattatgcatagaaagatgactagtcctcacttcaggctcttttcatcaaaaattccacaccctcaggtaccatctgtggtggctctctgcaagttttaaaactgcctctgctgagctctcatcattttggtggtttctgtgttagatctcgttagtctgcattccacagcttctcagttgccatttgatttcccaacttgtccggaagtgtttccagaatactgatcactttttttttttgaggcatctgacaaagtcacaaagtctcagactagaaataattacccagtatgatcatggcatccaagaccagagtctcagaactcattaagaaacagtttacttggaatggagaatacccatctgtaatacaggtcctgtcatttcattcatctcaaattattttgaattcttcccaaatggctgctggatttaggtggtaataggggctgtgggccataaatctgaagccttgagaaccttgggtctggagagccatgaagagggaaggaaaagagggcaagtcctgaacctaaccaatgacctgatggattgctcgaccaagacacagaagtgaagtctgtgtctgtgcacttcccacagactggagtttttggtgctgaatagagccagttgctaaaaaattgggggtttggtgaagaaatctgattgttgtgtgtattcaatgtgtgattttaaaaataaacagcaacaacaataaaaaccctgactggctgttttttccctgtattctttacaactattttttgaccctctgaaaattattatacttcacctaaatggaagactgctgtgtttgtggaaattttgtaattttttaatttattttattctctctccctttttattttgcctgcagaatcgttgagagactaataaggcttaatatttaattgatttgtttaatatgttatataaatgtaaaagagtgtataaactgtagagatagcattggcaagacattgtacagatgcaaccttttacacaacatcattgtgtaatttgtaaagattcacgtgtagttctttattatagtgattttgggctttgtacccactgaatgccattttttgtgtttttaaattattttctttatcttgttacaaaaactgagatgtggggtttttttttttt

SEQ ID NO: 29994 - DNA, 3158 bp, Homo Sapiens
cctcgctcccggaccccacggctgcaaactgatctggcgcgcggggaggaggagagcgcaggcgagcgaacccgcgagagagggagagagcgagcgagcaacagcgagagcgagagcgagagagccgggaggcagagggagtagtgaccgccttccggagccgggattcatgcctgtcctcgggaccagcgaaggggactttacggctgagtatgagccaggctgctaggagccaggtacccccacgcctgcagtccccgcgccgtgcccggaatgcgagctggacgcagggctctcccaagttcccaccgagccgaataaaaagcgtccgcccgcagctctccgccaaagacggacattgactccaggactccacagaatggagcaagaatgagaggaaaaaggccggcagaaaagcatgaactggaggtttgttgagctcctctacttcctgtttatatggggccgtatctcagtgcagccctcccaccaggaaccagctgggacagaccaacatgtctccaaggaatttgattggctcatttcagacagggggcctttccaccactccaggagctacctatcctttgtggaaagacaccgtcaaggatttacaaccagatataaaatatacagggagtttgcccgttggaaggtgaggaacacagccatcgagaggagagatctggtccgccatccagtgcccctcatgccggagtttcaaaggagcatccgcctgcttggcaggagacctaccactcagcagttcatcgataccatcatcaaaaagtacggcacccacctgctcatctcagccacattgggaggggaggaggctttgaccatgtatatggacaaaagtcgcctcgacaggaagtcagggaatgccactcaaagtgttgaagctctgcaccagctcgcatcatcctactttgttgaccgtgatggtaccatgaggaggcttcatgagatccagatatcaactggagcaatcaaggtcacagagacacgcactgggcctctgggctgtaacagttatgacaatctggactctgtgagttccgtccttctgcaaagcacggagagcaaactgcaccttcaaggtcttcagataatctttcctcagtatctgcaagagaagtttgtccagtcggccttgagctatatcatgtgcaatggggagggggagtacctgtgccagaacagccagtgtcgctgccaatgtgccgaggagtttccgcagtgcaactgccccatcacggacatccagatcatggagtacacgctggccaacatggccaagtcttgggccgaagcttataaggacctggagaattcagatgagtttaaatcatttatgaagcgcctccccagcaaccacttcctgaccatcggaagcatccatcagcactggggcaatgactgggacctgcagaaccgctacaagctcctgcagagtgccacggaggcacagagacaaaagatccaacgcactgcccgcaagcttttcggcctcagtgtacgctgtcgccacaatcccaaccaccagctgcctagagagaggacaattcagcagtggcttgcaagggtccagtcactcctctactgtaatgagaatgggttttggggaaccttcctggagagccagcggagctgcgtgtgccacggcagcaccacgctgtgccagcgccccatcccctgcgtgataggcgggaacaacagctgcaccatgtgcagcctggccaacatctccctctgtggctcctgcaacaagggctacaagctgtatcgaggccgctgtgaaccacagaacgtggactcggagcggagcgagcagttcatcagctttgagactgacctggacttccaggacctggagctgaagtacctgctgcagaagatggactcacgcctctacgtccacaccaccttcatcagcaacgagatccgcctcgacaccttctttgaccctcggtggcgcaagcgcatgtccctcactctcaagagcaacaagaaccgcatggacttcatccacatggtgatcggcatgtccatgcgcatctgccagatgcgcaacagcagcctggaccccatgttctttgtctatgtcaacccctttagcgggagccattcggagggctggaacatgcccttcggggaatttggctacccacgctgggagaagatccgtctccaaaacagccagtgctacaactggactcttttgctgggcaatcggtggaaaacatttttcgagacggtccacatctacctacgtagtcggactcggctacctaccctactgcgaaatgagactggccagggccccgtggacctgtcggatccctccaagaggcagttctacatcaagatctcagacgtgcaggtgtttgggtatagcctgaggttcaacgccgacctcctgcgcagtgcagtgcagcaggtcaaccagtcctacacacagggcggccagttctattcctcttcgtcagtgatgctcctcttgttggatattcgggaccgaattaatcgcctggcccctcctgtggccccggggaaaccccagctggacttgttctcctgtatgctgaaacaccgcctgaaactgaccaacagcgagatcatcagggtgaaccacgccttggacctgtacaacacggagatcctcaaacagtcggaccagatgacagccaaactctgctaacccgggactccttgccatggacttttcctgttgttgtacacacacaacagaacaaaatgaagcaaaacaaaacaaaaaaacccacaaaaatttgtaaaatgtaattaatattcaaagaaaaggaggaaaatcttcatttgttggaaatgaaaacgttctagcaactgtataaaagcgttgggcatgtttgttatttctatactcactctgtcatgaagaagggtctcagccttttgtggagcattgagggagttgcttcttaggcctcaggtgctgtattgggggagaagggagaaagcatatgcaatgaattgtaaagatctctgctgtgcaggtgctaagattaaacactaaaaagaaagagagatatatgtaatgtacaactgacactgccatttttcctttttggaggaaatggacatagataaagaagatatttcttcggttaagattt

SEQ ID NO: 29995 - DNA, 3438 bp, Homo Sapiens
cggttctttccggaaattatgactgcagctgttttcactccgctgtgactcagagcgctccgggctgcaggagaggaagaaatcttgcatcaccatggtgcacttctgtggcctactcaccctccaccgggagccagtgccgctgaagagtatctctgtgagcgtgaacatttacgagtttgtggctggtgtgtctgcaactttgaactacgagaatgaggagaaagttcctttggaggccttctttgtgttccccatggatgaagactctgctgtttacagctttgaggccttggtggatgggaagaaaattgtagcagaattacaagacaagatgaaggcccgcaccaactatgagaaagccatctcccagggccaccaggccttcttattggagggggacagcagctccagggatgtcttctcttgcaatgtgggtaacctccaacctgggtcgaaggcggcagtcaccctgaagtatgtgcaggagctgcctctggaagcagatggggctctgcgctttgtgctcccagctgtcctgaatcctagataccagttctctgggtcgtctaaggacagttgccttaatgtgaagactcctatagtccctgtggaggacctgccctacacactcagcatggtcgccaccatagattcccagcatggcattgagaaggtccaatccaactgccccttgagtcctaccgagtacctaggagaggacaagacttctgctcaggtttccctggctgctggacacaagtttgatcgggacgtggaactcctgatttactacaatgaggtgcatacccccagcgtggttttggagatggggatgcctaacatgaagccaggtcatttgatgggagatccatctgcaatggtgagtttctatccaaatatcccagaagatcaaccatcaaatacctgtggagagtttatctttctcatggaccgctcgggaagtatgcagagccccatgagtagccaggatacatctcagctgcgaatacaggcagccaaggaaacactgattttgctgctgaagagtttacctataggctgttatttcaacatctatggatttggctcttcctatgaggcatgctttccggagagtgtgaagtacactcagcaaacaatggaggaggctctggggagagtgaagcttatgcaggccgacctagggggcactgaaatcttggcaccactccagaacatttacaggggaccctccatcccaggccaccccctacagctttttgtctttacagatggagaagttacagacacgtttagtgtaattaaagaagttaggatcaacagacagaaacacaggtgtttctcatttggtattggagaaggcacctccaccagcctaataaaaggtattgcccgggcatcagggggcacctcagaatttatcacaggcaaagacaggatgcagtccaaggctctcaggactctgaaacgctctctgcagcctgtggtagaggatgtctctctgagctggcatttgcctcctggtctgtctgctaaaatgctttccccagaacagactgtcatctttaggggtcagagattaatcagctatgcccagctgaccgggaggatgccagcagcagagacaacaggagaagtatgcctcaaatatacactccagggcaagacttttgaggataaggtgacatttcctctacaacccaagcctgatgtcaacctcaccattcaccgccttgctgccaagtccttgctccagaccaaggacatgggcctcagggagactccagcaagtgataaaaaagatgcattgaaccttagccttgagtctggtgtcataagctccttcacagctttcattgctatcaataaggagctcaacaagccggttcaggggcctctggctcatagggacgtcccaaggccaattctgttgggtgcttctgccccattgaagataaaatgccaatcaggttttcgaaaggccttacactctgaccgtcctccttctgcatctcagcccagaggggaacttatgtgttataaggccaagacattccagatggacgattacagtctctgtgggttgataagtcacaaggaccagcacagtccaggctttggagagaatcaccttgtgcagctgatttaccaccaaaatgcaaatggttcctgggatctgaatgaagatctagccaagatcctaggtatgagtttggaagaaataatggctgcacagcctgccgagcttgtggattcctcaggctgggccaccatcctggccgtgatctggctgcacagcaatggtaaggacttgaagtgtgaatgggagcttctggaaaggaaggccgtggcctggatgcgtgcccatgcaggctccaccatgccttcggttgtgaaagctgctattactttcctgaagtcatctgtggatcctgctatctttgccttttgaagataccatccagaaaaagaagtgcctttaatttgctactgtcatttcctctagtatcacttttgctgtgatgatgtgttcttgtgtattataactctttattttttgccataaaagtaaaggatgcttactccacttcgcttctctgctccaggttcactttggatatgatctttcttttcccaacatatgccctcagaaaagtgacagtggtcccagaacctattccctttcttgagggagttcaaaacattcataggcagtaatgttcctcccagggtttccagggaaacaacatgaaaaacaggtgacatgaactacagactaaagattgcagcatttatgttagagaatgcttgaattagagaattttctgcattatctttgtctgttcactttctatcttatatacttatcagggccatactggtaagcttgcgtaggaggagttagagggaagttgaaagccaacatctggatcaatgtaatgtcaagatcacaaagacagagactgcaggggtccactgtgagaggtgacactgttggggaccttcctgattcattcttcttgggctttgctagcctgtacaacctacatgtcttttcttccactgcctgaaagacttgggttgaactataactgttggagagagatgttcctctttaatcatgaaacaccttaagaagtctataatgcaatccttagtcctaccctgaacctatgtgtcctctaagtcaggccctgatctagtgcagtaaagggaagggtgggcttaatgggagctttgcctgggacctgaacctggagcacttaccgcattaggaagaaaggagctccccgtaatcgttcctgacccttgtgtctcatataccctatcctggtggaaatgaccctatttgatatgctgtcccttaaaataacttgtatcaatattaaaatgactatttctaccctttgatgagtaaaaaaaaaaaaaaaaaaa

SEQ ID NO: 29996 - DNA, 8467 bp, Homo Sapiens
ttccccaaattgatggacataaacccatatgcttatctcagcatgtgtttaaaaagcacttgctgagattcagtgaccatccaacattaaaaactgctgatagaaggaaactcacttagctgaattaaggacgtgttcttaaaatctaccgccaacgtaatggggaggagctcacggcgttcgttaatttattcattccgcaaatatgttttgggcagttacataccgaatagtagatggaggtgtgcctgctgtcatggagatagggtgatttcatcctgttgatcaggaaaactcctaggtgcttgcaggtaaatgtgccacaaagaaagtgaggaccaaaggttagttgatgtaaaaacaagtttgaaatgcattttggggtaatttatccggtcgcttcgggcattcctcgcggaaggcgtggtctggtgactcagaagccaacacactgcgggagtccagccgtcggccccctgccgtgtggcgaggcccagtgtgtcccctttgtaaggacagcacaagcaggagttaatggaccggccatccatagcggtggtggggcagggagccagtttccgaaagaaactcacgccgccgcaggagggccctgtgggatgctctgtgcagagctgttgtgcggaccgggagacgggaaagcctggtggctgcaggagggcaccgtgcagaagtatccagtaaaccacccacagcacggcagcagaaaaacgaggaaattatatgtgtgtatgtttataagaactcagaagcaatggtgagcaaaaagcaaaagcaagaggagaaagtcacagtgtgctggcatcaagttgcattgagaggagcccgcggggtagtgcacccgcatttcctcgttgcgttgagaggcgcccgcggggtagtgcacccgcatttcctcgtttgagaggcgcccgcggggtagtgcacccgcatttcctagttgccttgagaggtgccgcggggtagtgcacccgcatttcctagttgccttgagaggtgcccgcggggtagtgcacccgcatttcctagttgccttgagaggtgccgcggggtagtgcacccgcatttcctcgtttcattgagcggtgcccgcggggtagtgcactcgcatttcctagttgccttgagaggtgccgcggggtagtgcacccacatttcttcactcgtttagagttcggggctctcagaacacagggagaatatgggagaattccttactagatgttacagaggccacacagggccacttttttcttttttttttattgtgtcaggtatacgtaaatattcctttcggtcagttcagcacgtaggactgagtggcattaggtacgctcactgtacagccaatgcctccataggccactttttaaatacgcggggctaagggccaacgacaagattgtcatcgaggacaataagtcgatggcgctgcctggtcactggcttggtcagaaaacacatgccagggtgactggatttaacgttcagttttagaaccacaaatctgccagcccaggcattcaagaggaagtgagtaattcactgaattgatggttagcaagacccttcaaagtccttggaagttccgtgtttgctgggggtcacaacagcaattgcgtttctaaaacattgaaaaccacccgtttttcacacatctgaatagcctgagttgtaacagacctaagtaaaggcgtccaaacgtgcctgatcctgtggctgggtcccaggagccttaacaaggcattgagagagctggattgattgattagactcttgccaactgctgtgcggaatacagaaaatgcagctccagctctcaaagggctgaaaatctaattgaggtgaaaaaggtaacatgtgtgaaaaccatgtctgtgtagacttgttttgtatggaccagaaaagttggaagtccagagatggatgcgaggaagtaggggatggagtttccttataacctctggagggacagtccagatacataccggggtgtgtagcgggtggaggttctaagacaggctggaggaacagtgcagacacacaccagggtgtgtagggggtagaggttctaagacagtctggagggagagtgcagacacacaccggggtgtgtaagcagtggaggttctaagacaggctggaggaacagtggagacacacaccagggcgtgtagggggtagaggttctaagacaggctggaggaacagtggagacacacaccacggcgtgtagggggtagaggttctaagacagtctggtgggagagtgcagacacacccggggccgtgtagggggtacaggttctaagacagtctggtgggagagtgcagacacacacggggctgtgtcggggatagaggttctaagacagtctggtgggagagtgcagacacacaccagggcgtgtagggggtggaggttctaagacaggctggaggaacagtggagacacacactggggagcataggggtgcttttctctgagtcccctagtacatggtagaggctgtagaccctccgctcttgggcacgtgggtaggctctcaggatgactcttggctcttgggcatgtgggtgagctctcaggatgatgcccagccccaattttcaggcaattgtgcaaggacttgacccattcatccgctgagctgagttgctgagactgctgggtgcccgggtggtgatcattgtccgtggcatacagaacacactgcagcttctgcaaagtgagctcatttcacgcattttatggctttgccaggctgctgttgacctgccagaacttttaatcagacatttggaggacctgttttgtagtcagtggagaaatattacaaggatagggtaatttgaaatatctaaggattgtaagtgacaagttcatgtctaattttgcatttccagtgaaagcaagtgttggctttgaatgttacttatgtgctgagatgtgtatattcctcagtgcttaattactaaggatttttagggccaagttttgttacagtgaatgattgtggatgcataaagaataaatttaatatttttaaggcatggagattatttgtatctaagaaaccaggtaaaataaagaaacatttatgcttgtgtgactgataaaagagttagagagacactcatattctgggagtttgaagaatgtcattttcattctctaaaagtcttgttagtgtcacagcattgaaaatttaaaaatccgtgtgtattttcttgctagtgctggtacttgaatatctgtatcatccacctatccatccacctacccatatttctataatccaccgtccctcgacatgcctatcatctgtccaccatttctctctgtctaattttcaaaacatcctgtaagtttatataaaggaagatttttcttcttgtgaagttctctaaggctgacaagttacctggcatgactgtggcggatgcccatagccaggtggtcctcggggtacagatggggcaggggcacttgtgagaaacacctgaagtgcttttccccagcctccccggccctgccgggtggtggaggcgctgcacggtgccttccatggagcaagcccggggctccgcagggtcctcagcatgattcagatttccttccacccccagctctagatgatttggtaaaaccacaaacaggcacaaaacagcccacatggaattctaaagttttaatttcattttggaatttatgcactcagatgaaatgatttatgatgatgttgagaatggggatgaaggtggaaacagctccttggaatacggatggagttcgagtgaatttgaaagttacgaagagcagagtgactcggagtgcaagaatgggattcccaggtccttcctgcgcagcaaccacaaaaagcaactttctcatgacctaacccgtttaaaggagcactatgagaaaaagatgagagatttgatggcaagcacggtgggcgtggtggagattcagcagctcaggcagaagcatgaactgaagatgcagaagctcgtgaaggccgcgaaggacggcaccaaggacgggctggagaggaccagggcagccgtgaagaggggccgctccttcatcaggaccaagtctctcatcgcacaggatcacagatcttctcttgaggaagaacagaatttgttcattgatgttgactgcaagcacccggaagccatcttgaccccgatgcccgagggtttatctcagcagcaggttgtaagaagatatatactgggttcagttgtcgacagtgaaaagaactacgtagatgctcttaagaggattttggagcaatatgagaagccgctgtctgagatggagccaaaggttctgagtgagaggaagctgaagacggtgttctaccgagtcaaagagatcctgcagtgccactcgctatttcagatcgcgctggccagccgcgtttccgagtgggactccgtggaaatgataggcgatgtcttcgtggcttcgttttctaagtccatggtgctggatgcatacagtgaatatgtgaacaatttcagcacagccgtggcagtcctcaagaaaacatgtgccacaaagcccgcttttcttgaatttttaaagcaggaacaggaggccagccccgatcgaaccacgctctacagcctgatgatgaagcccatccagaggttcccacagttcatcctcctgctccaggacatgctgaagaacacctccaaaggccaccccgacaggctgcctcttcagatggccctgacagagctcgaaacactagcagagaagttaaatgaaagaaagagagatgctgatcaacgctgtgaagtgaagcaaatagccaaagccataaacgaaagatacctgaacaagcttctcagcagtggaagccgatacctcattcgatcagatgatatgatagaaacagtttacaacgacagaggagagattgttaaaaccaaagaacgccgagtcttcatgttaaatgatgtgttaatgtgtgccaccgtcagctcacgcccctctcatgacagccgtgtgatgagcagccagaggtacttgctgaagtggagcgttccactgggacatgtggacgccatcgagtatggcagcagcgcaggcacgggcgagcacagcaggcaccttgccgttcacccgccggagagcctggccgtggttgctaacgcgaaaccaaacaaagtttacatggggccaggacaactgtatcaagatttacaaaacttgttgcatgacttaaatgtaattggccaaatcactcagctgataggaaaccttaaaggaaactatcagaacttaaaccagtcagtagcccatgactggacatcaggtttacaaaggcttattttgaagaaagaagatgaaatcagagctgcggactgctgcagaattcagttacagcttcccgggaagcaggacaaatctgggcgaccgacgttctttacagctgtgttcaatacgttcacccctgccatcaaggagtcctgggtcaacagcttacagatggccaagctcgccctagaagaggagaaccacatgggctggttctgtgtggaagacgatgggaatcacattaaaaaggagaagcatcctctcctcgtcggacacatgcccgtgatggtggccaagcagcaggagttcaagattgaatgtgctgcttataaccctgaaccttacctaaataatgaaagccagccagattcattttccacggcacatggtttcctgtggatcggaagttgcacccatcaaatgggtcagattgccatcgtctcgtttcaaaattccactcccaaagtcattgagtgcttcaacgtggaatctcgcatcctgtgcatgctgtacgttcccgtcgaggagaagcgcagagagcctggggcacccccggaccccgagaccccggccgtgagagcttctgatgtccccacgatctgtgtagggacggaggagggaagcatttccatttataaaagcagtcaaggctccaagaaagtgagacttcagcactttttcactcctgagaagtccacagtcatgagcctggcttgcacgtctcagagcctgtacgctggcctggtcaacggggcagtcgccagctacgccagagccccagatggatcctgggattcagaacctcaaaaagtgatcaagttaggcgtcctaccagttagaagtctactcatgatggaagacacgttgtgggcggcttccggaggtcaagtcttcatcatcagtgtggagactcatgctgtagagggtcagctggaggcccaccaggaggaaggcatggtgatctcccacatggccgtgtccggcgtcgggatctggattgccttcacctcagggtccacgctccgcctttttcacacggaaactctcaagcacctgcaggacatcaacatcgccacccctgttcacaacatgctgccagggcaccagcggctgtcggtgacgagcctgctcgtctgccacggattgctgatggtcggcaccagcctgggagtcctcgtggccctgccggtcccacgtctgcaagggattcccaaagtgaccggaagaggcatggtctcctaccatgcacacaacagtcctgtcaaattcatcgtcctggccacggctctgcacgagaaagacaaggacaaatccagggacagcctggctcctggccccgagcctcaggacgaagaccagaaggacgcacttccgagtggaggagctggttcatctctgagccagggtgaccctgacgcagccatctggttgggagattcgctgggatcgatgactcagaaaagcgacctgtcctcctcatctgggtccctgagcttgtctcacggctccagctctctagagcacagatcagaggacagcaccatctatgatctcctgaaggatcctgtctcgctgagaagcaaagcacgccgggccaagaaagccaaggccagctcggcgctggtggtctgtggagggcagggccaccgccgggtgcacaggaaggcccggcagccccaccaggaagagctggcgccgaccgtcatggtctggcagatccctctgctgaatatataagcaggacggccgccttctgctgtcagaatttgcaatcaagggtgacttctcagctaatcctacagcctgagtggttaagctgtgtctacactggttgggaataaattaaaaacagtatttgggggagaaacgtgcaatagcgtaatggtggtgtccctgccaattccttccttctcttctgtacagcagaagtaattacaagcacttctcacgaaggcagaagactgatgcaattttcgagtaattgagtgcagttctgggaaaataccacattctttttgactgctgtagtccatatatgaatactaaatgttaaacttcatcagcgtcagacctattgtatcatattagagaatttgcagactaagaatttatgagaaaatatatgtattcagtagtgcaggcatttattaacaattcttaaaagttttacctgattcagattcacgacttttatttatattctatatttttgaatttcagagtaaaatttgttaacaattttaaaagccaggtaacacctaccagtccagttagcatgatttgctttcagaagtgagctgggttttccaaagtggtataatgtgtgtactgtatattttaacaaagtaatatttttgtattgcatttttctattaaaaaattaacagttaatgtttcagtcaatgtattatctgtagcatttcacaaataatgtttgctttgaaccaaaatgctcagtgcctatcaacatttggactcaagcatcaacaccaaattattcctcccttctcgtataaatagagtgactatccacaggagaaaagtgtgtgctttagtattagaggagataggcagagaagtcttgcttagttccttcgtgcagcttcttgcccctgttgacgtggaatgctgtgtctgctttagcacgcacgctccgaatgactcctggtgctaggccatgctggctgctgtcactgagcgggactcaggccaagaggcgtgacctcgggccagcctgtctgttgtgcagacgcctcctctgcagaacgcatcagtttctattctgcagttgcagagccagccccgcgtgagaacgtgcataatgagtgcacaccatcatgtcaaggtgcatacttagtgagcgccatcctgctgaacgtgtatttcagtgtttcacttactggacggataacaagaaaaaaatcctaacacaggcagtcaccagaaataaatgtctcagcactttacagatgactaaaaatgttaattttatgacttagccaaatatgttctaggttgcatatatcccccatgtgaaagtgatttcttcccaagcttctcaaactgttagctgctgtctgacttcatcaataaagtatttttatttt

SEQ ID NO: 29997 - DNA, 5169 bp, Homo Sapiens
agcttgcgggacacggagccgcgaggagacagctgaggcccgcggagaccagggggtgaagcctggagaccctcttgccctggcctagctgcaggcccccgggatgctttgggcatgtcctctggagccccacagaagagcagcccaatggccagtggagctgaggagaccccaggcttcctggacacgctcctgcaagacttcccagccctgctgaacccagaggaccctctgccatggaaggccccagggacggtgctcagccaggaggaggtggagggcgagctggctgagctggccatgggctttctgggcagcaggaaggccccgccaccacttgctgctgctctggcccacgaagcagtttcacagctgctacagacagacctttccgaattcaggaagttgcccagggaggaagaagaagaggaggaggacgatgacgaggaggaaaaggcccctgtgaccttgctggatgcccaaagcctggcacagagtttctttaaccgcctttgggaagtcgccggccagtggcagaagcaggtgccattggctgcccgggcctcacagcggcagtggctggtctccatccacgccatccggaacactcgccgcaagatggaggaccggcacgtgtccctcccttccttcaaccagctcttcggcttgtctgaccctgtgaaccgcgcctactttgctgtgtttgatggtcacggaggcgtggatgctgcgaggtacgccgctgtccacgtgcacaccaacgctgcccgccagccagagctgcccacagaccctgagggagccctcagagaagccttccggcgcaccgaccagatgtttctcaggaaagccaagcgagagcggctgcagagcggcaccacaggtgtgtgtgcgctcattgcaggagcgaccctgcacgtcgcctggctcggggattcccaggtcattttggtacagcagggacaggtggtgaagctgatggagccacacagaccagaacggcaggatgagaaggcgcgcattgaagcattgggtggctttgtgtctcacatggactgctggagagtcaacgggaccctggccgtctccagagccatcggggatgtcttccagaagccctacgtgtctggggaggccgatgcagcttcccgggcgctgacgggctccgaggactacctgctgcttgcctgtgatggcttctttgacgtcgtaccccaccaggaagttgttggcctggtccagagccacctgaccaggcagcagggcagcgggctccgtgtcgccgaggagctggtggctgcggcccgggagcggggctcccacgacaacatcacggtcatggtggtcttcctcagggacccccaagagctgctggagggcgggaaccagggagaaggggacccccaggcagaagggaggaggcaggacttgccctccagccttccagaacctgagacccaggctccaccaagaagctaggtggtttccaggcccctgccctccccttcctcccatccttgtccttctctccctcagaagcctcaggacccaacaggtggcaggcagtggacagggtgcccgccccacagtgctttccccagcaccccagagccagtcgggacaccccccgcagcccgtcctggtggctgtggaactgcactgggtggcgggcagatggtggaaggcagcttaggagacctcaccaaagagaagatggaccggctcttgctcccagctcctattaggcccggggtgggaccagaggtcataggtgcccaacggcagccaaaccaaagacactggtgtgcatggggcagcatggttgtgcacgtgggaccctggggcggacccaggagccaaactcttgaagcaccccctgggtcaggcccagcagcggagtggccagccccagtttcccattgctcctctctgcggccagggccaggtgggttcatatttacagatatgcccagccagtcctggtcggccacaccagtgtcccaaagaggagagcgcagcagagccaggggtctgttctgtagcagccacccccctgcccccactccagggcagccatgatgtgcttgggcccaccagggccttccgggctgctctcttccctgagcccggaaccggcgacgcacatgtgtcttttgttggtgtgtttgtttttttccagggaggtctaattccgaagcagtattccaggttttctctttgttttatcagtgccaagatgacctgttgtgtcatataatttaagcagagcttagcatttattttattctttagaaaacttaagtatttacttttttaaagctatttttcaaggaacctttttttgcagtattattgaatttattttctaaatcaggattgaaacaggaacttttccaggtggtgttaataagccattcaagtgccttacacagctttgaagaaactaggactgcagtgggctcggataggcccattgaggtttttagaaaagcaggatttgttttgttagggaggcatgattttggtgagatctttctggaagagttttccgcctctttgtgatgctgaacacccccaaggttctcccctccccccgctgcccaggtgactggcaggagctgcgactgccacgtagtggtgcctgggcccgacagcggggctctgggcatcccgggtgaccttggcccatctgcctgcattcccacccccttgggcctggctggatcccaggcagagggaccttgctgctgtgtgattggaacattcccaaatatcttgtgaatttgtaatcaaattggtctcattgggaaagactcttaattaagaggctcaggcaagcacagaggcagcccgtgggtctctgtctcagtctggaggcagcagggatgctgctgggagtccatggcacaggccacagcccctcaccttgccgcggtggctggcagcacgcctgccttgctctgccccatgccctgaacaggcatgagagctccacgtcccctagtgcaccctgagagggggctcacaagtgaccgatcctgggtgcctcagggagctcactgagggcgtgcaaagttgaaagtggcaaggctgggggagggtgtcgggtagagggaagagggcagggggctaggggaggactcagaggccatctgcagggccaagccacaggaagggctgagctggaggtgggcagggctgctccaggcaggtcagagcagtgcagggggaggagaggagaaagggaggaagctgggctgtgtggtccccatgaaggcattcagagtccacctgcagacagcgagagccccaggaaggtttgcacagctgtgccccaagcaccttggcctcctctcagctcgccgaggaggcacgctagagccgccttcccggtgggagccctctgtcccacagggagcggggagccagctttgctggggccctacctgcatgcccagccttacccctcattctcacagcacagatgaggttgagaccatgcagtcaatgcattgcttaaggtctcttatttacaaaaaaaaaccttaaacatagtcgctgtcattcagacattcagagaatggttggccacaaacaatgaccaagtattgcttggcttaacttgaaggcctgctgtctccttctgggggtcagggacgcagctccaccctcaccactagcccaccctgcccgtgggcataaccttgacgaagagagagaatgattggcatctgcttttctcttttctttgctaataattctgttcctggctgccgagagtgaagtttcaccatgtggaggtttggctcctatcacctggtggtctgattcataccctagcctgaggctccactggaagatctcgcagcctcagtgtatgggaaaccctttccccaggcttgtcccagcactgccgctccccacccctgagccaggaccccagaggatggccatgccccgtgcctggcagaggtctggtgccagcactgggagctgctccgcccttgccttggggccgagggagccctcgtccacccctgcacagcagctgggcacagaggagcgctcttccatcttgaccaggactgcaccaagaagcaccaggtgtcttcagcctccaacctccggggcgaccttctcttccagccacagtcccatgagggcccctagccagggacactggtctgtaaattgtaatcctttctccagcccagctctccacttgttccttgtgtgagctgagcaggcagtgcacctctgagtgtcccttttgtaaggcccaggggttgcactgagtctgcagaggccgcgacctcctagaacgctgtgggtgcaggtgagccggcgtgtcctggggagatgctgccagcacacaggggccctcctgctgccagcaggttggggtggttaagtcttattagtgtctattcttaaaattaagtgggctggagaagaatggagctccacatgccagcaccgtatatggaatacaaaagctggggaagcagggcctgccttacaggtgtggctgactctgagcccaggcctgcaggggtggagggcagtccctcagaatcccagaggcagtcccagcctcagaacccaggataggaaatgggtgtgtttagtggggaaagggacggggtgcagacggcagggccagtatggggccccctccctctcctctcctctcctatggtgagcccagcgtgggcaccgggccgtctcagccgtgttcccagggctgggaggacagctctggcccttcttaggcctagcctcgtcccaagctaaatgtaagccagttgggctgtgttaaaggaagcagtgtttttggttcgattctgcctctgtagctcaaggggggcagcccccagagtcctgtgcattctgccaaggctccatagctttgccaaatgcacggagctctgccattccggtgcagtgcaggccttgcgaagggtttatctgcgttcgtctcggtgggcttctcctgcatgggagttgtgttcctgtgcaagggggagctttgctccaggacaggatgactgtcttccctattcttagggacaagtcccaagatgccagaaaggcagtctcccaaggacccaccatgcagaagtgtcaataaaccacaagttctgaactctgaaaaaaaaaaaaaaaaaa

SEQ ID NO: 29998 - DNA, 2283 bp, Homo Sapiens
cgcctccaggccccttcccgcgccgcgacgcacgctgccccggaaggccgcggcgctgtagtgcggcgccccaggttctttagtggaagaacgcgaagcgaggatgagtgatccgtggaggcagtaacaggcgcggcgagggagaagtgattcccgaagaatcaaggctgggccggacccggtggcctggcaacaggtaataagagaaatgaagccaacaggtacagacccaaggatcttatctatagctgctgaagttgcaaaaagccctgagcagaatgtccctgttatactgttgaagttaaaagaaataataaacatcacacctttaggaagctcagagttgaagaaaatcaaacaagatatatattgttatgatctcattcaatattgcctcttggtcctcagtcaagattattctcgaatccagggtggttggactacaatttcccagcttacacagatattaagccattgctgtgtgggcttggagccaggagaagatgcagaggaattttacaatgaattacttccatcagctgcagaaaattttctagttttggggagacaattacaaacatgttttatcaatgcagctaaggctgaagaaaaagatgaattactacactttttccaaattgtgactgattctctcttctggcttttgggaggccatgttgaacttattcagaatgtactacaaagtgatcatttcttacatttactgcaagctgacaatgtccaaataggatctgcagtcatgatgatgctacagaatatattacagatcaacagtggtgatttactcagaataggaagaaaagccctgtattcaattttagatgaagttattttcaagcttttttcaactcctagtccagttataagaagtactgctacaaaactcctactgttgatggctgaatcccatcaggaaattttgattttactgagacaaagtacctgctacaaaggactcagacgtctactaagtaaacaggaaactgggactgaattcagtcaagaacttagacagcttgttggccttttaagcccaatggtctatcaggaagtagaagagcagatccaaacgatcaaagatgttgctggagataaataggcagaaggaagaagaggacctcaaattacaattgcaacttcaaagacagagagccatgagactttcccgagaattgcagctgagtatgctcgaaatagttcatccaggtcaggtggagaaacactatcgggaaatggaagagaaatcagcactgattatccagaaacattggagagggtacagggaaaggaaaaattttcaccaacagaggcagtctctcatagagtataaagcagctgtcacacttcaaagagcagcgcttaaattcctagcgaagtaccgtaagaaaaagaaactatttgctccttggcgaggactccaagaactcactgatgcacgccgagttgaactgaagaaacgagtggatgactatgtcagaagacatttgggctctccaatgtcagatgtggtcagtagggagctccatgcccaagctcaagaacgactgcaacactactttatgggcagggccctagaagagcgagcccagcagcacagagaagctctgatagcacagatcagcaccaacgttgaacagctaatgaaggcaccaagtctgaaggaggcagaagggaaagaacctgagctcttcctaagtagatccaggcctgtggcagccaaggccaagcaggcccatctcacaaccctgaagcacatacaagcaccctggtggaagaagcttggagaagaatctggagatgagattgatgttccaaaggatgagcttagtatagaattagaaaatttattcattggtggaaccaaaccaccttagtgagtaaccctaagaattgacacaaatctcatattttaggagattatattggttctgcctctggcatgctggtagactagggccatcctaacttattattttccagaggttctcctccagacaagacctgcagtaagcaaagagttatattctacctctctctcaattttctttttcttttctctgtatcctcatccttagccacacacagatttgtgtggcttttattgtagaactaaacttagcatagtgttctgttgtttacatgaagtgtgtttttctttggtttcttctgttttccaactaaatatttttttctaaataaatattttcaacaattgatttgaaaaaaaaaaaaaaaaaaaaaaaaaaaaaaaaaaaaaaaaaa

SEQ ID NO: 29999 - DNA, 6245 bp, Homo Sapiens
gagaagaagtggcaggtgatgctgaagcgggggagaagcggcagagccggccacacagtgcaggggatggagacaggtgctgggctggtcctcctgcagcatcctcagttgttggagggcagtcatcctcaggccgtacccagccagagaagaaaaagaacagtgtgaagccacgtgtgatagccgtccaacatcggctcttccctccaattacattgtagttgattgtgtctcaaaccatgaattatgtgggacagctggctgggcaggtgattgtcactgtgaaggaactctacaagggcattaaccaggccaccctctctgggtgcattgatgtcatcgtggtacagcagcaggatggcagctatcagtgttcaccttttcacgttcggtttggaaagctgggagtcctgagatccaaagagaaagtgattgatatagaaatcaacggcagtgcagtggatcttcacatgaagttgggtgataacggagaagctttctttgttgaggagactgaagaagaatatgaaaagcttcctgcttaccttgccacctcaccaattcctactgaagatcagttctttaaagatattgacacccctttggtgaaatcgggtggagatgaaacaccatctcagagttcagacatctcacacgtcttggaaacagagacaatttttactccaagttctgtgaaaaagaaaaaacgaaggagaaagaaatacaaacaggacagtaagaaggaagagcaggccgcatctgctgctgcagaagacacatgtgatgtaggcgtgagctccgatgatgacaagggggcccaggcagcacgaggatcttcaaatgcttccttgaaagaagaagaatgtaaagagcctttgctcttccattctggggatcattaccccttatctgatggagattggtcccctttagagaccacctatccccagacagcgtgtcctaagagtgattcagagctggaggtgaaacctgcggagagcctgctcagatcagagtctcacatggagtggacgtggggcggattcccagagtccaccaaggtcagcaaaagagaacgatctgaccatcatcctaggacagctacaattacaccatcagaaaatactcattttcgggtaattcccagtgaggacaacctcatcagtgaagttgagaaggatgcttccatggaagacactgtctgtaccatagtgaagcccaaacccagagccctgggtacacagatgagcgacccaacatctgtggcagagcttctcgaacctcctcttgagagtactcagatttcatctatgttagatgctgaccaccttcccaacgcagccttagcggaggcgccctcagaatccaaaccggcagctaaagtagactcgccgtcaaagaagaaaggtgttcacaaaagaagccaacaccagggacctgatgatatttaccttgatgacttaaagggtctagaacctgaagttgcagctctttatttccctaaaagtgaatcggagcccggttccaggcagtggcccgagtctgacacactctctggctcccagtccccacagtccgtgggaagcgcagctgcagatagcggcaccgagtgcctctcagattctgccatggacttgcctgacgttaccctctccctttgcgggggcctcagtgaaaatggagaaatttcaaaagaaaaattcatggagcatatcattacttatcacgaatttgcagaaaaccctggacttatagacaatcctaaccttgtaataaggatatataatcgttactataactgggctttggcagctcccatgatccttagcttgcaagtattccagaagagcttgcctaaggccacagttgagtcctgggtgaaagacaagatgccaaagaaatctggtcgctggtggttttggcgaaagagagaaagcatgaccaaacagctgccagaatccaaggagggaaaatctgaggcaccgccagccagtgacctgccatccagctccaaggagccggccggtgccaggccggccgagaatgactcctcgagtgacgagggatcacaggagctcgaagaatccatcacagtggaccccatccccacagagcccctgagccacggcagcacaacttcatataagaagtctctccgcctctcctcagaccagatcgcaaaactgaagctccacgatggcccaaatgatgttgtgtttagtattacaacccagtatcaaggcacctgtcgctgtgcagggaccatttacctgtggaactggaatgacaagatcatcatttctgatattgatgggacaataaccaagtcggatgctttgggacagattctcccacagctgggcaaagactggacccaccagggtatagcaaagctctaccattccatcaatgagaatggctacaagtttctgtactgctcggctcgtgccatcggcatggccgacatgacccgtggctacctgcactgggtcaatgacaagggcacaatcttgccccggggccccctgatgctgtcccccagcagcttgttctccgccttccacagagaagtgatagaaaagaaaccagagaagttcaaaattgagtgtctaaatgatatcaagaatctgtttgccccgtctaagcagcccttctatgctgcctttggaaaccgtccaaatgatgtctatgcctacacacaagttggagttccagactgtagaatattcaccgtgaaccccaagggtgaattaatacaagaaagaaccaaaggaaacaagtcatcgtatcacaggctgagtgagctcgtggagcatgtgttcccccttctcagtaaggagcagaattccgcttttccctgcccggagttcagctccttctgctactggcgagacccgatccctgaagtggacctggatgacctgtcttgaggcggcacctcagtgggtgggcagggcttggtccccctccccacagcaagggaaggcagctggctcttctgctgacctcagataccagccttccccagcggggacgggtgcttctggagctggtcccgccatcctcctttgccttcccaggccagctgctcaggctcggcaggtctgcagctcagctcctggaaggagaagggaggaactgggcctggggctggaggcctgggatccctcctttgtgggtcgcacacatgtttcctgctgtgagctggggcctccttccattgcatcattttaaaggaagaaaaaagcagctaaaaaagagtggaccaaaacactgcacacagtgaagtgttccagtttccactgggcagttgaggtggcttctgtaaccagggctgtcttcagatgtcagggtccctgaactgctgcgggcccagtcagtgatgctggctgaagctgcctgtgcacgtttcttctctggtcgcctcatttcctgctacactgaaggggtcagctgctccagtgggccaagttgggcaggacccccgcccctgcagggcccatgcaccagagccactgagcccagtcccataaacctggccctctttggggaaagatccccacagagcatcctcctctcatctgtgacaactccacgagcccttaatttcttagtcctcaccagaagaacaggtctcacaagtatatatttgatgtctgtaataaaagtgggaaggtgggtcttaaaacagaccaaaccccgccccgcccccaacaactctgcttttagggaggcctccgaaatgcagataggcggttgagtggggtcctgggaagagcgctgaatccctctgcttgctgcctggtgtgggcctttggaaagcatcttgccttgggacaggatttctaaaattctgtgattcagatttgtcagggaagcacagtgaagcttgcttaaaggcactggccagcagtgtgtgactttggcttttgggatcacaccctgtaatcgggcccgtggaagcagcgtcaaagaggggtcttggagctcctatggagcagactgccccccgagcagtgtccccagcctagccctgtgagaccccatggggacacgggtgcctatgtattttcactaaaatatacatggtagctccatttactgatgcggttgtaatgagctcacatcgtgtctgaagagatggcaccagggaaaggtgtgccataagctgctccagagcttttggtatgctgagtgttgacagagctgcactcttaacatcaagagaactgtcaggagcccagaaccaaccccaggtcttggtctccattggcgagaacacaggacgtggtggttcctgagcagagagggatctgcagatacaggcttggcgctcggggtggtctcgtggccaactcttcatgcccctgccgttgtagtggaacctctacatgttttagtttgcttcacctaaaataatgctgatctagagatagagaaataggggtggttatttttccagattggagagttgaaagtccctgactgatttcagccattttcctagtgcttgtcggatgcagagacaatgttgaaatcccctaaacacagttctcagtggcaaaacctaggaaggctcatgttcccagagaagggaccacatgagccttctcccatgcaaagcttcccccagcttaaatagttgataaggactaattgtttaatgagtttatttatctacagtaggttagggatcctgggttctgtttatatgaagttcttcccagtttgtgaattctagtacagcagccatgcagccaccttatttcatagatgccatctgtgtgtcctcttgactaccttctatttagaggaagaatgagagctttgtgtgtttaactgagcttatagtaggacttctttgcatatgtatggtactgaaaaatcttaatatacatctttaatcctttttaggttgtcctttaaagagtttttgactagtttctttttcttgacagctcttctctttggacacatgggccttcttagagggttcagtctaggacccggctctcctggccctgtgttgagggtagctggtccctctgtccctgtgtctgctagcactagactttgttgctgcagattgatccagtgggtacataggctaattaatgtgagtctttttccttgtttaaaggagtccctcttgctgaaagtagatgattactattgctgtagtgttaggaaagtattaagtttgtgctgaaaatccattgccatttggtacaaatgacatttgttctttctgtgaaagagatgccctcgagtgtgtttgtacacaaacccttaggatggtgagttgaagcatcaccctcgcgctatcttcagtgacgggtgacggctcagggagatggcaggcagattgggctctaagtcattattctctcagttactccattggtgaaatggccctttccctctttgcagttcagtctaagtctcgtatttgctttgctgtctgtgtgctgaagctcgtcccgtgtgagttgctgtctgccccttgtcaggctgtgaggtgctcgtgtagacctggagcatgcaggctgcctccgtttttgggtactgtgttgtgttttgctctgtctaaaaacatctgcatagttttcaactggaaaaagaaaaaacttaaaaatgggatgtcctaaaatgaaagctgctcaaagtcacagaacaaccgagggacaaaggagattggatgactgggaagcgctggcccggaacagcccctgcaactgtggggcctgcacacagcccttccacagttggcactgcaggtgcaggccaaccctttaaagaataaacaaggaagtcagctctttcactttttacaagttggcaaaaacagacttccggggaatttcgatgttttcccgtgttgtagagcttccagggtttaataaaactggttaaaaattgagtctttccctgaagtaagtgctctttccagatgaaaactactcttttggttttgtttgaaagtaagaaagggaggggaaactttgctcttttaataattatgttcagcctatgatgaagtatttgattattagacagcaatgtcactaataagttttaagttgtccaaagttaattgtaaacatcatcagtacagtactcttagttacagtaaagcaattgttgcaagatgaatggctaatattttggtgcagtgtttgatgttcaaaacaaaatgttacaacaataaacgaacataacataaactgaaaaaaaaaaaaaaaaaa

SEQ ID NO: 30000 - DNA, 5319 bp, Homo Sapiens; identical to SEQ ID NO: 27981

SEQ ID NO: 30001 - DNA, 5740 bp, Homo Sapiens
cgccgccgccgcacgccgcctgcctcctgcacgccgccgccgcgcctagcgcccgggcccgcgacaccgcccgctaagcgccgggccgagttcacgcagccgcggtctggcggctccgcggcggcggcgggtgcgggcggcctggccggtgccggttaaagggacgagttgcaaacacttcaggaagtgacaagtcgatttcctcctccccgggagtcgctcgtacaaagcgctcggcgccggcaggcgagcgtgcgcgcggcggacgcgcggcgggcaccccggacgacttggcgagcgctggcggtgacggcgcggggtccgcgcccggagcgccccgccgcgcacaggagttgaccacatttggccatttcccagaagggccccaccccaagggtgagtggccaatggggagctgtttctgctgacatcaattccccaggaggtactcaccccaagtctgcccaagtgaagatggctgatacccaccctgggatggagcccagcgcctgaggcccttatcatggtgatggtcctaagtgaaagcctcagcacccggggagctgactccattgcatgtgggaccttcagccgtgaactgcacacgccaaagaagatgagtcaaggacctacacttttctcttgtggaattatggaaaatgacagatggcgagacctggacaggaaatgccctcttcagattgaccaaccgagcaccagcatctgggaatgcctgcctgaaaaggacagctcactatggcaccgggaggcagtgaccgcctgcgctgtgaccagtctgatcaaagacctcagcatcagcgaccacaacgggaacccctcagcaccccctagcaagcgccagtgccgctcactgtccttctccgatgagatgtccagttgccggacatcatggaggcccttgggctccaaagtctggactcccgtggaaaagagacgctgctacagcgggggcagcgtccagcgctattccaacggcttcagcaccatgcagaggagttccagcttcagcctcccttcccgggccaacgtgctctcctcaccctgcgaccaggcaggactccaccaccgatttggagggcagccctgccaaggggtgccaggctcagccccgtgtggacaggcaggtgacacctggagccctgacctgcaccccgtgggaggaggccggctggacctgcagcggtccctctcttgctcacatgagcagttttcctttgtggaatactgtcctccctcagccaacagcacacctgcctcaacaccagagctggcgagacgctccagcggcctttcccgcagccgctcccagccgtgtgtccttaacgacaagaaggtcggtgttaaaaggcggcgccctgaagaagtgcaagagcagaggccttctctagaccttgccaagatggcacagaactgtcagaccttcagcagcctcagctgcctgagcgcagggacagaggactgcggtccccagagccccttcgcccgccacgtcagcaacaccagggcctggaccgccctgctctcagcctccggcccagggggcaggacccccgctgggaccccggtccctgagcctcttcccccttccttcgacgaccacctcgcctgccaggaggacctgtcctgtgaggagtcagacagctgcgccctggacgaggattgtggcaggagagcggagccggctgcagcctggcgggaccgcggggcccctgggaacagcctctgctccctggacggcgagttggacattgagcagatagagaagaactgagggggtgtgggcccaggcagggctggggtgtgctggcatcgacagcccccactctgggcactaggtgggcccttgaaggggagcccaactcgtgggcctgatgaaagcttcctgagtggtgtcgggtcccagagagggagcccacctgctgcctgggggagagcctggcctggccgcgtcatacagcgggtgtgtcagcctctcaccggctccccgagcgtggcagccaccaggtccacagaactactgcagcccagaggacagctttgaagtttgcgtcttttctgcctctttccctgtgggatgttgggcagtctctgttgtccccggcagagctgggcaccgctctgtatccccctggtggtgggggctgtcagggagggcctggggtgggggccaggggccatctgctatgtcagggcccttcttggcctcactcaggttcacttctggggagtcggccccgcagcttctttcactcagttttactccgtgccttctctcccaggtctccctgcttcaggcttgggaaggttcgggagatgcttccttctgtaacaccagaaccatttggccttaattccaatgtgagagacagaatccctggggtgctggactggccctccagagggtaagccatgtccggagtctcgggcccaaggaacgatttggagggtgcttgttagggcctcccgtgttgggtagaaatttggtggatctgttggctgaaaagacggacttgcttgcctctcctacagcatggagaggctgaccccatggctctgccaccgttggggcagggttagcagatggcagcccttctctgtggctgacaggtcactgagtgataagcatggttggttccggtgagtgtagggatggcacgataccagggcagcctcttgaaaacggcctcgggagacgggagctgcgagcaggtgggcagatgagggccctatgcgcactcaggggtgaagggcgtccgctggccactctgcaggggcccctgcaggattccaggcacctcccgtttgtccttgaggactgctggctgtaaccagggcacatcacccacctcaagacaagcccacgcccttgtcagcttagggggagcccagtcctgagggctgcatctctgttgtaggcccagccaccggcacaaagctggattcatgctccctgcccctaccccaccctggctcctcaccctggggcatccgaggagcctagccccctgagggtttgctctcctctcaaggtttgtagctcctctccggctgccttgcagacaccaccacatgggctctgctctatgggaatctggcttttagcgaatgtggcgtcttctgcaaacaatagcaattgggctggcttaggagcaagtggctcattttcccataaggctaaaaataactggtgcgctcccttgtgttggctgacacgcgcgttcaaagcacttttgtagtcactttgcttttgctcgtcttcatggacgagtgaacgcctcgcttctgcaggttgagtccagatgcttctcaccttctttctcctcaagaaagatgctttttgggaaacgttgtttaaatcttatttttttactacatcaaaaggatggtggttcaagttcccaatatgtgggtggcacttcttaaaaatcagctttaaggagctggcagaaagcccccagccccacagccctgagagatggtgttgctagctcaggtggctgacacatggggtatgccgggcactgggcaggtcccagagccggggaaccagctcacctctggttgctgtagctcctgccggaggcatgtctacttgtgatcccggacagccgaacccaagagctggtggctctgagcagacagagacatcttggcctgtccctgcctgggggtcatggagaccatgtcttcttagagcaaatgtggaggcggccagggcagttgttgggtgaatgtggagagcacatggccatgtcttgcccccggagtaccactgggcgtggggggtcctggcaccacatgcccggtgtggccgagggcacacagcctctatagcaggccttcctgtggaaggcagaggcagtgagggaggtggacggtgccagctgaggctgaggcatgcagcagcccccagctacctttgcttagggctggggtgggaggcacatggtgacaggtatatgtcgtgggactggggtgtgggtgacctgccctcaaaccttgcctgccacctccccattcaggcctggtggcaggaagggacaagctgtggagctggctgagtcacagccacctccccacctccccgcaagctggtcccatcgaccagcaagcccagccccagggcgcttagggagaaatgacccagcctcctcagaccccgcctgcctgtcctgtgcccaccacgcagcagtcaggggagaaaatggtggctatcccttctgcttagagaaagaaatggcctttagctggtttcatgtttgtgttttgactggagggagtagaccctatctataaggtgccaccccatcatccaagctgccacactgcccggagcagcctgttcctgcactccaccctgctggccccaggacttctgatctcagtcctctgggagggaggttcgcctaggaggtgccccccacattggtgtccccatgggcagcaggcagacagctcacccccaccagcatgatggccccagctgggggcagtggcaggagccttacttttgtcacagccttgcccacaaaccctgcctctgaggggagactgaggaagggcagagccagaagcaagccgtgccaggccatctgcctgctcatggggtcctaaagcgcgggctaagcctgcaggaaagccggggcggtggggggggcttagtgccacatgcaccccactcattccaaagccaccaaactgccaggggctgccgtccacccgtggggcccaggggctggggccacagccttgccattttcgttgccataccctcttgccttactcgcggtggaggccggatttgcacgggcagacgtgcacctgggcccgtggggagcttgttctgaccagacgtacagattttcattctcagaaagccttacttttcaaccaaatttttgtagccagttttgtgaatttgtacactgaaagaaaatttaaataaaggggaagtccacattaaaaagaaaacaaaacaaaccctaactaacttccaaatgggtctcctggtgcgggggcgtgagtggccgtgccctgggtgtgctgcctgtctgagcaagcttccctagctgtggaaccccgggccccctgctgcgggctctgccttggtgtcatgcctgctgcacccccgtttccactgacgtgccgtctgtggctatgggggtggtcactggaatgacggtcactccagacgtcagccggcagggatgcagcaggctggccgcgcaccggggctcgggcaccctctggccccacactggcaatgatgccacaccttgccatgtccacgctgttggtcaaacccctctgtcatgcctctttaaagagaaaagaagagaaagattttttttttttttaatggcagaccgaagtggagatcttgtagcctagataggatagtctgaccttctagcatagtctttttggcaaatgatttgtgttttcagtgtgtggggaagctgtcctgggggctggggcgacagatagcacataggctgtttctggggctgcaggggcttccctgagctggatgttgtgggtgttgccgtgcttcaggaagtgtggcgaccagaaagcgtagacccggggcccagggtctgcccgcccctgcagcctggcctccccgcacaggctgtggcttgcactccagccgctctagtctctcaggaatttgcttgttacttgtactgtgtaaataaagcttcctggttcaataccc

SEQ ID NO: 30002 - DNA, 5934 bp, Homo Sapiens
gtactgtacttaggacgatggtgaacaaagaaaagctctttgcagcgtttgatgaatgggattctgcctcctataggccacactccgagtcttccatacggtacaatctccggactcggtggtgttaggaaagtggcccccggaatggcttgcattccgggtctgggatcctggggtgggcatttgtgccgtcgccttcgccgccgcgctcgccttgcaggagcgggtgcagatggagccaggctgacggttgttcaacaggaacaaatgtttgttcaattgttggatggtggagaaaagggactgtttcctattgactgctgcaggagttggaatggcattgtttattggcctgggaagccaggcaagcgtcttgtgctgcttacaacatattagcagacttccaaatgacatgctagcatatgtgttcccagcagtccccaccggctggcagggagattcctccttgctccagatcctggactcgtttaaaagatgccacctggtttgaggacttgggaaggaatggagtcagccgaccagggagttgaccacatttggccatttcccagaagggccccaccccaagggtgagtggccaatggggagctgtttctgctgacatcaattccccaggaggtactcaccccaagtctgcccaagtgaagatggctgatacccaccctgggatggagcccagcgcctgaggcccttatcatggtgatggtcctaagtgaaagcctcagcacccggggagctgactccattgcatgtgggaccttcagccgtgaactgcacacgccaaagaagatgagtcaaggacctacacttttctcttgtggaattatggaaaatgacagatggcgagacctggacaggaaatgccctcttcagattgaccaaccgagcaccagcatctgggaatgcctgcctgaaaaggacagctcactatggcaccgggaggcagtgaccgcctgcgctgtgaccagtctgatcaaagacctcagcatcagcgaccacaacgggaacccctcagcaccccctagcaagcgccagtgccgctcactgtccttctccgatgagatgtccagttgccggacatcatggaggcccttgggctccaaagtctggactcccgtggaaaagagacgctgctacagcgggggcagcgtccagcgctattccaacggcttcagcaccatgcagaggagttccagcttcagcctcccttcccgggccaacgtgctctcctcaccctgcgaccaggcaggactccaccaccgatttggagggcagccctgccaaggggtgccaggctcagccccgtgtggacaggcaggtgacacctggagccctgacctgcaccccgtgggaggaggccggctggacctgcagcggtccctctcttgctcacatgagcagttttcctttgtggaatactgtcctccctcagccaacagcacacctgcctcaacaccagagctggcgagacgctccagcggcctttcccgcagccgctcccagccgtgtgtccttaacgacaagaaggtcggtgttaaaaggcggcgccctgaagaagtgcaagagcagaggccttctctagaccttgccaagatggcacagaactgtcagaccttcagcagcctcagctgcctgagcgcagggacagaggactgcggtccccagagccccttcgcccgccacgtcagcaacaccagggcctggaccgccctgctctcagcctccggcccagggggcaggacccccgctgggaccccggtccctgagcctcttcccccttccttcgacgaccacctcgcctgccaggaggacctgtcctgtgaggagtcagacagctgcgccctggacgaggattgtggcaggagagcggagccggctgcagcctggcgggaccgcggggcccctgggaacagcctctgctccctggacggcgagttggacattgagcagatagagaagaactgagggggtgtgggcccaggcagggctggggtgtgctggcatcgacagcccccactctgggcactaggtgggcccttgaaggggagcccaactcgtgggcctgatgaaagcttcctgagtggtgtcgggtcccagagagggagcccacctgctgcctgggggagagcctggcctggccgcgtcatacagcgggtgtgtcagcctctcaccggctccccgagcgtggcagccaccaggtccacagaactactgcagcccagaggacagctttgaagtttgcgtcttttctgcctctttccctgtgggatgttgggcagtctctgttgtccccggcagagctgggcaccgctctgtatccccctggtggtgggggctgtcagggagggcctggggtgggggccaggggccatctgctatgtcagggcccttcttggcctcactcaggttcacttctggggagtcggccccgcagcttctttcactcagttttactccgtgccttctctcccaggtctccctgcttcaggcttgggaaggttcgggagatgcttccttctgtaacaccagaaccatttggccttaattccaatgtgagagacagaatccctggggtgctggactggccctccagagggtaagccatgtccggagtctcgggcccaaggaacgatttggagggtgcttgttagggcctcccgtgttgggtagaaatttggtggatctgttggctgaaaagacggacttgcttgcctctcctacagcatggagaggctgaccccatggctctgccaccgttggggcagggttagcagatggcagcccttctctgtggctgacaggtcactgagtgataagcatggttggttccggtgagtgtagggatggcacgataccagggcagcctcttgaaaacggcctcgggagacgggagctgcgagcaggtgggcagatgagggccctatgcgcactcaggggtgaagggcgtccgctggccactctgcaggggcccctgcaggattccaggcacctcccgtttgtccttgaggactgctggctgtaaccagggcacatcacccacctcaagacaagcccacgcccttgtcagcttagggggagcccagtcctgagggctgcatctctgttgtaggcccagccaccggcacaaagctggattcatgctccctgcccctaccccaccctggctcctcaccctggggcatccgaggagcctagccccctgagggtttgctctcctctcaaggtttgtagctcctctccggctgccttgcagacaccaccacatgggctctgctctatgggaatctggcttttagcgaatgtggcgtcttctgcaaacaatagcaattgggctggcttaggagcaagtggctcattttcccataaggctaaaaataactggtgcgctcccttgtgttggctgacacgcgcgttcaaagcacttttgtagtcactttgcttttgctcgtcttcatggacgagtgaacgcctcgcttctgcaggttgagtccagatgcttctcaccttctttctcctcaagaaagatgctttttgggaaacgttgtttaaatcttatttttttactacatcaaaaggatggtggttcaagttcccaatatgtgggtggcacttcttaaaaatcagctttaaggagctggcagaaagcccccagccccacagccctgagagatggtgttgctagctcaggtggctgacacatggggtatgccgggcactgggcaggtcccagagccggggaaccagctcacctctggttgctgtagctcctgccggaggcatgtctacttgtgatcccggacagccgaacccaagagctggtggctctgagcagacagagacatcttggcctgtccctgcctgggggtcatggagaccatgtcttcttagagcaaatgtggaggcggccagggcagttgttgggtgaatgtggagagcacatggccatgtcttgcccccggagtaccactgggcgtggggggtcctggcaccacatgcccggtgtggccgagggcacacagcctctatagcaggccttcctgtggaaggcagaggcagtgagggaggtggacggtgccagctgaggctgaggcatgcagcagcccccagctacctttgcttagggctggggtgggaggcacatggtgacaggtatatgtcgtgggactggggtgtgggtgacctgccctcaaaccttgcctgccacctccccattcaggcctggtggcaggaagggacaagctgtggagctggctgagtcacagccacctccccacctccccgcaagctggtcccatcgaccagcaagcccagccccagggcgcttagggagaaatgacccagcctcctcagaccccgcctgcctgtcctgtgcccaccacgcagcagtcaggggagaaaatggtggctatcccttctgcttagagaaagaaatggcctttagctggtttcatgtttgtgttttgactggagggagtagaccctatctataaggtgccaccccatcatccaagctgccacactgcccggagcagcctgttcctgcactccaccctgctggccccaggacttctgatctcagtcctctgggagggaggttcgcctaggaggtgccccccacattggtgtccccatgggcagcaggcagacagctcacccccaccagcatgatggccccagctgggggcagtggcaggagccttacttttgtcacagccttgcccacaaaccctgcctctgaggggagactgaggaagggcagagccagaagcaagccgtgccaggccatctgcctgctcatggggtcctaaagcgcgggctaagcctgcaggaaagccggggcggtggggggggcttagtgccacatgcaccccactcattccaaagccaccaaactgccaggggctgccgtccacccgtggggcccaggggctggggccacagccttgccattttcgttgccataccctcttgccttactcgcggtggaggccggatttgcacgggcagacgtgcacctgggcccgtggggagcttgttctgaccagacgtacagattttcattctcagaaagccttacttttcaaccaaatttttgtagccagttttgtgaatttgtacactgaaagaaaatttaaataaaggggaagtccacattaaaaagaaaacaaaacaaaccctaactaacttccaaatgggtctcctggtgcgggggcgtgagtggccgtgccctgggtgtgctgcctgtctgagcaagcttccctagctgtggaaccccgggccccctgctgcgggctctgccttggtgtcatgcctgctgcacccccgtttccactgacgtgccgtctgtggctatgggggtggtcactggaatgacggtcactccagacgtcagccggcagggatgcagcaggctggccgcgcaccggggctcgggcaccctctggccccacactggcaatgatgccacaccttgccatgtccacgctgttggtcaaacccctctgtcatgcctctttaaagagaaaagaagagaaagattttttttttttttaatggcagaccgaagtggagatcttgtagcctagataggatagtctgaccttctagcatagtctttttggcaaatgatttgtgttttcagtgtgtggggaagctgtcctgggggctggggcgacagatagcacataggctgtttctggggctgcaggggcttccctgagctggatgttgtgggtgttgccgtgcttcaggaagtgtggcgaccagaaagcgtagacccggggcccagggtctgcccgcccctgcagcctggcctccccgcacaggctgtggcttgcactccagccgctctagtctctcaggaatttgcttgttacttgtactgtgtaaataaagcttcctggttcaataccc

SEQ ID NO: 30003 - DNA, 3425 bp, Homo Sapiens
agcgcctgtgctgccgcgtctcgacgtgtcaccggcggcgccgctgctgtggcaaaggaaggagctgactgggggagttcgaggcggcgggcggcggtgaccccggcctggaactgccccggtacggaagtgttccggggtccgtggggagcaggagagggaggcggcggaccgtcccgcgcggggcacgatgttgaacatgtggaaggtgcgcgagctggtggacaaagccaccaatgttgttatgaattattcagagatcgagtctaaggttcgagaggcaacgaacgatgatccttggggaccttctgggcaactcatgggagagattgccaaggctacatttatgtatgaacaatttccagaacttatgaacatgctttggtcacgaatgttaaaagacaacaaaaagaattggagaagagtttataagtcgttgctgctcctagcttacctcataaggaatggatcagagcgtgttgttacaagtgccagagaacacatttatgatttacgatccctggaaaattaccactttgtagatgagcatggtaaggatcaaggtataaatattcgacagaaggtgaaggaattggttgaatttgcccaggatgacgacaggcttcgtgaagagcgaaagaaagcaaagaagaacaaagacaagtatgttggggtttcctcagacagtgttggaggattcagatacagtgaaagatatgatcctgagcccaaatcaaaatgggatgaggagtgggataaaaacaagagtgcttttccattcagtgataaattaggtgagctgagtgataaaattggaagcacaattgatgacaccatcagcaagttccggaggaaagatagagaagactctccagaaagatgcagcgacagcgatgaggaaaagaaagcgagaagaggcagatctcccaaaggtgaattcaaagatgaagaggagactgtgacgacaaagcatattcatatcacacaggccacagagaccaccacaaccagacacaagcgcacagcaaatccttccaaaaccattgatcttggagcagcagcacattacacaggggacaaagcaagtccagatcagaatgcttcaacccacacacctcagtcttcagttaagacttcagtgcctagcagcaagtcatctggtgaccttgttgatctgtttgatggcaccagccagtcaacaggaggatcagctgatttattcggaggatttgctgactttggctcagctgctgcatcaggcagtttcccttcccaagtaacagcaacaagtgggaatggagactttggtgactggagtgccttcaaccaagccccatcaggccctgttgcttccagtggcgagttctttggcagtgcctcacagccagcggtagaacttgttagtggctcacaatcagctctaggcccacctcctgctgcctcaaattcttcagacctgtttgatcttatgggctcgtcccaggcaaccatgacatcttcccagagtatgaatttctctatgatgagcactaacactgtgggacttggtttgcctatgtcaagatcacagaatacagatatggtccagaaatcagtcagcaaaaccttgccctctacttggtctgaccccagtgtaaacatcagcctagacaacttactacctggtatgcagccttccaaaccccagcagccatcactgaatacaatgattcagcaacagaatatgcagcagcctatgaatgtgatgactcaaagttttggagctgtgaacctcagttctccatcgaacatgcttcctgtccggccccaaactaatgctttgatagggggacccatgcctatgagcatgcccaatgtgatgactggcaccatgggaatggcccctcttggaaatactccgatgatgaaccagagcatgatgggcatgaacatgaacatagggatgtccgctgctgggatgggcttgacaggcacaatgggaatgggcatgcccaacatagccatgacttctggaactgtgcaacccaagcaagatgcctttgcaaatttcgccaattttagcaaataagagattgtaaaagaagcagattgaatgaagaatttttagctgtgcagataggtgatgttgggatggaaaatgctaatcaactaccctttcttttatcaagtaattaaaataaatctacataaagaaccaaaaaggctgttttataaaagtgaaatatccagtatttcagagggccaggcaagagcacttcagatgaggcagtcaaaatcatttttttccagtgaggatagaccacaagtgggtggtgagaccattgaaagcctttatcaactgaagagtccatttaacagcataatttgtgggaagactggaatagggctgaataaatgtgtttgaatctctaattttatactttcttttcctgaggaacttgatttttctgtccctggatcgccttgtcataattgggtctgttccttttactaccactcttgagtccatatatgaaatcattaaagttggatgatcagttttttataaaaatatatatttttgtccaagaaaaaaaaaagcatacatatgtgattatggctaaatcaaaggtaactggaatgtatatacttttgctaatgttccagcaacactgctattatactatccaaatttttattgtaacaaaacctctttaagcaattggtgattgccatgggacttttcccatgtcttctgctgtaattatcctgtgcagaactaggaagaaatttttttcaggactgctctatggtttcctttaaaagaaaaaaacttctgtttgtttttagcagtcattatttacaatttgcagtgattaacttggcaaggcttccttccgtgtttatccctgtagccatcatttaagtcaggaacagtcagaaaaatatttattttattttttttttgggtgtctgcaaaggtaaaaatccattaaaaccttaagttaaatataaatgttacaactcaatgtttgcttttagattttatacagtatttgttttgttttggttttgagtgtatataatgcagcattagcaatatggttccaatagaggagttaaatatatattgttaaaggagacctgtagcagtcaaagattttattgatttaatgacaaaggaaattaatgaaaatgtttttgtttttctgctgtaattctgcattaagctcacatgaaaatcatgattctagagtttggaatgcaaaattaattgttttaccctcaagctgggaatatttttcaaaataaatactataatatagatatcaaattattacctccccatgttatgttgaaaatttttttattaaattgataaaactttatttccattatattcataatgttctgttatacataacattaaaatgttcattaaaatc

SEQ ID NO: 30004 - DNA, 6072 bp, Homo Sapiens; identical to SEQ ID NO: 28757

SEQ ID NO: 30005 - DNA, 3327 bp, Homo Sapiens
ccattttggagcgatcggagtgccgcccgcggccccgagtcggtctcgagccgccggccggccgtgccggtgtccgtaggcgctgcgccctcggccgggcccatgtgtgtgcggcccgcccgaggccgcccgggctttgcctccaccagcgccctggcctccgctcgggcctccacacgggcctccgaagagctgccgcgacgcccggcccgcagggcaggtaaagagattataaatcttccactgaatgaaaaaaattttcttaaagctgcatatactccaagaaaaaaaccacaaatgtttttctgttttgcctgaatacatgatttaaacaagagatttccacagaagctctgcggccgtcacgatgttctggaagtttgacttgaacaccacgtcccatgttgacaagctgctggacaaggagcatgtgacgctgcaggagttaatggatgaagatgacatcttgcaggagtgtaaggctcagaaccagaagctgctggacttcctgtgcaggcagcagtgcatggaggagctggtgagcctcatcacacaggatccgcccctggacatggaggagaaggtccgcttcaaatatccaaacacagcctgtgagcttctgacttgtgatgtgccgcagatcagcgaccgcctcggtggggacgagagcctgctgagcctcctgtacgacttcttggaccatgagccgcctctcaatcctctgctcgccagttttttcagcaagaccattggcaatctcattgcaagaaaaaccgaacaggtgattacgtttttgaagaagaaggacaagttcatcagcctggtgttgaagcacatcggcacctcagcgcttatggacctgctgctgcgcctggtcagctgtgtggagccagccgggctccggcaggacgtcctgcactggctgaatgaagagaaggtcatccagaggcttgtggagttgatccacccgagccaggatgaagataggcagtcaaatgcttctcagactctctgtgacatagttaggctgggcagagaccagggcagtcagctgcaagaggctctggagccagacccgctcctcacagcgctggagtcgcaggactgtgtggagcagcttctgaagaacatgtttgatggagaccggacggagagctgcctcgtcagtgggactcaggtgttactcaccttgctggaaaccaggcgggttgggacagagggcttggtggactccttttctcagggactggaaaggtcatacgctgtcagcagcagcgtactacacggcatcgagcctcggctgaaggacttccaccagctcctgctcaacccgcccaagaagaaagcgatcctgaccaccattggtgtgctggaggagcccctggggaatgcccgtctgcatggcgcccgcctcatggcagcactgctgcacacaaacacacccagcatcaaccaggagctctgccggctcaacacgatggacttactgctggacttgttctttaagtacacctggaataactttttgcacttccaagtggaactatgcatagccgctattctctcccacgctgcccgtgaggagaggacagaagccagcggatccgagagcagggtggagcctccgcatgagaacgggaaccggagcctggagactccccagccggccgccagcctccctgacaacacaatggtgacccacctgttccagaagtgctgcctggtgcagaggatcctggaggcctgggaagccaacgaccacacgcaggcagcgggtggcatgagacgtgggaacatgggccacctcacacggatcgccaacgcggtggtgcagaacctggagcggggccctgtgcagacgcacatcagcgaggtcatccgagggctccctgcggactgccgtggccgctgggagagcttcgtggaggagacgctgacggagacgaaccgcaggaacactgtggacctggccttctctgactaccagatccagcagatgacagccaacttcgtggatcagtttggcttcaatgatgaggagtttgccgaccaggacgacaacatcaatgccccgtttgacaggatcgcagagatcaacttcaacatcgacgctgacgaggacagtcccagcgcagctctgtttgaggcctgctgcagtgaccgcatccagccctttgatgatgatgaggacgaggacatctgggaggacagtgacactcgctgtgctgcccgggtgatggccagacccaggtttggagccccccatgcttcagagagttgctcaaagaatggcccagagcgtggaggccaggatgggaaggcgagcttggaagcacacagagatgcacctggggcaggtgccccaccggcccccgggaagaaggaagcgccccctgtggagggtgactcagaaggcgccatgtggacggcagtgtttgatgagccagcgaactcaacgcccacagccccaggagtggtgagggacgtgggttccagtgtgtgggcagctggcacctcagctccagaggagaaaggctgggccaagttcactgacttccaacctttctgctgctccgagtcagggcccaggtgcagctctccggtggacacagaatgcagccatgctgagggcagccggagccaaggccctgagaaagccttcagcccggcttctccatgtgcctggaacgtgtgtgtcaccaggaaggcccccctgctggcctctgacagtagctcctctgggggctcccacagcgaggatggcgaccagaaggcagcgagtgccatggatgcggtgagcaggggtcccggccgggaggcccccccgctgcccacagtggccaggacagaggaggctgtcggcagggtcgggtgtgctgacagccggctgttaagccctgcctgccccgcgccaaaggaagtgactgctgccccagccgtggctgtgccccccgaggctactgtggccatcaccacagcactgagcaaggctggccccgccatacccaccccagcagtctcttctgcactggccgtggcggtccccctagggcccatcatggcagtcacagcagccccagccatggtggccaccctggggacagtgacaaaggacgggaagacagatgccccgccagaaggagctgccttaaatggcccagtgtgatgctgctgccgcccggccacggcccaccctggtcaggctgcctccttaatcgagaaaactacctggtgatgcaatcttttttttttttaatttaatttaattttaaaataaatgctgcattggtaaagctggcagttgaaaccaaaaaaaaaaaaaaaaaa

SEQ ID NO: 30006 - DNA, 6639 bp, Homo Sapiens
caggaaaggacttagaagccttacaaatacatctgtgcattcttgcttcagactttacaactgagggccagcccagtctggaagcatctcttattaatgttacaaggaaaccgctacctcagcaaacaaaaggaatggaggaggagacttacaacaaacgccatttaaaaaaaaaagaaaaacttgttttcaggaaacattagaggaaatttggagaatttcagcattgcatagaagcagccttacaggtaaacggatttgacgggcaggctctgtcaaaattctgcagaagtttgatcttccttcttaaggactttgtgtgaagtaattctttactgcttttaaattgctgttgatcagcttctgggtttttgggttctaacttttttgggtatattgaagacacagtgtattacattatattacatttttaaacgttaagttatttttctgccattgtaaatacaagtatcaaaatattcttgcaaagaagtaaacatttttctcagcaagcatatccttttagtaagagagtggaatgctaaacagttcttatccagcattttggacatcttttattttttgtcagagatcctgtctacactgaaaatattaattatataaacctgttgtctctcacctctacattggatcacatggtcacctgcctcatggaaatgccttttttaaaacttcgatttgcagaactccactatttttatacctagctacagttttgagaaagaagaatcagaaccctgacccacttacggttgctgggacaattccccctcccgcatgtattgctgcagtgcccaggacagtaaaatggactacaagcggcgcttcctgcttggcgggtccaagcagaaggtgcagcagcaccagcaatacccgatgcctgagctgggccgagcactgagtgctcccctggcatccacggccaccactgcccccctgggcagtctgaccgctgcaggcagctgccaccatgccatgccccacactactcctatcgccgacatccagcagggcatctccaagtatctggatgccctgaacgtcttctgccgtgccagtactttcctcacagatctcttcagcactgtgttcaggaactctcactactcaaaggcagccacacagctcaaagatgtgcaggagcatgtcatggaagcagccagtcggctgacctcggccataaagcctgagatcgccaagatgctaatggaacttagtgctggggctgcaaattttacggatcagaaggaattcagtctccaggacattgaggtgttggggcgatgtttcctgactgtggtgcaagtccatttccagtttttgactcatgcgttacagaaggtccagccggtggctcactcttgctttgctgaggtcatcgtgccagaaaaaaagaacagcggcagtggcggcggcttatctggcatgggccacacacctgaagtagaggaagctgtgcggtcctggcggggggctgctgaggcgacatctagactaagagaaagaggctgtgatggttgcctggcaggaattgaagttcaacaactcttttgttctcaaagtgcagcaattcctgagcaccagctaaaagaactgaacataaaaatcgacagtgctttgcaagcatataagatagctctggaaagcttaggacactgtgaatatgcaatgaaagccggcttccacctgaatccaaaggcgattgaagcaagtttgcagggctgctgcagcgaggcggaagcccagcagacggggcggaggcagacacccccgcagcccatgcagtgtgagctccccaccgtccctgtgcagataggatcgcacttcctgaagggcgtctcctttaatgagtcggccgccgacaatctgaaacttaagacgcatacaatgttacagctgatgaaggaggcaggctgctataatggaatcacatccagggatgattttcctgtgactgaagtgctgaaccaggtttgcccttccacatggcgaggtgcctgcaagacggcggtgcagctgctgtttggccaggctggactggtggtggttgacacagcacagattgagaataaagaagcctatgccccccagatcagtttagaaggctctagaatcgtggttcaagtcccatccacatggtgcctgaaagaagaccctgctaccatgtccctgctgcagagaagccttgatcctgagaagaccctgggtctagtggacgtgctctacacagctgtgctggacctaaaccgctggagggctggaagggagcaagctttaccctgcatacagatccagctgcaaagggagatctgtgattttggcaaccaggctgacctgccttctggaaatggaaacaaatcttcaggtggcctgcagaagacattctccaaactgacatcccggttcaccaagaaagcttcatgtaccagctccagcagcagcacaaattattccatccaaaataccccttccaaaaacatcttcatagctggatgttccgaagagaaggccaaaatgcctggcaatattgatacaaggttacaaagcattttgaacattggtaatttccccaggactacagacccttcacagtcagctcagaattccagtaatacagtggccaatggctttctcatggagaggcgtgagaacttcctgcatggagatgacggcaaggatgagaagggtatgaacttaccaactgatcaggaaatgcaagaggtgatagattttctctcgggctttaacatgggccagtcacatcagggctctccgttggtgacaaggcataattctgctgccacagccatggtgactgagcagaaggcaggagccatgcaaccacagcagccgtcactgcctgtgccccctccaccacgggcaccccaggctggggcacacacacctctgacaccccagccgggactggcacctcagcagcagtccccaaagcagcaacaacctcaagtccaatactaccaacacctactccagcccattggaccgcagcagcccccgccccagcctcgggcacctgggaaatgggtacatggctcatcccagcagccagcgcaggctgttggagcaggtctgtctcctcttggtcagtggcctggcatatctgatctcagttctgacttgtacagcttgggtctggtgagcagctatatggataatgtgatgtcagaggttctgggacagaagccgcagggacctagaaataacacctggcccaaccgtgaccaaagtgatggagtctttggaatgctgggagagattctgccttttgatcctgcagtgggctcagacccagagtttgcacgctatgtggcaggagtgagccaggcgatgcagcagaagcggcaggcccagcacggtcgccggccaggcaacccccggggcaactggccgcctatggatgacgcgcatcggacctggcccttccccgagttcttcacagaaggggatggcctgcacggtggctggtcgggtgctcagggagactctgccagctcgagtgatgagacatcctcagccaacggggacagcttgttctccatgttttcagggcctgacctcgttgctgctgtcaagcagagaaggaaacacagcagtggagagcaagacaccagcacgctgccctcaccacctctcctcaccacggtggaggatgtgaaccaggataacaaaaccaaaacgtggccacccaaagcaccctggcagcacccttccccgcttcccagcacgctgcccagccccagcgcaccactctatgcagtcaccagccctggcagccagtggaacgacaccatgcagatgctgcagtccccagtgtgggccgcaaccaacgactgcagtgccgctgccttctcctatgtgcagaccccaccccagcccccacccccaccagcacacaaggcagcacccaagggcttcaaggccttccctgggaagggtgagcgcaggccagcctatctgccccagtactgaccccaggccagccagcctgcctgcctgcctgcctgcccgcccagagctgtggggatgagtgtccccaccccagggccacttagctgacaccagcccctcagaggaccagtgcgccccatcccagggagggttccttggggacaagggtggttggcagctccaagcctttaaacctggcttctgaaacgatggcatcagagccctggagagccagctggagacacaggcgtctggccttcaggggcttgctagggaacctgcatgcctagtaagcgccacaggtgactctgatgcaggcgccacagccacacttgaagaaacacagctcttgggtttttagtcctgctgtgtgttgggaagacatcaggcctgaaagctgagggcataactgaccattttttggaaaccctctcctccctcctccacaccttgagtgatgaccacaccaatcactgtattttatagctttttttttcatgtaggtttttagttaaaacatctcctgcctaaaatgcattgaatattttaagataacagatatactggctggaggtttgtttaacactatctatatttaagcttatacaaaatgggcaaaatatagaatatttgtgattggaagcagtcacctggggtttctgggggtggacagttcctcgccacccagcagcaccctgggactgcggcctttcccagctttattgaagcagaatggtggaacttgtgccggaggtacactgctgaaggtgcgtggcggtggaccagccagctgctgtccatgtgcagagcaaggctgcacctgctgcccttcgatccttccacacatggccaggacactgccacaatcctcggggtgtggtcaaggggcactcagagacacctgcactagaaattgcattgacattgtgagctggctcagaagacaaaccaattaagatgtagatagaaattaatttaaggtcttttcttaaaaaaaaaatccacctcattttcagttaacatgtgccattaaatagataacatcctgtggatttagggatattttccagccagaatggatccagaagaattgaatggtgcttaaattgagaaataataataaatatatctatatagaatagacatatcccactgtatattaattgaggttacagaaagttctttatataaaacttatttaaatttttcatatttcatctttgaaaaagtctgagaaaaatccataatattttctggtatgaaagtttgacagtattaatattttttttatattttcttaaatcattaaaccattttaatatatgttaactactaataaatggtttattctttctaactccatataagcttttccagcaaagattgtaataacacatttatgttctcgtttttctacagatataagtaaatttatatataaaaataccaaaaagaggctgggcgtggtggctcacgcctgtaatcccagcactttgggaggccgaggcaggtggatcacctaaggtcaggagttcgagaccagcctggccaatatggtgaaaccccatctctactaaaaatacaaaaattagccgggtgtggtggcgtgcgcctgtagtcccagctactcgggaggctgaagcagaagaatcgcttgaacccgggaggcggaggttacagtgagctgagattgtgccactgcactccagcctgggtgacagagtgagattccgtctcaacaagaaaaaaaaaaaagaatatatatatatgtatgtatgtatgtatgtaaacacacacactaatttgagaggacccgtagggtgtctgagcccagccacctgagtttttagtactgtgttgtcaggctcttcccaggcctcaggtgttgtcttttgtgctgtgtggggatgcattgctgcctgtatttatgatcttttgccgtggttctgagcattcacctcaccatgtttacaaagaactgttttgtatatagacattttcaggcacgtgctttgcaccaaccctgcgtggctcttgtctgtgttagctgtcacggtgtgcacactaatctctgttaaagttgtctatggctgttctacttgtaagatagttttctatttccttcagtaatgtgtccacagtaccctgtatttcgagttccattatactgaagtactcatgttttaatagtgcctctccaaaggcctcaccttggacagaggtcaatccttgatgctccagcacaggtgacgtcactaattgtcactttccagtttgtttttctctattaaggaagacattttctaattgcatctccatgggctgtgagactgtgtgaagccgtttgtgtggtctccatgtaggtgctgtgttcccggcaccgccttgctctgaacactggtaattccaggtgctgcgcttggcagaggggtctcgccaaagcgcatgtgtgtgcatgtgtgaacgtgtgtgtcctttgcatggttgggcgtgggtgccttgctagggcatcagcaggacattgtgtgtatagttacaatgcttccaaactggaactctacattttgtatcttttaaagctcctataagtaaaataactattggctttattaaaaatatacatttaataataaaaaaaaaaaaaaaaaa

SEQ ID NO: 30007 - DNA, 6639 bp, Homo Sapiens; identical to SEQ ID NO: 30006

SEQ ID NO: 30008 - DNA, 6615 bp, Homo Sapiens
gaaaggacttagaagccttacaaatacatctgtgcattcttgcttcagactttacaactgagggccagcccagtctggaagcatctcttattaatgttacaaggaaaccgctacctcagcaaacaaaaggaatggaggaggagacttacaacaaacgccatttaaaaaaaaaagaaaaacttgttttcaggaaacattagaggaaatttggagaatttcagcattgcatagaagcagccttacaggtaaacggatttgacgggcaggctctgtcaaaattctgcagaagtttgatcttccttcttaaggactttgtgtgaagtaattctttactgcttttaaattgctgttgatcagcttctgggtttttgggttctaacttttttgggtatattgaagacacagtgtattacattatattacatttttaaacgttaagttatttttctgccattgtaaatacaagtatcaaaatattcttgcaaagaagtaaacatttttctcagcaagcatatccttttagtaagagagtggaatgctaaacagttcttatccagcattttggacatcttttattttttgtcagagatcctgtctacactgaaaatattaattatataaacctgttgtctctcacctctacattggatcacatggtcacctgcctcatggaaatgccttttttaaaacttcgatttgcagaactccactatttttatacctagctacagttttgagaaagaagaatcagaaccctgacccacttacggttgctgggacaattccccctcccgcatgtattgctgcagtgcccaggacagtaaaatggactacaagcggcgcttcctgcttggcgggtccaagcagaaggtgcagcagcaccagcaatacccgatgcctgagctgggccgagcactgagtgctcccctggcatccacggccaccactgcccccctgggcagtctgaccgctgcaggcagctgccaccatgccatgccccacactactcctatcgccgacatccagcagggcatctccaagtatctggatgccctgaacgtcttctgccgtgccagtactttcctcacagatctcttcagcactgtgttcaggaactctcactactcaaaggcagccacacagctcaaagatgtgcaggagcatgtcatggaagcagccagtcggctgacctcggccataaagcctgagatcgccaagatgctaatggaacttagtgctggggctgcaaattttacggatcagaaggaattcagtctccaggacattgaggtgttggggcgatgtttcctgactgtggtgcaagtccatttccagtttttgactcatgcgttacagaaggtccagccggtggctcactcttgctttgctgaggtcatcgtgccagaaaaaaagaacagcggcagtggcggcggcttatctggcatgggccacacacctgaagtagaggaagctgtgcggtcctggcggggggctgctgaggcgacatctagactaagagaaagaggctgtgatggttgcctggcaggaattgaagttcaacaactcttttgttctcaaagtgcagcaattcctgagcaccagctaaaagaactgaacataaaaatcgacagtgctttgcaagcatataagatagctctggaaagcttaggacactgtgaatatgcaatgaaagccggcttccacctgaatccaaaggcgattgaagcaagtttgcagggctgctgcagcgaggcggaagcccagcagacggggcggaggcagacacccccgcagcccatgcagtgtgagctccccaccgtccctgtgcagataggatcgcacttcctgaagggcgtctcctttaatgagtcggccgccgacaatctgaaacttaagacgcatacaatgttacagctgatgaaggaggcaggctgctataatggaatcacatccagggatgattttcctgtgactgaagtgctgaaccaggtttgcccttccacatggcgaggtgcctgcaagacggcggtgcagctgctgtttggccaggctggactggtggtggttgacacagcacagattgagaataaagaagcctatgccccccagatcagtttagaaggctctagaatcgtggttcaagtcccatccacatggtgcctgaaagaagaccctgctaccatgtccctgctgcagagaagccttgatcctgagaagaccctgggtctagtggacgtgctctacacagctgtgctggacctaaaccgctggagggctggaagggagcaagctttaccctgcatacagatccagctgcaaagggagatctgtgattttggcaaccaggctgacctgccttctggaaatggaaacaaatcttcaggtggcctgcagaagacattctccaaactgacatcccggttcaccaagaaagcttcatgtaccagctccagcagcagcacaaattattccatccaaaataccccttccaaaaacatcttcatagctggatgttccgaagagaaggccaaaatgcctggcaatattgatacaaggttacaaagcattttgaacattggtaatttccccaggactacagacccttcacagtcagctcagaattccagtaatacagtggccaatggctttctcatggagaggcgtgagaacttcctgcatggagatgacggcaaggatgagaagggtatgaacttaccaactgatcaggaaatgcaagaggtgatagattttctctcgggctttaacatgggccagtcacatcagggctctccgttggtgacaaggcataattctgctgccacagccatggtgactgagcagaaggcaggagccatgcaaccacagcagccgtcactgcctgtgccccctccaccacgggcaccccaggctggggcacacacacctctgacaccccagccgggactggcacctcagcagcagtccccaaagcagcaacaacctcaagtccaatactaccaacacctactccagcccattggaccgcagcagcccccgccccagcctcgggcacctgggaaatgggtacatggctcatcccagcagccagcgcaggctgttggagcaggtctgtctcctcttggtcagtggcctggcatatctgatctcagttctgacttgtacagcttgggtctggtgagcagctatatggataatgtgatgtcagaggttctgggacagaagccgcagggacctagaaataacacctggcccaaccgtgaccaaagtgatggagtctttggaatgctgggagagattctgccttttgatcctgcagtgggctcagacccagagtttgcacgctatgtggcaggagtgagccaggcgatgcagcagaagcggcaggcccagcacggtcgccggccaggcaacccccggggcaactggccgcctatggatgacgcgcatcggacctggcccttccccgagttcttcacagaaggggatggcctgcacggtggctggtcgggtgctcagggagactctgccagctcgagtgatgagacatcctcagccaacggggacagcttgttctccatgttttcagggcctgacctcgttgctgctgtcaagcagagaaggaaacacagcagtggagagcaagacaccagcacgctgccctcaccacctctcctcaccacggtggaggatgtgaaccaggataacaaaaccaaaacgtggccacccaaagcaccctggcagcacccttccccgcttcccagcacgctgcccagccccagcgcaccactctatgcagtcaccagccctggcagccagtggaacgacaccatgcagatgctgcagtccccagtgtgggccgcaaccaacgactgcagtgccgctgccttctcctatgtgcagaccccaccccagcccccacccccaccagcacacaaggcagcacccaagggcttcaaggccttccctgggaagggtgagcgcaggccagcctatctgccccagtactgaccccaggccagccagcctgcctgcctgcctgcctgcccgcccagagctgtggggatgagtgtccccaccccagggccacttagctgacaccagcccctcagaggaccagtgcgccccatcccagggagggttccttggggacaagggtggttggcagctccaagcctttaaacctggcttctgaaacgatggcatcagagccctggagagccagctggagacacaggcgtctggccttcaggggcttgctagggaacctgcatgcctagtaagcgccacaggtgactctgatgcaggcgccacagccacacttgaagaaacacagctcttgggtttttagtcctgctgtgtgttgggaagacatcaggcctgaaagctgagggcataactgaccattttttggaaaccctctcctccctcctccacaccttgagtgatgaccacaccaatcactgtattttatagctttttttttcatgtaggtttttagttaaaacatctcctgcctaaaatgcattgaatattttaagataacagatatactggctggaggtttgtttaacactatctatatttaagcttatacaaaatgggcaaaatatagaatatttgtgattggaagcagtcacctggggtttctgggggtggacagttcctcgccacccagcagcaccctgggactgcggcctttcccagctttattgaagcagaatggtggaacttgtgccggaggtacactgctgaaggtgcgtggcggtggaccagccagctgctgtccatgtgcagagcaaggctgcacctgctgcccttcgatccttccacacatggccaggacactgccacaatcctcggggtgtggtcaaggggcactcagagacacctgcactagaaattgcattgacattgtgagctggctcagaagacaaaccaattaagatgtagatagaaattaatttaaggtcttttcttaaaaaaaaaatccacctcattttcagttaacatgtgccattaaatagataacatcctgtggatttagggatattttccagccagaatggatccagaagaattgaatggtgcttaaattgagaaataataataaatatatctatatagaatagacatatcccactgtatattaattgaggttacagaaagttctttatataaaacttatttaaatttttcatatttcatctttgaaaaagtctgagaaaaatccataatattttctggtatgaaagtttgacagtattaatattttttttatattttcttaaatcattaaaccattttaatatatgttaactactaataaatggtttattctttctaactccatataagcttttccagcaaagattgtaataacacatttatgttctcgtttttctacagatataagtaaatttatatataaaaataccaaaaagaggctgggcgtggtggctcacgcctgtaatcccagcactttgggaggccgaggcaggtggatcacctaaggtcaggagttcgagaccagcctggccaatatggtgaaaccccatctctactaaaaatacaaaaattagccgggtgtggtggcgtgcgcctgtagtcccagctactcgggaggctgaagcagaagaatcgcttgaacccgggaggcggaggttacagtgagctgagattgtgccactgcactccagcctgggtgacagagtgagattccgtctcaacaagaaaaaaaaaaaagaatatatatatatgtatgtatgtatgtatgtaaacacacacactaatttgagaggacccgtagggtgtctgagcccagccacctgagtttttagtactgtgttgtcaggctcttcccaggcctcaggtgttgtcttttgtgctgtgtggggatgcattgctgcctgtatttatgatcttttgccgtggttctgagcattcacctcaccatgtttacaaagaactgttttgtatatagacattttcaggcacgtgctttgcaccaaccctgcgtggctcttgtctgtgttagctgtcacggtgtgcacactaatctctgttaaagttgtctatggctgttctacttgtaagatagttttctatttccttcagtaatgtgtccacagtaccctgtatttcgagttccattatactgaagtactcatgttttaatagtgcctctccaaaggcctcaccttggacagaggtcaatccttgatgctccagcacaggtgacgtcactaattgtcactttccagtttgtttttctctattaaggaagacattttctaattgcatctccatgggctgtgagactgtgtgaagccgtttgtgtggtctccatgtaggtgctgtgttcccggcaccgccttgctctgaacactggtaattccaggtgctgcgcttggcagaggggtctcgccaaagcgcatgtgtgtgcatgtgtgaacgtgtgtgtcctttgcatggttgggcgtgggtgccttgctagggcatcagcaggacattgtgtgtatagttacaatgcttccaaactggaactctacattttgtatcttttaaagctcctataagtaaaataactattggctttattaaaaatatacatttaat

SEQ ID NO: 30009 - DNA, 5180 bp, Homo Sapiens
caaagctcttggctcgctagctcagccccaacgcctgcatgaacttccggctacacgccattccgcttcccgaggaacgcttgggctgttgtacgggttccctacgggactctgaaggctgaggatatccggcccggagcgtttgtgcggcgcggagttaagcgccccggcagtaacttaagggaagtggaccagggttgccgctgcccagagcggtcctttagtttccactggagtggagggaagagtgctgccatggcagcccctgcgcagcccaagaagatcgtggcccctacggtgtcccaaatcaatgcggagttcgtgacccagttagcatgtaaatactgggctccccacatcaagaagaaatcaccttttgatataaaggttattgaagatatatatgaaaaagagattgtcaaatcaaggtttgctattagaaagataatgctcttggaatttagccagtatcttgaaaattatctctggatgaattattctcctgaggtatctagcaaggcctatttaatgtcaatctgctgtatggtgaatgagaagtttagagaaaacgtgcctgcatgggagatttttaagaagaagccagaccacttcccattcttttttaaacacatcttgaaggcggcattagctgaaactgatggtgaattttcacttcatgaacagacagtcttactactttttcttgatcattgcttcaatagtttggaagtagacttgatacgaagtcaagtacagcagcttatctccctcccaatgtggatgggcttacagctggcacgattggaattagaattaaaaaagacacctaagctaagaaaattctggaacttgattaaaaagaatgatgaaaagatggatccagaagcaagagaacaggcatatcaagagaggagatttctttcacaactcatccagaagtttatctctgtgctgaaatcagtcccactttctgaacctgtcactatggacaaagttcattactgtgaaagattcattgaacttatgattgatctagaggccctgctacccacaaggcgctggtttaataccatcctggatgattcccaccttctggttcactgttacctttccaatcttgttcgtagagaagaggatggccatcttttttcccagcttttggacatgcttaaattctatactggttttgaaattaatgaccaaactggaaatgctctgacagagaatgagatgaccacaattcactatgatagaattacttctctacagagagctgcttttgcacattttcctgaactctatgattttgccctctcaaatgtggcagaagtagatactcgggagtccttggtcaagttttttggacctcttagttcaaacacactccaccaggtggcatcatacctctgcttgttgccaactcttcctaaaaatgaagacacaacttttgataaagaatttcttctagaattgctggtatctcgtcatgaacgtcgaatttctcagattcagcagttgaaccagatgcctttgtatccaactgagaaaattatatgggatgaaaatattgtcccaactgagtactattctggagaaggttgtcttgctcttcccaaattgaatttgcagtttttgactcttcatgactacctgctaaggaactttaacctcttccgcttagaatcaacttatgaaattcgtcaggacattgaagatagtgtcagcagaatgaagccatggcaatctgaatatggcggtgtagtgtttggtggttgggcgcgaatggcccagcccattgtggctttcactgtcgttgaagtggccaaacccaacataggtgaaaactggccaacccgagttcgtgcagatgttaccataaatctcaatgtcagagatcacatcaaagatgaatgggaaggtcttcgtaagcatgatgtatgctttttaattaccgtacgtcccacaaaaccttatggcactaagtttgaccggaggagaccttttattgagcaggttggcctggtttatgtcagaggctgtgaaattcagggcatgctggatgataaaggacgtgtcattgaagatggacctgaacccagacccaatcttagaggagaatcaaggacatttagagtgtttttggatccaaaccagtatcaacaagatatgaccaatactatacaaaatggagcagaggatgtgtatgaaacttttaatataataatgaggagaaaaccaaaggaaaataactttaaggctgtgctggagactattcggaacctgatgaatactgattgtgtggtacctgactggctgcacgatatcattttaggttatggggacccaagtagtgcacattattcgaaaatgcccaatcagattgccacccttgatttcaatgatacatttctctccattgagcatttaaaagccagcttccctggtcataatgttaaagtaactgtagaagaccctgctctacaaataccccctttcaggataacttttccagtaagaagtggaaaagggaagaaaaggaaagatgcggatgtggaagatgaagacaccgaggaagcaaaaaccttaattgttgagccccatgttattcctaataggggtccttatccttataatcaacccaaacgtaatacgattcagttcactcatacacagatagaagccatccgtgctggaatgcagcctgggctgactatggttgtgggcccacctggtacaggcaaaacagatgtggcagttcagatcatatccaacatctaccacaacttcccagaacagaggactctaattgttactcattccaatcaggccctaaaccagttgtttgagaaaatcatggcattagacattgatgagcgccacctactgcgtcttggtcatggagaagaagagctggagacagagaaagatttcagcaggtatggaagagttaattatgttctggctcgaagaatagaacttttagaagaagtcaaacgattgcaaaagagtctaggggttccaggagatgcctcatatacctgtgaaactgcaggctatttcttcttataccaggtaatgtctcgctgggaagagtatatcagcaaagtgaaaaataaaggtagtacattgccagatgttacggaagtctccactttcttccctttccatgaatactttgcaaatgctcctcaacccatttttaaaggaagatcttatgaagaagacatggaaattgctgaaggatgtttcaggcatattaagaaaatctttacgcagcttgaggaattcagagcctctgaattgcttcgaagtggactggacagatctaaataccttttagtgaaagaagccaaaattattgctatgacctgtactcatgctgccttaaaacgacatgacttggtcaagctaggtttcaagtatgacaacattttgatggaagaggctgctcagattctggagatagaaacttttatccctcttcttctacagaatcctcaggatggatttagccgactaaaacgatggattatgattggcgatcatcaccagttacctccagttattaagaacatggcctttcaaaagtactcaaacatggagcagtctctcttcactcgctttgttcgcgttggagttccgactgttgaccttgatgctcaagggagagccagagcaagcttgtgcaacctctacaactggcgatacaagaatctaggaaacttaccccatgtgcagctcttgccagagtttagtacagcaaatgctggcttactgtatgacttccagctcattaatgttgaagattttcaaggagtgggagaatctgaacctaatccttacttctatcagaatcttggagaggcagaatatgtagtagcactttttatgtacatgtgtttacttggttaccctgctgacaaaatcagtattctaacaacatataatggccaaaagcatcttattcgcgacatcatcaatagacgatgtggaaacaatccattgattggaagaccaaacaaggtgacaactgttgatagatttcaaggtcaacagaatgactatattcttctttctctggtacgaaccagggcagtgggccatctgagggatgtccgtcgcttggtagtggccatgtctagagccagacttggactttatatcttcgccagagtatccctcttccaaaactgttttgaactgactccagctttcagtcagctcacagctcgcccccttcatttgcatataattccaacagaacctttcccaactactagaaagaatggagagagaccatctcatgaagtacaaataataaaaaatatgccccagatggcaaactttgtatacaacatgtacatgcatttgatacagactacacatcattatcatcagactttattacaactaccacctgctatggtagaagagggtgaggaagttcaaaatcaagaaacagaattggaaacagaagaagaggccatgactgttcaagctgacatcatacccagtccaacagacaccagctgccgtcaagaaactccagcctttcaaactgacaccacccccagtgagacaggagccacttccactccagaagccatccctgctttatctgagaccacccctactgtggtaggagctgtatctgcaccggcagaagctaacacacctcaggatgccacatctgccccagaagagaccaagtagccaaactgtagtccttctaaaggaggacatggcagtcaaaaagtctgagtaaagctgttttttgtattttatatttgcttctgccattttactgtcactaattaatgtttagttcttatatttgttaactgatttcggtgtcttgaatatatttttttaaattatgtgtatgaacaattctagtttcatttgttcaatcagaagagcaaataaccattcctttcatgttttgatcactgagtgtgtctgtaatcatacctacattaaaatcattttctatgaatatataatatatacttcacatttttagtgaacttctctaaagaagaggacagaatatactggacttaaccacgaatacccttgagtgtccaaattgggaaggaacttgtttcttctgttatactatcaaatgcttaaattctgtttccttttttcttaaaaaaaaaaaaaaaaaaaaaaaaaaa

SEQ ID NO: 30010 - DNA, 3740 bp, Homo Sapiens
cgccgtctgccctccgcagcgctcgcccctttctctgggaggacaacctgctgacccgaagccagggtctgccagacaaccacgaccaactagtcccagataaccttgaggcctgggcactggctgggccccgagggctcttcccaaagcgtaccctggtcatctggaagaggatcggagctggcctggtggtgacagtggccttgcttcctaggatggatggcagatggcaatgttcctgctgggcctggttcctgctggttctggcagttgtagctggggacacagtgtcaaccgggtccacggacaacagcccaacatccaatagcctggaggggggcaccgacgccacggccttctggtggggggagtggaccaagtggacggcgtgttcccgcagttgcgggggtggggtgacatcccaggagcggcactgcctgcagcagaggaggaagtccgtcccgggccccgggaacaggacctgcacgggcacgtccaagcggtaccagctctgcagagtgcaggagtgtccgccggacgggaggagcttccgcgaggagcagtgcgtctccttcaactcccacgtgtacaacgggcggacgcaccagtggaagcctctgtacccggatgactatgtccacatctccagcaaaccgtgtgacctgcactgtaccaccgtggacggccagcggcagctcatggtccccgcccgcgacggcacatcctgcaagctcactgacctgcgaggggtttgcgtgtctggaaaatgtgagcccatcggctgtgacggggtgcttttctccacccacacactggacaagtgtggcatctgccagggggacggtagcagctgcacccacgtgacgggcaactatcgcaaggggaatgcccaccttggttactctctggtgacccacatcccggctggtgcccgagacatccagattgtagagaggaagaagtccgctgacgtgctagctcttgcagatgaagctggctactacttcttcaacggcaactacaaggtggacagccccaagaacttcaacatcgctggcacggtggtcaagtaccggcggcccatggatgtctatgagaccggaatcgagtacatcgtggcacaggggcccaccaaccagggcctgaatgtcatggtgtggaaccagaacggcaaaagcccctccatcaccttcgagtacacgctgctgcagccgccacacgagagccgcccccagcccatctactatggcttctccgagagcgctgagagccagggcctggacggggccgggctgatgggcttcgtcccgcacaacggctccctctacggccaggcctcctcagagcggctgggcctggacaaccggctgttcggccacccgggcctggacatggagctgggccccagccagggccaggagaccaacgaggtgtgcgagcaggccggcggcggggcctgcgaggggccccccaggggcaagggcttccgagaccgcaacgtcacggggactcctctcaccggggacaaggatgacgaagaggttgacacccacttcgcctcccaggagttcttctcggctaacgccatctctgaccagctgctgggcgcaggctctgacttgaaggacttcaccctcaatgagactgtgaacagcatctttgcacagggcgccccaaggagctccctggccgagagcttcttcgtggattatgaggagaacgagggggctggcccttacctgctcaacgggtcctacctggagctgagcagcgacagggttgccaacagctcctccgaggccccattccccaacgttagcaccagcctgctcacctcggccgggaacaggactcacaaggccaggaccaggcccaaggcgcgcaagcaaggcgtgagtcccgcggacatgtaccggtggaagctctcgtcccacgagccctgcagtgccacctgcaccacaggggtcatgtctgcgtacgccatgtgtgtccgctatgatggcgtcgaggtggatgacagctactgtgacgccctgacccgtcccgagcctgtccacgagttctgcgctgggagggagtgccagcccaggtgggagacgagcagctggagcgagtgttcgcgcacctgcggagagggctaccagttccgcgtcgtgcgctgctggaagatgctctcgcccggcttcgacagctccgtgtacagcgacctgtgcgaggcagccgaggccgtgcggcccgaggaacgcaagacctgccggaaccccgcctgcgggccccagtgggagatgtcggagtggtccgagtgcactgccaagtgtggggagcgcagtgtggtgaccagggacatccgctgctcggaggatgagaagctgtgtgaccccaacaccaggcctgtaggggagaagaactgcacgggcccgccctgtgaccggcagtggaccgtctccgactggggaccgtgcagtggaagctgcgggcaaggccgcaccatcaggcacgtgtactgcaagaccagcgacggacgggtggtacctgagtcccagtgccagatggagaccaagcctctggccatccacccctgtggggacaaaaactgtcccgcccactggctggcccaggactgggagcggtgcaacaccacctgcgggcgcggggtcaagaagcggctggtgctctgcatggagctggccaacgggaagccgcagacgcgcagtggccccgagtgcgggctcgccaagaagcctcccgaggagagcacgtgtttcgagaggccctgcttcaagtggtacaccagcccctggtcagagtgcaccaagacctgcggggtgggcgtgaggatgcgagacgtcaagtgctaccaggggaccgacatcgtccgtggttgcgatccgttggtgaagcccgttggcagacaggcctgtgatctgcagccctgccccacggagcccccagatgacagctgccaggaccagccaggcaccaactgtgccctggccatcaaagtgaacctctgcgggcactggtactacagcaaggcgtgctgccgctcctgcaggcccccccactcctaggcccggcagctgcagccccttccagatgaagaccaagcgcccctcctggggctgctgcagcttctggggcctccacagacccccctcctgcggggcacgctggcctaagagacgtggcactgagcctcggctgtcgagaggggacttcccacggcccatggacctttgtgctcctggggcagagcctccggcacccagtggcctcccccagacagagccacccctgccgtgggaacctgtccgtgttcctgcgtggatcctgtgtttgtggctcccactccccagccccccagcagcccccagccgaggggcccagggcccacagccagcggtggaggtgtcttgctccgggcccgtagcccacgccctctctgggtggcagggccttctgaaggaaacttgcaggcgagcccaacgtggtggggggccttcctccctcagaggccatggggtgagaggggctcaggcagccaaggaggcccaggcgtgctccctcttatggagcccctcccatggagctctcttcccgccgcactttctaccccgggcagaggcgcttgcccacgggacgtttggggatggacctcggcccccgcccctgcagtcagcgtcagtgctcatctacgttaataaagtggtcctatttatggcggcaaaaaaaaaaaaaaa

SEQ ID NO: 30011 - DNA, 1896 bp, Homo Sapiens
gcctttgctcctgagaagttactgacaggtggaacctgaggcagcaggacagcctggcattggccacgggacatcggccacaaccatagcaacttcggcatcaaatggggcaggagagagaacattaaggcagccatgagctccagccaccccgagccgggtccctgggcacccctgagcccccgccttcagcccctgtcccagagctcttccagcctgctgggtgaaggccgggaacagaggccagagctccacaagactgccagcagcaccatgtggcaggcccagctgggcgaggccagcaccagaccccaggccccggaggaagaggggaacccgcctgagagcatgaagccagcacgggcctctggccccaaggcgcgacccagtgctggaggccactggcggagcagcactgtgggcaatgtgtccaccatgggcggtggtgacctttgtcgcctgcgggcccctagtgctgctgctatgcagaggagccattcagacctggtccgtagcacccagatgcggggacacagtggtgctcggaaggccagtctcagctgctcagcccttggcagcagccctgtccacagggctcagctgcagccaggtggtacttctggccagggtggccaggcccctgcaggcctggaaagggacctggctcctgaggatgagacttctaactcagcctggatgctgggggcgagtcagttgtcggtgccaccactagacctgggggacacaactgcccacagcagcagtgcccaggctgagcccaaagctgctgaacagctggctaccaccacctgccatgctctgcccccagctgctctactctgtggcatgagggagatgagggaggtgggggctggtggctgctgccatgccctacctgccacagggatcctggcctttcccaaactagtggcgtcagtgagcgagtctgggctgcaggctcagcatggggtgaagatccactgtaggttgtctggggggctccctgggcactcccattgctgtgcccacctttggggtcccgctgggttagtcccagagcctggctctaggaccaaagatgtgtggaccatgacctcagccaatgacttggcccctgcagaggcatccccgctgtcagcccaggatgctggtgtgcaggcggccccagtggcggcctgcaaggctgtggccaccagtccgtccctggaagcgcctgcagccctgcatgtgttcccagaggtaactctggggtccagcctggaggaggcgccgtcccctgtgcgggatgtgcgatgggatgctgagggcatgacatgggaggtgtacggagctgcggtggacccggaggtgctcggtgtggccatccagaagcacctggagatgcagtttgagcagctgcagcgggcgcctgccagcgaggacagcctgtctgtggagggccggagggggccgctgcgggctgtcatgcagtccctgcggcgccccagctgctgcggctgctctggcgcggcccccgagtgaggagctgtggcccttggagctggcctgggcccactgacttagtcctagacctgggccagggacagtgggggctccgtgccccctggacccaccggcagctgggcacatgtctcacccgaatatcggctgcctccagaccacaggactgcagcctggggcttccggccccacacagctgggctgttttcttaagggcttgatttccaagggccacatctctgcaccttccaggctctgaactttgagacagggctttagcactgtgcagaggggagatcctgagttttctttaaaaaatgaccttttgttcaaaaaaaaaaaaaaaaaaaaaaaaaaaaaaaaaaaaaaaaaaaaaaaaaaaaaaaaaaaaaaaaa

SEQ ID NO: 30012 - DNA, 6207 bp, Homo Sapiens; identical to SEQ ID NO: 27017

SEQ ID NO: 30013 - DNA, 4272 bp, Homo Sapiens; identical to SEQ ID NO: 27734

SEQ ID NO: 30014 - DNA, 5984 bp, Homo Sapiens
cgcgctgtgtgtgtgtgtgagtggagagtgagtgcgggacctgaggctgtgtgtgtgtgaactgtggccactggcggggtcgggggggggcagcggcggagccgcctcggacgataaggaaattgagatttggagaagttaaataaccaagacttcacaggcaaagccatgactacagtagtggtacatgtggactccaaagctgagctcactaccctgctggagcagtgggaaaaggaacatggcagtgggcaggacatggtacctatccttaccaggatgtctcaattgattgaaaaagaaactgaagagtatcgtaaaggggatccagacccatttgatgatcgacatcctggtcgagctgatccagagtgtatgctgggccacttgctgagaatactcttcaagaatgatgatttcatgaatgcactggtgaatgcatatgtgatgacaagccgagagccccctttaaacactgcagcttgcagactcctattagacatcatgccagggctggaaactgctgtcgtctttcaagaaaaggagggaattgtcgagaatcttttcaaatgggcccgagaggccgatcaaccattgaggacatattctactggactgttaggaggtgctatggaaaatcaagacattgctgccaactatagagatgaaaattcacagctggtggcaatagtgcttcgaagactgagggagctacagctacaggaagtggctttgcggcaggaaaacaagcgtcccagtccacggaagctctcttctgaaccccttttgcctctggatgaggaggctgtggatatggactatggtgacatggctgtagatgtagtggatggagaccaagaggaagcttctggagacatggagatctcctttcatcttgattcaggccacaagactagtagcagagtgaactcaacaaccaaacctgaggatggaggattaaagaaaaacaagtcagcaaaacagggtgacagagagaactttaggaaagccaagcaaaagttgggtttctcatcttctgatccagatcgcatgtttgttgagctgtctaatagcagttggtcagaaatgtctccctgggtgattggcaccaattataccctttatcctatgactcctgctatcgagcagcgactcattctccaatatttgacccctctaggagaatatcaggagctacttcccatattcatgcaacttggatcacgggagctgatgatgttctatattgacctgaagcaaactaatgatgtcctgcttacatttgaggcactaaagcacctagcatctctcctgctccataacaaatttgccacagaatttgttgcgcatggtggagtacagaaattactggaaatacctcgtccttctatggctgcaaccggtgtgtctatgtgtttgtattacctatcctacaatcaggatgccatggaaagagtttgcatgcatccccacaatgttctgtctgatgtggtgaactataccctgtggttaatggagtgttctcatgcttcaggatgctgccatgctaccatgtttttttcaatttgcttctcatttcgggccgtcttggagctctttgaccgctatgatggtcttcgtcgtctggtgaacttgatcagtactttggagattctaaatttggaagatcagggtgcacttctgagtgatgatgaaatatttgctagccgccaaactgggaaacatacctgcatggccttgcgcaaatactttgaggctcacctggccattaaattggaacaagtgaagcagtcacttcagaggactgagggtggcattcttgtccacccacaacccccgtacaaggcatgctcatatactcatgaacagattgtggaaatgatggaatttttgatagaatatggcccagcgcagctatattgggaaccagctgaagttttcctcaaactttcttgtgtgcaactcttgttgcagcttatttctattgcctgcaattggaagacctattatgcaaggaatgacactgtgcgctttgctttggatgtcctggctattcttactgtggtgccaaaaatccagctccagttggcagaatcagtggacgtgttggatgaggctggatctacagtctctactgtaggtatcagcattattttgggagtggctgagggtgagttcttcatccatgatgctgaaattcagaagtcagcacttcagattatcatcaattgtgtgtgtggcccagataaccgaatatccagtattggtaaatttatctctggtactcctcggagaaagctgcctcagaaccctaaaagcagtgagcacaccctggccaagatgtggaatgtggttcagtccaacaacggcatcaaggtgctcctgtccttactgtccattaagatgcccatcacagatgcagaccaaatccgggccctggcctgcaaagccctagtgggcctgtctcgcagtagcactgtccggcagatcatcagtaaactgccccttttcagcagctgccagatccagcagctgatgaaggagcctgtgctgcaggacaagcgcagtgaccatgtcaagttctgcaagtatgctgctgaactcattgaacgggtgtcaggaaaaccacttctcattggcactgatgtttccctagcacgactgcagaaagcagatgttgttgcccagtcaaggatctccttccctgagaaagagctgcttttgttgatacgaaaccatcttatttctaaagggcttggagaaacagcaaccgtgctgacaaaagaggctgacctgcccatgactgctgcctcccattcttctgcctttaccccagtcactgctgctgcttctcctgtctctctaccccgaacccctcgtatcgctaatggcattgcaactcgtctgggcagccatgctgctgtgggtgcctctgcgccttctgcccctactgctcatcctcagccacggcccccccagggtccgctagctctgcccggcccatcttatgcaggcaactcccctttgattggtagaatcagttttatcagagagaggccatcaccctgcaatggcaggaaaatcagagtgttgcggcagaagtcggaccatggtgcctacagccaaagcccagccataaaaaaacagctggacagacatcttccttccccacctacgctggacagtataatcacagagtatcttagagaacaacatgctcgctgcaagaatccagttgccacctgcccacctttctccctctttactcctcaccaatgtcctgagccaaaacagaggcggcaagcgccaataaactttacgtcaaggctaaaccgcagggcatcatttccaaagtatggaggggtggatggcggatgctttgataggcaccttatctttagcagattccgtcctatttcagtgttccgggaagccaatgaagatgagagtggcttcacctgctgtgcattctcagcacgggagcggttcctgatgcttggcacctgcacagggcagctgaagctctataatgtgtttagtggacaggaggaggccagctataactgtcacaactcagccatcacacatcttgaaccttccagggatgggtccttgctgctgacatctgctacttggagccagcctttgtctgcactttggggaatgaagtcagtatttgatatgaagcattccttcacagaagatcactatgttgagttcagtaagcactcccaggatcgggtcatcggcacaaaaggagacattgcccacatttatgatattcagactggcaacaagctgttgactctgtttaacccagatcttgccaacaactacaagaggaactgtgccacctttaatcctacagatgatcttgtcttaaatgatggcgtcctctgggatgtccgctctgcacaggccatccacaagtttgacaagttcaatatgaacatcagtggtgttttccatccaaatggactggaggtgatcattaatactgagatttgggaccttcgaacttttcatcttttgcatactgttcccgctctggatcagtgtcgcgtggtgttcaatcacacgggaacagtgatgtatggagctatgttgcaggcagatgatgaagatgacttaatggaagagaggatgaaaagcccctttgggtcatccttccgaacatttaatgcaactgactacaaacctatagcaaccattgatgtgaaacggaacatctttgacctgtgtacagacaccaaagactgctatcttgctgtcattgagaatcaaggcagcatggatgccctgaacatggacacagtatgcaggctgtatgaagtgggcaggcagcgtctggcagaggatgaggatgaagaggaggaccaggaagaggaagaacaggaggaagaagatgatgatgaagatgatgatgacaccgatgatttagatgagcttgacactgaccagttgctggaggcggagttggaggaggacgacaataatgagaacgcaggggaagatggggacaatgacttctctccctctgatgaggagctagcaaaccttctagaggagggagaggacggggaggatgaagactctgatgcagatgaggaggtggaactgatcctgggggacactgacagctctgacaactctgatttggaagatgacatcatcttatctctgaatgagtgaggagccatcactgcttggaagagattcttggcagagagaagaggggacaaatttggttgtgaagtaaacaagaaacacaagacggctaaaactctccaggggcaggtaaagccctgctgggctcagaagcactatagaatttgctgtacacactgaagtgggtctgtgtcacacaggtatttcttggtcctctggagagcagaggactcactcagctctttgcttcatgcctcgctttaatggtagtaaacacttaaccagtggaatagtctgactgctggtactgatggcatcagaagaaaacaggttaacaatcaagtagtgaaagcactatattctagtcattaactcaacggagccagtctcaactctgctgggagcacccacaggtctctgtgggggagacagggactataacagggaggcagaattcaggttggcttgacaacacaccttaggaacatgtgctaaggggctaaggaggcatcagctgtcttccttattctaccagggctgaaaatcggagtcacttaggaggcagcatgagaacagtggcacaccaccagtgaggcacatgttgcctttttgtctttaagcaacaccttagacagggcctgaaccctgggtgggggcactggatgcctgaagtaagtaagttttctcagtggggcagtctcataaaatcaccaggacattgaccacctgacctcccctaactagtgctggccaaggcctgagagttcacagaacctgctaggtcttaagagccaaaggaaggaagtggttgagggccaggaaagagaaggaatgtcatgccagggtgttactcctcaccaaaacttggcagttctttttggggccatgggacacctttctctgaagaggggttggataaggcaaaggttgaagtgtcttctctaggcacgttttctagcatgtttccttttacttggttctgtctcacaaagctgggaggtagatgattcttccgggtcctgagcacctgcttcatgaaggaagataggtagcccagagaagaagttttggacttaacaacataccaaggcagctctggcctgtgactcaggcgtttgttggagagctgcaggaaaaccactgcagtgtgcctgcaacaggacaagacccactcctgtttctggcggtaccagctaccctggaatggtggcgtgtcctgctgtacccaactgacttgcttaggtacctggcagctgtgaccacagctcaagtaaaaaaacaaaaacaggcaaataaataaacatgcttaacatgtc

SEQ ID NO: 30015 - DNA, 5488 bp, Homo Sapiens
ggctctgagaggtggagtcggggtggcagcggcggcggttgccaggagcccgcgttgcagcctgagatccgtaatatggcggggaggaggaggagaaggcggcggcggaccgagctgcgctctgtcagtaccatttgagccattcgcttcctgacaaggcccgtggcgaggggagaggagctgaaggggccgtgggggatcagtgcctgctgtgtgctgatactgttctgtgtaatggggattcagtgaacaagactgaaaaggtacctgtacttatggcgcttgcattttggtggaggaagacagacaaaaatcaaggaaataaacacgataatttcagatagtgtgtgactgtgggaagatggaggagtatgagaagttctgtgaaaaaagtcttgccagaatacaagaagcatcactatccacagagagctttctccctgctcagtctgaaagtatctcacttattcgctttcatggagtggctatcctttctccactgcttaacattgagaaaagaaaggaaatgcaacaagaaaagcagaaagcacttgatgtagaagcaagaaagcaggttaacaggaagaaagctttactgactcgtgtccaggagattcttgacaatgttcaggttagaaaagcacctaatgccagtgattttgatcagtgggagatggaaacagtttactctaattcagaagtcagaaacttgaatgttcctgctacatttccaaatagctttccaagccatacggaacactctactgcagcaaagcttgataagatagctgggattttgccattggataatgaggaccaatgtaaaactgatggaatagacttagctagagattcagaaggatttaattctccgaagcaatgtgatagttccaatattagtcatgtagaaaatgaagcttttccaaagacctcttcagcaaccccacaagaaactcttatttctgatggtcccttctcagtaaatgaacaacaggatctaccacttttggcagaagtcatcccagatccctatgtaatgagtcttcagaatctgatgaaaaagtcaaaggaatatatagaaagagaacaatctagacgcagtctgagaggtagtatgaacagaattgttaatgagagtcatttagacaaagaacatgatgctgttgaagtggctgactgtgtaaaagagaaaggccagttgacaggcaaacactgtgtctcagttattcctgacaaaccaagccttaataaatcaaatgttcttctccaaggtgcttccactcaagcaagcagcatgagtatgccagttttagctagcttttcgaaagtggacatacctatacgaactggccatcccactgttctagagtctaattctgattttaaagttattcccacttttgttaccgaaaataatgttatcaaaagtcttacaggttcatatgccaaattacctagtccagagccaagtatgagtcctaaaatgcaccgaagacgttccaggacatcatcagcgtgtcatatacttataaataacccaataaatgcctgtgaattaagccctaaaggaaaagaacaggcaatggacttaattattcaagatactgatgaaaacacaaatgtgcccgaaattatgccaaagttaccaactgatttagcgggagtttgttcaagcaaggtttatgtgggcaaaaatacatctgaagtcaaagaagatgtggttttaggtaaatcaaatcaggtatgtcaatcttcaggaaatcatttagaaaataaagttactcatggacttgttactgtggaaggtcagttaacatccgatgagagaggcgcacacataatgaacagtacctgtgctgcgatgccaaagctgcatgaaccatatgccagcagtcagtgtatagcaagtccaaactttggaactgtgagtggactcaagccagccagtatgttagagaaaaactgcagtttgcaaacagaactgaataagtcttatgatgtaaaaaacccttctcctttattgatgcaaaaccagaatacgagacagcagatggacacacctatggtgtcctgtggaaatgaacaatttttggataacagttttgagaaagttaaacggagacttgatttagatattgatggtttgcaaaaagaaaactgcccttatgtcataacaagtggaataactgaacaagaaaggcaacatttgccagaaaaaagataccctaagggatctggcttctttaacaagaataaaatgttaggaactagttccaaagaaagcgaggagttactaaaaagcaagatgttagcttttgaagaaatgcggaagagactagaagaacagcacgcccagcaattatcactactcatagctgagcaggaaagggaacaagaaagactgcaaaaggaaatagaagagcaggagaaaatgttaaaagagaagaaggcaatgacagcggaagcctctgagttggacattaacaatgcagtggaattagaatggagaaaaataagtgactctagtttgctggaaacaatgctgtctcaagcggactcactccatacttcaaattcaaatagttctggtttcacaaattctgccatgcaatatagctttgtttctgcaaacgaagcaccattctacctctggggatcatcaactagtggcttgaccaaactctcagtaacaaggccttttggaagagccaaaactagatggtctcaagtttttagtctggaaatacaagcaaaatttaacaaaataactgcagtggcaaaaggatttcttactcgtagacttatgcagacagataagctgaagcaacttcgacaaactgtaaaagatactatggaattcataagaagttttcagtcagaagcaccattaaagagaggcattgtttcagctcaagatgcttcacttcaggaaagagtgttagctcagttgcgagctgccttgtacggtattcatgacatattctttgtaatggatgcagctgaaagaatgtctattctacatcatgatcgagaagttcgcaaagagaaaatgctcaggcaaatggataaaatgaaaagtccacgagtggctctttcagctgcaacacagaagtctcttgataggaagaaatacatgaaagctgctgaaatgggaatgccaaataagaaatttctggttaaacaaaatccttctgaaacaagagtccttcagccaaaccaaggacagaatgcacctgttcataggctacttagtagacaagggagtatatgcaggaaaaatccaaagaaagcggccaaatgttgcgacaatttaagaagacaacattcattaggataaaatggggggaaggattattattcatgttattttccctgcccaagactttatttaaccctggactccgtttacacagacaaagtgacatcagaaggctgagcacttatctggatcatttggtcagtttggtaattcctgctccacacccctattttcctcttaataatacgtttgggtgaagacaaattagtgtttagtaattgcatcatctctgtgcttacctatacaaacataagtttattttatatgcccagatgtctacagagaccctttttgtaaatgtcaaggacatttggatttacttttacagaatattgaaaagataagacaaattataaataagtcctaaaacataaatttaattcatctctgcatagtgatttttgaatttgattcaaagggaaattattgcagaagaatgcctttccctcattttataactttaaaaacttggattaaccactcaatgtccactttctttgacttacagtataaccatgtagccaattgtggcccactaaaatatacagaagttaatgtgggtcaccattttggtcagaagcatacattcctgtcagacaactagttgtctgacagaaatgttaggcttcatgtatgttaccccagtactgttagaaacatttgtactaggttataagatctttctgtgacaggtaacaaatttggggaagacagcacaatcttcttgaatgtagctcttgggaatgcattattacatccatttctgtaacataataatatgttgcatgcagttatattttctatttagtctgtatattttgttcttcatagtctgttttttctagcatgcttgatttaggagagaataaagggctatataataataaatccagatttccggataagaatattgcctggttaaaattctgcattgcttaaagacacccatgtttaagatttttcatcactaacatatccattaaaagtatcaactggccaggcagggtggctcacgcctgtactcccagcattttgtgaggccaaggtgggtggatcacctgaggtcaggagtttgagaccagcctgaccaaacatggcgaaaccccatctgtactgaaaatacaaaaattaggcatggtggtgcatgcctgtagttccagctacttgggaggctgagacaggcgaattgcttgaacctgggaggcagaggttgcagtgagctgagactgtgccattgcactccagtcgggttaacagagcaagacactgtctcaaaaaaaaaaaaaaaaaaaaaagtatcaaccaacaaatgttaccaagataacgtgacttcatgagggagaatgtcactattaatttatcataccatttccaaaaagggctttgtgcttttcacataaaattgagacagtgtatatttaatctaatttaaattttaaagagatactggtattttgaaaatgcaacctatatatattcttaatatccttttaagaatatggagatgaagattgttttctccaattttctgtgccattttaaatttaactttgacatccagctatagacagaaataataagccaccctgggtgtaaacttgattttctttattgagatgtatcatgtattgaatgagtgaaccagaaaattagaagatggtcaaaaaaagtccaagttaccaattttttaaaatttataggcaaagtatcaaattgtcttcttaatatgataaactgtgctttatcattctgaaaactcaggatacagcttattcatagcattgtgggtctctccagtaagaaagatgctaaaagttttgtgcactttttgtgtgtgtaatgcaaattagttaaaacaaatagttttggagaaagttaaaactagctttagagtaaggatgagaaacttgagtgtttttaatttaaagataaaagcctgtgttttacacattcttttttggtgttcatagcttcttctcatacaggtgccagacactgtttgtgcttttgatggatttttatttatatactttttttgcttatttttactttgagtggaatgttcattaatgtaaattgtatttatttttatacttttattttcactagttttgcttctaggcaaaaagcaaaataaacttttcatcttaaagaaaaaaaaaaaaaaaa

SEQ ID NO: 30016 - DNA, 4966 bp, Homo Sapiens
ccacgcgtccgcagaggtttcagcgctgaggaggcctgagttccgtcatggccctctattatgaccaccagatagaagccccggatgcagcagggtcaccctcatttatcagctggcaccctgtccatccattcttggcagttgcttacatcagcacaacctcaacaggcagcgtggatatttacctggagcaaggggagtgcgtgccagatacacacgtcgagaggccgttccgggttgcttccctgtgctggcacccgacgcggctggtgctggctgtgggctgggagactggagaagtgacggtgtttaacaagcaggacaaggagcagcacacgatgcccctgacacacacagccgacatcaccgtgctccgttggagccccagtggaaactgcctgctgtctggggacaggcttggtgtcttgctcttgtggaggttggaccaaaggggccgagtgcaagggacgcctctgctgaaacacgagtatgggaaacacctcacgcactgcatcttccggctcccccctcctggcgaggacctggttcagttggcaaaggcagctgtgagcggtgatgagaaagccctggacatgtttaactggaagaagagcagttctggaagtttgctgaagatggggtctcacgaggggctgttgttctttgtcagtctgatggacgggacagtgcactatgtggatgagaagggcaagaccactcaggtggtgtccgcagacagcacgattcagatgctgttctacatggagaagagggaggcactggtggtggtcacagagaacctccggctgtccctgtacacggtgcctcctgagggcaaagcagaagaagtgatgaaggtcaagctgagcgggaaaaccggccgccgggcagacatcgctttgattgaaggcagccttctcgtgatggccgtcggggaggctgccctcagattctgggacatagaacgaggagagaattatatactgagtccagatgagaagtttggctttgagaaaggagagaatatgaactgtgtgtgttactgtaaagtcaaaggtcttctggccgctggtaccgacagagggcgagtagccatgtggaggaaagtaccagacttcctgggcagccccggggcagagggcaaggacaggtgggcccttcagacccctaccgagctccaaggaaacatcacgcaaatccagtggggttccaggaagaacctgctggcagtgaacagcgtcatctccgtggccatcctcagcgagcgggccatgtcgtcacacttccaccagcaagtggccgccatgcaggtctccccgagtctgctgaatgtgtgcttcctgtccacgggggtcgcacacagcctgcgcaccgacatgcacatcagtggagtgtttgccaccaaggatgctgtcgcagtctggaacggaaggcaggtggcgatcttcgagctttctggagccgcgatacggagtgcagggaccttcttgtgtgagacgcctgtgttagcaatgcatgaagaaaacgtttacacggtggagtcaaaccgagttcaagttcgaacctggcaggggactgtcaaacaactcctccttttctcggagactgaggggaatccctgcttcttggacatctgtgggaatttcctggttgtagggacagacttggctcactttaaaagctttgatctttcccgaagagaggccaaagcacactgtagctgcaggagcctggcggagctggtccctggggtggggggcatcgcttctctgcggtgcagcagcagcgggagcaccatcagcatcctccccagcaaggctgacaacagccctgattccaaaatctgcttctacgatgttgaaatggacacagtgaccgtctttgacttcaagactggacaaattgatcggagagagacgctgtcctttaatgagcaagagactaataagagccacctctttgtggatgagggactgaaaaattatgttcccgtgaaccacttctgggaccagagtgagccccggctgtttgtatgcgaagccgtgcaggagacgccgcgctcccagcctcagtctgcaaacgggcagccccaagatgggcgcgctggccctgcggcagatgttttgatcctgtccttcttcatttccgaagagcacggcttcctgcttcatgagagcttcccccggcctgccacctcccacagtctcctggggatggaagtgccttattactacttcacaagaaagcccgaagaagcagacagagaagacgaggtggagcctgggtgccaccacatccctcagatggtgtccaggagacccctgcgagactttgtggggctggaggactgcgacaaggccacccgggacgccatgctccacttcagcttctttgtcaccataggagacatggacgaagccttcaaatccatcaagctcatcaaaagtgaggccgtctgggagaacatggcgcgcatgtgcgtgaagacccagcggctggacgtggccaaggtgtgcctggggaacatgggccatgcccgcggggcccgagcgctgcgtgaggcggagcaggagccggagctagaggcccgcgtggccgtgctggccacgcagctgggcatgctggaggacgccgagcagctgtacaggaagtgcaagcgccacgacctcctgaacaagttctaccaggctgcgggccggtggcaggaggccctccaggtagccgagcaccacgatcgcgtgcacctgcgcagcacctaccaccgctatgccgggcacctggaggccagcgccgactgcagccgggccctcagttactacgagaagtcggacacgcaccgcttcgaggtgcccaggatgctgtcggaggacctgccgtccctggagctctacgtgaataaaatgaaggataagaccctgtggcggtggtgggcgcagtacctggagagccagggcgagatggacgccgcgctgcactactacgagctggcccgggaccacttctccctggtccgcatccactgcttccagggcaatgtccagaaggctgcgcaaatagccaacgagacaggaaacctggcggcctcctaccacctcgcccgccagtacgagagccaggaggaggtcgggcaggcggtgcacttctacacccgggcacaggccttcaagaatgccatccgcctgtgcaaggagaacggcctggacgaccagctcatgaacttggccctgctgagctcccccgaggacatgatcgaggcggcccgatactacgaggagaagggcgtgcagatggacagggcggtcatgctgtaccacaaggctggccacttctccaaggccctggagctggcctttgccacccagcagtttgtggccctacagctcatagcagaggacctggatgagacgtcagaccctgcgctcctggcccgctgctccgacttcttcatcgagcacagtcagtacgagagggcggtagagctgctgctggctgccaggaagtatcaggaagccctgcagctgtgcctggggcagaacatgagcatcaccgaggagatggcggaaaagatgaccgtggccaaggactcctcggacctgcctgaggagtcgcggcgggagctgctggagcagatagcagactgctgcatgcgccagggcagctaccacctggccaccaagaagtacacgcaggccggcaacaagctgaaggccatgagggcgctgctcaaatccggagacacggagaaaatcacgttcttcgcgagcgtgtccaggcagaaggaaatctacatcatggctgctaactacctgcagtccctggactggcggaaggagccggagatcatgaagaacatcatcggcttctacaccaaggggcgggccctggacctcctggctggcttttatgacgcttgtgcccaggtggagattgatgaataccagaactacgacaaagcccacggggcgctgaccgaggcctacaagtgcctggccaaggccaaggccaagagccccctggaccaggagaccaggctggcgcagctgcagagcaggatggcactggtgaagaggttcatccaggcccgcaggacgtacacagaggaccccaaggagtccatcaagcagtgtgagctgctcctggaggaaccagacctggacagcaccatccgcatcggggacgtctatggcttcctggtggagcactacgtgcggaaggaggaataccagacggcctacagattcctggaggagatgcggcggcggcttcccttggccaacatgtcctactacgtgagcccgcaggccgtggacgccgtgcaccgggggctgggtctcccactgccacgcaccgtccccgagcaggtccgccacaacagcatggaggacgccagggagctggacgaggaggtggtggaagaggcagatgacgacccctgaggggcctgggccccaggaccagcgtgctgctgcagaaaggcatcttctggaatttttttgtcagctgtggcaaagccagcatttttgctgggaaaaaacatgtctgtgttggaatacgcgacagagctgggcgagaacgcagcggcccgggccggcggagggtgtgacccgtctgcaccttgctctgtcccacctgcctctgggtgcccggcagctccactagatttttggattcattcctttgaagggagtcgggttcacccttccatcgtattctcccaactacacattgtaaagcctgagaaacttctagaacctcaggaagctgcagctggagggctggggcacctgcccccctgctccccacacatcatatcctccccatactcctgcagggcccacggctcctgagcaacagctgggacacccgggccttggcggctgcaccccctgctaggctctgcccaccggccaccaacactcctgtaattccaataaagcagtttattttctgaaaaaaaaaaaaaaaa

SEQ ID NO: 30017 - DNA, 6480 bp, Homo Sapiens
ctccactgactggactgaaaacagggccaagaaaactgctgctgcagggggtcctgaaaacagctggaacccggcagtgatgtgggacctaacttgaagttaacctgtggtggtgaggttggaaccagttggattatgatttattttctacactcttgtacggaatgcagagctgttgtatcctgatgaatctactgctaaatatagtcatttggaataattttaagtattgatcttaaaacttgtaccacaacaagagtgtctaaaaagcacggcaagctcattacgttcttacgaacattcatgaagtctcgtccaacaaaacagaagctgaagcagcggggaatcttgaaagagagggtgtttggttgtgacctgggggagcaccttctaaattctggttttgaagtgccgcaggttcttcaaagctgcacagcattcattgagagatatggcatcgtggatggaatctatcgcctttctggtgttgcctccaatatccagagactacgccatgaatttgactctgagcacgtccccgacctgacgaaagaaccgtatgttcaggacatccattctgtgggttccctatgtaagctgtacttccgggaactcccaaaccctctgcttacctaccagctgtatgagaaattttctgatgcagtttcagcagcaacagatgaagaaaggctgataaaaatccacgatgtcatccagcagctccccccaccacactacagaacactggagttcctgatgagacacttgtctcttctagctgactattgttccatcacaaatatgcatgcaaaaaatctagcaattgtttgggctccaaacctgttaagatcaaaacagatagaatctgcctgcttcagtggaacagcagctttcatggaagtgaggattcagtctgtggttgttgagttcatcctgaatcacgttgatgtgctgttcagcggcagaatcagcatggccatgcaagagggggcagcttctctatcaaggcccaagtccctcctggtatcctctccatccaccaaactgctgacattggaagaggcccaggcacgaacacaagctcaggtcaattctccaattgtgacggaaaataaatatatcgaagtaggagaaggacctgctgcacttcaggggaaatttcataccataattgagttcccacttgaaagaaagaggcctcaaaataagatgaaaaagtctcctgtgggtagctggcgttcctttttcaacttggggaaatcatcatctgtttctaaacgaaagctgcagcggaatgagagtgagccttcagagatgaaagccatggctctgaaaggtggcagggcagaaggaaccctccgttcagctaaaagtgaggagtctcttacatctctccatgcagttgatggtgattctaagctcttccgacccagaagacccagatcttccagtgatgcactgtctgcctcttttaatggagaaatgctggggaaccgctgtaactcctatgataatctgcctcatgacaatgagagtgaggaggaaggagggctgcttcatatcccagcccttatgtctcctcattcagctgaggatgttgacttgagcccaccagacattggagtagccagcctggattttgatccaatgtcatttcaatgtagtcctcctaaggccgaatcagaatgtctggagagtggtgcttcctttttagattcaccaggatactccaaggataaaccaagtgccaataaaaaggatgcagaaacaggtagtagccaatgtcagactccaggaagcacagcaagctctgaacctgtctctcctcttcaggagaaactgagtccattctttaccctggacttgagcccaactgaagataaatcatctaagccatcctcctttactgaaaaggtcgtctatgctttctctccgaagataggacggaaattaagcaaatcaccttctatgagcatatctgagccaatttcagtgaccctaccaccacgggtgtcagaagtcattggtacagtctcaaataccacagctcagaatgcatcatcttcaacctgggacaaatgcgttgaagaaagggatgccacaaatagatcccccacccagatagtaaagatgaaaacaaatgagacagttgcccaagaagcatatgaatctgaagtccagcccctggaccaggtggctgctgaagaagtagaattgccagggaaagaggatcagtctgtctcaagcagtcagagtaaggctgtagcttctggacagactcagacaggagcagttacccatgacccccctcaggattccgttcctgtcagttcagtctctcttatcccaccaccaccgcctccgaaaaatgttgcccgaatgttggcgctagcattagctgagtccgcacagcaagcctcaactcagtcattgaagagaccagggacctctcaggctgggtatacaaattatggagacatagcggtggctacaactgaagataatctgtccagttcttactctgcagttgctctagataaggcctatttccaaaccgatcgaccagcagagcagttccacctccagaataatgcaccaggaaactgtgaccatcctctaccagagacaacagctactggggatcctacccattccaacacaactgaatctggggagcaacatcaccaagtagacttaacagggaatcagccacatcaagcatatttatctggggacccagaaaaggccagaattacttcagttcccttagactcagagaagtctgatgatcatgtaagtttccctgaagaccagtctgggaagaacagtatgccaactgtctccttcttggatcaggaccagtctccaccccgtttctacagtggagatcagcctccttcttatcttggtgcaagtgtggataaactccatcaccctttagaatttgcagacaaatctcccacacctcctaatttacctagcgataaaatctaccctccttctgggtcccccgaagagaataccagcacagccaccatgacttacatgacaactactccagcaacagcccaaatgagcaccaaggaagccagctgggatgtggctgaacaacccaccactgctgattttgctgctgccacacttcagcgcacgcacagaactaatcgtccccttccccctccgccttcccagagatctgcagagcagccaccagttgtggggcaggtacaagcagcaaccaatataggattaaataattcccacaaggttcaaggagtagttccagttccagagaggccacctgaacctcgagccatggatgaccctgcgtctgccttcatcagtgacagtggtgctgctgctgctcagtgtcccatggctacagctgtccagccaggcctgcctgagaaagtgcgggacggtgcccgggtcccgctgctgcacctgcgcgccgagtctgtccctgcgcatccctgtggctttcctgcaccactgccccccaccaggatgatggagagtaagatgattgctgccatacactccagcagtgcagatgccaccagcagttcaaattatcattcctttgtcactgcttcatccacctctgtggacgatgcattgcctttaccacttcctgtcccacaacctaagcatgcttctcagaaaacagtttactcctcctttgctaggcccgatgtcaccactgaaccctttggtccagataactgtttgcatttcaatatgactccaaactgccagtaccgtccccagagtgtacctccccatcacaataaattggagcagcaccaagtgtatggtgccaggtcagagccaccagcctccatgggtcttcgttataacacatatgtggccccaggaagaaacgcatctggacaccactccaagccatgcagccgggtcgagtatgtgtcttctttgagctcctctgtcaggaatacctgttaccccgaagacattccaccgtaccctaccatccggagagtgcagtctctccatgctccgccgtcttccatgattcgctctgttcccatttcacggacagaagttcccccagatgatgagccagcctactgcccaagacctctgtaccaatataagccatatcagtcctcccaggcccgctcagattatcatgtcactcagcttcagccttactttgagaatggccgggtccactacaggtatagcccatattccagttcttctagttcctattacagtccagatggggccctgtgtgatgtggatgcctatggcacagtccagttgagaccccttcaccgccttcccaatcgagactttgctttctacaatcctaggctgcaaggaaagagcttgtacagttatgctggtttggctccacgtccccgggccaacgtgactggctatttctctcccaacgaccataatgtagtcagcatgcctccggctgctgatgtgaagcacacctacacctcatgggatcttgaggacatggaaaaataccgcatgcagtccatccggagagagagccgtgctcggcagaaggtgaaagggcctgtcatgtcccaatatgataacatgaccccggcggtgcaggacgacttgggtgggatctatgtcatccatctgcgtagtaaatcagatcctgggaaaactggacttctctcagtggcagaaggaaaggagagccgccatgcagccaaggccatcagtcccgagggagaggaccgcttctataggaggcatcccgaggcagagatggacagagcccaccatcacggaggccatggtagcacgcagccggagaagccatccctgcctcagaagcagagcagcctgaggagcaggaagcttcctgacatgggctgcagtcttcctgagcacagggcacaccaagaagcaagccataggcagttctgtgagtcaaagaatgggcccccttatccccagggagctggccagttagattatgggtccaaagggattccagacacttctgagccagtcagctaccacaactctggagtaaaatatgctgcatccgggcaagaatctttaagactgaaccacaaagaggtaaggctctccaaagagatggagcgaccctgggttaggcagccttctgccccagagaaacactccagagactgctacaaggaggaagaacacctcactcagtcaatcgtcccaccccctaaaccagagaggagtcatagcctcaaactccatcatacccagaacgtggagagggaccccagtgtgctgtaccagtaccaaccacacggcaagcgccagagcagtgtgactgttgtgtcccagtatgataacctggaagattaccactccctgcctcagcaccagcgaggagtctttggagggggcggcatggggacgtatgtgccccctggctttccccatccacagagcaggacctatgctacagcgttgggtcaaggggccttcctgcccgcagagttgtccttgcagcatcctgaaacacagatccatgcagaatgagccctgcgagcaatagagttgaagcagcctctgctggacagtggactgttctatttttttcaataaccaaaaagattaaacaaaaaatactataaaacccctgaccacatttaaaaaatgataataaaagtaaacaaatcagcatctttttccccttccctgcttcattaccccctcttccatctatagactttgtcatttttgtctttagaaaagatctgaaggatggtaaagccccgtgctgaaacccagtagagaaacctgtctcaggacacacttgccatctagggctagcttgaaagagcctgaggactgcctttaactgaatttgaattcagcattgtcctttcttcttagtatttgctgcataattgagagcagttcacatcgatttcctggtaggcgtctgcattccctgttgtgttcctgcttctccttcagtagctgcacaacttgcgcagatcgacacactgttgtcacttcattctccccgtctgagaaggatcttgtgttcagttagagtcgtggaaaaatccctgatccttcaaggtcagtcagacagttggcaacattataattaaaaataagaaattaagactttaaattaaacatttggtagagtcatcataaaacaccagaccacttagactcaggctgaaccatactctttctattcttatttttcatccttgttcctcacggttcagtgaacaggctcatatcatgacagaatggacttttaaaagttagtacttaaggaaacttctttaggtggaagaaagtaaagttcttattgtcagtgaactttattagcaccagaaatctctattgatgcttttaatgcattgcctgccttcaggttttcttcttaccccacccctcaataagatttggtgaattgtaattctagtaaaacatgtcataccattggttttcctaaattatcaactttctttcatt

SEQ ID NO: 30018 - DNA, 3187 bp, Homo Sapiens
ctgcagtagcggggttggggtgggagtgagagagtgaggacgctgggctgggggaaacgggaagccgctgcaagtccaccgcctcagctacccagattgggatctgcccaggcccgctttatggactagtgtgggcggcaggctcctttccgtccctgccctgctgtaccccgctccttggagaccccctgtatccctcccgcaaggtggaatccgcaggctggaggctcccaggggaggcaaacgcctggccctgccctgccccacgccgcaccatgaccctcctgctgctgccccttctgctggcctctctgctcgcgtcctgctcctgtaacaaagccaacaagcacaagccatggattgaggcagagtaccagggcatcgtcatggagaatgacaacacggtcctactgaatccaccactctttgccttggacaaggatgccccgctgcgctatgcaggtgagatctgcggcttccggctccatgggtctggggtgccctttgaggctgtgatccttgacaaggcgacaggagaggggctgatccgggccaaggagcctgtggactgcgaggcccagaaggaacacaccttcaccatccaggcctatgactgtggcgagggccccgacggggccaacaccaagaagtcccacaaggccactgtgcatgtgcgggtcaacgatgtgaacgagtttgccccagtgtttgtggaacggctgtatcgtgcggctgtgacagaggggaagctgtacgatcgcatcctgcgggtggaagccattgacggtgactgctccccccagtacagccagatctgctactatgagattctcacacccaacacccctttcctcattgacaatgacgggaacattgagaacacagagaagctgcagtacagtggtgagaggctctataagtttacagtgacagcttatgactgtgggaagaagcgggcagcagatgatgctgaggtggagattcaggtgaagcccacctgtaaacccagctggcaaggctggaacaaaaggatcgaatatgcaccaggtgctgggagcttggctttgttccctggtatccgcctggagacctgtgatgaaccactctggaacattcaggccaccatagagctgcagaccagccatgtggccaagggctgtgaccgtgacaactactcagagcgggcgctgcggaaactctgtggtgctgccactggggaggtggatctgttgcccatgcctggccccaatgccaactggacagcaggactctcggtgcactacagccaggacagcagcctgatctactggttcaatggcacccaggctgtgcaggtgcccctgggtggccccagtgggctgggctctgggccccaggacagcctcagtgaccacttcaccctgtccttctggatgaagcatggcgtaactcccaacaagggcaagaaggaagaggaaaccatcgtatgtaacactgtccagaatgaggacggcttctctcactactcgctgactgtccacggctgtaggattgccttcctctactggcccctgcttgagagtgcccgcccagtcaagttcctctggaagctggagcaggtctgtgatgatgagtggcaccactacgctctgaacctcgagttccccacagtcacactctataccgacggcatctccttcgaccctgccctcatccatgacaatggcctcatccacccaccccgaagggagcctgctctcatgattggggcctgctggactgaggagaagaacaaagagaaggaaaagggagacaacagtacagacaccacccaaggagaccctttgtcgatccaccactacttccatggctacctggctggtttcagcgtgcgctcaggtcgcctggagagccgcgaggtcatcgagtgcctctatgcatgtcgggaggggctggactatagggatttcgagagcctgggcaaaggcatgaaggtccacgtgaacccctcacagtccctgctcaccctggagggggatgatgtggagaccttcaaccatgccctgcagcatgtggcttacatgaacactctgcgctttgccacgcccggcgtcaggcccctgcgcctcaccactgctgtcaagtgcttcagcgaagagtcctgcgtctccatccctgaagtggagggctacgtggtcgtccttcagcctgacgccccccagatcctgctgagtggcactgctcattttgcccgcccagctgtggactttgagggaaccaacggcgtccctttgttccctgatcttcaaatcacctgctccatttctcaccaggtggaggccaaaaaggatgagagttggcagggcacagtgacagacacacgcatgtcggatgagattgtgcacaacctggatggctgtgaaatttctctggtgggggatgacctggatcccgagcgggaaagcctgctcctggacacaacctctctgcagcagcgggggctggagctcaccaacacatctgcctacctcactattgctggggtggagagcatcactgtgtatgaagagatcctgaggcaggctcgttatcggctgcgacacggagctgccctctacaccaggaagttccggctttcctgctcggaaatgaatggccgttactccagcaatgaattcatcgtggaggtcaatgtcctgcacagcatgaaccgggttgcccaccccagccacgtgctcagctcccagcagttcctgcaccgtggtcaccagcccccgcctgagatggctggacacagcctagccagctcccacagaaactccatgatacccagcgccgcaaccctcatcattgtggtgtgcgtgggcttcctggtgctcatggtcgtcctgggcctggtgcgcatccattcccttcaccgccgcgtctcaggggccggcgggcctccaggggcctccagtgaccccaaggacccagacctcttctgggatgactcagctctcaccatcattgtgaaccccatggagtcctaccagaatcggcagtcctgtgtgacgggggctgttgggggccagcaggaggatgaggacagcagtgactcggaggtggccgattcccccagcagcgacgagagacgcatcatcgagacccccccacaccgctactaaggcctacacctctccccacgcagagggggaattctgccctg

SEQ ID NO: 30019 - DNA, 4911 bp, Homo Sapiens
ccacgcgtccgggccttccaggaggcgggaggcgcccgctgtcgaggcagctgagccccggcaaccgctgctctccgcctctcccctcgcggggccggctcatggagcgcagggaccgggctggctctcgccgagccccgggcctcttttagcctcgtccccagagagggaggagccggtgcccggcacagccccgccggccctagaagctccccacgcgccaccatgcctctgctggacgttttctggtcttgcttcaggaaggtgaagtgcttcccattgctgcaggtgaagaagaacgctgaagccgaggccaaaagagcatgtgagtggcttcaagcaacaggattccctcagtatgtgcagctttttgaaggaggctgatgaccttgaataattgtgcctcgatgaaactggaggttcattttcaaagcaagcagaatgaagactcagaagaggaagagcagtgtaccatcagtagccactgggccttccagcaggaaagtaagtgctggtctcctatggggtcctctgatctgttggccccaccgagccctggcctgccagcgacctcaagctgtgagagcgtcctcaccgagcttagtgccacctctctgccagtcatcaccgtgagcctaccacccgagccagcagacttgcccttgccaggccgtgcccccagctcgagtgaccggcccctcctcagccccacccagggccaggagggtccccaggacaaagccaagaagcgccatcgtaaccgtagcttcctcaagcaccttgaatctctgaggcggaaggaaaagagtggcagccagcaagcagagcccaagcatagtccagccacctcagagaaggtctccaaagcctcatctttccgcagttgtcgtggcttcctctcagctggattttacagggccaagaactgggccgccacctcagccggtggcagtggtgccaatactcggaaggcctgggaggcctggcctgtggcctcgttccggcatcctcagtggacacaccggggtgattgcctggtgcacgttcctggggaccacaaaccaggcacattccctcgctccctgtccattgagagcctgtgtcctgaggatggacaccgcctggcagactggcagccaggtaggcggtggggctgtgaggggcgccggggctcctgtggctcaacgggcagccatgccagcacgtatgacaacttgcctgagctgtacccagctgagcctgtaatggttggggctgaggctgaagatgaagatgatgaggagagtgggggcagctatgctcacctagacgacatcctccagcacgtgtgggggctacagcaacgagtagagctgtggtctcgggccatgtacccagacctggggcctggagatgaggaagaggaggaggccacttcatcagtagaaatagccacagttgaggtcaaatgccaagctgaggctctcagccagatggaggttccggcccatggagagtccccagcctgggcccaggctgaagtccagccagcagtcctggctccggctcaggctccagctgaggctgaaccagtggcacaggaagaggctgaggccccggccccagccccggccccggccccagcccaggacagtgagcaggaggcacattcaggcggggaacccacctttgcctctagcctgtctgtggaagaaggacactccatttctgacactgtggcctcctccagcgaacttgacagtagtgggaactccatgaatgaggctgaggctgcggggcccctggctggactccaggcatcaatgccccgtgaacggcgcgattcaggtgttggggcctcacttaccagaccctgcaggaagctccgttggcatagcttccagaactcccatcgtcccagcctcaactcagagtcgctggagatcaaccggcagtttgcaggccagatcaacctcctgcacaagggctcactgctgcggcttaccgcgttcatggagaagtacactgtgccccacaagcagggctgggtctggtcaatgcccaagttcatgaggaggaacaagaccccagattaccggggacagcacgtatttggggtgccacccctcatccacgtgcagcgcacgggccagccactgccacagagcattcagcaagccatgcgctacttgcgcagccagtgcctggaccaagtaggcatcttccgcaagtctggggtcaagtccaggatccagaacctgcgtcaaatgaatgagacctcgcctgacaatgtctgctacgagggccagtcagcctacgacgtggctgacctgctaaagcagtatttccgggacctgcctgagcccatcttcaccagcaagctcaccaccactttcctccagatctaccagctcctccccaaggatcagtggttggcagcagcacaagccgccaccttgctgctccccgatgagaaccgagaggtgctacagaccctgctctacttcttaagtgacattgcctctgccgaggaaaaccagatgacagcaggcaacctggcagtgtgcctggcgccctccatcttccacctcaatgtctctaagaaggatagcccctctcccaggatcaagagcaaacgcagcctcattggcaggccaggccctagggacctgagtgacaacatggcagccacccagggcctgtcgcacatgatcagtgactgcaagaaacttttccaggtgccccaggacatggtgctgcagctgtgcagctcctacagcgcagctgagctcagccctcccggcccagccctggctgagctgcgtcaggcccaagctgcaggggtaagcctgagcctctacatggaagagaatatccaggacctgctgcgtgatgctgctgagcgcttcaagggctggatgagcgtgccagggccccagcacacggagctggcttgcaggaaggcaccggatgggcaccccctgcggctatggaaggcatccacagaggtggcagcccccccagctgtggtgctgcatcgtgttctccgggagcgggccctctgggatgaggatctgctgcgggcccaggtgctggaagccctgatgccgggtgtggagctgtaccactatgtcaccgacagcatggcaccccatccctgccgcgactttgtggtgcttcggatgtggcgctctgacctgcctcgtgggggttgcctgcttgtctcccagtccctggatccggaacaacctgtgccagagtcgggtgtgcgagccctcatgctcacatcccagtacctcatggagccttgcggcttgggccgctctcggctcacacacatctgccgggctgacctcaggggccgttctcctgactggtacaacaaagtctttggacacctgtgtgccatggaagtggcaaagatccgggactccttccccaccctgcaggcagcgggccctgagacaaagctgtgagccttgggctggtcccagggtggcaccacccaggccccctgggcaccaagggagcgagggggaataagagcagggcagccccctgggtgccgctgtcaggagcagagccaggcccaggtggctccagctgcctgtcctgtcccctttcctaaagctcctctgcacatagaggggagaaaaagagaatttaggcaactccactcccccttcacccccaaccctgtattctactctcccgaaaagagaagagaatcgcatgagtagcaagactgctgccaccagccacctgcttgtgaggccgccacttggcatgaagcctccacagctccccgcctgcaggggcaaagaggtcgacagcaatgtgtgatcccagctctctgccagactgagagggcaagccgtcttgtttgctgcaaggatgcttttgaggttggacaggaggttctggtcctgcctttggggccaacgctggctctgaagtgtctttttcagaggaattggactggagtgaatgggcacaggggtggagcgcagggcagccccagtcaccacgagctgtttcatttgtgtaaatacgatgctgaattttatgaggctgagttaagagtgggcactgacgggcccctaatatgtgacatgacgatttggcatagatagggatgtgagagtggagtaccttcctttctcaagtctcgagatgccagtgaaaccagtattccctgacttgggtttcacactttatcgaccaccccatggggtcctgtgtagcctttggccacgcactgacactgcccaggccaagcaaaagcagagtgtggttaagagacaagggtctatgtcatcatcccttttgcttatggtagtgggctaacataacagcccctttctcaagcagagacctggcccctgggccagccagatggaagggcctatcttagccagctggagcttaagccaaacctgttctgtcccactggccagccatctttgctcacatggaaattcaaatgccattcaaaggccactggtgctttatttttctatctgctgagtaaactgaaatgagatgggtcccaaccaccactgtaattttcaagcctattttatttgtacctgtaaatactgtacagctaatatatatatatatatatatatgtgtgtgtgtgtgtgtgtgtgtatatgtgtttatagagatacacacacatatatatgtgtgtatatatatacacatacatatatatacacacacgcatttgcacagacacacacatatatcaattctcatgagtgtattataatctctggtgggggcaagtgtctggaaggcctgaggggcacttcagatgagaatggagaggtagggagccaggtgcagcaggatccctcaaatcaataaagcattaccagagatgcaaaaaaaaaaaaaaaaaaaaaaaaaaaaaaaaaaaaaaaaaaa

SEQ ID NO: 30020 - DNA, 8469 bp, Homo Sapiens
atggcggcggcggcgggcggcggcagttgccccgggcctggctccgcgcggggccgcttcccgggccggccgcggggcgccggcgggggcgggggccgcggcggacggggcaacggggccgaaagagtgcgggtagctctgcggcgcggcggtggcgcgacggggccgggcggagccgagcccggggaggacacggccctgctccgtttgctggggctccgccggggcctgcgccggctccgccgcctgtgggccggcccgcgggtccagcggggccggggacggggtcggggccggggctggggcccgagtcgaggctgcgtgccggaggaggagagcagtgacggggaatccgacgaggaggagtttcagggttttcattcagatgaagatgtggcccccagttccctgcgctctgcgctccgatcccagcgaggtcgagcgccccgaggtcggggtcgcaagcataagacgaccccccttcctcctcctcgcctagcagatgtggctcctacccccccaaagacccctgcccggaaacggggtgaggaaggcacagaacggatggtgcaggcactgactgaacttctccggcgggcccaggcaccccaagcaccccggagccgggcatgtgagccctccaccccccggcggtctcggggacggcccccaggacggccagcaggcccctgcaggaggaagcagcaagcagtagtggtggcagaagcagctgtgacaatccccaaacctgagcccccacctcctgtggttccagtgaaacatcagactggcagctggaaatgcaaggaggggcccggtccaggacctgggacccccaggcgtggaggacagtcaagccgtggaggccgtggaggcaggggccgcggccgaggtggtgggctcccctttgtgatcaagtttgtttcaagggccaaaaaagtaaagatgggacaattgtccttgggactcgaatcaggtcaaggtcaaggtcaacatgaggaaagttggcaggatgtcccccaaagaagagttggatctggacagggagggagcccttgctggaaaaagcaggaacagaagctggatgacgaggaagaagagaagaaagaagaagaagaaaaagacaaggagggagaagagaaggaagaaagagctgtagctgaggagatgatgccagctgcggaaaaggaagaggcaaagctgccaccaccgcctctgactcctccagccccttcacctcctccacccctcccacccccttcgacatctcctccacccccactctgccctccaccaccacccccagtgtccccaccacctctaccatcccctccaccgcctcctgcccaagaggagcaggaggaatcccctcctcctgtggtcccagctacgtgctccaggaagaggggccggcctcccctgactcccagccagcgggcggagcgggaagctgctcgggcagggccagagggcacctctcctcccactccaacccccagcaccgccacgggaggccctccggaagacagtcccaccgtggcccccaaaagcaccaccttcctgaagaatatccggcagtttattatgcctgtggtgagtgcccgctcctcccgtgtcatcaagacaccccggcgatttatggatgaagacccccccaaacccccaaaggtggaggtctcacctgtcctgcgacctcccattaccacctccccacctgttccccaggagccagcaccagtcccctctccaccacgtgccccaactcctccatctaccccagttccactccctgagaagagacggtccatcctaagggaacccacatttcgctggacctcactgacccgggagctgccccctcctcccccagcccctccacctcccccggccccctccccaccccctgctcctgccacctcctcccggaggcccctactccttcgggcccctcagtttaccccaagcgaagcccacctgaagatctacgaatcggtgcttactcctcctcctcttggggctcctgaagcccctgagccagagcctcctcctgccgatgactctccagctgagcctgagcctcgggcagtgggccgcaccaaccacctcagcctgcctcgattcgcccctgtggtcaccactcctgttaaggccgaggtgtcccctcacggggctccagctctgagcaacgggccacagacacaggctcagctactgcagcccctgcaggccttgcaaacccagctcctgccccaggcactaccgccaccacagccacagctgcagccaccgccgtcaccacagcagatgcctcccctggaaaaagcccggattgcgggcgtgggttccttgccgctgtctggggtagaggagaagatgttcagcctcctcaagagagccaaagtgcagctattcaagatcgatcagcagcagcagcagaaggtggcagcttccatgccgctgagccctggagggcagatggaggaggtggccggggctgtcaagcagatctccgacagaggccctgtccggtctgaagatgagtcggtggaagctaagagagagcggccctcaggtcccgagtcccctgtgcaaggtccccgcatcaaacatgtctgccgtcatgctgctgtggccctgggtcaggcccgggccatggtgcctgaagatgtccctcgcctcagtgccctccctctccgggatcggcaggacctcgccacagaggatacatcatcggcgtccgagactgagagtgtcccgtcacggtcccggcggggaaaggtggaggcagcaggccctgggggagaatcagagcccacaggttctggagggaccctggcccacacaccccggcgctcactgccctcccatcacggcaagaagatgcgcatggctcgatgtggacactgtcggggctgcctacgtgtgcaggactgtgggtcctgtgtcaactgcctagacaagcccaagtttgggggccctaacaccaagaagcagtgctgtgtataccggaagtgtgacaaaatagaggctcggaagatggaacgactggctaaaaaaggccggacgatagtgaagacgctgttgccctgggattccgatgaatctcctgaggcctcccctggtcctccaggcccacgccggggggcgggagctggggggccccgggaggaggtggtggcccacccagggcccgaggagcaggactccctcctgcagcgcaagtcagctcggcgctgcgtcaaacagcgaccctcctatgatatcttcgaggattcggatgactcggagcccgggggcccccctgctcctcggcgtcggaccccccgagaaaatgagctgccactgccagaacctgaggagcagagccggccccgcaaacctaccctgcagcctgtgttgcagctcaaggcccgaaggcgcctggacaaggatgctttggcccctggcccctttgcttcttttcccaatggctggactggaaagcagaagtctcccgatggtgtgcaccgcgtccgtgtggattttaaggaggattgtgatttagagaacgtgtggctgatggggggcctgagtgtgctcacctctgtgccagggggccccccgatggtgtgcttgctgtgtgccagcaaaggactccacgagctggtgttctgtcaagtctgctgtgacccattccacccattctgcctggaggaggccgagcggcccctgccccagcatcacgacacctggtgctgccgtcgctgcaaattctgccacgtctgtggacgcaaaggtcgtggatccaagcacctcctggagtgcgagcgctgccgccatgcataccacccggcctgtctggggcccagctatccaacccgggccacgcgcaaacggcgccactggatctgttcagcctgtgtgcgctgtaagagctgtggggcaactccaggcaagaactgggacgtcgagtggtctggagattacagcctctgccccaggtgcacccagctatatgagaaaggaaactactgcccgatctgtacacgctgctatgaagacaacgactatgagagcaagatgatgcagtgcgcacagtgcgatcactgggtgcatgccaagtgcgaggggctctcagatgaagactacgagatcctttcaggactgccagactcggtgctgtacacctgcggaccgtgtgctggggcagcgcagccccgctggcgagaggccctgagcggggccctccaggggggcctgcgccaggtgctccagggcctgctgagctccaaggtggtgggcccactgctgctctgcacccagtgtgggccagatgggaagcaactgcacccaggaccctgcggcctgcaagctgtgagtcagcgcttcgaggatggccactacaagtctgtgcacagcttcatggaggacatggtgggcatcctcatgcggcactcggaggagggagagaccccggaccgccgggctggaggccagatgaaggggctcctgctgaagctgctagaatctgcgttcggctggttcgacgcccacgaccccaagtactggcgacggagtacccggctgccaaacggagtccttcccaatgcggtgttgcccccatccctggatcatgtctatgcgcagtggagacagcaggaaccagagaccccagaatcagggcagcctccaggggatccctcagcagcattccagggcaaggatccggctgccttctcacacctggaggacccccgtcagtgtgcactctgcctcaaatacggggatgcagactccaaggaggcggggcggctcttgtacatcgggcagaacgagtggacacacgtcaactgtgccatctggtcggcggaagtcttcgaggagaacgacggctccctcaagaatgtgcatgctgctgtggcccgagggaggcagatgcgctgcgagctctgcctgaagcctggcgccacggtgggctgctgcctgtcctcctgcctcagcaacttccacttcatgtgtgcccgggccagctactgcatcttccaggatgacaagaaagtcttctgccagaaacacactgatctcctggatggcaaggaaattgtgaaccccgatggttttgatgttctccgccgagtctatgtggacttcgagggcatcaacttcaagcggaagttcttgacggggcttgaacccgatgccatcaacgtgctcattggttccatccgcattgactccctgggtactctgtctgatctctcggactgcgagggacggctcttccccattggctaccagtgctcccgtctgtactggagcacagtggatgctcggaggcgctgctggtatcggtgccgaattctggagtatcggccatgggggccgagggaagagccagctcacctggaggctgcagaggagaaccagaccattgtgcacagccccgccccttcctcagagcccccaggtggtgaggaccccccactggacacagatgttcttgtccctggagctcctgagcgccactcgcccattcagaacctggaccctccactgcggccagattcaggcagcgcccctcctccagccccccgttctttttcgggggctcgaatcaaagtgcccaactactcgccatcccggaggcccttggggggtgtctcctttggccccctgccctcccctggaagtccatcttcactgacccaccacatccccacagtgggagacccggacttcccagctccccccagacgttcccgtcgtcccagccctttggctcccaggccgcctccatcacggtgggcctcccctcctctaaaaacctcccctcagctcagggtgccccctcctacctcagtcgtcacagccctcacacctacctcaggggagctggctccccctggcccggccccatctccaccaccccctgaagacctgggcccagacttcgaggacatggaggtggtgtcaggactgagtgctgctgacctggacttcgcggccagcctgctggggactgagcccttccaggaagagattgtagccgctggggccatggggagcagccacgggggcccgggggacagctccgaggaggagtccagccccacctcccgctacatccacttccctgtgactgtggtgtccgcccctggtctggcccccagcgctacccctggagccccccgcattgaacagctggacggcgtggacgacggcactgacagtgaggctgaggcggtgcagcagcctcggggccagggcacgcctccttcggggccaggagtagtccgggcaggggtccttggggctgcaggggacagggcccggcctcctgaggacctgccatcggaaattgtggattttgtgttgaagaacctagggggtcctggggatggaggtgctggccctagagaggagtcactccccccggcgcctcccctggctaatggcagccagccctcccaaggcctgaccgccagcccagctgaccccacccgcacatttgcctggctcccaggggccccaggggtccgggtgttaagccttggccctgcccctgagccccccaaacccgccacatccaaaatcatacttgtcaacaagctggggcaagtatttgtgaagatggctggggagggtgaacctgtcccacccccagtgaagcagccacctttgccccccaccatttcccccacggctcccacctcctggactctgcccccaggccccctcctcggcgtgctgcccgtggtcggagtggtccgccctgccccgcccccgccaccccctcccctgacgctggtgctgagcagtgggccagccagcccgccccgccaggccatccgcgtcaagagggtgtccactttctccggccggtccccgccagcacctcccccatacaaagccccccggctggatgaagatggagaggcctcagaggatacccctcaggttccagggcttggcagtggcgggtttagccgtgtgaggatgaaaacccccacagtgcgtggggtccttgacctggatcggcctggggagcccgctggggaagaaagtcctgggcccctccaggaacggtcccctttgctgccacttccggaagatggtcctccccaggtccccgatggtcccccagacctgctgcttgagtcccagtggcaccactattcaggtgaggcttcgagctctgaggaagagcctccatccccagatgataaagagaaccaggccccaaaacggactggcccacatctgcgcttcgagatcagcagtgaggatgggttcagcgttgaggcagagagcttggagggggcgtggagaactctgatcgagaaagtgcaagaggcccgagggcatgcccgactcagacatctctcctttagtggaatgagtggggcgagactcctgggcatccaccatgatgctgtcatcttcctggccgagcagctccccggagcccagcgttgccagcactataagttccgttaccaccagcagggagagggccaggaggagccgcccctgaatccccatggggctgctcgggcagaggtctatctccggaagtgcacctttgacatgttcaacttcctggcctcccagcaccgggtgctccctgagggggccacctgtgatgaggaagaggatgaggtgcagctcaggtcaaccagacgtgccaccagcctggagctgcccatggccatgcgttttcgtcaccttaagaagacgtccaaagaagctgtgggtgtctacagatcagccatccacgggcgaggcctgttctgtaagcgcaacatcgacgcgggggagatggtcatcgagtactctggcattgtcatccgctcggtgttgactgacaagcgggagaagttctacgatgggaagggcatcgggtgctatatgttccgcatggatgactttgatgtagtggacgccacgatgcatggcaatgccgcccgcttcatcaaccactcctgtgagcccaactgcttctctcgggtcatccacgtggagggccagaaacacattgttatcttcgccctgcgccgcatcctgcgtggtgaggagctcacctacgactacaagttccccatcgaggatgccagcaacaagctgccctgcaactgtggcgccaagcgctgccgtcggttccttaactgaggccgtggctgcccaccacgacccctcacacctcctgctgccgtcgctgccatcttgcccctagcctgggggctccctagcccctcccagagcatctcacccccaccctcatgttcagggtggatgtgggcatgcaggtgacaagggccctgcctccacccctccagcccatccagcaatcgccccctttctgccctgggggcccaggatgtagatattgtacaaaggtttctaaatcccttcttttctatgcacttttttatttaagaggtggggtcccaggtgggaacccccccacaataaagtctgtcaatgtttgga

SEQ ID NO: 30021 - DNA, 5538 bp, Homo Sapiens
gccccagatcggaagtgacggagacgtgctagcgcgtcgaaggtagctctatggttttcctcgcgttcttgagtcgggaaatggccgctgtgtggttgcaacggagataaattcccggaaccgcgattcggcgtgtcaggaattcgaatttagagtttaatttctcagagcattctctccaggaagaatttttacagtatctcaaagacttcacttgacttcttgatcctgcataaaaccaaggagaaaagaaatgggtcgctccaattctagatcacattcttcaaggtcaaagtctagatcacagtctagttctcgatcaagatcaagatctcattctagaaagaagcgatacagttctaggtctcgttccagaacatattcaaggtctcgtagtagagatcgtatgtattctagagattatcgtcgcgattacagaaataatagaggaatgagacgaccttatgggtacagaggaaggggtagagggtattatcaaggaggaggaggtagatatcatcgaggtggttatagacctgtctggaatagaaggcactctaggagtcctagacgaggtcgttcacgttccaggagtccaaaaagaagatccgtttcttctcaaagatccagaagcagatctcgccggtcatatagatcttctaggtctccaagatcatcctcttctcgttcttcatccccatatagcaaatctcctgtttctaaaagacgagggtctcaggaaaaacaaaccaaaaaagctgaaggggaaccccaagaagagagtccgttgaaaagtaaatcacaggaggaaccgaaagatacatttgaacatgacccatctgagtctatcgatgaatttaataagtcatcagccacatccggtgatatttggcctggcctttcagcttatgataatagtcctagatcaccccatagtccttcacctattgctacaccacctagtcagagttcatcttgctctgatgctcccatgctcagtacagttcactctgcaaaaaatactccttctcagcattcacattccattcagcatagtcctgaaaggtctgggtctggttctgttggaaatggatctagtcgatacagtccttctcagaatagtccaattcatcacatcccttcacgaagaagtcctgcaaagacaatcgcaccacagaatgctccaagagatgagtctaggggccgttcctcgttttatcctgatggtggagatcaggaaactgcaaagactgggaagttcttaaaaaggttcacagatgaagagtctagagtattcctgcttgataggggtaataccagggataaagaggcttcaaaagagaaaggatcagagaaagggagggcagagggagaatgggaagatcaggaagctctagattacttcagtgataaagagtctggaaaacaaaagtttaatgattcagaaggggatgacacagaggagacagaggattatagacagttcaggaagtcagtcctcgcagatcagggtaaaagttttgctactgcatctcaccggaatactgaggaggaaggactcaagtacaagtccaaagtttcactgaaaggcaatagagaaagtgatggatttagagaagaaaaaaattataaacttaaagagactggatatgtagtggaaaggcctagcactacaaaagataagcacaaagaagaagacaaaaattctgaaagaataacagtaaagaaagaaactcagtcacctgagcaggtaaagtctgaaaagctcaaagacctctttgattacagtccccctctacacaagaatctggatgcacgagaaaagtctaccttcagagaggaaagcccacttaggatcaaaatgatagcgagtgattctcaccgtcctgaagtcaaactcaaaatggcacctgttcctcttgatgattctaacagacctgcttccttgactaaagacaggctgcttgctagtacacttgtccattctgtcaagaaggagcaagaattccgatccatctttgaccacattaagttgccacaggccagcaaaagcacttcagagtcatttattcaacacattgtgtccttggttcatcatgttaaagagcaatacttcaagtcagctgcaatgaccctaaacgagcggttcacttcgtatcagaaagccactgaagaacatagtactcggcaaaagagccctgaaatacacaggagaattgacatctcaccaagtaccctgaggaagcatacccgtttagcaggggaagagagagtttttaaagaagaaaatcaaaagggagataaaaaattaaggtgtgactctgctgaccttcggcatgacattgatcgccgtagaaaagaaagaagtaaagaacggggagattccaagggctccagggaatccagtggatcaagaaagcaggaaaaaactccaaaagattacaaggaatacaaatcttacaaagatgacagtaaacataaaagagagcaagatcattctcgatcttcatcctcttcagcatcaccttcttctcccagttctcgagaagaaaaggagagtaagaaggaaagagaagaagaatttaaaactcaccatgaaatgaaagaatactcaggctttgcaggagttagccgaccacgaggaaccttttttcgaattagaggcagaggaagagccagaggagtttttgctgggacaaatactggtccaaacaactcaaatactacttttcaaaagagaccgaaggaagaggaatgggatccagaatataccccaaagagcaagaagtacttcttgcatgacgacagagatgatggtgtggattattgggccaaaagaggaagaggtcgtggtacttttcaacgtggcagagggcgctttaacttcaaaaaatcaggtagcagtcctaaatggactcatgacaaataccaaggggatgggattgttgaagatgaagaagagaccatggaaaataatgaagaaaagaaggacagacgcaaggaagaaaaggaataataaatatgaagtaagattacaacagagcagaacttgcacccaccattttttttacctgatttttgttttcaaataagaatgtaagcattttacttaaattttactgtttgcaagtagtctatagaaattttgttttaagtcttcaaatatcttgagaaatagtagactgtatgttgaaaattgtactgaaataaagtagaaaattgttacgtaccatatttgtaactatcaacttttaaaacttttaacgtttttgttacatgcattgtaattctgctttgtctataagatatggtcaagtacagctctgtgaaagttctgattctcttccttccctgtttgtcaatgttttattctgaagtaaacgttagctctacatataaatcctggaacagaaattgtttatagagactacactaattattttaactgtatacatctgtttaatttgaacacactacatcgtagggtgactgatttttgaagtataccacagacaaaaagttgttactatggtaaactaagctagtttaacacttgagcaaatgcttaagaaggaattaaaaaaaaaaagctttgccaatagctaaaaagtacaagctattaaaaatcagattgaaaagttttgagaaaatgttatttttactgaaagcaagcagtggcctataaagaacattcttaggagccttttctatttgcgttcaaaactgtgtgttctctttctattcctatttgatagtttgagtcatggtcttagatattagctatttgtgagaggaaactggtttgtaacaatactgcaaatagaaaccccatttctactgaacatcctagttttaaacagaagaaaaactgtaatcctggggttggtatgtaggaggtctatcctgcagaataagttgatacattagtacctgatttcatatcttacatatttatttgagctgaacattagtttgtagtgtaactattagtaaaaatagagaaacacagcatactgttcattaatagtattttaaaaaaattgtttttcaaatgtcaccaataaaagttttggcaggaagcttgttgcggcattgatctaacctttttcccccccatttcagttgcagtttttgtagaatggctttttctttttcctcttaagagttctattcttcaggtagataatttttcaaatgtgaattatcttttgtgtctatattgatagctcttaaaggagtgaaaatctaaaatagtaaatttcaatgttaagtgtctgctttatgggcatatataaaagtagacacatttcatttgttaatttagttgtgtgtgtgtgttaaaaggagctaatgcttattctgttaatgtaaacttttgaagatcttaagtgtattgctctttcatcttaaacactttcgaggatttgcagtgcgtctagcacctagattacagccaggaacattggttaagaactgttggaaacaaaactaaaagcaaactcaacatatgtgatgtttatggccctcagatccttagtattgtgtgattttcccccgttaacatgtctttctaaaattgtctattaaagcagaggaaatacctgccaaaggaagtatgtattgcattaatcagggcataactaatattctcctgttcagaataatacttatttacgtgtgaaagcaacatggatgtgattcccaacacagaattttcatgacccttttattgtatacaaataaataccataacagttacttggttagacatcaaatctgtgtgcatgactatgtgcttatccacttaagacaataggtaaaaggggatctgagaaattatgtaatagggagtgggaataaaactacttaattcctgtgggcaggttatattttaagttcaaatgcattgctttaacctttggttacttttattctgttaaacagaattgaagaaagagtattataccagagtgtagtaggctagggtgattgtaagaactctgtaatagaatgtcattgtggatgttacctttttcagatccaagcatataaaaagcctgtatattttttaaaaacacatcttaactccacgctttacgatattataaaagttgaatggttcctcttggtaaggatatttgcttacaagtgctaggaaataactcactgatacctgcgttaacatactttgttttgcctagagaggggcaataaaaatgaaccaaaggatatttccagaaaggattaagaaagctgtttaagaaggccatgactctttaggtgtgtatgtgtacctttcagcatcctaggaatttttatactaaaagcaaaatgttttttccagttagtcttcttcaaggaattactattgttccttttgtcacaggtaaaatcagtgttgggaattataatttgagaaaaatattacccagtaacattgaatgtagatggctaaacgattcttactcagtgtgatgtataatgatgcaacagggacccttgtaaattgtcatacgccaataaaatgtcacaagtaat

SEQ ID NO: 30022 - DNA, 3752 bp, Homo Sapiens; identical to SEQ ID NO: 26434

SEQ ID NO: 30023 - DNA, 6611 bp, Homo Sapiens
tgactgcatcacctggtctgtgaattttccattagaagcttggtgtgctgttaggtgaaagacttgctcagctatgcgtcattgggttttatcaacatataggcgaaaaaaatcctggtctctgagtgtacagctgagatgaaaatttcttttattggaggaagtattgagtgtgtgctctcaaatgcggcctcagttgagtagtgcattcctgagttttggaagcaaatttgcaaacaattgagagtcgtacagtgggtgttctaactggattcaggttttttctaatgtaattttttcacacgtaaattaaaaagtttagaaatgtcacacataacttcataacactttatggagaaatggttgtacttttaatttttttctttttatttatactccaactgactgagcagaggttgtacttctaaataactttgtggaagtttttagtaccataatttttataattttcattccagtcctttgatatttatgacagtacttctgaagcgcttactgagtgccggacactgttgtaagtgctttacggaacttgacttttttttttttttgagacggactctcgctctgtcgcccaggctggagtgcagtggtgcagtggctcgatctcggctcactgccacctctccctcatggtttcaaacacttctcctgcctcagcctcccaggtagccaggattatagccgcccgccaccactcccgactaattttattttgtatgttcttttttagtagagacggaggagtttcaccatgttggccaggctggtatcgacctcctgacctcaagtgatgtgtccatctcggcctcccaaggtgctggaattacaggtgtgagccactgtgctcggcctaccttttttttttgttttttgtttttttgaaaaggagtttcgctcttgtccaggctggagtataatggtgcgatctcagctcaccgcaatctccgcctcccagattcaagcgattctcctgcctcagcctcctcaggagctgggattacaggcgcccaccgccatgcccggctaatttttgtatttttagtagagacggggtttcactatattggccaggctggtctcgaactgctgacctcaagtaatccgcctgcctcagcctcccaaagtgctgggattacagacgtgatccaccaggatcacaccaggccgcgcctggcctgctttcattttaaaagtcaaatttgtcatccgcctcagtgcttgtaatcttttctgagtgagatactgaaatttgcagtttcgttttgcttgcacttgttcactggaccagtagtcactgttaaatgtaaaagtatctacttcctctgaaagttttttattcctttatttcctgcctgggcttgtcctccaccctacatgtatgcgtagtagatttagtgtttgttatcctaacctttaggtttagggattgactgggtttctgactttttatttggccaatgaggacgatacagaaaatgaagcattggtcattatcacattttaacgctgaaaaagtaagaaggacaaccccggaataaaatgatatcagtatcaagataaaagtttggaatgggagaaaaattctcaaagcctgaaagaaaatctgtagttacttttggtgacgctgtccagttcccacaatgtatcattccttatctgaaactagacatcctctgcagccagaagaacaagaagtaggcattgaccccttgtccagttactctaacaagtctggaggagattcaaataaaaatggaagaagaacaagttctactttagactctgaagggacttttaattcctataggaaagaatgggaagaactatttgtaaacaacaattacttggcaacaataaggcagaaggggattaatgggcagctgagaagcagcaggttccgcagcatttgctggaagctatttctttgtgttcttcctcaagacaaaagtcaatggataagtagaattgaagaattaagagcatggtatagcaacattaaagaaatacatattaccaacccgaggaaggttgttggccaacaagatttgatgatcaataatcctctttcacaggatgaagggagtctttggaacaaattcttccaagataaagaacttcgatcaatgattgaacaagatgtcaaaagaacgtttcctgaaatgcagtttttccagcaagaaaatgtgagaaaaattcttacagatgttcttttctgttatgccagagaaaacgagcagttgctttataaacagggcatgcacgaactgttagcacctatagtctttgtccttcactgtgaccaccaagcttttctacatgccagtgagtctgcacagcccagtgaggaaatgaaaactgtcttgaaccctgagtatctggaacatgatgcctatgcagtgttctcacaacttatggaaactgctgaaccttggttttcaacttttgagcatgatggtcagaaggggaaagaaacactgatgactcccattccctttgctagaccacaagatttagggccaacaattgctattgttactaaagtcaaccagatccaggatcatctactgaagaagcatgatattgagctttacatgcacttgaacagactagaaattgcaccacagatatatgggttaaggtgggtgcggctgctatttggacgagagttccccctgcaggaccttctggtggtctgggatgccttgtttgcagacggcctcagcctgggtttagtagattatatcttcgtagccatgttactttacatccgagatgctttgatctctagtaactaccagacctgtctcggccttctgatgcattacccattcatcggggatgtacactcactgattcttaaggctctgttccttagagatccaaagagaaatccaagaccagtgacttatcaattccatccaaatttagattattacaaagcacgaggagcagacctcatgaataaaagccggaccaatgccaaaggtgctcccctgaatataaataaggtctctaatagcctgattaattttggaagaaagttgatttccccagcaatggctccaggcagtgcaggtggccctgtacctggaggcaacagcagtagctcctcctctgttgtaattcctaccaggacctcagcagaggccccaagccatcacttgcaacagcaacagcagcagcagaggctgatgaaatcagaaagcatgcctgtgcaattgaacaaagggctaagttctaaaaacatcagttcatctccaagcgttgagagtttgcctggaggaagagaattcactggctctccaccttcatctgctactaaaaaagattccttttttagcaacatctcacgttctcgctcacacagcaaaactatgggcagaaaagaatctgaagaagaattagaagcccaaatttccttccttcaagggcagttgaatgacctggatgccatgtgcaaatactgtgcaaaggtgatggacactcatcttgtaaatattcaagatgtgatattacaagaaaatttggaaaaagaagatcaaattctggtttccctggcaggattaaaacagatcaaagacattctaaaaggttccctgcgttttaaccagagccagctagaggccgaagagaacgaacagatcaccattgcggacaaccactactgctccagcggccagggccagggccgaggccaaggccagagcgttcaaatgtcaggggccattaaacaggcctcttcagaaacgccagggtgcactgatagagggaattccgatgacttcatcctgatttccaaagatgatgatgggagcagtgccaggggctccttctccggccaggcccagcctcttcgcaccctcagaagcacctctgggaaaagccaggccccagtctgctccccactggtgttctcagatccactgatgggcccagcctcagcttcctccagcaaccccagctccagtcctgatgacgacagcagcaaggactctggcttcaccattgtgagtcccctggacatctgaccacagtgcccagtcctgccccacagggatctagccacccttcagtggccccaaggccagactgaggctcatccagtggagaaccttcttaaaccactgcttccttcccggcatgcatttggcattggtccagccctttgaaaccccttagagagaagcatatatggccacaaagcacagaggcttaggtttgccacatgcagacagggctttctgggcccttacctaatccccacccgactcttgctctgagttagagctgagttacgtacccagtatcacactcacagttagaaaagaccgaatcacaatttagaatcacttttcctctgtccccttctccccagctaagaatgtgtggcacctccatcagttatacttagaaggagcagaaatagttattttcgtatcttctatccctcaaagcatcagacatgggaaaattggtttataccaagaaagcttcctctgtggaaatctgtctcagcctactttattcctgcattgggaagccatatcgcagagctaaatgcaatagaatgaaccagaactagtggattccagggctgggggaaaaaaaaaaaagaaaaaacctcattactgacctctcaaagttataaggatctctgcaaacaggatctaagcttaggaataatatttaggtgtgatatagtgttagatttttttgatgtattaaagaatgcatctccaatccttaggccatatcaactttggccatcaatatctctccttaaacaattatatttcaccttttagaatctttcatagccagaaaacaagattactgtaagccagttttagctgcactgatttcaaaagatataagaatattactatccttcaaatggaaaatgcgaccttgactttatgggataaacatctttcagacagtcagttttctagtcaggtttctctggtttcagagctgtatatacctgtcaactgaggaataaagggaaaaacccaagttcattcccacccaaagtcagaatccctcattggccttaaggtagcagtcataagacagagaattggacctagagtcccttctgtggggaataaggatacctagagaacattccacatgccaagaggatgcaggatttctacacaaccccttcccttcttggaagtcaagtgtaggtactgcagggcctgtgctcagctgtgaaccccgtatcctgggccccactgccgggaccgggtctgacatgccagtgccttcctgggctgagcacagattagagactctcccccttgtcagtcagcaccttaggaaaccatgatgggcacagagcatcacatgagctgtttctctccttaaagaagatccctggaaaggatgcttttcctctcctttgcctgcgcaggaattctaacaggagtgggtgaggatggcagagggacacagtgcctgtctcgcctccatcagggagagcagccatgccagggatgactagctctttgagcctgtcctcagaggatggcgaggcagccgggcagtggaggccttcatggtaacaaatgaaagctcagtatagaggaacagacactgtttacgtccctcccactgctaaccttatatatctctatagacaaatgtgataatgacatgatttcccacctgccctccaagaaaatggtgactcactctcaagtcagctactgtagagagggttctaattggttctgcaatttgctcttaaactctagcagggaactctcctcttaccacatcagcatgtaaggtgaataataactctggttttgccagacagcaggttgtctgaccttcaaccactgggcaattgcctggcagatgcacacagtagctccctggcttctggctctgagtgttcctctcagcacctctgagtaagctgctgccaagcacatatccctatgacaacactttgtaaaagccgcggggcccccatacagcgagtgaccttgcaactgtgcagggttgccattggtcactttctcaccttgggaaggtgtcagtgttttcagttctaaggtaagaggtgtagagctgttcccaccagggctctgggacagactggaaaggaccacagacctggccatccctgggcagcagggccagtgtcacctgctgacctctagtatttcctttgccctagagctagagtcatgatagctgagggtcactcgccctgcaagagtcactaggcacccaccatgccaataaggctctccgctggctccctgcagttggctgggtgtttaatagtcactgaaaactcccagccctgctgcacactagaggcaggtcctctcggtcctctccatcctgtgcttctgtggcccccagcaagctcaccgcctccttggaggagagagacatacaaggacagtgggtcatgggtagtaccagcctcaaattcccacaggctcatactcagacaattgtattactgccttatgttttttaagtgtttttttaaattcttcatagttgagtattatttgcaattttattagttacagtgctattaaagaatatgtgctcctttt

SEQ ID NO: 30024 - DNA, 6611 bp, Homo Sapiens; identical to SEQ ID NO: 30023

SEQ ID NO: 30025 - DNA, 6609 bp, Homo Sapiens
tgactgcatcacctggtctgtgaattttccattagaagcttggtgtgctgttaggtgaaagacttgctcagctatgcgtcattgggttttatcaacatataggcgaaaaaaatcctggtctctgagtgtacagctgagatgaaaatttcttttattggaggaagtattgagtgtgtgctctcaaatgcggcctcagttgagtagtgcattcctgagttttggaagcaaatttgcaaacaattgagagtcgtacagtgggtgttctaactggattcaggttttttctaatgtaattttttcacacgtaaattaaaaagtttagaaatgtcacacataacttcataacactttatggagaaatggttgtacttttaatttttttctttttatttatactccaactgactgagcagaggttgtacttctaaataactttgtggaagtttttagtaccataatttttataattttcattccagtcctttgatatttatgacagtacttctgaagcgcttactgagtgccggacactgttgtaagtgctttacggaacttgacttttttttttttttgagacggactctcgctctgtcgcccaggctggagtgcagtggtgcagtggctcgatctcggctcactgccacctctccctcatggtttcaaacacttctcctgcctcagcctcccaggtagccaggattatagccgcccgccaccactcccgactaattttattttgtatgttcttttttagtagagacggaggagtttcaccatgttggccaggctggtatcgacctcctgacctcaagtgatgtgtccatctcggcctcccaaggtgctggaattacaggtgtgagccactgtgctcggcctacctttttttttttgttttttgtttttttgaaaaggagtttcgctcttgtccaggctggagtataatggtgcgatctcagctcaccgcaatctccgcctcccagattcaagcgattctcctgcctcagcctcctcaggagctgggattacaggcgcccaccgccatgcccggctaatttttgtatttttagtagagacggggtttcactatattggccaggctggtctcgaactgctgacctcaagtaatccgcctgcctcagcctcccaaagtgctgggattacagacgtgatccaccaggatcacaccaggccgcgcctggcctgctttcattttaaaagtcaaatttgtcatccgcctcagtgcttgtaatcttttctgagtgagatactgaaatttgcagtttcgttttgcttgcacttgttcactggaccagtagtcactgttaaatgtaaaagtatctacttcctctgaaagttttttattcctttatttcctgcctgggcttgtcctccaccctacatgtatgcgtagtagatttagtgtttgttatcctaacctttaggtttagggattgactgggtttctgactttttatttggccaatgaggacgatacagaaaatgaagcattggtcattatcacattttaacgctgaaaaagtaagaaggacaaccccggaataaaatgatatcagtatcaagataaaagtttggaatgggagaaaaattctcaaagcctgaaagaaaatctgtagttacttttggtgacgctgtccagttcccacaatgtatcattccttatctgaaactagacatcctctgcagccagaagaacaagaagtaggcattgaccccttgtccagttactctaacaagtctggaggagattcaaataaaaatggaagaagaacaagttctactttagactctgaagggacttttaattcctataggaaagaatgggaagaactatttgtaaacaacaattacttggcaacaataaggcagaaggggattaatgggcagctgagaagcagcaggttccgcagcatttgctggaagctatttctttgtgttcttcctcaagacaaaagtcaatggataagtagaattgaagaattaagagcatggtatagcaacattaaagaaatacatattaccaacccgaggaaggttgttggccaacaagatttgatgatcaataatcctctttcacaggatgaagggagtctttggaacaaattcttccaagataaagaacttcgatcaatgattgaacaagatgtcaaaagaacgtttcctgaaatgcagtttttccagcaagaaaatgtgagaaaaattcttacagatgttcttttctgttatgccagagaaaacgagcagttgctttataaacagggcatgcacgaactgttagcacctatagtctttgtccttcactgtgaccaccaagcttttctacatgccagtgagtctgcacagcccagtgaggaaatgaaaactgtcttgaaccctgagtatctggaacatgatgcctatgcagtgttctcacaacttatggaaactgctgaaccttggttttcaacttttgagcatgatggtcagaaggggaaagaaacactgatgactcccattccctttgctagaccacaagatttagggccaacaattgctattgttactaaagtcaaccagatccaggatcatctactgaagaagcatgatattgagctttacatgcacttgaacagactagaaattgcaccacagatatatgggttaaggtgggtgcggctgctatttggacgagagttccccctgcaggaccttctggtggtctgggatgccttgtttgcagacggcctcagcctgggtttagtagattatatcttcgtagccatgttactttacatccgagatgctttgatctctagtaactaccagacctgtctcggccttctgatgcattacccattcatcggggatgtacactcactgattcttaaggctctgttccttagagatccaaagagaaatccaagaccagtgacttatcaattccatccaaatttagattattacaaagcacgaggagcagacctcatgaataaaagccggaccaatgccaaaggtgctcccctgaatataaataaggtctctaatagcctgattaattttggaagaaagttgatttccccagcaatggctccaggcagtgcaggtggccctgtacctggaggcaacagcagtagctcctcctctgttgtaattcctaccaggacctcagcagaggccccaagccatcacttgcaacagcaacagcagcagcagaggctgatgaaatcagaaagcatgcctgtgcaattgaacaaagggctaagttctaaaaacatcagttcatctccaagcgttgagagtttgcctggaggaagagaattcactggctctccaccttcatctgctactaaaaaagattccttttttagcaacatctcacgttctcgctcacacagcaaaactatgggcagaaaagaatctgaagaagaattagaagcccaaatttccttccttcaagggcagttgaatgacctggatgccatgtgcaaatactgtgcaaaggtgatggacactcatcttgtaaatattcaagatgtgatattacaagaaaatttggaaaaagaagatcaaattctggtttccctggcaggattaaaacagatcaaagacattctaaaaggttccctgcgttttaaccagagccagctagaggccgaagagaacgaacagatcaccattgcggacaaccactactgctccagcggccagggccagggccgaggccaaggccagagcgttcaaatgtcaggggccattaaacaggcctcttcagaaacgccagggtgcactgatagagggaattccgatgacttcatcctgatttccaaagatgatgatgggagcagtgccaggggctccttctccggccaggcccagcctcttcgcaccctcagaagcacctctgggaaaagccaggccccagtctgctccccactggtgttctcagatccactgatgggcccagcctcagcttcctccagcaaccccagctccagtcctgatgacgacagcagcaaggactctggcttcaccattgtgagtcccctggacatctgaccacagtgcccagtcctgccccacagggatctagccacccttcagtggccccaaggccagactgaggctcatccagtggagaaccttcttaaaccactgcttccttcccggcatgcattttgcattggtccagccctttgaaaccccttagagagaagcatatatggccacaaagcacagaggcttaggtttgccacatgcagacagggctttctgggcccttacctaatccccacccgactcttgctctgagttagagctgagttacgtacccagtatcacactcacagttagaaaagaccgaatcacaatttagaatcacttttcctctgtccccttctccccagctaagaatgtgtggcacctccatcagttatacttagaaggagcagaaatagttattttcgtatcttctatccctcaaagcatcagacatgggaaaattggtttataccaagaaagcttcctctgtggaaatctgtctcagcctactttattcctgcattgggaagccatatcgcagagctaaatgcaatagaatgaaccagaactagtggattccagggctgggggaaaaaaaaaaagaaaaaacctcattactgacctctcaaagttataaggatctctgcaaacaggatctaagcttaggaataatatttaggtgtgatatagtgttagatttttttgatgtattaaagaatgcatctccaatccttaggccatatcaactttggccatcaatatctctccttaaacaattatatttcaccttttagaatctttcatagccagaaaacaagattactgtaagccagttttagctgcactgatttcaaaagatataagaatattactatccttcaaatggaaaatgcgaccttgactttatgggataaacatctttcagacagtcagttttctagtcaggtttctctggtttcagagctgtatatacctgtcaactgaggaataaagggaaaaacccaagttcattcccacccaaagtcagaatccctcattggccttaaggtagcagtcataagacagagaattggacctagagtcccttctgtggggaataaggatacctagagaacattccacatgccaagaggatgcaggatttctacacaaccccttcccttcttggaagtcaagtgtaggtactgcagggcctgtgctcagctgtgaaccccgtatcctgggccccactgccgggaccgggtctgacatgccagtgccttcctgggctgagcacagattagagactctcccccttgtcagtcagcaccttaggaaaccatgatgggcacagagcatcacatgagctgtttctctccttaaagaagatccctggaaaggatgcttttcctctcctttgcctgcgcaggaattctaacaggagtgggtgaggatggcagagggacacagtgcctgtctcgcctccatcagggagagcagccatgccagggatgactagctctttgagcctgtcctcagaggatggcgaggcagccgggcagtggaggccttcatggtaacaaatgaaagctcagtatagaggaacagacactgtttacgtccctcccactgctaaccttatatatctctatagacaaatgtgataatgacatgatttcccacctgccctccaagaaaatggtgactcactctcaagtcagctactgtagagagggttctaattggttctgcaatttgctcttaaactctagcagggaactctcctcttaccacatcagcatgtaaggtgaataataactggttttgccagacagcaggttgtctgaccttcaaccactgggcaattgcctggcagatgcacacagtagctccctggcttctggctctgagtgttcctctcagcacctctgagtaagctgctgccaagcacatatccctatgacaacactttgtaaaagccgcggggcccccatacagcgagtgaccttgcaactgtgcagggttgccattggtcactttctcaccttgggaaggtgtcagtgttttcagttctaaggtaagaggtgtagagctgttcccaccagggctctgggacagactggaaaggaccacagacctggccatccctgggcagcagggccagtgtcacctgctgacctctagtatttcctttgccctagagctagagtcatgatagctgagggtcactcgccctgcaagagtcactaggcacccaccatgccaataaggctctccgctggctccctgcagttggctgggtgtttaatagtcactgaaaactcccagccctgctgcacactagaggcaggtcctctcggtcctctccatcctgtgcttctgtggcccccagcaagctcaccacctccttggaggagagagacatacaaggacagtgggtcatgggtagtaccagcctcaaattcccacaggctcatactcagacaattgtattactgccttatgttttttaagtgtttttttaaattcttcatagttgagtattatttgcaattttattagttacagtgctattaaagaatatgtgctcctttt

SEQ ID NO: 30026 - DNA, 6368 bp, Homo Sapiens; identical to SEQ ID NO: 28763

SEQ ID NO: 30027 - DNA, 4994 bp, Homo Sapiens; identical to SEQ ID NO: 25079

SEQ ID NO: 30028 - DNA, 5745 bp, Homo Sapiens
cggccgcggcggtagcgcggaaaacaatggggccggggcggtggggagaggccgaggcttgaggtaggcagcaagcgccggctgggggtcgggccgagcggggcaggaggaaaacccgccgccgcgcgcgagcccgctccgctgccctcgggggcatggcgcggccgtgaggcggagaggggtagccgcggggagcgaagcccgcagtgccagccggccccgagaggcccggccccgggcccggcccgtgcagcccgcggcccatggtgctgcccacctgccccatggcggagttcgcgctgccgcggcacagcgcggtcatggagcgccttcgccggcgcatcgagctgtgccggcgccaccacagcacctgcgaggcccgctacgaggccgtgtcgcccgagcgcctggagctggagcgccaacacaccttcgccctgcaccagcgctgcatccaggccaaggccaagcgcgccgggaagcacaggcagccgcccgccgccacggccccggcgcccgccgccccggccccgcgcctggacgccgctgacggccccgagcacggccgcccggccacgcatcttcatgatacagttaagaggaatcttgacagcgccacttcccctcagaatggcgatcaacagaatggctacggggacctctttcctgggcataagaagactcgccgggaggcccctctgggagttgccatctcttccaatggactgcctccagcctcccccctcggtcagtctgacaagccttctggagccgacgccctgcagtccagtgggaagcactctctggggctagactctctcaacaaaaagcgtctggctgactccagccttcacttgaatggaggcagtaaccccagtgagtcatttcctctgagcctgaataaagaactgaagcaggagcctgtcgaagacctgccttgcatgatcactgggactgtcggctccatatcgcaaagcaacctcatgccagacctcaaccttaacgagcaggagtggaaggagctcatcgaggagctgaacaggtcggtgcccgatgaagacatgaaggacctgtttaatgaggacttcgaggagaagaaggacccagagtcttctggctctgccacacaaacccccttggcacaggacattaatattaagacggaattctctccagcagcctttgagcaagaacagttaggctctccacaagtgagggccgggtctgcagggcagacctttctggggccttcctctgcccctgtgagtacagattcccccagcctagggggctcccaaaccttattccacacctctggtcagccccgggcggacaatcccagtccaaacctgatgccggcatcagcccaggcccagaacgcacaaagagcccttgcaggtgtggtattgcccagtcagggcccaggaggggcctcagagctgtcctctgcccaccagctccagcagatcgctgccaagcagaagcgcgagcagatgctccagaacccacagcaggccaccccggcaccagccccgggccagatgtccacatggcagcagacggggccctcccacagttccttagatgtcccttaccccatggagaagcctgccagcccttccagctacaagcaagacttcactaactccaaactgctcatgatgcctagtgtgaataagagttcccctcggcccggaggcccctacctccagcccagccatgtgaacctgctgagtcaccagccaccgagtaacttgaatcagaactccgcgaataaccaggggtctgtgctggactacggcaatacaaaacccctttctcattacaaagcggactgtgggcaaggcagcccggggtctggccagagcaagccagccctgatggcttatcttccccagcagctgtcccatataagtcacgagcagaactccctgtttctgatgaagccaaagccaggaaatatgcctttccgatcactggttccacctggccaggagcagaacccttccagtgtccctgtgcaagcccaggctaccagtgttgggacccagccgcctgccgtgtccgtggccagctcccacaacagctccccctatctcagcagccagcaacaggccgctgtaatgaagcagcatcagttgcttttggaccaacagaaacaaagggagcagcagcaaaagcatttacagcaacagcagttccttcagaggcaacagcaccttctcgcggaacaggagaagcaacagtttcagcgccatctgacccgcccaccaccccagtaccaagacccgacacaaggcagcttcccacagcaggttggacagttcacagggtcctctgctgccgtgcccggcatgaacaccttgggtccatccaactccagctgtcctcgagtgttccctcaggctgggaatctgatgccaatgggccctggacatgcttcagtttcctctctccccacaaactcaggccaacaggaccggggtgtggctcagttccctggctcccaaaacatgcctcagagcagcctctatggcatggcttctggcataacccagatagttgcccagcccccgccacaggccaccaatggacatgcccacattccacggcagaccaacgtgggccagaacacctccgtctcagctgcctatgggcagaactctctgggaagctctggcctctcccagcagcacaataaggggaccctgaaccctggtttaacaaagccaccggtcccaagggtgtcaccagccatgggaggccagaattcctcctggcagcatcagggaatgccgaacctcagtggccagaccccagggaacagcaacgtgagtcccttcactgcagcctccagtttccacatgcagcagcaggcccacctgaaaatgtctagcccgcaattctcccaggcagtgcccaacaggcccatggctcccatgagctcagcagctgccgtggggtccttgctacccccagtgagtgcacagcagaggaccagcgcccctgccccagcaccacccccaacagcccctcagcagggcttgcctggcctgagcccagcagggcctgagctgggggccttcagccagagccctgcctcacagatgggcggtcgggcggggctgcactgcacccaggcctaccctgtgcggaccgcgggccaggagctgccttttgcctatagcgggcagccaggtggcagtgggctctctagtgtggctggacacaccgatctgatcgactccctgctgaagaacaggacttcagaggagtggatgagtgatttggacgacctgttagggtctcagtaatggaaggatttgtagtgtttttagtgttcattcatcctatatttttattctcagattcaaagaaagagcaactactttggaccaaaagcccatggcctggggagctgggcaggtagagcccaagctccaggtgaggcctggccctgggcagggtctgtggctgcgcccctcaggccagcagttgaggtccatcgggctggccccagcccatctgctggcatcagtacctggtgttgggacagcaggatagggttctaaaggtggttttctatccaaacgaccaaaaaaccaacagtaacaccagtgaaaccccacactgtcgggcttataaaaatctgtgccatcatggtgattttatccaagactgctccacttaccccagtgctggggacaagtttctgttgaaactttagatagcagaattatttgcaatttgtagcatagaaaagattttttaaatttttttacaaaaggtttttaaacagattagggtaggtgatggtttaaatcaattaagtggcattggaaacctagggtttccttttgattaagagccttttttgtttctgctctttgtcagctttcaggggagaaggaggccactggaaaattatttccctaagtgcaggctgttgactgcgtatgccaaaaagggacaggaggcatgggatagcaggtctggtgacacagctagggtcttcctagcagctcctcctcctccctcccaaggcccccaggaatcccttcctcccatgtcctggcagcaggaccccaggctacatatggaaggtagagatgtgggggtcctgtatcctggagtattatgtctccccaccttctgcagttttctctgaacatgtatgttgcccatggtgggagcgtggtcactgtgcagttgtgcacagatgtctttcctttaccgttggcctttctgtctgcctctccttcctctctgcagcccaaatggaaaacaattatttactccattggagggaaaggaagagtcttagaattcctaagggaaccttagcataaaggttttggggaaggaggccgtaggccggcccggaggaagcaattccacttggtttgacaacttctgccactcccatgtcagatgacttgcacttcttaaagagattgctttataacactaagacatcctttctaaagattcaagtggacttgactaagctgagggtccacgaaatagaatatgacatgtgagctgtttttggaaaacgaagatggagagagcacttccccgtaacgaaagcaaagtggtaagcacagggtgagacccttttacacagaatggtggagagaaaagagaatgctgaaaagtggctcagatgcagagtgttctgtggagaaactgcagccccacttctgtttccctggagtctcccaatggatcattcaggagtgtcctatgtgagaattgagccaaggaaaatactcatgcaaccagcctgagtcgcggtgaggggacgagaggttgtacacacattggtagttattttgcaccagcagtgcctttctcactgggggtacttggaccctcagatcttcttttctaatagccatttgccaccccaagtggtatgtcggccatttctccttaaaacaccttccctacctttcccatgtactcagtttagctctcaaagaaggggtgaatcataaagccagtgaaaatttcaccctctgagggagttccccaatctgaaggggaagagggtgacctcagcggcttttctcccaaaaatcggctgaaggctggttgtggatccttgttcctctcctgaccccatctggctgctgccccgtctcccacccctgtccccggggctcgctggccctgcactccgccttagtcctggggccggcgacacagtgggggctcctcacttgctgcagtgtcatagcaataaaatgtgattcttggggtccccccagggagctgcccatggctttatttatgaacctggttttcgggagtcaggggaggagatgactttgcttctgtgcacagccccgtcttccaggagccacaactcagaagaaaagggtgctcagacttttgttatacacatttgctttgtgtaaataaatgtttacaattttatatgaaagatggaataagcgctagagcttccaactgtatattttttacttttatagattttaaaactatgatcctttatatgtgtgttttgggggagctatgataagttttatggcaaacggttggtattgttaactttttattgtcatcaaaagttcataaaagtcctattaatccccatattcttctactgcccttaactctggtatacaccaaaaagaaatctttactttccttgttttatcattataaaaataaagtattttgctagtatggaaaaaaaaaaaaaaaaaaaaaaaaaaa

SEQ ID NO: 30029 - DNA, 5316 bp, Homo Sapiens
cggacgcgtgggaacgaagccacccattacggtatgatgatgtcaaacgtgatgctgatgctacagttacagcccctgctggcgcagcctctctgattctctctccctctccgcgtccagtgctgggctttttcagacaagtgcatctcctaaccaggtcacatttcagccgcgacccactctccgccagtcaccggaggcagaccgcgggaggagagctgaggacagccgcgtgcgcttcgccagcagcggggtgggaggaaggacattaaaatactgcagaagtcaagaccccccaggtcgaacccagaccacgatgcgcgccccgggctgcgggcggctggtgctgccgctgctgctcctggccgcggcagccctggccgaaggcgacgccaaggggctcaaggagggcgagacccccggcaatttcatggaggacgagcaatggctgtcgtccatctcgcagtacagcggcaagatcaagcactggaaccgcttccgagacgaagtggaggatgactatatcaagagctgggaggacaatcagcaaggagatgaagccctggataccaccaaggacccctgccagaaggtgaagtgcagccgccacaaggtgtgcattgcccagggctaccagcgggccatgtgcatcagtcgcaagaagctggagcacaggatcaagcagccgaccgtgaaactccatggaaacaaagactccatctgcaagccctgccacatggcccagcttgcctctgtctgcggctcagatggccacacttacagctctgtgtgtaagctggagcaacaggcgtgcctgagcagcaagcagctggcggtgcgatgcgagggcccctgcccctgccccacggagcaggctgccacctccaccgccgatggcaaaccagagacttgcaccggtcaggacctggctgacctgggagatcggctgcgggactggttccagctccttcatgagaactccaagcagaatggctcagccagcagtgtagccggcccggccagcgggctggacaagagcctgggggccagctgcaaggactccattggctggatgttctccaagctggacaccagtgctgacctcttcctggaccagacggagctggccgccatcaacctggacaagtacgaggtctgcatccgtcccttcttcaactcctgtgacacctacaaggatggccgggtctctactgctgagtggtgcttctgcttctggagggagaagcccccctgcctggcagagctggagcgcatccagatccaggaggccgccaagaagaagccaggcatcttcatcccgagctgcgacgaggatggctactaccggaagatgcagtgtgaccagagcagcggtgactgctggtgtgtggaccagctgggcctggagctgactggcacgcgcacgcatgggagccccgactgcgatgacatcgtgggcttctcgggggactttggaagcggtgtcggctgggaggatgaggaggagaaggagacggaggaagcaggcgaggaggccgaggaggaggagggcgaggcaggcgaggctgacgacgggggctacatctggtagacgccctcagaagccggctgccgggggggactcaacagcagagctctgagcagcagcaggcaacttcgagaacggatccagaaatgcagtcagaaggaccctgctccacctggggggactgggagtgtgagtgtgcatggcatgtgtgtggcacagatggctgggacgggtgacagtgtgagtgcatgtgtgcatgcatgtgtgtatgtgtgtgtgtgtgtggcatgcgctgacaaatgtgtccttgatccacactgctcctggcagagtgagtaacccaaaggccccttcggcctccttgtagctgttttctttccttttgttgttggttttaaaatacattcacacacaaatacaaattgacaggtcaaaatccatgaaatgagatcccccagccgtgtcctccagcccagccctgaccccttggtttctaccctggctccccttggtttctaccctggctcaaccgacccctgtctgcccttctccctcctgcttctgaggtcaagctctggcctgcgagcctgtccccattgcaaaggggagggaggggcagggagctgtctaccagctgaggtcctcccaaaactgggccgatgtggtgtgacatccccaccagcctcagatgagacgggccaggacgcccagccacagcaagccctgtccctttgccggatccccaaacactagagaagctctcctaacccaaggcggagaatgaaggtggtggcggcagaggaggagggcagcagctgagaggccagggacagggtgcctcgccaagctgtctgaggtctgtcccaggtggcccaggtggtgcaggtagaacagggtgaggagagggggtcggctcaacaggaggaggctgtggctgcagagcctggaggagcttttaggtgttgagatggggcagctctgaatcctagaccctggaatagcctgtcccttttctctgggtctcgtggtggagccatgatctgggctgctctcttggggacactgggtggtggttacacagttgacctctgcctggctcccccttggtgcaactcctgcctccatcccccttgctggggtcccctcatccacttgagggcgcctgagggccaggagcagcaggcaaggagcctgggtctaggctaagggggtgtgtgcccacctcctccctgacccttaacactcctgtcctgcccagaccaacagagagagctgtccctgagaccccggagagaagcagctgccgaaagctgcagcctttccgcactctgagaccatgatcttcctcctgccaggggagagccacccacaggccatgtccagccccacttccctcagcccccagggcttccttctggcccctctgaggattccctagggctgccccgcagaggggcttccccaagctctgttttgaagcctgcaatgtggaaaagtgagaagtcagagggaacaggacaggtgcagccgggctctgaggccacacctcacacctcgctgttccccaacatcccctgagcagtgtgagctcatctcaccagatgagaagaggccctgtgcatttcttttgtttgtttgttgctgttttcccccacccatccagttctcctcagcaaagcaaattccttaacacctttggtggagaatttcttacccagacttggggctgtgatgcccttcagtgcgtggtgagtgcagcgtgtgtgcgtgtgcctgtgtgtgaacctgggggccatcctggtggcctgggagcgtgaggagaggccccctgtgtgctgggtgagtggtgggtgtggggtcaatgcagtgaggctctctgggtgaggctcccaacctggcagtccccagcctcccagcatctgtgagcgtctgttggactttacagaagagcctcatcccgtctgcccctcactctgccctggaatcaacatcttccgagtccttcttgggggaaatagcagagccccacttaactccataaactgcttcccattccgcagcccagttctgattgttgaggtgtcgcgtcgttccaggtcccccagtcccctctttctcctgtcctctctctgtccttcacctccccactccagccccggctcagttcagggaaatgctgttccatatcagccctctgctctctgaggcagccgcgcctctgactcggagctacttgaaacttctgctcttgctaggattggagtctacctatctcttccatttgtcccagctggagttctggaactttcctcctcggggtgggggtgggggttgttaaggatgctggggggcctggggaaggaaggagttcagaggaagggtgtcccctgtcctcttgatgtcaccctccgctcctgggacacgtgctctctctgtctctgggtcttctggctgtgcacgtttgtgtgtccttgtaaatatgttttaggaagaaagcaaaagggactgaactagcctctggtaggattgcaggggtccagccttgcctgtttccgaagcccccacactgcctttcgccccactgagactggtcccctcaaaaggtagacaaaacagcagctccctgtggagctgaagggcggcctcaaagtggctttttgttagacaaggttaaggtttcctcatgagcaaggttgcagatcggtccttcctcagctccttgatttgtgaccttgaccaaggggcctgccacccagcccctccagtgccctctcctcgatgcctcgctccttcctgcccccactcccctggcttaggcaggtaggggaattagggccatgctggaagaagcttaaccatgtgttcaaagaacggtttcttgcttgcttggtcctggaactccccttggctgccccaggcctccttggcccatgggtgctgggggaggtggatgtcagatctggtaggttgcagcagagaaaataaatgtgccttgagagaccactcagagagggtccaagggtgatggagaaggaagcatggcctgggagcttggaagggaggggtggtgggtggcggcatcttgactgccccctgttgtcccacacgtggggggtggtcaccccccttcactccagcccgcctgccttcagccttccatgagcttcacctgcttccaacttcactttggagggggtggggtccgttggcatcaacacggggaccctctgcttcaccaaagcccgagccctcagcccctggggagaacaaatggctgagctttgatacctggggtcgtcgagaggctgcgggctggcggcagtcccaggggagagacaccacagaaggagacccagacatcccgaggaagttcccagcagagcaaactgctttccagcctgaagcctgcttaaactgtgtgatgtgcaataactgagcttagagttaggaattgtgttcaagtgcttggatttccgtctgtagatttaactgctgaaattgtatctctcagtaattttagatgtcttttaaaaaattgaaaaacaaagtgttagactgtgtgcgtgtgcgttgatgggcactcaagagtcccgtgagtcatccagccctgcctttcccctgcgcccccatcctctcacgtcccgccctgcctccacttggggaccctgcctcgtgtcgtctttatctgcctattactcagcctaaggaaacaagtacactccacacatgcataaaggaaatcaaatgttatttttaagaaaatggaaaataaaaactttataaacacc

SEQ ID NO: 30030 - DNA, 5316 bp, Homo Sapiens; identical to SEQ ID NO: 30029

SEQ ID NO: 30031 - DNA, 5445 bp, Homo Sapiens
cagggacatttcgggattctggatttcttggtctgcaactccctgtgtgccaggcggggctgggccccgctgcggctggctggcgtttggcgctctcatcgagggagcgcttcgctttgaaatctacccactccttttttttttttttttttaaaccaggtatgatgatgtcaaacgtgatgctgatgctacagttacagcccctgctggcgcagcctctctgattctctctccctctccgcgtccagtgctgggctttttcagacaagtgcatctcctaaccaggtcacatttcagccgcgacccactctccgccagtcaccggaggcagaccgcgggaggagagctgaggacagccgcgtgcgcttcgccagcagcggggtgggaggaaggacattaaaatactgcagaagtcaagacccccccaggtcgaacccagaccacgatgcgcgccccgggctgcgggcggctggtgctgccgctgctgctcctggccgcggcagccctggccgaaggcgacgccaaggggctcaaggagggcgagacccccggcaatttcatggaggacgagcaatggctgtcgtccatctcgcagtacagcggcaagatcaagcactggaaccgcttccgagacgaagtggaggatgactatatcaagagctgggaggacaatcagcaaggagatgaagccctggataccaccaaggacccctgccagaaggtgaagtgcagccgccacaaggtgtgcattgcccagggctaccagcgggccatgtgcatcagtcgcaagaagctggagcacaggatcaagcagccgaccgtgaaactccatggaaacaaagactccatctgcaagccctgccacatggcccagcttgcctctgtctgcggctcagatggccacacttacagctctgtgtgtaagctggagcaacaggcgtgcctgagcagcaagcagctggcggtgcgatgcgagggcccctgcccctgccccacggagcaggctgccacctccaccgccgatggcaaaccagagacttgcaccggtcaggacctggctgacctgggagatcggctgcgggactggttccagctccttcatgagaactccaagcagaatggctcagccagcagtgtagccggcccggccagcgggctggacaagagcctgggggccagctgcaaggactccattggctggatgttctccaagctggacaccagtgctgacctcttcctggaccagacggagctggccgccatcaacctggacaagtacgaggtctgcatccgtcccttcttcaactcctgtgacacctacaaggatggccgggtctctactgctgagtggtgcttctgcttctggagggagaagcccccctgcctggcagagctggagcgcatccagatccaggaggccgccaagaagaagccaggcatcttcatcccgagctgcgacgaggatggctactaccggaagatgcagtgtgaccagagcagcggtgactgctggtgtgtggaccagctgggcctggagctgactggcacgcgcacgcatgggagccccgactgcgatgacatcgtgggcttctcgggggactttggaagcggtgtcggctgggaggatgaggaggagaaggagacggaggaagcaggcgaggaggccgaggaggaggagggcgaggcaggcgaggctgacgacgggggctacatctggtagacgccctcaggagccggctgccgggggggactcaacagcagagctctgagcagcagcaggcaacttcgagaacggatccagaaatgcagtcagaaggaccctgctccacctggggggactgggagtgtgagtgtgcatggcatgtgtgtggcacagatggctgggacgggtgacagtgtgagtgcatgtgtgcatgcatgtgtgtatgtgtgtgtgtgtgtggcatgcgctgacaaatgtgtccttgatccacactgctcctggcagagtgagtcacccaaaggccccttcggcctccttgtagctgttttctttccttttgttgttggttttaaaatacattcacacacaaatacaaattgacaggtcaaaatccatgaaatgagatcccccagccgtgtcctccagcccagccctgaccccttggtttctaccctggctccccttggtttctaccctggctcaaccgacccctgtctgcccttctccctcttgcttctgaggtcaagctctggcctgcgagcctgtccccattgcaaaggggagggaggggcagggagctgtctaccagctgaggtcctcccaaaactgggccgatgtggtgtgacatccccaccagcctcagatgagacgggccaggacgcccagccacagcaagccctgtccctttgccggatccccaaacactagagaagctctcctaacccaaggcggagaatgaaggtggtggcggcagaggaggagggcagcagctgagaggccagggacagggtgcctcgccaagctgtctgaggtctgtcccaggtggcccaggtggtgcaggtagaacagggtgaggagagggggtcggctcagcaggaggaggctgtggctgcagagcctgggggagcttttaggtgttgagatggggcagctctgaatcctagaccctggaatagcctgtcccttttctctgggtctcgtggtggagccatgatctgggctgctctcttggggacactgggtggtggttacacagttgacctctgcctggctcccccttggtgcaactcctgcctccatcccccttgctggggtcccctcatccacttgagggcgcctgagggccaggagcagcaggcaaggagcctgggtctaggctaagggggtgtgtgcccacctcctccctgacccttaacactcctgtcctgcccagaccaacagagagagctgtccctgagaccccggagagaagcagctgccgaaagctgcagcctttccgcactctgagaccatgatcttcctcctgccaggggagagccacccacaggccatgtccagccccacttccctcagcccccagggcttccttctggcccctctgaggattccctagggctgccccgcagaggggcttccccaagctctgttttgaagcctgcaatgtggaaaagtgagaagtcagagggaacaggacaggtgcagccgggctctgaggccacacctcacacctcgctgttccccaacatcccctgagcagtgtgagctcatctcaccagatgagaagaggccctgtgcatttcttttgtttgtttgttgctgttttcccccacccatccagttctcctcagcaaagcaaattccttaacacctttggtggagaatttcttacccagacttggggctgtgatgcccttcagtgcgtggtgagtgcagcgtgtgtgcgtgtgcctgtgtgtgaacctgggggccatcctggtggcctgggagcgtgaggagaggccccctgtgtgctgggtgagtggtgggtgtggggtcaatgcagtgaggctctctgggtgaggctcccaacctggcagtccccagcctcccagcatctgtgagcgtctgttggactttacagaagagcctcatcctgtctgcccctcactctgccctggaatcaacatcttccgagtccttcttgggggaaatagcagagccccacttaactccataaactgcttcccattccgcagcccagttctgattgttgaggtgtcgcgtcgttccaggtcccccagtcccctctttctcctgtcctctctctgtccttcacctccccactccagccccggctcagttcagggaaatgctgttccacatcagccctctgctctctgaggcagccgcgcctctgactcggagctacttgaaacttctgctcttgctaggattggagtctacctatctcttccatttgtcccagctggagttctggaactttcctcctcggggtgggggtgggggttgttaaggatgctggggggcctggggaaggaaggagttcagaggaagggtgtcccctgtcctcttgatgtcaccctccgctcctgggacacgtgctctctctgtctctgggtcttctggctgtgcacgtttgtgtgtccttgtaaatatgttttaggaagaaagcaaaagggactgaactagcctctggtaggattgcaggggtccagccttgcctgtttccgaagcccccacactgcctttcgccctactgagactggtcccctcaaaaggtagacaaaacagcagctccctgtggagctgaagggcggcctcaaagtggctttttgttagacaaggttaaggtttcctcatgagcaaggttgcagatcggtccttcctcagctccttgatttgtgaccttgaccaaggggcctgccacccagcccctccagtgccctctcctcgatgcctcgctccttcctgcccccactcccctggcttaggcaggtaggggaattagggccatgctggaagaagcttaaccatgtgttcaaagaacggtttcttgcttgcttggtcctggaactccccttggctgccccaggcctccttggcccatgggtgctgggggaggtggatgtcagatctggtaggttgcagcagagaaaataaatgtgccttgagagaccactcagagagggtccaagggtgatggagaaggaagcatggcctgggagcttggaagggaggggtggtgggtggcggcatcttgactgccccctgttgtcccacacgtggggggtggtcaccccccttcactccagcccgcctgccttcagccttccatgagcttcacctgcttccaacttcactttggagggggtggggtccgttggcatcaacacggggaccctctgcttcaccaaagcccgagccctcagcccctggggagaacaaatggctgagctttgatacctggggtcgtcgagaggctgcgggctggcggcagtcccaggggagagacaccacagaaggagacccagacatcccgaggaagttcccagcagagcaaactgctttccagcctgaagcctgcttaaactgtgtgatgtgcaataactgagcttagagttaggaattgtgttcaagtgcttggatttccgtctgtagatttaactgctgaaattgtatctctcagtaattttagatgtcttttaaaaaattgaaaaacaaagtgttagactgtgtgcgtgtgcgttgatgggcactcaagagtcccgtgagtcatccagccctgcctttcccctgcgcccccatcctctcacgtcccgccccgcctccacttggggaccctgcctcgtgtcgtctttatctgcctattactcagcctaaggaaacaagtacactccacacatgcataaaggaaatcaaatgttatttttaagaaaatggaaaataaaaactttataaacacc

SEQ ID NO: 30032 - DNA, 5737 bp, Homo Sapiens
gtcagatcagggatcattttttttccttcctctactccctcccccctacccgcccctccctccctgtttcccttccctccctccctcccctctctgctgggtctgtgcgctggggcgcccgatcccctccgcagctgggacgctccgaactcgaggcaggagtcggctctccggagcctcgtccctcccttccccttccctgcccccttcccccacccccgactcgggcttggcgcggcggccagaggaaccccgagtcccggcccaggcccctgagctggagggatggaaaactcctctgcagcatcagcctcctcggaggcagggagcagccgctcccaggagatcgaggagctggagcgcttcatcgacagctacgtgctggagtaccaggtgcaggggctgctggctgacaagacggagggtgatggcgagagcgagaggacccagtcccacatctcccagtggacagcggactgcagcgaaccgctggacagcagctgttccttctcccgagggcgagcccccccacagcagaatggcagcaaagacaactctctggacatgctgggcacggacatctgggcggccaacaccttcgattccttcagtggtgccacctgggacctgcagccggaaaagctggacttcacccagttccaccgcaaagtccgacacacgcccaagcagcccctgccacacatcgaccgcgaagggtgtggcaaagggaagctggaagatggggatggcatcaacctgaatgacatcgagaaggtccttccagcctggcagggctaccacccgatgccccatgaagtggagatcgcacacaccaagaagctgttccgcaggaggagaaatgatcgaaggcggcagcagagacctccggggggcaacaagccccaacagcatggtgaccaccagccaggcagtgccaaacacaacagggaccaccagaaatcctaccaggggggctcagcaccccacccctcagggaggcccactcaccatggctacagccagaaccggcgctggcaccatggcaacatgaagcacccaccaggcgacaagggggaggcaggcgcacaccgcaatgccaaagagaccatgaccatcgagaacccaaaactggaggacactgcaggggacaccgggcacagcagcctcgaggccccccgcagccctgacaccctggccccggtggcttctgagcggctgcccccacagcagtcaggggggccagaggttgagacaaaacgtaaagacagtattcttcccgagcgcatcggggagcggcccaaaattaccctgctccagtcttccaaagacagactgcggcgaaggctaaaggaaaaggatgaagtggccgtggagacgaccactccccagcagaacaagatggacaagctgatcgagatcctgaacagcatgcggaacaacagcagcgacgtggacaccaagctcaccaccttcatggaggaggcccagaactccaccaactccgaggagatgctgggcgagatcgtgcgcacaatctaccagaaggctgtgtccgaccgcagcttcgccttcaccgctgccaagctctgcgacaagatggcgctctttatggtggaggggaccaagttccggagcctgctcctcaacatgctgcagaaggacttcacggtgcgcgaggagctgcagcagcaggacgtggagcgctggctgggcttcatcaccttcctgtgtgaggtcttcggcaccatgcgcagcagcacaggcgagcccttccgtgtgctcgtgtgccccatctacacctgcctcagggagctcttgcaatctcaggatgtgaaggaagatgctgtcctttgctgctctatggagctgcagagtacaggccggctgctggaggaacagctgcctgagatgatgacagagctcctggccagcgcacgggacaagatgctgtgcccctcggagtccatgctgacccggtcgctgctcctagaggtcatcgagctccacgctaacagctggaaccctctgacgccccccatcacgcagtactacaacagaaccatccagaaactgacagcctgacagccagggggcctggcaggcggcccacgggcagctggggccctggtgcacagggccagatggacaggcgggaggacaggggtggccctggcgggagaaagaaatggggaggagggcaggcagagtcggtggccagtctggagccagacggggaagggagcaaatccctgagaggagtgcccccgcacaagccccccagcccgagcatgcaagctcacaccaataagggaagcatgtttctttttcctggtggccctggccctccccttcctcactcccgcctctcccctccccatcagacccatcccccacggagctttgtgtgagggatctcatcgctgtgactcctcggagaccttggcagcctcgcacgccggggcaccgcttgggtcagaaaggacctcggaaggctgaaaaagtgggtcggagacgggctcgcattgttcccgcatgctgtcagccgcagtcgccaactggcagcaggcgacgtgtagcagatgtccgggaggacaaaggcaggcacggtccccaccagccgcccgtaattgacggcctttgtcagccatggcagagctgacgctccacctcccacctccaagtcctcctcactgcagcccccacagcctcaggcctagggggtcaggcgcagcgggggagatggagtttgcagttccacttgcactcttttgtttattgtgttttatttttcaaaagtcggttgctttgaagtctctttggccaatgaaaatgcccgtgaggtgatcacacagtcagcactgttgaggacccccggattagtgggagatcaaacccagctcccctctagaagaaggattcgagccacagacagcttgccagtagccaattagggtaattggaaacttctgccccggcggggggtccccgctggaatcctgtgttcctcgccactggcttccagcgcctctgttttctcaaagggctgatactgtcaccactgggaccaagttaaacctggtcctggccccaggggccttgtggcaaacagggcacagaacgagactggcaaattaaaaccaaaattctagatggtgtcttgcgctccacacgcaggtcttactggggaaaaggatgggagtgggggctccccaggactcgattttagctaatgcgctgtgtcactgccccagctcggacgtagaagcccagccctccgtgagctcttgggaaaggggtgaattcactgggtcatggaagggacagtcaggtgaccagcggggtcgccagatgaagcttcccagccgggaaacaagacggggtttcttggcaggccctggtcctggggagcaggccctgttgttggctggagaggaaggtgtggggtggaacaggtgtccacatagctccatctctgggggctggagcacacactttgatgagcccccccggaaatgatgtcagagcctagccgcttccttatttgctcttttattgaggccgggcaggccctgggtcactttggaggcccctcttggtccacactggactggccgggaggtgatgggcggggaaggttctcgtgattgattgattctgagtctgagagtggcgagtggggagaggcttccccagttctctccagctttccctgcagctgcaacctgccctctggtcccaggtgtggagcctttgcctgtctctaaaaagagcctgttggcgacaaggtgtagggggcacaagtttacctgaaacaggtcagtggtctctcccaagaagcgcacgccacctctggtccctggccctgaaccctgccttcttcctccctccacggtttcttcccagactttctcaagctcctcctcactgcccttcctccccagcccagcctgggaacacagatgccccgcgggtaggaggcctcgagggaggagccgggctgatgcggggctgctcagggcaggccccagggcgagcttgccatcgtggccaggcagcctccacctgtgcttcagtggcccctgcccccctgaagcatgtggggtttgtccgctaggaggaggcaaggcccccgaagagaggagagacctgggagtgggagctcaggtcagggaggaggcaggggagtggggtctcccagacccaacggtgagctcagagcaagcttcacgcaggacgctccgaaacactgtgtggagggggctgtgttgtgggcaccttggggcctgattctccttcctccgaacgggctccttgatggcctggccacaggggcagctccccattggctgttaggaccagagtgtgaagaagaagtgaaatataaatatgtatacatatataaatatatttttaattacatgtcgtgtcacggtggctccagacatactgtttgcctagtttattccactgcttgaaagcgcttcctagccaatctgaacaacaacactttaagctgtttttctaaatgcaggttgctgctcctttttcagatatggaaggaaaacgttaagactattttttttttaaagaaacaacagtcaagcctaaaatttgagaccccgaggcagcttcccgagggagactgctcagacaggaactgcaggacagaagtggatgccccacagaccctggccccctccccaagtccatcccctctctgtggcatgaggaaggccgcgtccgagttgacctctgaatgtatgtgatgagaggcagagctggatattgcatttctaaggcttgcattgctttcccctcgcccgcggttcttggcgcatggaagaggcggtccagccatctgatgttgatcctgtctcagtctccccactgcctgtcaggatgagttagtcattgtttttctccgaggcggcctgcttgccacagccctgctccccaaggcctggtggctttgccgaagctctgggaccgcagccccagcgaggcccccaacctcacccagacgaggccaggagccccgccaccctccacgggatgtgcaccctcagaccccattctctctgttcgtccttccttgaccagtctgtaaaccttcactgtttggggatcgtcctgtccatccatgtaaatgtaaatgttggccgagtcggtatttattctgattgatttttattttattctattattttctccgagggatgagggtggggggtgtgggaagggtaccacagatcaggccggggcagctgtaggggcgggggcccagacagccaggccgccaccagagcagccccatggggtgccccagacgcgggcctccaagaagccaagtcccagtctgttttctggcatcagacaccggcccgtgttccttgtcagacagacagactctcaggcctgcctggggagtcgtgtccctcagctgcagggcactgtgttgggaaaccattggctgggcctttgaggacacagatcagaagaaagaaagacaactttcctctgcgcggaacactcacacggaagggctggccgcctccctgagccggctgggagtggacgacaggacctacctccccagagcaagggcctggggcttcccgccaaagctgccgcggaaccccgctagtgcgaccaccctccctccgtcggtatgtcctgctttccagctgaacccaaactacaagtgggtttaaaaaaaataaacaccaccaccaaaaac

SEQ ID NO: 30033 - DNA, 3901 bp, Homo Sapiens
cggagacgagagaggaagcagccggcccgcccctgggttcgcgctctcgccgcctctgagggaattgaattgaggcgccgcggctgcgagagctaaaaaggaaggaggagccgccgcgggactgagacgggggcagagccgaagagaccgacacagagaaggaaacgaggaggaggatgtctcaccgggcggccagcgcctggatcagcccgtgactcttaacagcggcgggcctcagaccccagcgcagactcggactttgtctttgggggcccgtgctctgccctccccggtttccgacaggacccagaggagccggcgtgcctctctgccctccagccttcttcaccatgtccaagatgccggccaagaagaagagctgcttccagatcaccagtgtcaccacggcccaggtggccactagcatcaccgaggacaccgagagcttggacgacccggacgagtcacgcacagaggacgtctcttccgagattttcgacgtctctcgggccacggattatggccctgaggaggtctgcgagcgcagctcttccgaagagacgcttaacaatgttggggatgcggagactcccgggaccgtctccccaaacctcctcctagatgggcagctggcagcggcggctgctgctcccgccaacggaggaggagtcgtttcggcccggagcgtgtctggggcgctcgccagtaccctggcggcggctgccacttcggcccccgcccccggagcacccggcggcccccagctcgcgggctcatccgccgggccagtgactgcagccccatctcagcctcccaccacatgtagttcccgttttcgcgtgatcaagctggaccacgggagcggagagccctatagacgcggccgatggacgtgtatggaatactatgagagggattcagacagcagcgtcctgactagatccggggattgcattagacacagcagtacttttgaccagactgcggagcgggacagcggcctgggcgccaccggagggtcggtggtggtagtagtggcctccatgcagggggcgcacgggcccgagtcgggaactgacagctccttgactgctgtgtcacagctacccccgtcggagaaaatgagccagcccactccggcccagccgcagagttttagcgttgggcagccacagccgccgccgccacccgtaggtggggctgtggctcaaagctcggctccgctgccgccgttcccgggagccgcgaccgggccgcagccaatgatggcagccgcgcagcccagccagccccagggagcggggcccgggggacagactctgccgccgacgaatgtaaccctggcgcagccggctatgtccctgcctccgcagccgggccctgcagtgggcgcccccgcggcgcagcagccccagcagttcgcgtatcctcagcctcagataccgcccggacatttgctgcccgtccagccctccggccagagtgagtacctgcagcagcacgtggccggcctgcagccgccaagccccgcgcagccctcgtccaccggcgccgcagcgagccccgccacggcggccacccttcccgtgggcaccggccagaatgcttcctcggtgggcgcgcagctcatgggcgcgtcttcccagcccagcgaagccatggccccccggacgggaccagcgcaaggcgggcaggtcgcgccttgtcagccgactggagtgcccccggctactgtgggaggcgtggtgcagccgtgcctcggtcctgccggggctgggcagccccagtccgtgcctccgccgcagatgggtggcagtggtccgctgtcagccgtacctggtggccctcacgccgtggtgcccggagttccaaacgtgcctgcagccgtgcccgctccaagcgtgcctagtgtgtctaccacttctgttactatgccaaatgtacccgcgcctctggcccagtcgcaacagctgagcagccatacgccagtcagcaggagcagcagcataatccagcatgttgggctgcccttagcgccaggcacacacagcgcaccaacaagtctaccacagtctgacctaagccagtttcaaactcagacccagcctttagtcgggcaagtcgacgatactagaagaaaatcagaacccctacctcaaccaccactttctctcattgctgaaaataagcctgttgtgaagccgcctgttgcagattccctggcaaacccccttcagttaacacctatgaacagtctggccacctctgtattcagcatagctattcctgttgatggtgatgaagacaggaatccttcaactgctttctaccaagcgttccatttgaacacgttaaaggaatcaaagagcctctgggatagtgcatctgggggaggtgttgtagccattgacaacaaaatagaacaagcaatggatctggtgaaaagccatttgatgtatgcagtaagagaagaagtggaagttttaaaggaacaaataaaagaattagttgaaagaaactctttacttgaacgagaaaatgcactgttaaaatctctttcaagcaatgatcaattatcccaactcccaacccaacaggccaatcctggtagcacttctcaacagcaagcagtgatagcacagcctccgcagccaacgcaacctccacagcagccgaatgtctcctcagcataaagctttcttaagcctcattaagaaaaaaactgaaagcaatctatccttgtgtgccactggtgttctttccactttatacgaaagcaagtagccatgctttggttgtgtgtttggccttttcagtattagacaatcattctacaagagcttttcctctctctgagatgtcatgcagcgctgttgatgtccagttctatgtcatcagtacacaaggagaataatagatggggtttattaaagcgagcaaagtctgcattttacctggtgcgcatgagtggggtctttaagagttttggtggctctcccatgtttcctattacccatggatttaccctgagccttcctatcacattataaataacagttcatctaaagagccacttttctttctgattcagtaacatttgcctacataagttttcatttatttgtgttttatttattacagggctgctattttcataatgtacatgaacaatgtcacagaacttttttaatttttttgaataattataagtatcagtaaaggaagtgaaagacaggattgcatttaatagataaaacgtttaggcaataattgaacaaaagaatcctggcatatttctaacactaatggcaatttacttatggtatttattttcagtagtaaagacccagcttgaatgtaaattttgtatagtgtaagtatgaagaacatagtgcaactgtacaggtagtcaccagttattgtgatatgataaataattgggctattttgatgaagaaaactttgttcatttgtttctactttctaagagaaattgccacgattcctctgcttttcaacatttcgtatgacttttttttcgggtgggaataaaaagctgtgaaattgttcaacctactttgtaaccaaagaagcaaagctgtgtaatggagtttggtttttttttgttgtttttttttttttgtctttttttttttttataatgcacattctttatgtatttttatttagtgttttctcagtcacaattttctttactgtctagcatgatctgcatgacctataatctttgaaccactttcgtacctcatgtttttatccagcactcttattgtaatatgtactagtctgtgaacaatgtcaaataaaagagaacgaacaggtagtttggtggagctgagctagtgtacaatacactagttgtaaaaaaaaaaaaaaaaaa

SEQ ID NO: 30034 - DNA, 5491 bp, Homo Sapiens
ctcggctccgccccggcgctctcccagggcccctagctttccgctgggtcgggcggaaatgagccgtggcttttggctggcggagccgctggcagggaccgggccccaccctgccccagtggctgccgactcacgcgggtgcagctctgttccgcggaggcacgccccctcccgtctctccgtctcgaccccctcgcggggcccaggtggggcccaagtcgccgccagcgtctgtgccgcgtcccttgctctgtgaaggacaggcctcgcgccaggaccccggtggacttctgaggtgccaggatggtgggagaactccgctacagggaattcagggtgcccctggggcccggcttacatgcctatcctgatgagctgatccgccagcgcgtgggccatgatgggcatcctgagtaccagatccgttggctcatcctgcggcgtggcgatgagggggacgggggctctggccaagtggactgcaaggctgagcacatcctgctgtggatgtccaaggatgagatctatgccaactgccacaagatgctgggcgaggatggccaggtcatcgggccctcccaggagtctgcaggggaggttggggccctggacaaatctgtgctggaggagatggaaaccgacgtgaagtccctcattcagagagcccttcggcagctggaggagtgtgtgggcactatccctcctgctcctctacttcacactgtccacgtgctcagcgcctatgccagcattgagcccctcactggagtattcaaggacccaagggtcctggacttgctcatgcacatgttgagtagtcctgattatcagattcgctggagtgcaggccggatgatacaagccctgtcctcccatgacgctgggacccggactcagatccttctgtcactgagccaacaagaagccattgagaaacacctggattttgacagccgctgtgctctgctagcactgtttgcacaggccacgctctctgaacaccccatgtctttcgagggcattcagctaccacaggtcccaggaagggtgctcttctccctggtgaagcggtatttgcatgtcacctcgctcctggatcagctgaacgacagtgctgcggagccaggagcccagaacacctctgctcctgaggagttgagtggggagaggggtcaactggagctggagttcagtatggccatgggcaccctgatctcggagctggtgcaagccatgcgctgggaccaggcctcagacagaccaaggagctcagcacggtcccccggttccatcttccagcctcagctggcagatgtgagcccagggctccccgctgcccaggctcagccctccttcaggaggtcaagacgttttcgccctcgttctgagttcgcaagtggcaatacctatgctttgtatgtgcgggacacactgcagccggggatgcgagtgcggatgctggatgattatgaggagatcagtgccggggatgagggcgagtttcggcagagcaacaacggtgtgcctcctgtgcaggtattttgggagtcaacaggccgcacctattgggtgcactggcacatgctggagatcttgggctttgaggaagacattgaggacatggttgaggctgatgagtaccaaggggcagtggccagtagagtcctgggtagagccctgcctgcctggcgctggaggcccatgacagaactctatgctgtgccttatgtgctgcctgaggatgaggacactgaggagtgtgaacacctgaccctggctgagtggtgggaactcctcttcttcatcaagaagctggatggacctgaccatcaggaggttctccagatcctccaggagaacctagatggggagattctggatgatgagatcctagctgaactggccgtgcccatagaattggcccaggacttgctgctgactctgccacagcgactcaatgacagtgccctcagggacctgatcaactgccatgtctacaagaagtatgggcctgaagccctagcagggaaccaagcctacccatcccttctagaagcccaagaagatgtcctcctgctagacgcgcaggcccaggctaaggactcagaagatgcagccaaagtggaagcaaaagaacccccatctcagagtcccaacactcccctgcagcgtctggtggagggttatggtccagctgggaaaatcctcctggatctagagcaagccctcagctcagaggggacccaggagaacaaggtcaagccactcctgctgcagctgcagcggcagccgcagcccttcctggcactgatgcagagcctggacactccggagactaacaggaccctgcacctgactgtgctgagaatcctgaagcagctggtggacttccccgaggcactgctgctcccctggcacgaggccgtggatgcctgcatggcctgcctgcggtccccaaacactgatcgagaggtgctccaggaactgattttcttcctgcaccgcctgacctcagtgagcagggactatgccgtggtgctgaatcagctgggagcaagagacgctatctccaaggccctggaaaagcacctgggaaagctggagctggctcaggagctgcgggacatggtgttcaagtgtgagaagcatgcccacctctaccgcaaactcatcaccaacatcctgggaggctgcatccagatggtgctgggccagatcgaagaccacagacgaacccaccaacccatcaacatccctttctttgatgtgttcctcagatacctgtgccagggctccagtgtggaagtgaaggaggacaagtgctgggagaaggtggaggtgtcctccaacccgcaccgggccagcaagctgacggaccacaaccccaagacctattgggagtccaacggcagcgccggctcccactacatcaccctgcacatgcgccggggcatcctcatcaggcaactgactctgcttgtggctagtgaggactcgagttacatgccggcccgagtggtggtgtgcgggggtgatagcactagctctcttcacacggaactcaactcggtgaatgtgatgccctctgccagccgggtgatcctcctggagaacctgacccgcttctggcccatcatccagatccgcataaagcgctgccagcagggtggcattgatacgcgcattcgggggttagagatcctaggccccaagcccacgttctggccagtgttccgggagcagctctgtcgtcacacacgcctcttctacatggttcgggcacaggcctggagccaggacatggcagaggaccgcaggagcctcctgcacctgagttctagactcaacggtgctctgcgccaggagcagaattttgctgaccgcttcctccctgatgacgaggctgcccaagctctgggcaagacctgctgggaggccctggtcagccccgtggtgcagaacatcacctcccctgatgaggatggcattagccccctgggttggctgctggaccagtacctggagtgtcaggaagctgtcttcaacccccagagccgcggcccagctttcttctcgcgggtgcgccgtctcactcacctgctggtgcatgtcgagccctgtgaggcaccccctcctgtggtggccactcctcggcccaaaggcagaaacagaagccacgactggagctccttggctacccggggccttccaagcagcatcatgagaaacctgacgcgctgttggcgggccgtggtggagaagcaggtgaacaattttctgacctcatcctggcgggatgatgactttgtgccacgctactgtgagcactttaatattctgcagaactcaagctctgaactgtttgggcctcgggcagccttcttgctggcgctgcaaaatggctgtgcgggagccttgctgaagctcccttttctcaaagctgcccacgtgagtgagcagttcgcccggcacattgaccagcagatccagggcagccggatcggtggagcccaggaaatggagaggctggcacagctgcagcaatgcctgcaagctgtcctgattttctccggcttggagatagccaccacttttgagcattattaccagcactacatggcggaccgtctcctgggcgtggtctcgagctggctggagggggccgtgctggagcagatcggtccctgcttccccaaccgcctcccccagcagatgttgcagagcctgagcacctctaaggagctgcagcgccagttccacgtctaccagctccagcagctggatcaggaactcctgaagctggaggatacagagaagaaaatacaggtgggccttggggccagtggcaaggagcacaagagcgagaaggaagaggaagctggggcagcagcagtggtggatgtggcggagggagaggaggaagaggaggagaatgaggacctctactatgaaggggcaatgccagaagtgtctgtgcttgtcctgtcccgacactcctggcctgttgcctcaatctgccacacactgaaccccagaacctgcctgccctcctacctgaggggcactttgaacagatactccaacttctacaacaagagtcagagccaccctgcccttgagcgaggctcacagaggcgactgcagtggacgtggctgggctgggctgagctgcagtttgggaaccagaccctgcatgtgtccaccgtgcagatgtggctactgctgtatctcaacgacctgaaggcggtctctgtggagagtctgctggcgttctcagggctctccgcagacatgctcaatcaggcgattgggcccctcacctcttcaagaggccccctggaccttcacgagcaaaaggatataccaggaggggtcctcaagattcgagatggcagcaaggaacccaggtcgagatgggacattgtgcggctcatcccacctcagacgtacctgcaagctgagggtgaagacggccagaacttggagaagagacggaatcttctgaactgcctcatcgtccgaatcctcaaggcccatggagatgaggggctgcacattgaccagcttgtctgtctggtgctggaggcttggcagaagggcccgtgtcctcccaggggtttggtcagcagccttggtaaggggtctgcatgcagcagcactgacgtcctctcctgcatcctacacctcctgggcaagggcacgctgagacgccatgacgaccggccccaggtgctgtcctatgcagtccctgtgactgtcatggagcctcacactgagtccctgaacccaggctcctcaggccccaacccacccctcaccttccataccctacagattcgctcccggggtgtgccctatgcctcctgcactgccacccagagcttctctaccttccggtagccctagacttggggtcaggggaaggtagagctggagcttttacagaaataaaacccaagagtttgattataaaaaaaaaaaaaaaaaaaaa

SEQ ID NO: 30035 - DNA, 6636 bp, Homo Sapiens
gtcgacaataacaaaccaagccgcggcggtgtccgcggccctgccgagccctcggcgttgcctcagaatcccccagtcgcctgggcccctcggctctgacaggccgcggccttctgtcccccggccccagacccagagccgaggggcctgctcgcgtccttgtccgcccggacccctccctgcctcctagagttcggggccgcggcgggcgggcgcccgggacgccggcggttgtgtcggcttagcggtgccgaatgggcggttggtaaccgctgccgaggactaggcggcggcggaagatggtgccgggggtcgctggctctgctgctgccgccggcgaaggaggaggcgttgccggttttctgagtttaaccagtaatgccattcagttgccaatctcaagcaaagcaaacataagccagttttaatctactttttaagaaaagtggtagtccttttcacagtgcctgacgtaactgtatcagagggtgaggtataagctcacagaattcagataaatcatcatgaagttatatgtatttctggttaacactggaactactctaacatttgacactgaacttacagtgcaaactgtggcagaccttaagcatgccattcaaagcaaatacaagattgctattcaacaccaggtgctggtggtcaatggaggagaatgcatggctgcagatcgaagagtgtgtacctacagtgctgggacggatacaaatccaatttttctttttaacaaagaaatgatcttatgtgatcgtccacctgctattcctaaaactaccttttcgacagaaaatgacatggaaataaaagttgaagaatctcttatgatgcctgcagtttttcatactgttgcttcaaggacacagcttgcattggaaatgtatgaagttgccaagaaactttgttctttttgtgaaggtcttgtacatgatgaacatcttcaacaccaaggctgggctgcaatcatggccaacctggaggactgttcaaattcataccaaaagctacttttcaagtttgaaagtatttattcaaattatctgcagtccatagaagacatcaagttaaaacttactcatttaggaactgcagtttcagtaatggccaagattccactgttggagtgcctaaccagacatagttacagagaatgtttgggaagactggattctttacctgaacatgaagactcagaaaaagctgagacgaaaagatccactgaactggtgctctctcctgatatgcctagaacaactaacgaatctttgttaacctcatttcccaagtcagtggaacatgtgtccccagataccgcagatgctgaaagtggcaaagaaattagggaatcttgtcaaagtactgttcatcagcaagatgaaactacgattgacactaaagatggtgatctgcccttttttaatgtctctttgttagactggataaatgttcaagatagacctaatgatgtggaatctttggtcaggaagtgctttgattctatgagcaggcttgatccaaggattattcgaccatttatagcagaatgccgtcaaactattgccaaacttgataatcagaatatgaaagccattaaaggacttgaagatcggctctacgccctggaccagatgattgctagctgtggccgactggtgaatgaacagaaagagcttgctcagggatttttagctaatcagaagagagctgaaaacttaaaggatgcatctgtattacctgatttatgcctgagtcacgcaaatcagttgatgattatgttgcaaaatcatagaaaactgttagatattaagcagaagtgtaccactgccaaacaagaactagcaaataacctacatgtcagactgaagtggtgttgctttgtaatgcttcatgctgatcaagatggagagaagttacaagctttgctccgcctcgtaatagagctgttagaaagagtcaaaattgttgaagctcttagtacagttcctcagatgtactgcttagctgttgttgaggttgtaagaagaaaaatgttcataaaacactacagggagtgggctggtgctttagtcaaagatggaaagagattatatgaagcagaaaaatcaaaaagggaatcctttgggaaattatttaggaagtcttttttaagaaatcgtctgtttaggggactggactcctggcccccttccttttgtactcaaaagcctcgaaagtttgactgtgaacttccagatatttcattaaaagatttacagtttctgcaatcattttgtccttcggaagttcagccattcctcagggttcccttactttgtgactttgaacctctacaccagcatgtacttgctctacataatttggtaaaagcagcacaaagtttggatgaaatgtcacagaccattacagatctactgagtgaacaaaaggcatctgtgagtcagacatccccacagtctgcttcttcaccaaggatggaaagtacagcaggaattacaactactacctcaccgagaactcctccaccactgactgttcaggatcccttatgtcctgcagtttgtcccttagaagaattatctccagatagtattgatgcacatacgtttgattttgaaactattccccatccaaacatagaacagactattcaccaagtttctttagacttggattcattagcagaaagtcctgaatcagattttatgtctgctgtgaatgagtttgtaatagaagaaaatttgtcgtctcctaatcctataagtgatccacaaagcccagaaatgatggtggaatcactttattcatcagttatcaatgcgatagacagtagacgaatgcaggatacaaatgtatgtggtaaggaggattttggagatcatacttctctgaatgtccagttggaaagatgtagagttgttgcccaagactctcacttcagtatacaaaccattaaggaagacctttgccactttagaacatttgtacaaaaagaacagtgtgacttctcaaattcattaaaatgtacagcagtagaaataagaaacattattgaaaaagtaaaatgttctctggaaataacactaaaagaaaaacatcaaaaagaactactgtctttaaaaaatgaatatgaaggtaaacttgacggactaataaaggaaactgaagagaatgaaaacaaaattaaaaaattgaagggagagttagtatgccttgaggaggttttacaaaataaagataatgaatttgctttggttaaacatgaaaaagaagctgtaatctgcctgcagaatgaaaaggatcagaagttgttagagatggaaaatataatgcactctcaaaattgtgaaattaaagaactgaagcagtcacgagaaatagtgttagaagacttaaaaaagctccatgttgaaaatgatgagaagttacagttattgagggcagaacttcagtccttggagcaaagtcatctaaaggaattagaggacacacttcaggttaggcacatacaagagtttgagaaggttatgacagaccacagagtttctttggaggaattaaaaaaggaaaaccaacaaataattaatcaaatacaagaatctcatgctgaaattatccaggaaaaagaaaaacagttacaggaattaaaactcaaggtttctgatttgtcagacacgagatgcaagttagaggttgaacttgcgttgaaggaagcagaaactgatgaaataaaaattttgctggaagaaagcagagcccagcagaaggagaccttgaaatctcttcttgaacaagagacagaaaatttgagaacagaaattagtaaactcaaccaaaagattcaggataataatgaaaattatcaggtgggcttagcagagctaagaactttaatgacaattgaaaaagatcagtgtatttccgagttaattagtagacatgaagaagaatctaatatacttaaagctgaattaaacaaagtaacatctttgcataaccaagcatttgaaatagaaaaaaacctaaaagaacaaataattgaactgcagagtaaattggattcagaattgagtgctcttgaaagacaaaaagatgaaaaaattacccaacaagaagagaaatacgaagctattatccagaaccttgagaaagacagacaaaaattggtcagcagccaggagcaagacagagaacagttaattcagaagcttaattgtgaaaaagatgaagctattcagactgccctaaaagaatttaaattggagagagaagttgttgagaaagagttattagaaaaagttaaacatcttgagaatcaaatagcaaaaagtcctgccattgactctaccagaggagattcttcaagcttagttgctgaacttcaagaaaagcttcaggaagaaaaagctaagtttctagaacaacttgaagagcaagaaaaaagaaagaatgaagaaatgcaaaatgttcgaacatctttgattgcggaacaacagaccaattttaacactgttttaacaagagagaaaatgagaaaagaaaacataataaatgatcttagtgataagttgaaaagtacaatgcagcaacaagaacgggataaagatttgatagagtcactttctgaagatcgagctcgtttgcttgaggaaaagaaaaagcttgaagaagaagtcagtaagttgcgtagtagcagttttgttccttcaccatatgtagctacagccccagaactttatggagcttgtgcacctgaactcccaggtgaatcagatagatccgctgtggaaacagcagatgaaggaagagtggattcagcaatggagacaagcatgatgtctgtacaagaaaatattcatatgttgtctgaagaaaaacagcggataatgctgttagaacgaacattgcaattgaaagaagaagaaaataaacggttaaatcaaagactgatgtctcagagcatgtcttcagtatcttcaaggcattctgaaaagatagctattagagattttcaggtgggagatttggtactcatcatcctagacgaacgccatgacaattatgtgttatttactgttagtcctactttatattttctacattcagagtctctacctgccctggatctcaaaccaggtgagggtgcttcaggtgcatctagaagaccctgggtacttggaaaagtaatggaaaaagaatactgtcaagccaaaaaggcacaaaacagatttaaagttcctttggggacaaagttttacagagtgaaagccgtatcatggaataagaaagtataacttatggacaaaattaatacattctatgacatttttttctgatttgtcctgcagtgctcattcatcactccaaaaacagcaggccatctttttatgcaaaagtcagcgtgacaatatacttcactggtgtacatcgtttactttttaactggcttcattttaggaataataaattcatcagaatccttggctgaattaaaatggtttttgttttttggtttttttttttacccagacaactctagaaatgcggaccaaactacttcattttctcaaagggcataccttgtgcattgtggcttatgatgagccatattaattgcctgttaaatatacactagcttgaacttagatgttaaatgttattattaccagcatttgtccttttgtgaaatcagtatcagaatacttgcactctttaacacattctttataaaatgtataaattattcagaactatttaaaataaagaggagtgttattgcatgctgataatcattttgagtttgcctcagtagatactaaagcaaattgtttcagtttttttaaatgccctttgatgtttcaaaaaaaaaaaggaactgtaatttgattgactgattttaagatcagccataagtaatcagcaatcttcaaaagcactttcagtggattggtcatctgggttctaaagggaagagtctgtgctactaaccatttcaaatgcagactcaaaccttcccaacatctttatgactctagaataatcatattgatgaaatcgtaattcatggttgagtttcagaacaaaagatattcattgcacattaaccatttagaggtcatttaaataacaaaatattgtattgtaaaagaactgtacaattttaaaacaataaagatttgaacctgtaaatgtgtgtgccttttaaagaaggatacatttttaatatatttgagtgattgctgggaagtgtgaaaatattgttatgtatcatatcaaagagaaacatgtttattacaaaaatgttctttaactatatactatgtaacagggtaaacagtgttatgtagaatagaattgtgtaaactagatctttagagaagttgccattgagcaaagttatttaaatgagttagttgagttggatgagaattgtttgaggtttgttgctagagaacaataataaaataattctttttcagaaaatatttaatttcttcataaaaataagttaaatatttttttaaatatgtatatctaatagtacaaaatggaataaacatcatagtgtatagaaaactgaatttgacaagttaatgaataaatgaacaaatgatttcaaaa

SEQ ID NO: 30036 - DNA, 5616 bp, Homo Sapiens
gaaactgcgggtgtgacccccccgtggtggctctgggtgtctgcggaggagctgggggcggaagcatgaggctaacggcttggcttcagtgaacgcaccgggatgtgcaggccgggaggtagaggcaggctgatgggggagggaacgagcagcctgtgagacggggtgacggcggctaccagcccgggcgggcaccgggactggaagagttgcctgagcagccggctggtccggcggccaggctagggcgggggcgagcgcccagttgagcctgctggggctggaggagcgagaagggttttcttcacatttcagagcgaaccagacggggacagtaaggtttggaggaagggggatcgttggaagtagcaagaagtggagagaatctggcaatagacgagaaaccgaaagaatcagaaagaagtctatgtgagtagctgaaagcattgggtgaccagaaagaaggtcggtgtaagtgaaggaagagtgaggtgtggctggatcaaagggctaagagaagcgggtctgtgtaagtggatgtgagtgaggatcaaggaaaagccgtggaagtggccgggggtcggggccgcagaagtgccagacggggccggaaagcagccgagcggagttcaaatttgagagcgtttggaaattggaagacttggtggcgaacgagggtcaggacctgcatcctgcctcagagagttatcgacgtatccggaatgtgggatcagaggctggtgaggttggccctgttgcagcatctgcgggccttctatggtattaaggtgaagggtgtccgtgggcagtgcgatcgcaggagacatgaaacagcagccacggaaatagggggtaaaatatttggagtaccttttaatgcactgccccattctgctgtaccagaatatggacacattccaagctttcttgtcgatgcttgcacatctttagaagaccatattcataccgaagggctttttcggaaatcaggatctgtgattcgcctaaaagcactaaagaataaagtggatcatggtgaaggttgcctatcttctgcacctccttgtgatattgcgggacttcttaagcagttttttagggaactgccagagcccattctcccagctgatttgcatgaagcacttttgaaagctcaacagttaggcacagaggaaaagaataaagctacactgttgctctcctgtcttctggctgaccacacagttcatgtattaagatacttctttaactttctcaggaatgtttctcttagatccagtgagaataagatggacagcagcaatcttgcagtaatatttgcaccgaatcttcttcagacaagtgaaggacatgaaaagatgtcttctaacacagaaaagaagctacgattacaggctgcagtagtacagactcttatcgattatgcatcagatattgggcgtgtaccagattttatcctggaaaagataccagccatgttgggtattgatggtctctgtgctactccatcactggaaggctttgaagaaggtgaatatgaaactcctggtgaatataagagaaagagaagacaaagtgtaggagattttgttagtggagcactaaataaatttaaacctaacagaacaccttctattacacctcaagaagaaagaattgcccagctatctgaatcaccagtgattcttacaccaaatgctaagcgtacattgccagtagattcttctcatggtttctcaagtaagaaaaggaagtccatcaagcacaattttaactttgagctgttgccaagtaatctcttcaatagcagttctacaccggtatcagttcacatcgatacaagctcagaagggtcatctcagagttcactctctcctgtactcattggtggaaaccatttgatcactgcaggtgtgccaaggcgaagtaaaagaattgcaggcaaaaaagtttgcagagtggaatcaggaaaagcaggctgcttttctcctaaaatcagccataaagaaaaggttcgaagatctctgcgtttgaaattcaatctagggaaaaatggcagagaagtaaatggatgttctggtgtcaatagatatgaaagtgttggttggcgacttgcaaatcaacaaagtttaaaaaatcgaattgaatctgtaaaaacaggtttgctttttagcccagatgttgatgaaaagttaccaaagaaaggttcagaaaagatcagtaagtctgaggaaaccttactaactccagagcgactagttggaacaaattaccggatgtcttggacaggacctaataattcaagttttcaagaagtagatgcaaatgaagcttcttcaatggtggaaaatcttgaggtagaaaactctttggagcctgatattatggtagaaaagtcacctgctacttcatgtgaactcaccccttccaatttaaacaataagcataatagcaacataacaagtagccctcttagcggggatgaaaataacatgaccaaagagactttggtgaaagttcaaaaagcgttttctgaatctggaagtaatcttcacgcattgatgaatcagaggcagtcatcagtaactaatgtggggaaagtaaaattaactgaaccatcttatttagaagatagcccagaggaaaatctatttgaaactaatgatttgactatagtagaatcaaaggagaaatatgaacaccacactggtaaaggtgaaaaatgtttttcagagagggacttttcaccccttcaaactcaaacatttaatagagaaacaactataaaatgttattcaactcagatgaagatggaacatgaaaaagacattcattcaaatatgccaaaagattatttaagcaagcaagaattctccagtgatgaagaaataaagaaacagcagtccccaaaggataaactaaataataaattaaaagagaatgagaatatgatggaaggtaacttaccgaagtgtgcagcacatagcaaggacgaggctagatcctctttctcacagcagagtacatgtgttgtaacaaacttgtcaaaacctaggcctatgagaattgctaaacagcagtcattggaaacatgtgagaaaacagtttctgaaagttcacaaatgacagaacatagaaaggtttctgatcacatacagtggtttaacaagctttctttaaatgaaccaaatagaataaaagtcaagtcacctcttaagtttcagcgtactcctgttcgtcagtccgtcagaagaattaattctttgttggagtatagcagacaacctacagggcataagttggcgagtcttggtgatacagcttctcctttggtcaaatcagtgagctgtgacggtgctctttcctcttgtatagaaagtgcatcaaaagattcctctgtttcatgtatcaaatcaggtcctaaagaacagaagtccatgtcatgtgaagagtcaaatattggtgcaatttcaaagtcaagcatggagttaccctcgaaatctttcttaaagatgaggaagcacccagattcagtgaatgcttctcttaggtctactacagtttataaacagaagatcttatctgatggccaagttaaggttcccttggatgatctgactaatcatgatatagtaaaaccagttgtaaataacaacatgggcatttcttctgggataaataacagggtccttaggagaccatcagaaagaggaagggcctggtacaaaggttctccaaaacatcctatcggaaaaactcaattactaccaacaagtaaacctgtagatttgtaattggtaaatgttatacttgtcattaatgtaaataaagtgagtaattggtatgacttgcaggatgatgtacatgttagtttgtagctcaggatgattgttaagcaatagatttgctctattgaaaatgtttcatttttttcactgtacaagcaacttagatttttatttgtacaaattacttctttgtttttcttaatgatggcaatttttaaactttaattttattgtgatctcttaaagcagaggttagactttacctttctgactctgtcgtccaggctggagtgcagtggcgcaatctcactgcaagctccacttcctgggttcatgccattttcctgcctcagcctcccgagtagctgggactacaggtgcccgccaccacgcccagctaattttttgtatttttagtagagacggtttcaccgtgttagccaggatggtctcgatctcctgaccttgtgatccgcccgcctcagcctcccaaagtgctgggattacaggcatgagccaccacgcccggctagactttacctttctaaagaaattgtttactggatttataagaagttaatttttgaaaatgacatatttttgtgtgatagaaagaatggagcaagttgtgcctatttcctccaagtcagataaggtttctaaaataaataaatttctagcatataaagggtagagataaactctgcaaatcttatgtctggaattatattaatgtttattgtccttgccaaaattcctagaaattaatttccttcaatagcatcctaaaactctatttttatttggggcagagtaatttcatttatagtgccagtaggtgtaccttgtgttcactcgaactaagaacaatggttaaggcagaataatgactaaaatatgttcatatattatgatgtggaaataattgataacttttaagccatactatgtttttaaagataatttgcacaaacacgtttgtgtctgttctgtccaatatagatttggcaattatttaaagagggataatcttgaaaaaaattaaccaaggtgatttcttatatgtagatgctcgattttggaatttgaaatagtagatgcacctctttaccttttttacttggataaaaacctatgatgattttgtcctgtgtgtaaatgttatttatttagcatagacattaaagataactctctggaaaatgacttgactaaggctctcatgaaattcaaagtgccatttagaacatgcaccaaattgtcaagtaaatctgtctaaatttatattttaaattattacaaattacacatctttgaggaaagagtattatgaacaatagaacatattctctaggttgtagaggaaggaataagcagacagaatcaaccactaaaggtagtttttcagattggttgttagaatgtcatgtttagatgttggagcagattagagcagcattcatgccactcggagcaaccagacttacagcataagtatgtacgaggaatttcaaatcatcagatgtttgcttggctaggttctactttgtttatttgatatcaaataggtttgtagatgtttatggcatttctaattgtaagtagagacaaaatattcatatagtcagatatatgttgtctgctttaaacaatttttaaattttaaaaatgcattaacgtctttttatatccatcaagggaaggatgaaatgttgaatttgaagactaattcagtaagaagtcctaggggtttaactgtacatactacctgaactggcttttctgagagatgaatcaataatgaaacatgtctgttttaaaaactacc

SEQ ID NO: 30037 - DNA, 6784 bp, Homo Sapiens
agcgaaatctccgtttcatggaggctgaggcaagagaaaatttcggagcctggatgtggaggagcccaacagcagaactaactcaggaaattgtctttcagaaaaaggccgaacgtaggctgggtctgagaatcaggctggggtaggtggaggaacctgcaagtttaaaggaaaaagaaaaggagagaatattttcagtgattatctctggtttgttatcattactaccatcttaaaggtaaaaagcattgcatttcaggtgttctttgatttttattttatttttttttttggtgcaattggctcatttaagaatttcaaaacatttaatgtaaaagcttttttttttttaaggaagtccataaattttggttcccagggttgcactggacttggaaggagtgctgttgtgtacatactattgtatggttttatttattattttactgtacaaatcagccgaaagaatttttccaagtgccatttcggatttattaatccttttttttttcctttcctcaaagatatttgctgttgtcatattaagcattggagactagaaaattactttccccctttgagctagagggtctcttgccaacagaaggacagctgagaaagctggatttaaaggatggttttatctgtactttgcagttaacagtgatattttgaaggcacatttttctgtgattcatttttttttggccatagtgctaaccttgaagagattcgtggctgggtttttggtttctgagaaggtcgtagtttttcctcttttcctttttttttcttttttcttttcttttctttttttttaaagcgggggaggggaagaggggctgagaaaggaaatcatgttcactggtagaagtagagtggagcatcagttaccagggtcctgagagctggaggagaaaggattctatcttcaagttgggaggccctcctctcaccttgctcaaaaattgcaagcgattcaatcctgatcaagacaccaaagctacaggattctggaaccgtggagacaccgagaaaccatgagtgtaaggttaccccagagtatagacaggttaagtagcctgtcttctctgggagattctgcaccagagcgcaagtccccttcccaccatcgccagccttcggatgcctctgagacaacaggtctcgttcaacgctgtgtcattatccaaaaggaccagcatggcttcggcttcacagtcagtggggatcgcattgttctggtgcagtctgtgcggcctggaggtgcagccatgaaggccggtgtgaaagagggcgaccggatcatcaaagtcaacggcaccatggtgaccaatagctcacacctggaagtggtaaagctgatcaaatctggcgcctatgtcgcactcaccctcctgggctcttcaccttcatccatgggcatctctgggctccagcaggacccatccccagcaggagctccccgaatcacgtcagtgatcccctcaccaccacctcctccacctctaccacctccacaacgcatcacaggacccaaacctctgcaggatcccgaagttcaaaaacatgccacccagatcctcaggaatatgctgaggcaggaagaaaaagaattacaggacatacttccactatatggtgacaccagccagagaccatcagaaggccggctctctctggattcccaggagggggacagtggcttggactctgggacagaacgctttccttccctcagtgagtcattgatgaatcggaactcggtactgtcagaccctgggctagacagtcctcgaacctcccctgtgatcatggccagggtggcccagcaccacaggcggcagggctcggatgcagcagtcccctcaaccggtgaccagggtgtagatcaaagcccaaagcctttaattattggcccagaggaagactatgacccgggttatttcaacaacgagagcgacatcatattccaggatctggagaaactgaagtctcggccagctcacctgggggtttttctacgttacatcttctctcaggcggaccccagtccactgcttttttacctgtgtgcagaagtttatcagcaggcaagccccaaggattcccgaagcttggggaaagacatctggaatattttcctggagaaaaatgcgcctctgagagtgaagatccctgagatgctacaggctgaaattgactcgcgcctgcggaacagcgaagatgcccgtggtgttctctgtgaagctcaagaggcagccatgcctgagatccaagagcagatccacgactacagaacgaagcgcacactggggctgggcagcctgtatggtgaaaatgacctgctggacctggatggggaccctctccgagagcgccaagtggctgagaagcagctggctgcccttggagatattttgtccaagtatgaggaagacaggagcgcccccatggacttcgccctcaatacctacatgagccatgctgggatccgtcttcgagaggcacgaccttccaacacagctgaaaaggcccagtctgctcctgacaaggacaagtggctaccgttcttccctaagaccaagaagagcagcaattccaagaaagaaaaggatgccttggaggacaagaagcgaaaccctatcctcaaatacattgggaagcccaaaagctcttctcaaagcacatttcatattcccttgtcccctgtggaagtcaaaccaggcaatgtgaggaacatcattcagcactttgagaacaaccagcagtatgatgccccagaacctgggacacaacgactctcgaccggaagctttcctgaggacctgctggagagtgacagttcacgctcagagattcgcctgggccgctctgaaagcctcaagggccgggaagagatgaaacggtctcgaaaggcagagaacgtgccccgctctcgcagtgatgttgacatggatgctgctgcggaggctactcgcctgcaccagtcagcctcgtcctctacctccagcctctccaccaggtctcttgagaacccaacccctccattcactcccaaaatgggccgcaggagcattgagtcccccagtttggggttctgcacagataccctccttccccacctcctagaggatgatctgggccagctgtctgacctggagccagagccagatgcccaaaattggcagcatacagtgggcaaggatgtggtggctgggctaacccagcgggagattgaccggcaagaggtcatcaatgagctgtttgtgactgaagcttcccacctgcgcacactccgggtcctggacctgatcttctaccagcgaatgaagaaggagaacctgatgccccgggaggagctggcccggctcttcccgaacctgcctgaactcatagagattcacaattcctggtgtgaagccatgaagaagctccgggaggaaggccccatcatcaaagagatcagtgacctcatgctggcccggtttgatggccctgcccgagaggaactccagcaagtggctgcacagttctgttcctatcagtcaatagccctagagctaatcaagaccaagcaacgcaaggagagtcgattccagctcttcatgcaggaggctgagagccaccctcagtgtcggcggctgcagctgagagacctcatcatctctgagatgcagcggctcaccaagtacccgctgctgctggagagcatcatcaagcacacagagggtggcacctctgagcatgagaagctgtgccgggcccgggaccagtgccgggagattctcaagtatgtgaatgaagcggtaaaacaaacagagaaccgccaccgtttagagggctaccagaaacgcctggatgccaccgccctggagagggccagcaaccccctggcagcagagttcaagagcctggatcttacaaccagaaaaatgatccatgagggacccctgacctggaggatcagcaaggataagaccttggacctccacgtgctgctgctggaggacctcctagtgctgctacagaaacaggatgagaagctattgctgaagtgccacagcaagactgctgtgggctcctcagacagcaagcagaccttcagccccgtgctcaagctcaatgctgtgctcatccgctctgtggccacagataaacgggccttcttcatcatctgcacctccaagctgggcccaccccagatctatgagctggttgcattgacgtcatcagacaagaacacatggatggagctcttagaagaggccgtgcggaatgccaccaggcaccccggagctgccccaatgcccgtccatcctccacccccaggtccccgggagccagcccagcagggccccacacccagcagggtagaactggatgactcagacgtgttccatggtgaacctgaacctgaggagctgcctggaggcactgggtcccagcagagggtccaagggaagcaccaggtcctgctagaggaccctgagcaggagggcagtgcagaggaagaggaactgggtgtcctgccttgcccttccacatccctggatggagagaacaggggcatcaggacaaggaaccccatccacttggccttcccaggccctctgttcatggaagggctcgctgactccgctctggaagatgtggagaacctgcgacatctgatcctgtggagcctgctgccaggtcacaccatggaaactcaggctgcccaggagcccgaggacgacctgacacccacaccttctgtcatcagcgtcacctctcacccctgggacccaggctccccagggcaagcaccccctgggggtgaaggggacaacacccagcttgcagggctggagggggaacggccagagcaggaagacatgggtctctgttctctggaacacctacccccaaggaccagaaattctgggatatgggagtctccagaactggacaggaatctggctgaagatgcttcaagcacagaggcagcaggaggttacaaagttgtgagaaaagctgaggtggcaggcagcaaggttgtccctgcactaccagagagtggccagtcagagcctgggccacctgaagtggaaggcggaacaaaggctacggggaactgcttttatgtcagcatgccatcaggacccccggactcaagcaccgaccactcagaggcacccatgagcccccctcagcctgacagcctccctgcagggcagacagagcctcagcctcagctgcagggaggcaacgatgatccaagacgccccagccgctctcctccaagcctggccctcagggacgtgggcatgatcttccataccattgagcagctcactctcaagctcaacaggctcaaggatatggagctggcccacagagagctgctcaagtcccttgggggagagtcatctggtggcaccacgcctgtgggcagtttccacacagaagcagctagatggacagatggctccctctcacctcccgctaaggagcccctagcttctgactccaggaacagccatgaactggggccctgccctgaggatggctctgacgcccccctggaagacagcacagcagacgcagccgcgtcaccaggaccataaccgtacaaaccaccaaatcctctgcgtccccactcctccttcagggactggcctgagaccggggcacagggtaggggggatcccaacactcctccctgtggaggaggcagttagggaaactaggatccagccaaggcccggggggagacccgcatgttgcttggtctgctcaagtcggagtcaggtttcagtgtcttttccctcccttagcccaaccctccaaggcctcatgtctcctaagcatgctgactgcatccgaaaggcccccactcaccatggtctgccctcaccccacatatgtgtgtacacgcgcacgcctgtatgtgcgctgccctcagacatgcaagtgaaaggaggaggcttctgtgtaaatgcactttcttcctcccctctttctccataagaccccaggcagaggtgggtgcctcccctcccctctttgtcactttggtttcctataaatatgtatgtatcgtatgtgcatctttgctattgtaaataactttgaccttttttgttcctgttcctgaagtgctggaggcagttatggaaggagctgcttagggaagaggggtttcacttgtatctccttagttaacaacccagttccaggatcgagcctaaagcgggagccaggcctgagtgttcctgtccctgtgagtgggaaggtcttctggctccccatcccacctggctccagagcctgccctccacagcttgctgccaagctactccctccctccctggacttctcatcttcacaagatggggatcatgggggtttcttaccccacctatgtccccctcttccccaccctgtccctgtagaaaaccagtgaagcaggtacggagctgaggactgggccccaggaggtggggacaggggtctgaatgccgagtccctgaattcacccaggaccatccaaggggccaccgcagcattggccccatcaccacgtcctcacccaactctccctgatgaatagaatatacacactgtgctaggtgtatatatacatatatatatatataaatatatatataatatataaaatatagatatggaaatgactgttctgctgttaagataatgtatactcttttattttcttcctttcatggttaagattttttttttaagaaaagttaaatatccttcaaaaaaaaaaaaaaaa

SEQ ID NO: 30038 - DNA, 7540 bp, Homo Sapiens; identical to SEQ ID NO: 23674

SEQ ID NO: 30039 - DNA, 2931 bp, Homo Sapiens
aagcgaacttagcactggctacaccctcctcaattctggttggcgagatgcgctcttcccggaagtgacgcacaagtgccggcggaaggggaagtccaggagcatgggtggtttttttccccctaccgaggtccgtgaggtgtgtgctaaccaaggggcggctcacaaccgtgacagactgccattcctgagtctcttctggccatgggcccccggagccgtgagcgtcgggcaggcgcggtacagaacaccaacgacagcagcgccctcagcaagcgttccctggccgcgcgcgggtacgtgcaggacccctttgccgcgttgctggttccgggcgcggcgcgccgcgcaccgctcattcaccgaggctactacgtccgcgcacgcgccgtgaggcactgcgtgcgcgcttttttggagcagattggcgcgccccaggccgcgcttcgcgcgcagatcttgtctctcggcgctggcttcgactcgctctattttcgcttaaaaaccgcgggccgcctggcccgggctgcagtctgggaggtggattttccggacgtggcgcggcgcaaagcagaaaggattggagagacgccagagctgtgcgcgttaaccgggcctttcgagaggggggagcccgcgtccgcgctgtgctttgagagcgcagactactgcatcctgggtctggacttgcggcagctccagcgagtggaggaggccctgggcgccgcggggctcgacgcagcctcacccactctgctcctggccgaggcggtgctgacctacctcgagccggagagtgccgcggccctcatcgcctgggcagcccagcgttttcctaatgcccttttcgtggtctatgagcagatgaggcctcaagacgcctttggccagttcatgctgcaacattttcggcagctaaactcccccctgcatggcctggagcgttttcctgacgtggaggcgcagcggcgccgcttccttcaagctggctggaccgcctgcggtgccgtggacatgaatgaattctatcactgctttcttcccgcagaagaacgccggcgggtggaaaatattgaaccctttgacgaatttgaggagtggcatctgaagtgcgcccattatttcattctggcagcttctaggggagacaccctctcccacaccctagtgtttccatcctcagaggcatttcctcgcgtaaatcctgcttcgccttcaggggtattccctgccagcgtagtcagtagcgagggccaggtcccaaacctgaagagatatggccacgcctctgtcttcttgagcccagacgttattctcagtgcaggaggatttggagagcaggaggggcggcactgccgagtgagccagtttcacttgctctcaagagattgtgactctgaatggaaaggcagccaaataggcagttgtgggactggagttcagtgggatggacgcctttatcacaccatgacaagactctcagagagtcgggttctggttctgggagggagactgtccccagtaagtccagccttgggggttctccagcttcatttttttaagagtgaggataataacactgaggacctgaaagtgacaataacaaaggctggccgaaaggatgattccactttgtgttgttggcggcattcaacaacagaagtgtcctgtcagaatcaggaatatttgtttgtgtatgggggtcgaagcgtggtggaacctgtactaagtgactggcatttcctccatgtagggacaatggcttgggtcaggatcccagtggagggagaagtacctgaagcccggcattctcacagtgcctgcacttggcaagggggagcccttattgctggaggtctcggggcttctgaggagccattgaactctgtgctctttctgagaccaatctcttgtggattcctctgggagtcagtagacatccagcctcccattaccccaaggtactcccacacagctcatgtgctcaatggaaagctgttactggttggagggatctggattcattcctcctcatttcctggagtgactgtgatcaatttgactacaggattgagctctgagtatcagattgacacaacatatgtgccatggccattaatgttacacaaccatactagtatccttcttcctgaagagcaacagctcctgctccttggaggtggtgggaactgcttttcctttggtacctacttcaacccccatacagtcacattagacctttcttccttaagtgctgggcagtaaggactggactaatattcaggacccactaaagtagacaataaagttttccacaaataggatgaccctctagctatagatactgccactcctcctttccccatcctttttttcccttagcactattcagtgcaaaaagtgaaaaaggttggtaaaataggtaaaatacctagaaacaatcactacagaaaacagctgaagacagtggccatgcagtccgagaggagtagtggtctgcctctaattttctaatctaagttcgtttattgagttacagtggtctttagtaaagtaaaacaatttcccaatcccaggccttgtgatttgagatggtaccttagaaaaagttacacgcagttccgtggttgaatatatttgagatggtaccttagaaaaagtttcacgcagatccttggttgaatatagttgagggagcgtagtattgacaattcttcatgtaggaaacctgaaatgaacacagtcacagtttgattaaaacattgtcctgtttgttgcaacagaaaactcggatagttttaacaacaggaaacacttgtaggacttcctttaccaacatactttttaaatgttttgctattggttccatatttatttagatttataagtgtcaataaagcaaacttttgatgcctcaaaaaaaaaaaaaaa

SEQ ID NO: 30040 - DNA, 5277 bp, Homo Sapiens; identical to SEQ ID NO: 27988

SEQ ID NO: 30041 - DNA, 5248 bp, Homo Sapiens
ccgagagaccgcatcgtcggctcggaggctgaggggctgccgcggccgggagcgcccctcgcctcgctcctcgctccgcttggtgtcatgtgattctctgagggagcagctgcgtgagtggagatgctttcagtggtggagaatggactggacccccaggctgccatcccggtcatcaagaagaagctggtgggatccgtgaaggccttgcagaagcagtacgtgtccctggacacggtggtcactagtgaagacggagatgccaacaccatgtgcagcgccctggaggccgtatttatccatggcctgcacgccaagcacatccgagctgaggccggaggaaaaaggaagaaaagtgcccaccagaagcctctgccccagcctgtcttctggcccctcctgaaagctgtcacccacaaacacatcatctcagagttggagcacctgacgtttgtcaacacggatgtgggccgctgccgggcatggctgcggctggccctgaacgatggcctgatggagtgctacctgaagctgctgctgcaggagcaggcccgcttgcatgagtactaccagcccaccgccctgctccgggatgctgaggagggcgagttcctccttagcttcctgcagggcctcacgtccttgtccttcgaactctcctacaagtctgccatcttaaatgagtggacgctcaccccattggccctgtctgggctttgcccgctttctgagctggaccctctctctacctctggtgcagaactacagcggaaggaatctctggattccatttcccattcttcaggctctgaagacatcgaagtccatcactcgggccataagatacggaggaaccagaagctgactgcctcctccctcagcctggacacggccagttcatcccagctgtcctgcagcctaaactctgatagctgcttactccaagagaatggctccaagagtccagaccattgcgaggagcccatgtcctgtgactcagacctgggcacagcaaatgctgaggactcagaccggtctctgcaagaggtattgttggaattcagcaaagcccaggtaaactctgtgccaaccaacggactgagccaagaaacagagatccccacaccacaggcctcgctctccctccatggcctcaacaccagcacatacctgcactgtgaggcacctgcagagccccttcctgcccaggcagcctctggaactcaagatggtgtccacgtgcaggagccgcgtccccaggcgcccagccccctggacttacagcagcctgtagagagcacctcaggccagcagccttctagtactgtcagcgagacagccagagaagtgggccaagggaatggcctgcagaaggcccaggctcatgacggagctggtctgaagctggtagtttcctcacccaccagtccgaaaaacaagagctggatctcagaggatgacttctaccggccttcccgggagcaacccctggagagtgcttcagaccacccaatagcttcttacagggggactccagggtcaaggcctggtctccacaggcatttttctcaagaaccaagaaaaaactgctccctgggggcgttagaccaagcgtgtgtaccttccccaggaagaaggcaagcccaggcagccccatcccaggggcataagagcttccgggtggtacaccggagacagatgggactgtccaacccattccggggtctcatgaagctgggcaccgtggagcggcggggggcaatgggcatctggaaggagctcttctgcgagctctccccgctggagttccgcctctacctgagcaacgaggagcacacctgtgtggagaactgctcgctgcttcgctgtgagtctgtggggccagcccatagtgatgggcgctttgagctggtcttctctggcaagaagctggccctgcgcgcctcctcccaggacgaagctgaggactggctggaccgggtgcgggaggccctgcagaaggtccggcctcagcaggaggatgagtgggtgaacgtgcagtacccagaccagcctgaggaaccccccgaggcgccccagggctgcctctctccctcagacctgctctcggagcccgcggccctccagggcacacagtttgactggtcgtccgcccaggttccagagccagatgccatcaaggagtccctgctgtacttgtacatggacaggacctggatgccctatatattttctctgtccttggaggctctgaaatgtttccgcatcaggaacaatgagaagatgctgagtgacagccacggcgtggagaccatccgggacatcctgccagacaccagccttgggggcccatccttcttcaaaatcatcacggccaaggctgtcctgaagctgcaggccggaaacgccgaggaagccgccctgtggagggatctggtccgcaaagtcctggcatcctacttggagacagccgaggaggcggtgaccctgggcgggagcctggatgaaaactgtcaggaggtgctgaaatttgccacccgggagaatggcttcctgctgcagtacctggtggctatccccatggagaaaggccttgactcccaaggctgcttctgcgcaggctgctcccggcagatcggcttctcctttgtacgacccaagctctgtgccttctctggcctctattactgtgacatctgccaccaagacgatgcctcagtgattccggccaggatcatccacaactgggacctcaccaagcgcccgatctgcaggcaggccctgaagtttctgacacagatccgggcccagcccctcatcaacctgcagatggtgaacgcgtctctgtacgagcatgtggagcggatgcacctcattgggaggagacgggagcagctgaagctcctgggggattacctgggcctgtgccggagtggcgccctgaaggagctcagcaagaggctcaaccacaggaattatctcttggaatctccgcataggttcagtgttgctgacctccaacagatcgcagacggggtgtatgaaggattcctcaaggccctgattgaatttgcctcccagcatgtctaccactgcgacctgtgcacccagcgcggcttcatctgccagatctgccagcaccacgacatcatcttcccctttgagtttgacaccacagtcaggtgtgccgagtgcaagaccgtcttccaccagagctgccaggctgtggtgaagaagggctgcccccgctgtgcccgccggcgcaagtaccaggaacagaacattttcgcctgatgcccatctgctgaccccgctctgaaagccgggggtgagtgtggctcagccatcccggctgggtttgccatcagcccaggatactcaccgtgtcacagctgtgtccccttgtcaggaagaccctcagatgtggccagagcaccggcctcccagagaaagcccaggaagtccccgtggtgtcccctggccctccccccacccctctgctgcaggaggcgtggccaccaccagatgctccctgtctggggcaggcagggccgtttactcaccaggccctggctcaccagcgtcccggcgcctccgttagggctgcccaaacactgtggaaaggggacttggggagcattttcaattccacattcctgattaaaaggtctagttttttaaggtgggtttttcccattcatatttcaacagaaagtatttttttattcttgaccctacgtgagtcacccatgaaatccagacattctcacccccagcggatgcacaggagccactcaggcctggcttagaggtagcgggtggctggtgggcaggccactgctgggacagggtctatgggcccacccagtgcctttccttggccctcactgccagtgccaaaccgcccctcagcagggcagggccagtcctggcgaccccggttcctctgtgtcctctttactccccaccccagtgcgtctcgcctgctgagcccaccgctttctcagcgtcagagcccctagctcttctctagcctggggccttggccccattaggagaaggagaaatgactggaaaccagcactgtcagcactttgagccctcctcggtttatggagggtcgccgtcttgcccacccccgatccccgtgcgctcctcacccctctacagacaggggcgctgctgcagatgctccaggcccaccttggtgggtgcccggggtcacactctctgcctgactgacccctgccagggcacagataggcaggaccccagagagggcaggcagccacgccctgcactgtggagaagtgacctggtcctaagctgtgcagggcgtgcgggggaactgccctgtggatgcagccaccacctcacaaagccatgaattcccaaagcatcactgaacttgcccagccgggacactggagactgaagaagttccccggagcaggactgcctttgaaggggccttggggctggggtgggagtctggaattgttttcaaagtgatggtcagaccctccaggcttcggggaaatgtgggtttgctggtctctctgtcgccttcccccacctctcctggacctagcaggccctcagtcctagctgtcttacctgcgctcagcttggagtcaggcctcaggtggagagccgcatgtcactgtcagagatgagcccacccccacccttccctgggggcgattagctgctgagtcacccacccagccttggagctggatgcctgtgcagcagaacagaggcaacggtggcaggcaggtggaggctgcgcacagcttctcccggtcatggcacacacctgtgcccagacgccaatgcctcctaagccaggagctgggttatgcaccgccatggcccacattaacgctccaccacaagcccagcctagtcagagccctcattgccccatccctgagtgggcaggagcctggcctggggagggcttgggcctgtgaggattctccccgaaggtgccctcggaggcagcaggtttgaggccctggggggcccgttccccagaagctgccagtgctttcagatgcattgactcttcccgcctcccctccctcagaaaggtagtgcccacactatttttaaaatgttattttatgcaatacactgttcctagtgagcagggctctggccctgaggagtctttgcaatgtattgaaggaattgctgccgtgtgagttttgaatgattttgcagtaaagacctgatctttctc

SEQ ID NO: 30042 - DNA, 3370 bp, Homo Sapiens
gagccggtgccggcccgcgagccccagcgtctctgcagaccagtcccctccagggtccggcggggcccgcgcggtgggaggagtcgggcactggccggcgactaacgggtccgactgctgaccaagctaggagagacccggaccacggagacagagaccccggcatcgcgacccccgaggacctcctctcctcgccctgtggcacccactagtcctgggcactcagccgcggagagcccccgaccccgcgcgcccagccccgggggagcccacctcctccccgcggcccgcccgggccatgctcccccggggcagcgggtgagccccagccgggaccgggatcggagcccgcgcggagcatggatccgggctgggggcagcgggacgtgggctgggcggccttgctgatcctcttcgccgcctcgctgctcacggtgttcgcctggctgctgcaatatgcccggggcttgtggctggcgcgggcccgcggggaccggggcccgggacccgccttagccggggaacccgcgggttccctgcgggagctgggcgtgtggcgctcgctgctgcggctgcgggcgactcgggctggcgccgccgaggagccaggagtccggggcctcctggcgtcactcttcgccttcaagtctttccgggagaactggcagcgggcttgggtgcgagcgctgaacgagcaggcctgcagaaacgggagctccatccaaatcgcctttgaggaggtgccccaactcccacccagagccagcatcagtcatgtgacctgcgtagaccaatctgagcataccatggtgctgcgttgccagctctctgctgaggaggtgcggttcccagtctctgtgacccagcagtcccccgctgccgtctccatggagacctaccacgtcactctgacactgccaccaacacagttggaagtcaacctggaggaaatccctggtgaggggctgctcatatcctgggccttcactgatcgcccagatctcagcctaacggtgcttcccaagcttcaggccagggagagaggtgaagaacaagtggagctctccacaattgaggaactgatcaaggatgccatagtcagcacccagccagccatgatggtcaacctcagggcttgctctgccccaggaggcctggtacccagtgagaagccacccatgatgccccaggctcagccagccatccccagacctaaccggttattcctacggcagcttcgggcatctcacttgggaaatgagctggaaggcaccgaggaactgtgctgtgtagctgaactcgacaaccccatgcagcagaagtggaccaagcccgcgagggctggatccgaggtggagtggacagaagacctggcactggatctgggcccccagagccgggagctgaccctcaaagtgctgaggagcagcagctgtggagacaccgaactcctaggccaggccacactgcctgtgggctccccctccagaccactgtctcgaagacagttgtgcccactcaccccagggccagggaaagccctgggaccagcagccaccatggcagtggagcttcactatgaggagggctctccccggaacctgggtactcccacctcctccactccacgccccagcatcacacctaccaagaagattgagcttgaccggaccatcatgcccgatggcaccattgtcaccacagtcaccactgtccagtcccggccccgtatagacggcaaattagactccccctcccgctccccgtccaaggtggaggtgaccgagaagacgacaactgtgctgagtgagagcagtggccccagcaatacctcccatagcagcagcccaggggacagccacctttccaacggcttggaccctgtagcagagacagcgattcgccagctgacagagcccagtgggcgggtggccaagaagacacccaccaagcgcagcactctcatcatctctggtgtttccaaggtgcccattgctcaggacgagttggcgctatccctgggctatgcggcatccctggaagcctcagtgcaggatgatgcagggaccagcggaggcccctcttcacctccctcagacccaccagccatgtctccaggaccgctagatgccctctctagtcccacaagtgtccaggaagcagacgagacaacccgttcggatatttctgagaggccatctgtggatgatattgagtcggaaacggggtccactggtgccctggagacccgcagcctcaaggatcacaaagtgagtttcctgcgcagcggcactaagctcatcttccgccggaggcctaggcagaaggaagctggcctgagccaatcacacgatgacctctccaacgcaacggccacgcccagtgtccgaaagaaggccggcagcttttctcgccgccttatcaagcgcttttccttcaaatccaaacccaaggccaatggtaaccccagcccccagctctgaggacccagctctgaaagggcacgagttctctcagcccattccccacctccccttccataccccttcctggatctccagtgcctgggccaggaaagccctctgggttccgggaagccccgtccaccctgggccatggggccggttggaaggatacttggaacgggaagcacatgagaggtgggcacccggtgccgaggacatggacgagggactggtggctgggagggagaggagggccctgtccggcatgtgtgggtattccccagaagcatttgcctcctgctgagcctggtccctgagcggagtcccagggtgctcagctcttcagctgacccttcttcccttatttattctcttttctatttatatgtgtggcttaggaccctccgtgaacagatgatagagggcatctctcccaggtgacccttcttttctgtcccaggagggtgggtaattccctttgggatggggctcccacacctccctcaggtccccactcagaccagcaccagtgtctgcctctgagaatgttggcagctcacagagagcagggccggcccgggatggggggcaggtactccccaccttcctgcctcccctcctgctcctcatccctccctccccctttattaccgttttttgtacttgatgccttctctgtgagcagtggctctgtgggaaggagggagccgggagcctggtgggaagccttccccagagagatggctttaggggctttatttaaagactgtgatgatggagccacgcaaggctgcacctctgtgtgttgggagacgatgatgatgtccattgctgtgtgatggcttggaatttaatttattaaagtcaaattggagtttaaaaaaaaaaaaaaaaaaaaaaaaaaa

SEQ ID NO: 30043 - DNA, 11740 bp, Homo Sapiens; identical to SEQ ID NO: 23497

SEQ ID NO: 30044 - DNA, 4403 bp, Homo Sapiens
gggggcggaaactccttggggaaagggcaatcccccgagccggttcccaggccgggtggagaccaactctggggtctgttggtgggagagtggggagcccgtcttctgctgagtgctgccgccccttcccaggacagcggaggtggaacttcgtcgcgctgcaacccccggctcgggatcctggggcgtcctttggcagtcgattgcaccctgcactagagagaagtccaggaatgatatattcttgggctgtatttctctaccctggagttcatccagttcatcccagaaacactgacctgattactgtgacaaagtctgatggatagaccctttctgttgaccttgtggcgtttttctttcatgtggaagttggaagacaaggtgaaaggggccaaaagttacctgctttggtgaataggagtgctctacttggttctcagaacatgggccctcgtttaaagctgcagctgtgatcctcggctgtctgttggcattgacgggacctgatgttttacgttattggtgggatcacagtgtctgtggttgcattcttcttcacaattaagttcctctttgagcttgccgcacgtgtagtcagcttcctccagaatgaggaccgcgagcgccgaggggaccggactatttatgactacgtgcggggaaattacctggatccccggtcttgcaaagtctcctgggattggaaggacccctatgaggtgggccacagcatggccttccgagtgcatttattctataagaacgggcagcctttccctgcacatcggcctgtgggactaagagttcacatctctcatgtcgagctagcagtggaaattccagtgaaccaggaagtccttcaggagcccaattccaacgtagtaaaagtggccttcactgtgcgcaaggctgggcgttatgaaatcacagtgaagcttggtggattaaatgtggcatatagtccctactacaaaatttttcaacctggaatggtggttccttctaagaccaaaattgtgtgccacttttctactcttgtattgacctgtgggcagccgcacacccttcaaatagtaccccgagatgagtatgataatcccaccaacaattccatgtccttgagagatgagcacaattacaccttgtccattcatgagctcggccctcaagaagaagagagtactggtgtctcatttgagaaatcagtaacatccaacaggcagactttccaggtgttcttgcgactcaccctgcattctcgaggctgcttccatgcttgcatttcataccaaaatcagccaatcaataatggtgaatttgacattattgtcctaagtgaggatgagaagaatatcgtcgaacgcaatgtgtccacttcaggcgtgagcatttactttgaggcttatctttataatgctaccaactgtagcagcactccatggcacctgccacccatgcacatgacctcttcccagcgccggccatccactgctgttgacgaggaagatgaagactcgccctctgagtgccacacccctgagaaggtgaagaaaccgaagaaggtgtactgctatgtgtcaccaaagcaattctcagtgaaggagttctacctgaagatcatccactggcgcctttacaccttccgagtgtgtccaggaacaaaattttcataccttggtcctgaccctgtccataagctgctcacactggtggtggatgatggcattcaacctcctgtggagctcagctgtaaggagaggaacattctagcagccacttttatccgctccctgcataagaacataggaggctctgagacctttcaggacaaggtgaactttttccagcgagagcttcggcaggtacatatgaaaagaccacattccaaagtcaccctgaaggtcagcagacatgccttgttggaatcgtctctgaaagccactcggaatttctccatctcagattggagcaagaactttgaggttgttttccaggatgaagaagctctggactggggagggcctcgccgggaatggtttgagctaatctgcaaagcactatttgatacaaccaatcagctcttcacccggttcagtgacaacaaccaagcattagtgcatcccaaccctaatcgccccgctcatctgcgcctgaaaatgtatgagtttgcgggacggctcgtgggcaagtgtctctatgagtcctctctaggaggagcctacaagcagttggtccgagctcgcttcacccgctctttcctggcccaaatcataggactgcgtatgcattacaagtactttgaaacagatgacccagaattctacaaatctaaagtttgttttatcctcaacaatgacatgagtgagatggagctggtctttgcagaagagaaatataataaatcaggtcaattggataaggttgtagaactcatgacaggtggagctcaaactccagtcaccaatgcgaataaaatcttctatttaaatttgctggcccaatatcggctggccagtcaagtgaaagaggaggtggaacatttcctaaaaggcctgaatgaattggtccctgagaaccttttggctatttttgatgagaatgagcttgagctgctgatgtgtgggactggagacatcagtgtgtctgacttcaaagcccatgcagtagttgttggtggctcatggcatttcagagaaaaggtcatgaggtggttttggactgtggtttccagtctgacccaggaggagttggctcggctacttcagttcacaacaggctcctctcagctaccacctggaggctttgccgccctctgtccctcatttcagattattgccgctccgacccatagcacgctgcctactgcacacacatgaaattcaatatagaaaatttggaaataagaaaaagaacaagggaaataggtaagttgctatccagaggtaatcaccgttaacactttgataaatagccttttgattttcatatttaagcacacatttgtctcccaacatctccctcacccacaaggggtttgggagtggcaaacaaaaatactgctcctaagaagtttgttggcggcaagtcttaccgattcttttcagcttacaaaggtaagcttggaagagaagaaaaaaaacagacctctgatttgggcctagaaggagtagtattaaggaccctgactttcttgggaaagtaattatgatgtcttgtatattggttcccaatctggaaaatgttaaaaaaattcccttttgaatttaaaaacaaaacaaaacagatccttgcccccaccccagacagtgcattctcctcttacctcatcaagctcctgagtgatatgagatatcttaaagggccaggcacagtgactcatatgtataatcccagtactttggaacactgcaaggcaggagggtcacttgaacccaggagttcgaggctgcagtgagctatgcctgtgtcactgtgctctagcctgggtgacagagcgagacactgtctctctttctctttttttttgaaaaggtggggttttggcatgtttcccaggctgatcttgaactcctgggctcaagtgatccacccacctcccaaagtgctgggatcacaagcatgagccatggggcccagccaaatgttcatatttttatttttaactcccgtggttcaactttgggcaagacaaccttctttcagtatcagtttcctgacctgcaaaatgatgctattaaccaattaagaaaatcgactaataacttaagagttcttgggaaaaaagttttcctatatatagtatgtgtgttaccatgctgactgtgacttagggccctggtagtttctgtagcaggaggctgtatgggtctgggggcagttgagaatgctagagtcgatgactggtgtggaaattcccagggggtggtgactctgtttttcaccttgccgtgtccaggcaggccagagagaatgagtactcaagacacctggcccaaacattcatgaagaagacaccaagtcagaagagacttcctcctttgcatgatcctgtaaggacggaagagctagcagctgtggatactccgaacagaccagtgaggcagagcagcaaaagcagcctggaactggaggcggccaggagaggagcagcaagccggtgcccacagtcagccacggcaccctcagcaggcccattaggaggaattgagaagcttctccagtgtttgccctaaaatctcaatccattttaagtgacagaaagtgacaaaaaacaccccagaggaaaatactggggcctaagggagtaatctcagaactcttgtaataataataataatagcagccaacatctaatacatgcttactctgtgccaggccctattctaaaaaaaaaaaaaaaa

SEQ ID NO: 30045 - DNA, 5695 bp, Homo Sapiens
agcacgtcctgttttcgttggccgcgctgggatggccgccacagctgtaggtgctgctagtgtttagcgctggtctttgccgggcgttgagggcagctcagcctccttgtttgtccggttcgcctgtgcgtggtactcaagggcaccagtattcccgcggtcggcagcatgggtcgggagtcacgccactatcgaaaacgatcggcatcccggggtcgctctggaagtcggtctagaagtcgctcaccctcagacaaaagaagtaaacgtggagatgacagacggtctagaagtagagatagagataggaggagagagaggtctcgtagcagggataaaagaagatctcggtcaagggacaggaagcgtctgagacgttccagaagtagagagagagacagaagccgagagcgaagaagatctcgaagtagagacaggagacgctcaaggagtagaagccggggccggcgatcccgatcctccagtcctggaaataaaagcaagaaaactgagaatagatctaggtccaaagagaaaactgatggtggggaaagttctaaagagaagaaaaaagacaaagatgacaaggaggatgaaaaagaaaaagatgctggcaactttgaccagaataagctggaagaagaaatgagaaagcgaaaagaaagagtagaaaaatggcgagaagagcaacgtaaaaaggctatggaaaacataggagaactgaaaaaggaaatcgaagagatgaaacaagggaaaaagtggagtttagaggacgatgatgatgacgaagatgatcctgcagaagctgaaaaggagggaaatgaaatggagggtgaggagttagatccattagatgcttacatggaagaagtgaaagaggaagtaaaaaaatttaacatgagaagtgtaaaaggtggtgggggaaatgaaaagaagtctgggccaacggtcacaaaagttgtcactgttgtgacaaccaaaaaagcagttgtggattctgataagaagaaaggtgagctgatggagaatgaccaggatgccatggagtattcttcagaggaggaagaagttgatcttcagacagcccttacagggtatcaaacaaaacagcgaaagcttctagaaccagttgatcatggaaaaattgagtatgagccatttaggaaaaacttctatgttgaagttccagaactagcaaaaatgtctcaagaagaggtaaatgtgtttcgattggaaatggagggcattacagttaaaggaaaaggttgccccaaaccaattaaatcctgggtccagtgtggaatttccatgaagatcttaaattccctcaagaagcatggctatgaaaagcccacgcccatccaaacccaagctattcctgctataatgtctggacgagatttgattggcattgccaaaacaggaagtggaaagaccattgcttttctgttgcccatgtttagacacatcatggatcagaggtcattagaggaaggagaggggccaatagctgtcatcatgactccaactcgagaactggctttacagattactaaagagtgtaagaagttttccaagactttgggacttagagtggtctgtgtttacggaggaacaggaatcagtgagcagattgctgagctgaaaagaggtgctgaaattattgtttgcacacctggtcgaatgattgacatgttagccgctaacagtggtcgggtcacaaatcttcgaagagtgacatatgttgttttagatgaagcagacagaatgtttgacatgggttttgaaccccaggtcatgcgcatcgtggataatgttcgtcctgatcgacagacggttatgttttcagctactttccccagagctatggaggctttggctcgcaggatcctcagtaaacctattgaagtacaagttggaggcaggagtgtggtttgctcagatgtggagcaacaagtgattgtgattgaagaagaaaagaaattcttgaagttacttgagcttctaggccattatcaagagtcaggatctgtcattatatttgtggataagcaggaacatgctgatggtcttcttaaggatttaatgagagcatcttatccttgcatgtctcttcatggaggcattgatcaatatgacagagatagcatcataaatgactttaagaatgggacctgcaaacttcttgtggctacctctgttgctgcccgaggtctagatgtgaaacatctgattcttgtagtaaattatagctgccccaaccattatgaggattatgtacacagagcagggcggactggaagagcaggaaacaagggttatgcttatacttttatcacagaggatcaagctcgctatgctggtgacataattaaagctcttgaattgtcagggactgcagtacctcctgatttagagaaactgtggagtgatttcaaagatcagcagaaagctgaggggaaaataattaaaaagagtagtgggttctctggtaagggattcaagtttgatgaaacagaacaagctttggctaatgagaggaagaagttacaaaaagcagctcttggtctacaagattcagatgatgaggatgctgcagttgatattgatgagcaaattgaaagcatgtttaattcaaagaagagagtaaaggatatggctgctcctggaacatcaagtgttcctgctccaactgcaggaaatgctgagaaattagaaattgctaagagattggctcttagaatcaatgcccagaagaatttgggcatcgagtctcaggatgtgatgcagcaggccaccaatgcaattcttaggggtggcaccattctggctcccactgtttctgcaaaaaccattgcagaacaacttgctgaaaagatcaatgccaagctcaattatgtgccgttagagaaacaagaagaagagagacaggatggtggacagaatgaatcttttaagagatatgaagaagaattagagatcaatgacttcccacagactgctaggtggaaagttacctctaaggaagctctgcagagaatcagtgaatactctgaagccgcaattacaatcagaggaacctacttccctcctggcaaagaacccaaggaaggcgagcggaagatttacttggcaattgaaagtgccaatgaactggctgtgcagaaagcaaaggcagaaatcaccaggctcataaaagaagagctgatccggctgcaaaattcataccaaccaacaaataaaggaagatacaaagtcttatagacatccggaaaaaagatttttacctgtgctggtctatgatgtatgtggcagttgctgtctgcagtttacaatgtattgtaaatgaagattttttaaattctatcttgctgattttttttaaatataagaaactggtacttggtaaagaaatctgtccgtaagtacccccacaatcagtcaaactatatttaaagccagcctgttttcagagtatgatgtcctttaatgtaaactcaaatatcaatattttaaatgtccggataatattctagaggtttaaaaaatggaaatatttgaactttctattgaagacaataaagtacacaagtcgttaaggggctattcactttatcctgtactttcaatgaaattgtgatcatttcctaagaaaaggtaaaattcactatcatattttgtgtccccaccttgatgttacatgactctggaacaatatgaactggatttaagaatgttataatagaagtcttacaaaatgggttgagagtttttgtttcaatttttatcatcataaatgggcaaaaagtagttggactaatttcggtttttatacaagtaaagatttaatagtataaggatttttttgcatttctttacactgagtgtaaaactctacaaagagttatagtatttactactttgaggtttccctcacaacttctggctccatacctagcccctcttttataatcttccttaaaagaaagagtgtagcctataaatactaaatatgataccttttccttctagaaagtgtttatttatatatctatacatgttgtatgtacaaatatcctactacttttaatctgatttttcttcaggattattgagtaggttgtgaattttctttcttaaaaattgtaaaacataatggtacccaagttttaaacttagatgtgcttcatcttagtgaaatttaattcacaaggaatcataaattgtgtttttgaggctgggcgcagtgactcacacctgtatcccagcaatttgggaggccgaggtgggcagatcacttgaggtcaggagttcaagactagcctggtcaacatggtgaaaccctgtctctactaaaaatacaaaaattagtcggcatggtggtgggtggctgtaatcccagctactcaggaggctgaggcagaagaatctgagccaagataacaccattgcactccagcctgggcgacagagtgagactatctcaaaaataaataaataaataaataaatagtatttttgagccttcaagatacagttcctgaatattctaatttaaattgttataattggattacctaatattcttttcaagactcctgatgtattaacttcatgttattgtcacttttcaaaaaaggaatttttttcaggagttaaataaagtcagtcttttatatccaagggtttcaaacccacagattaaaccaaccacagatcaaaaatagaaaaaaaaaaaaaaagaaaaaaagaatgtaaaattttaaaaatacagtttaacagctgtaaaagttttactataacatttacattgtgttaggtattttaagtaatttaaaggttacagtatacaggcggttaaagtatacaggaggatgtgcatcggttatatgcatatagcaagccatttcatataagaggcttgaacatccatggattttggtatagaggaggggtttaaggggtgtcctgcaatcagtccccctctcataccaaaggatgactgtatatttcttaaatgaagagactttcattctttaaatattattgacttacagtttaaaaataaataaataaaagcatactatagttgtaaaaacaaataattttaatagtatattcagtggctgaagtgatagggagtattaatcattatttcttcagtataaagttattcttcctgaaaaagtaagatatacctgggaaatattcttggatccttcacacatccacttaatttcttgaaggaagaaaacagacaaaagacatgtaacaacagaaacaaataaaccacttactgtaaaatttcagaaattgtgggctcattccctccctctagtttatttatttgctcatctttatcacctaatggtagtttgttttctttggtagagtatatggcagtcccacatcgatgataattggtgctcccttcatccaactggatcactttgagattcagttttacatcattttagcattttgtttgtatatcagttgtgatgagccactgataaaattttgttctaaaatgaaacatattactttgttagtacattttttagtgtcacactgacttttaaaatttgaatgatatatagactttgtttttttaatgcaatatgaatatttgctcatgttttctaaattccttataaaataaaattaattcgaattcaaaaaaaaaaaaaaaaaa

SEQ ID NO: 30046 - DNA, 3935 bp, Homo Sapiens
agtgggtcgcgggcctacggggcgggggcggggcggcagtgagctcggccggcaaccgagggacccgcgtccagatcttcagtgtctattggatttttccaagagaaagtttgtaaaattccttacactgtagatgtggatcagatacgatgattcagtagaagagcacatgtcaggggcagtggaggctggctgctgaaggatgaacggagaggaagaattctttgatgccgtcacagaggcaaatcagaaagtcacgggaatgattgacttagacaccagcaaaaataataggattgggaaaactggggagaggccctctcaagagaacggaattcagaaacacaggacatcgctgccggctcccatgttcagcagaagcgacttcagcgtgtggaccatcctgaagaagtgtgttggcctggagctgtccaagatcacgatgccaatcgccttcaacgagcctctgagcttcttgcagcggatcacggagtacatggagcacgtgtacctcatccacagggcctcctgccagccccagcccctggagaggatgcagtctgtggctgcttttgctgtttcggctgtggcttcccagtgggagaggaccggcaaaccatttaatccactcttgggagaaacgtatgaattaatcagggaagatttaggattcagatttatatcggaacaggtcagtcaccacccccccatcagtgcgttccactcggaaggtctcaaccatgacttcctgttccatggctccatctaccccaagctcaagttctggggcaaaagcgtggaggcggagccccgaggcaccatcaccctggagctgctcaaacataatgaagcctacacctggaccaaccccacctgctgcgtccacaacgtcatcatcgggaagctgtggatagagcagtatgggacagtggagattttaaaccacagaactggacataagtgtgtgcttcactttaaaccgtgtggattatttggaaaagaacttcacaaggtggaaggacacattcaagacaaaaacaaaaagaagctctttatgatctatggcaaatggacggaatgtttgtggggcatagatcctgtttcgtatgaatccttcaagaagcaggagaggagaggtgaccacctgagaaaggccaagctggatgaagactccgggaaggctgacagcgacgtggctgacgacgtgcctgtggcccaggagaccgtgcaggtcattcctggcagcaagctgctctggaggatcaacacccggccccccaactctgcccagatgtataatttcaccagtttcactgtgagcctcaacgagctggagacaggcatggagaagaccctgccacccacggactgccgcctgcgccctgacatccgcggcatggagaatggcaacatggatctggccagccaggagaaggagcggctggaggagaagcagagagaagcacggagggagcgggccaaggaggaggcagagtggcagacgaggtggttctacccaggcaataacccctacactgggacccccgactggttgtatgcaggggattactttgagcggaatttctccgactgcccagatatctactgagggcctggaggggcctggggcccgggaccggaggctgacgaggctggacttcctcgagtggccactgtgagcctcgtcacagcagaaaccaacttttctaacgactgagttcgcggagatagcatcatccctgatcaaggatgtaattctaattaactgttgattgccaaacatttcactctgctgtgccgtctcttcataaagcttcacttgggatcatcgtcttcattaaggtttcaacagggaaattcttcacggcgcccttttatgtggcagaaatcagctggggcttgtttagcttccagcacactctcagtcatagcatgtgtagctaaaggaagtaatgggaaggggttcatgttctctttataatgcagtggcaaaaggttctgaaagccttttaaactcgaaccagtgggggaaagatggatcttgaagctaatcctgcagagagttttatagaggccagggattgccttctaaattatgataaaacagaagtgaagagtttcagagcatcagattgagtgaaaagttgtcagattctgtattttttaacaatcttcaataatgtaaagattacttttaaaatatttaagttaaaactacttgaatagtattttgctgaagagcaagatatgcattaatcaccggttttatactgtccaaaatgaagcatccccgtgacaaaccagagtgggcagaagcatcgagagcgtgacaggaaatcccaagactgcttccgcctcagaggcgtcccggctgcgattcgctgccctgttgtcagtgaggcctggctgtcaccgcacaccgcgtccgtgtctccagggggttcctttcttctcacacgtcgcgtgtacccatagcactcttgtgtttctgtttttcccagtatgcatgtttaaaatagaagtgacaagaatcacatccggttgtgtcctgtgggagggtcagaggcagaatctacttacagtggtgtaattaaagttatttaaccaaaaataggtatgtgtccatctcagcattcacctttatcaagtgactgatttttttttcttttctttccttttttttttttttttgagacggagtttcactcttgttgcccaggctggagtgcaatggcatgatctcggctcaccgcaacctccgcctcccgggttcaagcgattctcctgcctcagcctcccaagtagctgggattacaggcacgcgccaccacacctggctgattttgtatttttagtagacacgggttttcaccatgttggtcaggctggtctcaaactcccgacctcaagtagtctgcctgcctcaacctcccaaagtgctgggattacaggcgtgagccactgcgcctggccgtgactgattttttttcatgtagaattgtcaacacgagagatcacagtggagcactttgaaagaccgtcggttgtgtgcacgcacgcacacactcatgcacacgctgacacgcggttgcatggagtccaggttactcaggccggcacttctgagtgacaggtgccacctgcgtgtgtcttggcgtccacatcacacctgtgacggaagcacttctggaagtgaacactcgttttgaaagcttgattttgtagctttggaagctggaagcgatggtgtttggtgccgagtcctgtgtcatcctcggggcctatgagctccgtaccagccactcaaaagtgtctgaacagaaccgctccgtgactggtagctgggtctgaggattcaggattgtggcgttattcaaagaggagactttgaaattccccgatggctggaatgtggagcccaggtgcctctggtggagggtcatctgcttttccagactgtggttgtgaaccggctccttctccaagaaaggttgcaagctgagaacatccagaggtgagactcagacacattgaaagtgactgcatttagggaggtttaacgagttcttactgatcattccacttgttactggttaagataatttgcccacgggtttgtttccaagtcctcttctaggaccaggctcctggtatttcaggggctggttggctgcacagacagcccctcttctgctgtccttgaggacagacaccaaaccagaggtggaggaagaacggtaggaaggctgatggcaaaagcggctgtgtgtcgaggttattttaactttttactactttttgttactgtttctgcaaatgctaacacataaaccatgacctaacttttgtcaccttggatatctattgaatgttaaacatctctaataaagatggccaccacttaatgtgtggaaagtgatggccttctcgtgggc

SEQ ID NO: 30047 - DNA, 4471 bp, Homo Sapiens
aaggggagggctgcgggtggaaaggggcgagcccctctcgcccgggactgggaagagcggccacggcgccgggcgaggcggcagggcgaggcagtgccatgctgcctttgtgcaaagttgggcggcgggcggcgcgccgcgcgcaggggccccgcacacccgcgaccgcgcgcagccgtggctgctgctgagtggcgggggcccccccgctccccccggcccttgaaggcggagagagctcgcgtctcgctcggcttcagggtaagtccagctgtgagcagagtgttctgttcttcacttccagcaagccagagtttcataaatggacgctgacatggactacgaaagacccaacgttgaaactatcaaatgtgtggtcgtgggtgacaatgccgtggggaagacgcgcttgatctgtgccagggcgtgcaacaccacactcacgcagtatcagctgctggccacccacgtgccaacagtgtgggcgattgaccagtaccgcgtgtgccaggaggtcttggagcgttctcgggatgttgttgatgaagtgagtgtttctctcaggctttgggatacttttggtgatcatcacaaagacagacgctttgcatatggcaggtctgatgttgtggtcctctgtttttcgattgctaatcccaattccctaaatcatgtgaaaagcatgtggtatccagaaatcaagcacttttgccctcgaacacccgttatccttgttgggtgccagcttgatctccgctatgccgacctggaagctgttaatcgagccaggcgcccgttagcaaggcccataaagagaggggatattttgcccccagaaaaaggccgagaggtagcaaaggaacttggcttaccatactatgaaacaagcgtgtttgaccagtttggtatcaaggatgtgtttgacaatgcaatccgagcagcgctgatttcccgcaggcacctgcaattctggaaatcccacctaaagaaagtccagaaacctttacttcaggcacccttcctacctccaaaagcccctccaccggtcatcaaaattccagagtgtccttccatggggacaaatgaagctgcctgtttactggacaatcctctatgtgccgatgttctgttcatccttcaggaccaggaacacatctttgcacatcgaatttacctcgctacctcttcttccaaattttatgatctgtttttaatggaatgtgaagaatccccaaatgggagtgaaggagcctgtgagaaagagaagcagagcagagatttccaggggcggatattgagtgtcgacccagaggaagaaagggaggagggcccgcctaggattcctcaggccgaccagtggaagtcttcaaacaagagcctggtggaggctctggggctggaagccgagggtgcagttcctgagacacagactttgaccggatggagtaaggggttcattggcatgcacagggaaatgcaagtcaaccccatttcaaagcggatggggcccatgactgtggtcaggatggacgcttcagtccagccaggcccttttcggaccctgctccagtttctttatacgggacaactggatgaaaaggaaaaggatttggtgggcctggctcagatcgcagaggtcctcgagatgttcgatttgaggatgatggtggaaaacatcatgaacaaggaagccttcatgaaccaggagattacgaaagcctttcacgtaaggaaagccaatcggataaaagagtgtctcagcaagggaacgttctcggacgtgacatttaaattggacgatggagccatcagtgcccacaagccgctgctgatctgtagctgtgagtggatggcagccatgttcggggggtcatttgtggaaagtgccaacagtgaggtgtatctcccgaacataaacaagatatcaatgcaagcagtattggattatctctataccaagcagttgtctcctaacttggatctggacccgctggaattaattgccttggcaaacagattttgcctgccacacttggttgcacttgcagaacagcatgccgttcaggagttgaccaaagccgccacgagtggcgtgggcattgacggagaagtgctctcttacttggaattggctcagtttcacaatgcccaccagttggccgcctggtgtttgcaccacatctgcaccaactacaacagtgtatgctccaagttccgtaaggaaatcaaatcaaaatctgcagacaaccaggaatacttcgagcggcaccgctggccccctgtgtggtacctgaaggaagaagatcactaccagcgtgtgaaaagggaacgagagaaggaagatattgcactaaataagcatcgctcaagacgaaagtggtgcttctggaattcatctccagcagtggcctgaagaggaagagaaaaaaaacaaaaaacagaaaccaatcggtaatctgatccaccacttttcaaagcactactataaaattcgtcttgttagagatacgacatagttcaggtttcgggcactgatcttcctccacttttgtgcatttatctttgttaggatcaaagcacaagctcaccatcaatgagcctggacaaaaagggaagctgactctcactgcattccttaaactgatatgtatattttttttgttaggaggcttaataaactttagtctgttattttgtttctttttatacaaagaaaaaaaattcagctttcatgtttctgattccagattggaaaatatttttatatggtctgttgtattttgttgaaatgaaaatactgtgtattactttattttacaggccacaattgattatgaagtcaccctgtgattctctttgcccacatgaccaccgagcattattacgtaattagagggttatccttttgttgtgaaaggaaggaggggactgaaatctcccaaagtgcaaattggagagtgtttaatctttgttctgttgaataacatcggtgtaattacaaagtcaactccaagaatgtgtatttacaatatttgccatgttaagtgctggtaattatatggttatatgtgccatgtaaaatatagtgatatcaaatattctgttgtttccaatgtctagtttcaagaggacaatctttataatcattagaagggcttattaaatcccagcattatccagggcaaactcactggtggacctgaatacataagataccattagtgcgctggtgttcggattgctgtattagggtttacatctctcagtattccttgaacttgccatgcttctgcatgcagattcttcactgacttgaattgagatgggcaagggaaaaggtccctggactccctcctgccatctacaggcttgtcacatctcaccaccagaaacaggcttcctcaggcttctcacctgtggccaacttcactttgtaagacccatatttttaactcttcccagggaaaattcatgttgctgcagaagtaggctaaggcagaccacccacttctgctgaaatgcattgggagcctgtgaaagcacaaagctggaggctgggcgcctgcgttctcctacacggaaaggaatctaattccaagagtctaggaaatggtgctattgtgagttcgttctgactctttctcattctgagttttcagtgttaaactaggaagtgtgacagcaggggagctttcgtgaggcagtcagtcattgcttctctgtaaattaaaatgttacagcacacacatacacacacagagagcatttcaaggccacagctccacacctgccatgggatgttaatgtggcagggggtggggctcattctgttgggaggtcaaattaccaatgccaaggactgttgattttgtttttatttttattttttcttctagcttttcagaagatggaaatgagacagttgagtccaaaccccaatgctgacagccatatgcatttgaaaatctatctagattacagatgggcatttattactggcagtggaaacaccagatagaagatcttaggagaggcccagaaatgcatcaccttgtcatgacaaaagagaaggcagtagagtagggatagttacaaatgcatccatcttaattattttcaataggcttgtaaatcttatcgatggaaggagaaaggagacaagatgtggaagaattgacatgtatcccaccataaaatggtagaagatgagttttcaatgagtagtcatagttgaaattttacaaccaaagctcccatttgattgtaatcttgccaaaatataatggatgtataaatgaacttggggtataagcaataatatccactagtgttgttatcagctactgtaaccaagtggctggttcatttggttgatgctgattatggcctttaaccatggtggtttgttgtgtgttttttatttcacaaaaagccaataaaattgtttagctataaaaaaaaaaaaaaaaaa

SEQ ID NO: 30048 - DNA, 4513 bp, Homo Sapiens
ccacgcgtccgcagagccgcgggtgagatccccagccctgtgagcctgtaggagtagaatggctccccaaatgtatgagttccatctgccattatccccagaggagttgttgaaaagtggaggggtgaatcagtatgttgtgcaagaggtactgtccatcaaacatcttccaccacagcttagagcttttcaggctgcctttcgagctcaggggcccctggctatgctgcagcactttgatactatctacagcattttgcatcactttcgaagtatagatcctggcctcaaagaagatactctggaattcctgataaaagtggtatcccgccactcccaggagcttccagctatcctggatgatacaactttgagtggatcagatagaaacgcccatctaaatgccctcaaaatgaactgttatgctctgatacgtctcctggaatcctttgagaccatggccagccagacaaaccttgtggacctggaccttggtgggaagggtaagaaagctcggaccaaggcagcccatggctttgactgggaagaagagaggcaaccaattcttcagcttttaacacagctacttcagttggacatccgtcacctgtggaaccactcaataattgaagaagaatttgtcagtttggttactggctgttgctaccgccttctggagaatcccaccattaatcaccagaagaaccgccccactcgggaagccataacacacctgcttggtgtagccttgacccgttataaccatatgctcagtgctacagtgaagatcatccagatgctgcagcactttgaacacctggcacctgtactggttgcagccgtgagtctatgggcaactgactatggaatgaagagcatagtgggagagattgtaagagagattggacaaaagtgtccccaagagctgagtcgagacccttcagggacaaagggctttgcagcattcctgacagaactagcagaacgtgtcccagctatcctgatgtccagcatgtgcattttgctagatcacctggatggagaaaattacatgatgcgtaatgctgtgctggcagccatggcggagatggtgctgcaggttctcagtggcgatcaactggaagcagcagcccgagacaccagagaccagttcttggatactttacaagcccatggccatgatgtcaactcctttgtgcggagccgtgttttgcagctcttcacccgaattgtccagcagaaggctctccccctgacacgtttccaggcagtggtggctttagctgtgggacgtctggcagacaagtcagtgctagtatgtaaaaatgccatccagctgctggccagttttctagccaataatcctttctcctgcaagcttagtgatgctgaccttgccggaccactgcagaaggagacccagaaattacaagagatgagggcccagaggcgaactgcagcagcttctgcagtgctggacccagaggaggagtgggaagccatgctgccagagttgaagtctaccctgcagcagcttctacagcttccccagggagaggaggagattcctgagcaaattgccaatacagagacaactgaagatgtgaaaggacgcatctatcaactgcttgccaaagctagttacaaaaaggccatcattctcactcgagaagccacaggccacttccaggagtccgaacccttcagtcatatagacccagaggagtcagaggagaccaggctcttgaatatcttaggacttatcttcaaaggcccagcagcttccacacaagaaaagaatccccgggagtctacaggaaacatggtcacaggacagactgtctgtaaaaataaacccaatatgtcggatcctgaggaatccaggggaaatgatgaactagtgaagcaggagatgctggtacagtatctgcaggatgcctacagcttctcccggaagattacagaggccattggcataatcagcaagatgatgtatgaaaacacaactacagtggtgcaggaggtgattgaattctttgtgatggtcttccaatttggggtaccccaggccctgtttggggtgcgccgtatgctgcctctcatctggtctaaggagcctggtgtccgggaagccgtgcttaatgcctaccgccaactctacctcaaccccaaaggggactctgccagagccaaggcccaggctttgattcagaatctctctctgctgctagtggatgcctcggttgggaccattcagtgtcttgaggaaattctctgtgagtttgtgcagaaggatgagttgaaaccagcagtgacccagctgctgtgggagcgggccaccgagaaggtcgcctgctgtcctctggagcgctgttcctctgtcatgcttcttggcatgatggcacgaggaaagccagaaattgtgggaagcaatttagacacactggtgagcatagggctggatgagaagtttccacaggactacaggctggcccagcaggtgtgccatgccattgccaacatctcggacaggagaaagccttctctgggcaaacgtcacccccccttccggctgcctcaggaacacaggttgtttgagcgactgcgggagacagtcacaaaaggctttgtccacccagacccactctggatcccattcaaagaggtggcagtgaccctcatttaccaactggcagagggccccgaagtgatctgtgcccagatattgcagggctgtgcaaaacaggccctggagaagctagaagagaagagaaccagtcaggaggacccgaaggagtcccccgcaatgctccccactttcctgttgatgaacctgctgtccctggctggggatgtggctctgcagcagctggtccacttggagcaggcagtgagtggagagctctgccggcgccgagttctccgggaagaacaggagcacaagaccaaagatcccaaggagaagaatacgagctctgagaccaccatggaggaggagctggggctggttggggcaacagcagatgacacagaggcagaactaatccgtggcatctgcgagatggaactgttggatggcaaacagacactggctgcctttgttccactcttgcttaaagtctgtaacaacccaggcctctatagcaacccagacctctctgcagctgcttcacttgcccttggcaagttctgcatgatcagtgccactttctgcgactcccagcttcgtcttctgttcaccatgctggaaaagtctccacttcccattgtccggtctaacctcatggttgccactggggatctggccatccgctttcccaatctggtggacccctggactcctcatctgtatgctcgcctccgggaccctgctcagcaagtgcggaaaacagcggggctggtgatgacccacctgatcctcaaggacatggtgaaggtgaaggggcaggtcagcgagatggcggtgctgctcatcgaccccgagcctcagattgctgccctggccaagaacttcttcaatgagctctcccacaagggcaacgcaatctataatctccttccagatatcatcagccgcctgtcagaccccgagctgggggtggaggaagagcctttccacaccatcatgaaacagctcctctcctacatcaccaaggacaagcagacagagagcctggtggaaaagctgtgtcagcggttccgcacatcccgaactgagcggcagcagcgagacctggcctactgtgtgtcacagctgcccctcacagagcgaggcctccgtaagatgcttgacaattttgactgttttggagacaaactgtcagatgagtccatcttcagtgcttttttgtcagttgtgggcaagctgcgacgtggggccaagcctgagggcaaggctataatagatgaatttgagcagaagcttcgggcctgtcataccagaggtttggatggaatcaaggagcttgagattggccaagcaggtagccagagagcgccatcagccaagaaaccatccagtggttctaggtaccagcctctggcttctacagcctcagacaatgactttgtcacaccagagccccgccgtactacccgtcggcatccaaacacccagcagcgagcttccaaaaagaaacccaaagttgtcttctcaagtgatgagtccagtgaggaagatctttcagcagagatgacagaagacgagacacccaagaaaacaactcccattctcagagcatcggctcgcaggcacagatcctaggaagtctgttcctgtcctccctgtgcagggtatcctgtagggtgacctggaattcgaattctgtttcccttgtaaaatatttgtctgtctctttttttaaaaaaaaaaaaaaaaggccgggcactgtggctcacgcctgtaatcccagcactttgcgataccaaggcgggtggataacctgaggtagggagttcgagaccagcctgaccaacatggagaaaccccatctctactaaaaaaaaaaaaaaa

SEQ ID NO: 30049 - DNA, 4414 bp, Homo Sapiens
gcggccgccatgtggtgcctgcactgcaactcggagaggacccagtcccttctggagctagagcttgacagcggcgtcgagggcgaggcccccagcagtgagactggcacatccctggacagcccctcagcctacccccagggccccttggtgcccggttccagcctgagcccggatcactacgagcacacgtcagtgggagcctatgggctgtactcggggccgccggggcaacagcagcgcacgcggaggcccaagctgcagcactcgacctccatcctgcgcaagcaggctgaggaggaggccatcaagcgctcacgctcactctccgagagctatgagctctcctcggacctgcaggacaagcaggtggagatgctagaacgaaagtatggggggcgcctggtaacccgccatgcggcccgcaccatccagacggcgtttcgccagtaccagatgaacaagaacttcgagcgcttgcgcagctccatgtcagagaaccgcatgtcacgccggattgtgctgtccaacatgaggatgcagttctcctttgaggggcctgagaaagtgcacagctcctacttcgaggggaagcaggtctcagtgactaacgacggctcccagctgggagccctggtgtcccctgagtgtggtgacctcagcgagcccaccaccctcaagtctccggccccctccagtgactttgcggacgccatcaccgagctggaggacgccttctctaggcaagtgaaatcactggccgagtccatcgacgatgccctcaactgccgcagcctgcacactgaggaggcaccggccctggatgcggcgcgggcccgggacaccgaaccccagacagccctgcacggcatggaccaccgcaaactggacgagatgacggcctcgtacagtgatgtcaccctgtacatcgatgaggaggagctgtcgccccctctgcccctctcgcaggcaggggaccggccgtccagcaccgagtcggacctgcggctacgggctgggggcgcagccccagactactgggccctggcccacaaagaggacaaggctgacacggacacgagctgccggagcacgccgtcgctggagcggcaggagcagcggctgcgggtggagcatctgccgctgctcaccatcgagccacccagcgacagctctgtggaccttagtgaccgctcggagcgggggtcactcaagaggcagagtgcttacgagcgcagccttggcgggcagcagggcagtcccaagcatggtccccacagcggcgcccccaagagcctcccccgggaggagcctgagttgcggccccggccccccaggcccctggacagccacttggccatcaatggctcagccaaccggcagagcaagtctgagtcggactactcagacggtgacaatgacagcatcaacagcacgtccaactccaacgataccatcaactgcagctccgagtcatcgtcccgtgacagcctgcgggagcagacgctcagcaagcagacctaccacaaggaggcccgcaacagctgggactcgcctgcctttagcaacgatgtcatccgcaagaggcactaccgcatcggcctgaacctcttcaacaagaagcctgagaagggagtccagtacctcatcgagcgtggctttgtgcccgacacgcccgtcggggtggcccacttcctgctgcagcgcaagggcctcagccggcagatgatcggcgagttcctgggcaaccggcagaagcagttcaaccgtgacgtgctcgactgcgtcgtggacgagatggacttctctaccatggagctggatgaggccctcaggaaattccaggcgcacatccgtgtccaaggggaggctcagaaagtggagcggctcatagaggcgttcagccagcgctactgcatctgcaaccctggggtggtgcggcaattccggaacccagacaccattttcatcctggccttcgccatcatcctgctgaacaccgacatgtacagccccaatgtcaagcccgagcggaaaatgaagctagaggacttcatcaagaacctccgaggtgtggacgatggtgaggacattccccgtgagatgctgatggggatctatgaacggatccgtaagcgagagctaaagaccaatgaggaccatgtgtcccaggtgcagaaggtggagaagctcattgtggggaaaaagccgatcggatccctgcatcccgggctcggctgtgtgctctctctgccccaccgtcggttggtctgctactgccggctctttgaggttccagacccaaacaagccccagaaactcggactacaccagcgagaaatcttcctgttcaacgacctcctggtggtcaccaagatcttccagaagaagaagaactcggtgacgtacagcttccgacagtccttctccttgtacggcatgcaggtcctgctcttcgagaaccagtactaccccaatggcatccggctcacctcgtctgtccccggagcagatatcaaagtgttaataaacttcaacgcccccaaccctcaagaccggaagaaattcaccgatgacctgcgggagtccattgcggaagtccaagagatggagaagcacaggatagagtcggagctcgagaagcagaaaggcgtcgtgcggcccagcatgtcccagtgctctagcctcaaaaaggagtcgggcaacggaacactgagccgggcctgcctggacgacagctatgccagcggtgagggcctcaagcgcagcgccctcagcagctccctgcgggacctctcggaagccgggaagcgagggcgtcgcagcagtgcgggatcgctagagagcaatgtggaatttcagcctttcgagccactgcagccgtcagtgctgtgctcctaagccatgggacccgaggactgccccccggcgcctgcccaggcggaggccctttcagaaagggcgaagctcacgcctgactctgcgggccgcggggccgcgttcccagtggacagcgtggtgagccgtggccggacggcaggaggagaggggagccccctctggctgtgtgtcaccttggctggctggctggccagggttttgccgatttccctcctcacatccctcccaccctcggtcatatcattgagatcaccgtaccagcaaatctgcaaaccaagcactttgttaatctccagagagagcaaatacagcaatctagagtttagcctttttaaaaatgtgactttaacccgcccacctgtgtcctcccattggcgtggcatttctttggtgtctgctcagaaagaaacagcatgggaccgtgtgattgggtccaggctgggctgtcagggaagcgccctggtgtctccgactcatcaattctcgggttttttaaaagccaggctccccaaagcactctgtctcgcaattttgaggaggttgttccgacctggaagcgttaaactgctgcatgtcatctggcgtcagctgtgaggctgcgctctgcgtgttgtgcgtttgcaaaatgtattggcgtgactgtaaacacatcgttgaagtaaagcgattacatattgagtatgtcagcttttctcaccctcttctgtgctgggaggagagtctaactgtaacctttaggttgttccagaaaagattcaggccgtttggcacagaattgctctttctgaagggtagcagtaatgaataggaacagacagaaaaccccaggaggggctttcaggaaactctccctctccatcgccatcctgcaagctccacagcctcgggctgccagcctgtggcactgtcctcggtgtgtcctggagctgtgctgggcagcagggcctcgcgtaaggaactgctggaacccactgagcccttcccggggtttcccgccgcactcagtgtgttccttcaggctagtgaggtttcattctgttttatttgcaagcttatcaaaagtttgtggaagatacattgttgggttccagaggctggagtcatgctgcccacatcttgtttgggaaagcaaaagctcccagtgagctggtgtccccgtgtgtctttcatgggactgtcccctttagagatcccacctgtcagagccacagcttcggggtcctgtcatcacatcccctgggaggggaggcaggaggaggccgagggccccaggatgtctgcctggtcccttctcactgtgaggacgcccttggcacacctttctcaagtcacacaaattattgcagttacatacagaattgctgacaggagcaggagacgctgagggaaacagctggcaatgtgacaaaagtcttttctgggacaacaatcaaatcatgtatttgtatttttttaagtttaccaatgaattgtacaacaatgtaaaaataaagttcatcctaatatgctgtgc

SEQ ID NO: 30050 - DNA, 4631 bp, Homo Sapiens
gcgaactggctggaggagctaggggactagaggcggggtgggaggggggcgggtggaagggggaggaagtcccgtaacggagacgctggtcaggacgttcccacctcctctgacactgccgagtccgatcggagaggggtcaccgcctccttcagcgaggaggaggggggcggagcccgactcaggatcatggattttcctggtcactttgaacaaatcttccagcagctgaactaccagagacttcatggccagctctgtgattgtgtcattgtagtggggaatagacactttaaagcccaccgctccgtgctggcagcatgcagcacgcatttccgagccctgttctcagtggcagaaggagatcagaccatgaacatgatccagctggatagcgaggtggtgacagcagaggcctttgctgcactgattgacatgatgtatacctccaccctcatgctgggggagagcaatgtaatggatgtcttattggcagcctctcacctgcatttgaactctgttgttaaggcatgtaaacattacttaacgacaaggacgctgcccatgtctccccccagtgagcgcgttcaggagcagagcgcccgcatgcagcgctcctttatgctacagcagctgggactaagcatcgtgagctcagccctcaattccagccagaatggcgaggagcagccagcccccatgagctcttccatgcgcagtaacctggatcagcgcacgcccttccccatgagacgccttcataagcgcaagcagtctgcagaggagcgggccaggcagcgcctccgaccctccatagatgagtctgccatttcagatgttacaccggagaatgggccttcaggggttcattctcgggaggagttcttttcaccagattctctgaaaattgtggataatcctaaagctgacggaatgactgataaccaggaagatagtgcgatcatgtttgatcagtcttttggcactcaagaagatgcccaggtgcccagccagtctgataacagtgctggcaacatggcacagttgtccatggcctctcgtgcaactcaggttgagactagttttgatcaggaagctgcacctgagaaaagtagttttcagtgtgaaaaccctgaggttggccttggtgagaaggagcacatgagagtggtggttaaatctgagcctctgagctcacctgagcctcaggatgaagtgagcgatgtgacctcacaagcagaaggcagcgagtctgtggaagtggaaggagttgtggtcagtgccgagaagatagacctcagccctgaaagcagtgatcggagtttttcagatccccagtctagcacagacagggtaggtgatatccatattttggaagtcacaaataacctagagcataagtccacttttagtatttcgaattttcttaacaagagcagaggaaataactttactgcaaatcagaacaatgatgataatattccaaacaccactagtgactgcaggctggagagtgaggccccctatttgttgagtccagaggctgggcctgcaggtgggccctcctctgcccctggctcccatgtagagaacccatttagtgaacctgcagactcccacttcgtcaggcctatgcaggaggtgatgggcctgccgtgtgtgcagacttcaggctaccaaggaggagaacagtttgggatggacttttccaggtctggtttgggcctccactcctccttctccagggtaatgataggttccccaaggggaggagccagtaactttccttactaccgccgcatagctcccaaaatgccagttgtaacttccgtcaggagctcacagatcccagaaaactctaccagttctcagctaatgatgaatggagctacgtcctcatttgaaaatggccatccttcccagcctggccctccacagttgaccagggcatctgcagatgttctgtcaaagtgcaagaaggccttatcagagcacaatgttttggttgtagagggagctcgcaagtatgcctgcaaaatctgctgcaaaacttttctgactttgacagattgcaagaagcacatccgtgttcacacaggtgaaaagccttacgcctgcctgaagtgtggcaagaggtttagtcagtccagccacctgtataagcactcaaagactacctgcctgcgctggcagagcagcaatcttcccagcactttgctctagctgtttgtccttacaagacaacgctgaggccagttgtcagactgaatttcttttggtaagcagttaatgcctttgggttcgaggcttccagctgcccagtggctcttaaacagtttagcaactaataaccggagaactaacatgtagtatttgtgctgctgcatttctgagtgaagtgcacgtcttgggaaagggatgcaatccctgaaaccaggtgcttccttggggttgagtaatgcagtcagaaagtagtttgtaattgatattaaaagtggcacatttaaaaatttaaaaattgaagtgcaaaaaaaattttttagcaatttttgtaaaactgtgtagcatttaaatttcctataccttctgatgggagtattatatccctgtatagtgatgcaaaatgcacttatgtgtaaccagtggtgatttggtgcctgtcttaaaggaaggcctttgaggacacacctgtctgccacaaatgctttaaagtgtatcatgagctagtcctaggcctcaaagtactgtattttttatttttacctgatttgcagtcataaacactgcactttggtgctgacactgggtccagagtgagcattctcttggactattagatgtatatacttttgaatacatcactgttggatagatgttttaacagttttttctggtttaaaaaccaaattgtaaatggagtgtgtacttgtagagagtgacaaggtattgtttgtttccctatgtgctgtttgagcagtattttaaccaacttgtattacagatgttacagttccatgttaggaagtcagaaaagacttgtgtttgtctttgttctgctgatgtggagtcatgttttgtggggtcttccatggcacatttacctgttgctccgtccagatgttgagggccagtctaggctgacacatcctacccgaggacaagcctgttctccatttcttcactctcccctccccatatagcaactctcccaggtttagattaccgttttcgacgacagattaaccaaaaatgccccacacaggttttattactgttatatactatacttttaacagtacagaccctaaattttattatttgttgctcccccaatctgataccaaatgtttaaagttgtttgaaatccaaacatggtagtgttcatgggtaaatattttctaggctatgtaagagttagcagcccatagcatagaagtaatcaagtagcatctgagactgttggaggcactagggcctctctgggccctacagcctcacttccccagcctcaccttgctgtcctctgacactgccatcagggctgttagtggcacctgtatgaggccaagtgtgcgtccaggggaacagcacaggttaatgcgtctccctagaactcatgaagtcagtttaattcatgcatgaacatgagttcattttatgttttatatagctttcttagacataccaaaccatcattcataaatcagataaattattcagtttttgtgtttagaaagctaagtatgtgtagctggaaacaaaaatgagcgtgttttctctcctgttaatctagagtgtgcagttacacatgtgtggataatttcatgttccaggggcgcttggcatctcccatggactgattcccaggaagaaaagcccaaagggaaacccacgattcctttcgagtagatgtgggaaagagcccattggaggatatgaggtcctgtgaaattcagttgtgtgtgtggctccttgttagcagtcatgttgacatggtgttaggaggctccccatccaccctttacatgatgtagggaccagtgtcttgtgagattaaccttgggacacagtgggttagcctggagaaaatgagaggccctgcctggacccagggagaggagccagtgacacaggcagagcggtgcagccctccttcccttccatttggaggaggtggtgccaggagcctgcccgcttacctctgctgaagcataagtggactttgcttttggggcttatctctgatacatgctggagccctgcctctccactgctagatggaacctggaatctctcatctacctcttagtctgtcagtttctacgtgtgagaagcaagcttgtgggccagtgtccttgtacatgctgtagcacttaaaaaataattccagggttccctggaaaaccagtcccagggttcctatgatctgtagtttctacctggattataactggttttgggtacctgaattttgattggttagccttaattatagtctggcgtgatcatgtagaatcttttctggtgaacagatcataaagttctatcaaggagttctatcaaggcatccatgtcagtggtgctatgctggttacaacttgagatttttgaaataaaaaatttgtcatatt

SEQ ID NO: 30051 - DNA, 4631 bp, Homo Sapiens; identical to SEQ ID NO: 30050

SEQ ID NO: 30052 - DNA, 4546 bp, Homo Sapiens
gtaggcggggcgagccggctgggctcagggtccaccagctcacccgggtcgaggggcaatctgaggcgactggtgacgcgcttatccacttccctcctcccgcctccccctggggtggcgctcgctggtgacgtagtgagtgtgatggccgccgcgaggccgggaaggtgaagtcaggactggtggagtcaacacagtcaatcaatagccaacctcaacctgagacaggacagaagagaactcagaatctttttgtcttttggacttcagccatgtccatgatgcctaccctgtgaagatctctcaccatccaaaaaacgcaatgtccctgctcttctctcgatgcaactctatcgtcacagtcaagaaaaataagagacacatggctgaggtgaatgcatccccacttaagcactttgtcactgccaagaagaagatcaatggcatttttgagcagctgggggcctacatccaggagagcgccaccttccttgaagacacgtacaggaatgcagaactggaccccgttaccacagaagaacaggttctggacgtcaaaggttacctatccaaagtgagaggcatcagtgaggtgctggctcggaggcacatgaaagtggctttttttggccggacgagcaatgggaagagcaccgtgatcaatgccatgctctgggacaaagttctgccctctgggattggccacaccaccaattgcttcctgcgggtagagggcacagatggccatgaggcctttctccttaccgagggctcagaggaaaagaggagtgccaagactgtgaaccagctggcccatgccctccaccaggacaagcagctccatgccggcagcctagtgagtgtgatgtggcccaactctaagtgcccacttctgaaggatgacctcgttttgatggacagccctggtattgatgtcaccacagagctggacagctggattgacaagttttgtctggatgctgatgtgtttgtgctggtggccaactcagagtccaccctgatgcagacggaaaagcacttcttccacaaggtgagtgagcgtctctcccggccaaacatcttcatcctgaacaaccgctgggatgcatctgcctcagagcccgagtacatggaggaggtgcggcggcagcacatggagcgttgtaccagcttcctggtggatgagctgggcgtggtggatcgatcccaggccggggaccgcatcttctttgtgtctgctaaggaggtgctcaacgccaggattcagaaagcccagggcatgcctgaaggagggggcgctctcgcagaaggctttcaagtgaggatgtttgagtttcagaattttgagaggagatttgaggagtgcatctcccagtctgcagtgaagaccaagtttgagcagcacacggtccgggccaagcagattgcagaggcggttcgactcatcatggactccctgcacatggcggctcgggagcagcaggtttactgcgaggaaatgcgtgaagagcggcaagaccgactgaaatttattgacaaacagctggagctcttggctcaagactataagctgcgaattaagcagattacggaggaagtggagaggcaggtgtcgactgcaatggccgaggagatcaggcgcctctctgtactggtggacgattaccagatggacttccacccttctccagtagtcctcaaggtttataagaatgagctgcaccgccacatagaggaaggactgggtcgaaacatgtctgaccgctgctccacggccatcaccaactccctgcagaccatgcagcaggacatgatagatggcttgaaacccctccttcctgtgtctgtgcggagtcagatagacatgctggtcccacgccagtgcttctccctcaactatgacctaaactgtgacaagctgtgtgctgacttccaggaagacattgagttccatttctctctcggatggaccatgctggtgaataggttcctgggccccaagaacagccgtcgggccttgatgggctacaatgaccaggtccagcgtcccatccctctgacgccagccaaccccagcatgcccccactgccacagggctcgctcacccaggaggagttcatggtttccatggttaccggcctggcctccttgacatccaggacctccatgggcattcttgttgttggaggagtggtgtggaaggcagtgggctggcggctcattgccctctcctttgggctctatggcctcctctacgtctatgagcgtctgacctggaccaccaaggccaaggagagggccttcaagcgccagtttgtggagcatgccagcgagaagctgcagcttgtcatcagctacactggctccaactgcagccaccaagtccagcaggaactgtctgggacctttgctcatctgtgtcagcaagttgacgtcacccgggagaacctggagcaggaaattgccgccatgaacaagaaaattgaggttcttgactcacttcagagcaaagcaaagctgctcaggaataaagccggttggttggacagtgagctcaacatgttcacacaccagtacctgcagcccagcagatagtgggcacctgaggcggagtctgcgtggagaggggcggtgctgccagccctaagtgccatgtgggctcccccaggggcacgtgtggctcctgccccctggccactgccaagagaatgaagcacccagtctcgtaccattttgagccctccagcactacttattttcccccacctttgcctgctgttgctggaagagctggctcatacccccaaaggacactttcagcgacagctatggacagcatggtaccaaggagttaagttgaggctttttccagctttctctggttcatttgattgcttgataaggcctcaggatctcagcattgcacaatgcctcatggaagcctttgagggtatcacacagacacccccaccttcctccagcctgtgcgcacctgccctccttgcagcccagcacacctgcaggtgtaagggacgattggagtttcttcccagagagtctgtcccagaaggactgtggcttgtgtgtgtccatctcgcctgttggctcagtgcttcatcccatttgcagagcctcagacacgtcttggtggtgaggctcagttacccctgggcttaggctgaggcgggccctgtgctgggggtggtagaaaggatgctgctgaggcagctggaggagtgggagtagctcagaggggagggctgttggatgtatggggagctggcagagcaggtggcagtcactgggacaaggagggacttgcctctcttctcattattgtgtcctttgctttagtgtcagtcctggacttgtgcaggcctgttttgtgtagatctgttttggaagatggcatggtctaggtggttgaaggatgtagtagaaggatggatggtggaaggtggggacgttggtggctggctgaggtgcatgggccccacacaggacagctggagaatgggccgtccacttggcctcgttctgcgaggggctcatgggtctgagagcccccacccactaggcttgattgcatccctgttgtgccctttaagagacatgtttccaccccacccccaaccttgtcccaagtgccctggactaaatttcctgtgccagtgactgcagttggccaagggacaatgtggaaaacccagtgtccatctttccaccctccctgatctccagaaccttcgactgacccccttgtctttatgctgatgttgagttttgggattgttactggttgaagtgggggcagatgcctgtcaccaaggtgttgactgtgtgagaaaagcagtttgggtgacaaatcctgtgtggcacaagttggatcgcttcctagaaataagcaacacctctcccaaaaagcagcccacaaggcaggggcccagcagcccagccatcactcatctttgaggaaatgagttggtagcctctgtgcactgtttggtggccacatcacaggtgatgtcctgttcacatacctgcttgtatttaaagccctcagtctgtcctgttgtgtggggcgaagtgatggactctgccaggtggacatgctgtgggtggatgttcccggcgtgtgccgggcctgaatggacaggggccacttcacagcatgtcagggaaaatcactgtcacacaattccaatggattttgtgctctttttgaaaaaaaaaaattctttagcgtaaacatgaattttttttcaatgtagcccctggggaatgaatgaaattttgagcttcttcaatacgtaaaattaaatttataccactgagggagagaccctttctgaaagaagtatggccaaaagcactttaatgctgctgacattgttgtttttatgttcatttgctggagcgcaagacgtgctgacacagtgagttttctctgatgtatttaaggtgatgtatttgcttgagttactcctgtatcattgctcataatattggaaactaaaataaaacctagttggaaatccaaaaaaa

SEQ ID NO: 30053 - DNA, 3465 bp, Homo Sapiens
agagggggttcctcgccagccaggtgctcgtcatgcgcaatgtggcgctgcggcgggcggcagggcctgtgtgtgctgaggcggctgagcggcggacatgcacaccacagagcgtggcgatggaacagtaaccgggcttgtgagagggctctgcagtataaactaggagacaagatccatggattcaccgtaaaccaggtgacatctgttcccgagctgttcctgactgcagtgaagctcacccatgatgacacaggagccaggtatttacacctggccagagaagacacgaataatctgttcagcgtgcagttccgtactactcccatggacagtactggtgttcctcacattcttgagcataccgtcctttgtgggtctcagaaatatccgtgcagagaccctttcttcaaaatgttgaaccggtccctctccacgttcatgaacgccttcacagctagtgattatactctgtatccattttccacacaaaatcccaaggactttcagaatctcctctcggtgtatttggatgccacctttttcccatgtttacgcgagctggatttctggcaggaaggatggcggctggaacatgagaatccgagcgacccccagacgcccttggtctttaaaggagtcgtctttaatgagatgaagggagcgtttacagacaatgagaggatattctcccagcaccttcagaacagacttcttcctgaccacacgtactcagtggtctccgggggtgacccactgtgcatcccggagcttacatgggagcagcttaagcagtttcatgccactcactatcacccaagcaatgctaggttcttcacgtacggtaattttccattagaacagcatctgaaacaaattcacgaggaagcactgagcaaattccagaaaattgaaccaagcaccgtggtgccagctcagacaccctgggacaagcctagggaattccagataacatgtggcccggattcatttgctacagatccctctaaacaaacaaccatcagcgttagcttcctcttaccggacatcaccgacacatttgaagccttcacattaagtcttctgtcttcactcttgacttctgggcccaattctcccttttacaaagccttgattgaatctggccttggcacagacttttctcctgatgttggatataatggctacacgagggaggcctactttagtgtcggcctccaagggattgcggagaaagacattgagaccgtcagaagcctcatagacagaacgattgatgaagtagttgagaaaggatttgaagatgatcgaattgaggctttacttcataaaattgaaatacagatgaaacatcagtctaccagctttgggctgatgctgacatcatacatagcttcttgctggaaccatgatggggaccctgtggagctcttgaagttgggaaatcagttagctaaattcagacagtgcctgcaggaaaatccaaaatttttgcaagaaaaagtaaaacagtattttaagaataaccagcataagctgactttatcgatgaggccagatgacaagtatcacgagaagcaggcacaggtggaagccacgaagctcaagcagaaggtcgaggctctgtcccccggagacaggcagcagatctacgagaaaggtctagaattacggagtcaacaaagcaaacctcaagatgcctcttgtctgccagcgttgaaagtttccgatattgaacccaccatacctgtcacagagttggacgtggtcctgacagctggagatatccctgttcagtactgcgcccagcccaccaatggcatggtgtatttccgggccttctccagcctgaacacactccccgaggagctgaggccctatgtgcccctcttctgcagcgtcctcaccaagctgggctgcggccttcttgactaccgggagcaggctcagcagatagaattgaagaccggagggatgagtgcttctccccacgtgctccccgacgactcacacatggacacctacgagcagggtgtgcttttctcctctctctgcctggatcgaaacctgccagacatgatgcagctatggagtgaaatatttaacaacccgtgctttgaagaagaggagcacttcaaggtgctggtgaagatgaccgcccaggagctcgccaatggaattcctgactctgggcacctgtacgcatccatcagggcaggccggaccctcacgcccgcaggggacctgcaggagaccttcagcgggatggatcaggtgcggctgatgaagaggattgcagaaatgacagatatcaaacccatcctgaggaagctcccgcgtatcaagaaacacttgttaaatggtgataatatgaggtgttcagtgaatgcgactcctcagcagatgcctcagacagaaaaagcggtcgaagacttccttagaagcatcggtcggagtaaaaaggaacggaggcctgtgcgcccacacacggtcgagaaacctgtgcccagcagctctggtggagatgcccacgttccccatggctcccaggtcattaggaagctggtcatggaacccaccttcaagccctggcagatgaagactcacttcctgatgcccttcccggtgaattacgtgggtgaatgcatccgaactgtcccctacacggacccagatcatgccagtcttaaaatccttgcacgtttgatgactgccaaattcttgcatacagaaattcgagaaaaaggcggtgcttatggtggaggcgcaaaactcagccacaatgggattttcaccctttactcttacagggacccaaatacaatagagacgctccagtcttttgggaaggctgtcgactgggctaagtctggaaaattcacacagcaagacatcgacgaagccaaactttctgtcttctcaaccgtagatgctcctgtcgctccttcagacaaaggaatggaccacttcttgtacggcctctcggatgagatgaagcaggcccacagagagcagctctttgctgtcagccacgacaagctcctggccgtgagcgatagatacctcggcactgggaagagcacacacggcctggccatcctcggacccgagaacccgaaaattgccaaggacccatcctggatcatccaatgagcagccgtggcgctcgactgcacaggagcccgagacaatacacctccgagctgaatatgaaaagtcagaaatgctactgctttttccaagaatattatgtcattgagtgtcgccaaagcccttgactggcgagtcaaaaactcagatctatcttaagagtgaccaggaagaggttcattgaaataatcatgcatgaagcgccaaagatgcaccatgtagaattttcactttgtactggcaggctcgttttacctcattctagaatatttaagaatctaaaaataaagggcaactctgacttaaaaaaaaaaa

SEQ ID NO: 30054 - DNA, 6059 bp, Homo Sapiens; identical to SEQ ID NO: 24805

SEQ ID NO: 30055 - DNA, 5747 bp, Homo Sapiens
ggctcccggccagctgcgagtcttggctcccggacttgtctcgtcgcgtcggagaaatcgccccccagcgccgctctcccgcccgggggtcttggttccgagctcgcgcggccgggagtcgcctcggtcttccttggggcgcgcgcagatgtgagcgtgcgagagttgtgtaggggattttgttccctccgaaactgagacccagggcgcccagtgggcacccgtgccttgactctgtcctttctgcagccgctggtccgagctgtctggcctcagtttccctccgacttttctccgctctgccagccctcactgctgcccgtcattgttctcgcagttagatgggggtgctttgtgacggctgccaagttggggtgtgttctctttattccgtttttcaaacagaacaaggcctccaaggctgaccccagacaacccaccccctcggaccctaattcaccttattgcactgattttttttatcaagtcgtattttattgtacaggagccacgccctgatttcttaaaggcgccttgcactctggccatgtgttatctctgcagccggtgtgcgggaggcctcttgtgagccagttgttttcccgcctccaccacccccctcgaagatttagggatgccaggggggaagaaggtggctgggggtggcagcagcggtgccactccaacgtccgctgcggccaccgccccctctggggtcaggcgtttggagaccagcgaaggaacctcagcccagagagatgaggagccagaagaggaaggggaagaggacctgcgagacggaggcgtccccttctttgtcaaccggggtgggctacctgtggatgaggccacctgggaaaggatgtggaaacacgtggccaagatccaccccgatggagagaaggtggcgcaacggatccgtggggccacagacctgcccaagatccccataccgagtgtgcctacgttccagccgtctacacctgtccctgagcgcctggaagctgtgcagcgctatatcagagagctgcagtacaatcacacagggacacagttctttgaaattaagaagagcagacctctgacagggctgatggacctggccaaggaaatgaccaaagaggccctgccaatcaaatgcctggaagccgtgatcctgggaatttacctcaccaacagcatgcccaccctggagcgcttccccatcagcttcaagacctacttctcagggaactacttccgccacatcgtgctgggggtgaacttcgcgggccgctacggtgcgctgggcatgagtcggcgcgaggacctgatgtacaagccgcccgccttccgcacgctcagcgagctcgtgctggacttcgaggccgcctacggccgctgctggcacgtgctcaagaaggtgaagctgggccagagcgtgtcacacgacccgcacagcgtggagcagatcgagtggaagcactcggtgctggacgtggagcgcctgggccgcgatgacttccgcaaggagctggagcgccacgcccgcgacatgcggctcaagattggcaaagggacgggccctccctctcccaccaaggaccggaagaaggatgtttcttccccgcagcgggcccagtccagcccccaccgcaggaacagccgcagtgaaagacggccctcgggtgacaagaagacttccgagcccaaagccatgccagaccttaacgggtaccagatccgggtctgaggcggatgccagcaccccaggccccacccactcttgggggccaggatccacctgctggaaccagccttatgcatggggaaggcggggctggtgacaaggcagggcaagaggctgcaggaagagtgtgttccagctcagccccccaagctgctctcgctcccactgagccaagccccctaactttgggcctagaggccgttagtattttatttggagtttttaactctacaactgaagtttaaggtatttggggaaaacttagtccaaatggatctgctgatggtgggaaggccagtgcttaacaaatccatgtgtcatggggccaggtgagggaaactgctggttctgctggtgcctctgcccctggcttccctctgggagttgggtgcatcttatcagtgggaaatctcccagccttaccaggcctgtgatggggggtgggggtggggtggagatgtttctccagttctgcctgccctggcagaatcttgacccagggaaagggaagcagggtaggagtccttctgagaaaggtctgtgtagcccattaaccaggagcttggcacaggccacatctgccccaagagcatgagctcgtggctcaggagagccttcaggcccttgaggcccccatgggcagtgctgtgtgggcagaggaggggtgatatgagagcgagcccagggaaggacctctgggcaaaaagttcccaggccctaactgcgtctacttgctcagtcccagctctgcctgttgctctagcccacaggctcctgcggagggtctgggcttggcggaggacccagaatggcactgaggccagcatggctgtgggagttgagcaaaccctgggtgccagtccaggagctgtggctggacatggggtgatggggcgggatgcttgggcctgggtctctccgccagcagtgccaggagcccttgctggggaaatcaagaccagactaggatgcttctgccccaggcctgccttccattctttaacagcccatcttggcttggggttgcaatgatggctgggccagtcacttgtggcagggcatcagggccctggcagggaagaacctaggcacctggggttgtccccagcctgcccgtcagcatgagatacccagtgggaaagtgagaggatgcggagaggttggcagagccaggggtaggttctggaggctcaagcaacaaggaggtgcaggtaaagggtgcagtgcagccactgagggacagctgggaactgggggatgcaagtgagaaagggatgtgggggagagttcaggatcaggctgcttgaggagtaatgggttacctacagcagagacgagatggctgtttgtcaggaggcggtagaaaggtagaaaggattcagattgtggaagggtaaatggatgagatgaccattaaggttttgttttactgagaggctgtaagtctgccagggacagctgtcagtaaggctgcagaagggctggggggctacacaaggaagagcagaactagggttgtaagctcaaatgacgagcaagcggtgagaaggaggcctgaagggctgtgtggggactatggctacctgaagagggcacaccctgttaaaggggccacagctgctcagctgttcttacagtgccggccctgtgttgccagattgtctgctttgtcagaggccagaattctgactttttatgtgaaataggatttttaaatgctggtgatcacttaaaaaaaacttaaaaacccaatactggcaaaagaggatgccagtctgcaatccctgaagtagagagagctcgtgctggggagaagtccaccaagatgctttgaggcgggctgtagcaaagtcctgtttctcagagctgggctgggctggggtaggatccttgcagctgaggaggaggaaaagccactgagtctcctcccagagcgggacaaaccagaggccctttgcagttgctgggtcaccagcgggggtggcgcatggagtacagacagtgtagctcttggcctgccagggagacggatggtgcctttgaagcaaagaggaagggaaggcagaaccagggatgcctttgctgatgagagtgcctgtcagggaaggcgccacaggctggcagctcttcaaaccagcagcgcttgacccagagccagatccagcatggcctggccagaggcaccctgggaggccagctggtcagtcccttgcctccccaagttccccctggggtcaatgagccctgggaggatgcctaacctaactccagccagactaataggggcatggtgacccttgactcaccatcccatcccagctttcagggagtgggggtagtgtggtctccatgttcctactatgcctaagaagagatggctcaccttgggaggtgccaggctgaaactaggtcctttccgggtctggatgctgccgctcaggagcaggggcgtggcctcagctgcctctgggagcttcccgggaatgacagggtttgaggggagtagatatgagagggagccgctcctggttctggagtcttaggaggttccaacttgcaggatcctttcccagagccctccatggagaaaacagcaaaatgaagcccttacctgcttgctgtctgcaagggagggagccgagccccagctgataatcccccagcactcacccttcctgagctgaggcttcggggctgtggagaccagcacaggacatagtggtgctttttaaatttatttttaactgtttctcatatgtagcaacccctcctcccctcctgggcatgtttacacaggctctgctctgggggctggcctggctgtgaggtttctggggaggcagagaggcagggactttggggccttagtcaccatccatggtatcacctcatctcacttcctgtgagggacagggcctggctgatgtgatcccagctccccccagttcaggactgtctttcagctcctttgcccctggaggtgggggctgctggctgaggaggggtcaaggtgagttcaagaaagctacctgtggaaaatggaccaggttgggggggtgattgcaaagtctccccaaagcctggctcctcatgctcagtgccaggggcagaacactggggagccaggtatagagagccttcctgtcataactgccagtcctcttcctccaaggcctctgcatattctcatgttcccctcacccatcatgccagccacccctatccctcttctagcagggccaagatggggacagtagcagccctctggacttgggatgtgatgataaagcaagcctagggccagggtttggggagcagagagagccaagaagttgaccacgtgtgatttccagcccttcccactgggacttgacttcccaggtcaaggagtccgtctcattctggctggtcgagtgaccagaggcctgtgtgaatgtgtgcacctgcttttcctgcctggaatgttttctggctcagctgcagcaacatctgtgagcccagtgtctgccctgtgtccctgggctcgctccaagtgcaggaacgtacatgcagggcccaacatgatgatggtgtgaagggcaggaaacagtcctctgaaggagtggggaggtgggcagtctgcccccgccaggtaccatcgcctcctgccagcttccttagaccaggcagggctgccatggtgctagctgcaagtccatcagtattgaccgtctcgctccatcttggccctccggagtcccaagtttccttttcatcaaatctgacaagagagaagaaacatgggtgtgcttggcccacagggcctggtggtgatggacctccccgctccctcaagctctggatggctgcagtgttgtactagactttgttcaggctgttctcatctcagtattgccccttcctttcactttcacacttcatctcattcctgttgtcactttccccgaaacgaataaagtctccccagctcctgctgtgtaggctgggcagaaaccacaaaaaaaaaaaaaaaaaaaaa

SEQ ID NO: 30056 - DNA, 3229 bp, Homo Sapiens
gatcagctggcgggcgggcgggagccgagcgcggccccggctctcgctgcagcgccgcctcttctctgcgtcgcaggccggcccggcggccgtgacaatgtcgcggggctggtagcagggcgccggccgccgagccgtctcaagtttaaacttacacgaatcgctttctggaggaggaggggacccgctgcgcgattgacacgcatattcctataggcatcctccctcagcccccacccccacggccggattcgggtggctcctctccgaggtgaaatctgagaagaaatccttggatctcttttcttaaaaaaaaaaaaaaaaaaaaaaaatctagaaaccatcggtattttgctttgctgctccctattcgcaagatgaagaagtttttcgactcccggcgagagcagggcggctctggcctgggctccggctccagcggaggagggggcagcacctcgggcctgggcagtggctacatcggaagagtcttcggcatcgggcgacagcaggtcacagtggacgaggtgttggcggaaggtggatttgctattgtatttctggtgaggacaagcaatgggatgaaatgtgccttgaaacgcatgtttgtcaacaatgagcatgatctccaggtgtgcaagagagaaatccagataatgagggatctttcagggcacaagaatattgtgggttacattgattctagtatcaacaacgtgagtagcggtgatgtatgggaagtgctcattctgatggacttttgtagaggtggccaggtggtaaacctgatgaaccagcgcctgcaaacaggctttacagagaatgaagtgctccagatattttgtgatacctgtgaagctgttgcccgcctgcatcagtgcaaaactcctattatccaccgggacctgaaggttgaaaacatcctcttgcatgaccgaggccactatgtcctgtgtgactttggaagcgccaccaacaaattccagaatccacaaactgagggagtcaatgcagtagaagatgagattaagaaatacacaacgctgtcctatcgagcaccagaaatggtcaacctgtacagtggcaaaatcatcactacgaaggcagacatttgggctcttggatgtttgttgtataaattatgctacttcactttgccatttggggaaagtcaggtggcaatttgtgatggaaacttcacaattcctgataattctcgatattctcaagacatgcactgcctaattaggtatatgttggaaccagaccctgacaaaaggccggatatttaccaggtgtcctacttctcatttaagctactcaagaaagagtgcccaattccaaatgtacagaactctcccattcctgcaaagcttcctgaaccagtgaaagccagtgaggcagctgcaaaaaagacccagccaaaggccagactgacagatcccattcccaccacagagacttcaattgcaccccgccagaggcctaaagctgggcagactcagccgaacccaggaatccttcccatccagccagcgctgacaccccggaagagggccactgttcagcccccacctcaggctgcaggatccagcaatcagcctggccttttagccagtgttccccaaccaaaaccccaagccccacccagccagcctctgccgcaaactcaggccaagcagccacaggctcctcccactccacagcagacgccttctactcaggcccagggtctgcccgctcaggcccaggccacaccccagcaccagcagcaactcttcctcaagcagcaacagcagcagcaacagccaccgccagcacagcagcagccggcaggcacgttttaccagcagcagcaggcccagactcagcagtttcaggcagtacatccagcaacccagaaaccagcaattgctcagttccctgtggtgtcccaaggaggctctcaacagcagctaatgcagaatttctaccagcagcagcagcagcagcaacaacaacagcaacagcaacagctggccacagccctgcatcaacaacagctgatgactcagcaggctgccttgcagcaaaagcccactatggcagcaggacagcagccccagccacagccagctgcagccccacagccagcccctgcccaggagccagcgattcaagccccagtaagacaacagccaaaggttcagacaaccccacctcctgccgtccaggggcagaaagttggatctctcactccaccctcatcccccaaaacccaacgtgctgggcacaggcgtattctcagtgacgtaacccacagtgcagtctttggggtccctgccagcaaatcaacccagctgctccaggcagctgcagctgaggccagtctcaataagtccaagtctgcaaccaccactccatcaggctctcctcggacctctcaacaaaacgtttataatccttcagaagggtctacgtggaatccctttgatgacgataatttctccaaactcacagctgaagaactgctaaacaaggactttgccaagcttggggaaggcaaacatcccgagaagcttggaggctcagctgagagtttgatcccaggctttcaatcaacccaaggtgatgcttttgctacgacctcattttctgctggaactgctgaaaaaaggaagggtgggcagactgtggactctggcctcccgcttctaagcgtgtctgatcctttcattcctcttcaagtacctgatgcaccagaaaaactaattgagggactcaaatctcctgacacttctcttctgctccctgacctcttgcctatgacagatccttttggtagcacttctgatgctgtaattggtaaagtcatcatctctgtttcttcagtcatgcatgatatgtgtgcctgtttcaagaatgacaagtacctagttaaccaatccctggggaatagccctgccaccccagaagccaaggctatttaatctcacttgtatcactccaaatgaagtgttttccttgcttttcgggggtacaacgtctattttttgcctttcttgatatctggagatttctagagtggatctcttatgaatgaggaggaatgtggaaagtttcacatttagttagaagaactttaaaaaattggtttctaactagactacctttactgaacttaatgaaatttagcagattcttcttttttttttttttgtttgagacagagtttcactcttgttgcctg

SEQ ID NO: 30057 - DNA, 5840 bp, Homo Sapiens
gtctccactagaggctgcacagcccgcccggaccaacgcctccgcgcctgccgccgtctggccggcgccctcccgtttccttcctccagggggaaaaaatgtctttcgggccgctttccaggaagcagcaggatgcgccgctccactgtcggtagcaacaagctgcgcaaaccatgcaggatgatttactgatggacaaaagcaaaacccagccccagccccagcagcagcagcggcagcagcagcagccccaacctgagtccagcgtatccgaagccccgtccacgcccctctcctcagagacccccaagccggaggaaaacagcgcagtgccggccctcagcccagccgctgcccccccggcccccaacggcccggacaagatgcagatggaatcaccgctcctgccaggcttgagtttccatcagcctcctcagcagccgccgccgcctcaggagcccgcggcaccgggcgcgtcgctgtcgccgtccttcggcagcacctggtccacgggcaccaccaacgcggtagaggacagcttcttccaggggatcaccccagtcaacgggaccatgctcttccagaacttcccgcaccatgtcaacccagtcttcggaggcactttctccccgcagatcggcctggcgcagacccagcaccaccagcagccgccgccgcctgcgcccgcgccgcagccggcacagccagcgcagccaccacaggcgcagcccccgcagcagcgccgctcacccgccagccccagccaggcgccctacgcgcagaggagcgccgccgcggcgtacggccaccagcccatcatgaccagcaagccgtcctcgtcttcggcggttgcagccgctgctgccgcagccgccgcctcgtcggcctcgtccagctggaacacgcaccaaagcgtgaatgcagcctggagcgcaccgtccaacccctggggcggcctgcaggcgggccgggaccctcgccgggcggtcggtgtgggcgtgggtgtgggtgtcggggtgccttccccgctcaaccccatctcgccgctcaaaaagcccttctccagcaacgtgatcgcgccgcccaagttccctcgcgcggcccctctcacttccaagtcctggatggaggataacgctttccggaccgataatggtaacaatctgttgccatttcaggaccggagtaggccctatgatacttttaacttgcactcgttggagaactccttaatggatatgataaggactgatcatgaacctctgaaaggtaaacactaccctcccagtggcccaccaatgagtttcgctgatataatgtggaggaatcattttgcaggacgcatggggataaatttccatcatccaggaacagataatattatggcacttaacaatgccttcctggatgatagccatggtgatcaagccttgtcatctggcttaagttctcccactcgctgtcaaaatggggaacgagtagaacgctactctagaaaggtgtttgttggaggacttcctcctgatattgatgaagatgagatcactgccagctttcgcaggtttggacctctcgtagtagactggcctcacaaagctgaaagcaagtcttattttcctcctaaaggctatgcctttctgctgttccaagaggaaagctcagtacaagctttgatagatgcctgcctagaagaagatgggaaactctacctgtgtgtgtcaagccccaccatcaaggacaagccagtgcaaattcgaccatggaacctaagtgacagtgactttgtaatggatggttctcagcctttggaccccagaaaaactatctttgttgggggagttccacgaccccttcgagctgttgaactggcaatgatcatggaccgtttgtacggtggtgtctgctatgctggcattgatacggacccagagctgaagtaccccaaaggtgctggccgcgtggcattctccaatcagcagagttacattgcagccatcagcgctcgttttgtgcagcttcagcacaatgacattgacaaacgggttgaagtaaagccatatgtgctggatgatcagatgtgtgatgagtgccagggcacacgctgtggtgggaagtttgccccgttcttctgtgccaacgtcacctgtctgcagtattactgtgaatactgctgggcgagcatacattcccgagccgggcgggagttccacaaaccgctggtgaaggagggaggcgaccgccctcgtcacgtcccgttccgctggagctgagccacgggccgacccagccacaagtactggagtagataacaaggagggaaaagagagggcactgcctcagggcttacagtgttctggaaatctgtgcattcgttctcgatttttaaagaagaattgggtctttttattattattattattatttacagtcatattactgaactcagtgtccagtataatgcagaattgcagagtgtagaatggtactgatttgcactttgattcacacctttgtctgcttggtaccttaattttttatacctgatttgtcactcgtgacagtatgtagactgccattctcatcagcggccgtcaggctactgtctgtgattcttttgtttgttgttgtggtgttgttctgattgttttgaactggagcatgcacttattttcagaaacttagagagttgcccctaggacaagacttaccaaaggtaatactcgtgagtaggtggcagatgtagcaaaaacttcacaacaattcagcaatcattagctcgggtcacttagagtaaggataacccttcatgaaaataagcctttagttgctctctattttgacttgtaaggatacctcataagctggatcttttatttttccttcatgtttgatttttgttttgccgaggattttggttagatcttttagtattatgtaaatttatgctgcaatagcttttgctgctattaaaatggtattattaataccataatactctattcaggctaggatatcaattaaacacaaaaacccaacaacacacttttgtgattttagggatagagtcagctgccgaacggagatcagaatagacttcagaaagcttcggtggaaggtcactatttctgactgcatgtttacttaatcaggttgctgcatgcaataaattttatatccaatgtctagtataaaacgttcccacaatgcacaaattaagaatctatataagctataaaaatactcattttttaaaaaaagtttttttcattcaaagaattggtaattgaccggaggaaggcatgcctcaataaatggaatgctctgaatgggaagagcccataacagaatgacctatattacaaccgatataaaacctaggtgtaggatattcttcaagcaaatttgtggatggtagatgaagtactttgcggtgctctgttatatattgtgaaatttattttatatagtaaagtgattatgtctaactgtgatcaaacttaactgtttaaagcctctgtcagacattaatgaacttgacagttcataactgatatattataaactaacacatgagctcttagttacaatctcttagtgcttgcaccattttacatagcttcagaccttgtccagaaaaccaaagagctcatcttagcttacaaacactaagaatatatacaggatatagagataagttgtcagattgacaaactaggcacatttttaagaaagttgtgtaatggtgatgctaaagaaatgtctgtacaaaataagatggcctgggcagagttggttgtctgagtgagaaactaactacttaattccctggatttatcctgttaagcttgagtagaatgaaggcctgctagcactagcgtggtctagaatgaaggcctgctagcactagcgtggacatttttctagcattcacccttgggctgcagatagtaatatataaacacacacaatgattgcaagactatgtaaatctttttttaatcttcttcctatgttttggaattctggggacaatctgactggatatgacactgcagaatagatttaagtcgctgtgttttctgtgctgtgatgtccttgtactgtcttaagttagtgttgcttgtttttgttttgttctcccatgtttagttgcaattactggctctcaagctatagtttgttttcaaaaaggaaaaacaaaatagttttttactggattaaaaatgcttattttagaatcctcccctttttgaggctttttggtaataattgcttttttccagcccaggtgtggttttgtttgtttttttctatgtttgtgggttttttttcatctgtacaagaaattttgttatgcactactactttttgtattctagacagttttcaaaagttggcagatttttttttttgtttttaaggaaaaaggcatgctttctgactgacatgatcttttgcaatacctcaattttgaaatataggaaagaaaatgatattttctaagtaagtttattcagaaaaatatatattaatttaattctgcaagaaaatgatttaacagatgggtaactttatttttttcatgcttatttgtgttttttgaaaatgaagaagttagagctttataactataatattaaagatcatatctaacctacagaaatctacctaattatgtgaaagaagcaaaactttttgaagaagcacccctctttcatgtattaaaataacactgagatttttttaaaagctggaagattgtacagcataaagctaaagtgaaggcaaaaaacattgtcctgaagaataggttacaaaaaataaactccatttggtgctgaaagttgtgaatagatggtggaaactactttcccttaatttgtatatttctaatcaagtgttgattgtgcgcgactgaccaggattgtgaaagagttcttctgtttgtatttttttaaagagaacttttttagtttattaaattataacatgttcccttttgttttgtaaataaatgtgcccccaagttgttaatgttatattaaaagagagggtccttcaaaaaaattattttttaaaacacagaggtgttctgacctgcaacttgactgggaagcccctgggtaacacaggtcctgctgtggcctttccttggtgtgacacttgaactagtcgattttttgaaggctataacctaacctcgactatttgttgttatgtgcaatactgtttgtactgtttgtataaaaaatagaaaaaaaaaagaaaagaaaaaaggcataaatctttattgcagatttattttcattgcaaactttagacattgtgattcactgaaatcatttttctactgtcaaatatgtaccttttcttcatgctggtattttttcaatagtaatgtagcctttgtactgagacaaattttcattgttatttttagaaagattttttgctaagaaaaaaattaaacatatttacatatttttcattttatttcgtattttctttaaggagtgctttctcaatcattaatagagttgtttctgggagggactttcatatctggtcaatgtcataatattattttgtatttttattggaataaattaattttatgatgctaattctttaaaagtttatttttttcattttcagttatttttgaagctaaaacctttgtaatattgttactaaagtgtctagttttttgaaatgcaaagctttatgtattaacttgctgatgtggtttacaatagtgtgacaacgatgaaaatgcttggttatgtaaagtgattggaaatgtaatggataattgggtaataaaatgacagaatgagcag

SEQ ID NO: 30058 - DNA, 5403 bp, Homo Sapiens; identical to SEQ ID NO: 28156

SEQ ID NO: 30059 - DNA, 4078 bp, Homo Sapiens
gcgactcggtcccaggtcggcgggcggcgcgcggcgggctcgcgcgggggccccggcgcgccgggcggcgcagtacgcagcgcgcggacccacgccacggccaggagcccagagcagcgcggccacactgcccaggggtcggccctcggccccggcgctcggagcgcggcggctgcctgggctttaatggctgctccgcggagcagcgcctagggctggaaggcggctgcggctcaggaagtcacccgagcaagcctccttcggggccggccgcacccgccgcggcgcgctccatgggggcgcgctccccccgggcggcccgctgacccgggacgccggggcccgctcgctcgccggccgcgcgtcccggccatgaactgagcccgcgggccagccccgcgcctgctccgcccgcgcctttcttctcgcgcctcctccgcccgccgccggcgggcccggctccccgggggctgcggcgccccgggctcggcggcccgcgggccccggggcgcggggcggcggcggcggggggcgcgcggctccgggcgcggcgcctgcaccatgaactaccagcagcagctggccaactcggctgccatccgggccgagatccagcgcttcgagtcggtccaccccaacatctactccatctacgagctgctggagcgcgtggaggagccggtgctgcagaaccagatccgggagcacgtcatcgccatcgaagatgccttcgtgaacagccaggaatggacgctgagtcgatctgtcccggagctcaaagtgggaattgtgggtaacttggccagcggcaagtctgccctggtgcaccggtacctgacgggcacatatgtccaggaggagtctccggaaggtggcaggttcaagaaagagattgtcgttgatggacagagctatctgctgctgatcagagatgaagggggccccccggaggcgcagtttgccatgtgggtggacgctgttatatttgtcttcagcttggaggatgaaataagtttccagaccgtttaccactactacagtcgaatggccaactatcggaacacgagcgagattcctctggttctggtgggaacccaggatgccataagttctgctaacccgagggtcatcgatgacgccagggcgaggaagctctccaacgacctgaaacggtgcacgtactacgagacgtgtgctacatacgggctgaatgtggagagggtcttccaggacgttgcccagaagattgttgccacaaggaagaagcagcagctgtccataggaccctgcaagtcgctacctaattctcccagccattcctccgtctgttccgcgcaggtgtctgccgtgcacatcagccagacaagtaatggaggtgggagtttaagcgactattcctcctccgttccatcgactcccagcatcagccagaaggaacttcggatcgatgttcctcccactgccaacacgcccacgcccgttcgcaagcagtctaagcgccggtccaacctgttcacctctcggaaagggagcgacccagacaaagagaagaaaggcctggagagtcgtgcggacagcattgggagcggccgagccatcccaattaaacagggcatgctgttgaagcgaagtggcaaatcgttgaataaagagtggaaaaagaaatatgtcaccctgtgtgacaatggcgtgctgacctatcatcccagtttacatgattacatgcagaatgttcatggtaaggagattgaccttctgagaaccactgtgaaagtcccagggaagaggccaccccgagccacgtcagcctgcgcacccatctccagccctaaaaccaatggcctatccaaggacatgagcagtttacacatctcacccaattcagacacagggctgggtgactccgtatgctccagccccagtatctccagcaccaccagccccaagctcgacccgcccccctcccctcacgccaacagaaagaagcaccgaaggaagaaaagcactagcaacttcaaagccgacggcctgtccggcactgctgaagaacaagaagaaaattttgagtttatcattgtgtccctcactggccaaacatggcactttgaagccacgacgtatgaggagcgggacgcctgggtccaagccatcgagagccagatcctggccagcctgcagtcgtgcgagagcagcaagaacaagtcccggctgacgagccagagcgaggccatggccctgcagtcgatccggaacatgcgcgggaactcccactgtgtggactgcgagacccagaatcccaactgggccagtttgaacttgggagccctcatgtgcatcgaatgctcagggatccaccggaatcttggcacccacctttcccgagtccgatctctggacctggatgactggccaatcgagctcatcaaggtgatgtcatccatcgggaacgagctagccaacagcgtctgggaagagagcagccaggggcggacgaaaccatcggtagactccacaagggaagagaaggaacggtggatccgtgccaagtacgagcagaagctcttcctggccccgctgccctgcacggagctgtccctgggccagcacctgctgcgggccaccgccgacgaggacctgcggacggccatcctgctgctggcacacggctcccgggacgaggtgaacgagacctgcggggagggagacggccgcacggcgctgcatctggcctgccgcaaggggaatgtggtcctggcgcagctcctgatctggtacggagtggacgtcacggcccgagatgcccacgggaacacagctctggcctacgcccggcaggcctccagccaggagtgcatcgacgtgctgctgcagtacggctgccccgacgagcgcttcgtgctcatggccacccctaacctgtccaggagaaacaataaccggaacaacagcagtgggagggtgcccaccatcatctgaggaacagccgtgcccgcctgctcgccgcacctgggacgcggcagcctcgccgcattctcgctcagaagtcgcagcacgtgagtcccgtcgcatcccctccctcttcctggtggccacctccctcccgcccacccactctcaccccaaacaaaatcacaaaacctggacatccctcaaggggcgaagaggcggccgggagactgcagaagtggctccttttcataaactcccctaaaccacacacaggagagagcgacgggcctcggccctttgatgatagcacatggcgcaggacccttgtcctggtggcacaagggatggggacgcgagggggaggggaggcgaggaacaaggagaaggggcaactttccttaactggcagttgagcacatagtacatttcccctctaccaaacggaacacttggattccatctcttctctgaggagctcgacggcataaatcagaagcaagcacagagtttgtcaggtttgaagcccctatgatggtgtgtgtcaaatcagttgtagctaatctgtccagggagaatactggcttcattacacttgtacagccgagttcttcccgcattactgctgtttaatagaacgtgattagtcatcgccgagaagaaagcatattagccgaggaggtagtcacgcggcacgcgccggtgattgccacgatgtgattgcaatactcttagaagcaccatattatcccagacatgttctttcaagcccttggagccctctctaaattcactgtcatcatttagtatctgtttaatttttcagtccaaagagaggaaatcagtcgctgagtattatttgactccggtctccttggtgcaaaaacaaaatgggaaaaataaataagaataactcagaaactcaaaaggaaaccacaaattcagctaataatagcatttcgagtatatttcgtaaactaaggaaatacacaaaaggctgtttttttccgactgtaagagatatttgatgtccttttgccgaggtggatgtgttagtctcaggccctcctggaccacgttgcccaagtcacacaggcttctgtgttatgtatttagataagatgtgtgaaaa

SEQ ID NO: 30060 - DNA, 4620 bp, Homo Sapiens
ccggaggatgtgcagctgcggcggcggcgccggctacgaagaggacggggacaggcgccgtgcgaaccgagcccagccagccggaggacgcgggcagggcgggacgggagcccggactcgtctgccgccgccgtcgtcgccgtcgtgccggccccgcgtccccgcgcgcgagcgggaggagccgccgccacctcgcgcccgagccgccgctagcgcgcgccgggcatggtcccctcttaaaggcgcaggccgcggcggcgggggcgggcgtgcggaacaaagcgccggcgcggggcctgcgggcggctcgggggccgcgatgggcgcggcgggcccgcggcggcggcggcgctgcccgggccgggcctcgcggcgctagggcgggctggcctccgcgggcgggggcagcgggctgagggcgcgcggagcctgcggcggcggcggcggcggcggcggcggcccggcgggcggagcggcgcgggcatggccgcgcgcggccggcgcgcctggctcagcgtgctgctcgggctcgtcctgggcttcgtgctggcctcgcggctcgtcctgccccgggcttccgagctgaagcgagcgggcccacggcgccgcgccagccccgagggctgccggtccgggcaggcggcggcttcccaggccggcggggcgcgcggcgatgcgcgcggggcgcagctctggccgcccggctcggacccagatggcggcccgcgcgacaggaactttctcttcgtgggagtcatgaccgcccagaaatacctgcagactcgggccgtggccgcctacagaacatggtccaagacaattcctgggaaagttcagttcttctcaagtgagggttctgacacatctgtaccaattccagtagtgccactacggggtgtggacgactcctacccgccccagaagaagtccttcatgatgctcaagtacatgcacgaccactacttggacaagtatgaatggtttatgagagcagatgatgacgtgtacatcaaaggagaccgtctggagaacttcctgaggagtttgaacagcagcgagcccctctttcttgggcagacaggcctgggcaccacggaagaaatgggaaaactggccctggagcctggtgagaacttctgcatgggggggcctggcgtgatcatgagccgggaggtgcttcggagaatggtgccgcacattggcaagtgtctccgggagatgtacaccacccatgaggacgtggaggtgggaaggtgtgtccggaggtttgcaggggtgcagtgtgtctggtcttatgagatgcagcagcttttttatgagaattacgagcagaacaaaaaggggtacattagagatctccataacagtaaaattcaccaagctatcacattacaccccaacaaaaacccaccctaccagtacaggctccacagctacatgctgagccgcaagatatccgagctccgccatcgcacaatacagctgcaccgcgaaattgtcctgatgagcaaatacagcaacacagaaattcataaagaggacctccagctgggaatccctccctccttcatgaggtttcagccccgccagcgagaggagattctggaatgggagtttctgactggaaaatacttgtattcggcagttgacggccagccccctcgaagaggaatggactccgcccagagggaagccttggacgacattgtcatgcaggtcatggagatgatcaatgccaacgccaagaccagagggcgcatcattgacttcaaagagatccagtacggctaccgccgggtgaaccccatgtatggggctgagtacatcctggacctgctgcttctgtacaaaaagcacaaagggaagaaaatgacggtccctgtgaggaggcacgcgtatttacagcagactttcagcaaaatccagtttgtggagcatgaggagctggatgcacaagagttggccaagagaatcaatcaggaatctggatccttgtcctttctctcaaactccctgaagaagctcgtcccctttcagctccctgggtcgaagagtgagcacaaagaacccaaagataaaaagataaacatactgattcctttgtctgggcgtttcgacatgtttgtgagatttatgggaaactttgagaagacgtgtcttatccccaatcagaacgtcaagctcgtggttctgcttttcaattctgactccaaccctgacaaggccaaacaagttgaactgatgagagattaccgcattaagtaccctaaagccgacatgcagattttgcctgtgtctggagagttttcaagagccctggccctggaagtaggatcctcccagtttaacaatgaatctttgctcttcttctgcgacgtcgacctcgtgtttactacagaattccttcagcgatgtcgagcaaatacagttctgggccaacaaatatattttccaatcatcttcagccagtatgacccaaagattgtttatagtgggaaagttcccagtgacaaccattttgcctttactcagaaaactggcttctggagaaactatgggtttggcatcacgtgtatttataagggagatcttgtccgagtgggtggctttgatgtttccatccaaggctgggggctggaggatgtggaccttttcaacaaggttgtccaggcaggtttgaagacgtttaggagccaggaagtaggagtagtccacgtccaccatcctgtcttttgtgatcccaatcttgaccccaaacagtacaaaatgtgcttggggtccaaagcatcgacctatgggtccacacagcagctggctgagatgtggctggaaaaaaatgatccaagttacagtaaaagcagcaataataatggctcagtgaggacagcctaatgtccagctttgctggaaaagacgtttttaattatctaatttatttttcaaaaattttttgtatgatcagtttttgaagtccgtatacaaggatatattttacaagtggttttcttacataggactcctttaagattgagctttctgaacaagaaggtgatcagtgtttgcctttgaacacatcttcttgctgaacattatgtagcagacctgcttaactttgacttgaaatgtacctgatgaacaaaacttttttaaaaaaatgttttcttttgagaccctttgctccagtcctatggcagaaaacgtgaacattcctgcaaagtattattgtaacaaaacactgtaactctggtaaatgttctgttgtgattgttaacattccacagattctaccttttgtgttttgttttttttttttacaattgttttaaagccatttcatgttccagttgtaagataaggaaatgtgataatagctgtttcatcattgtcttcaggagagctttccagagttgatcatttcccctcatggtactctgctcagcatggccacgtaggttttttgtttgttttgttttgttctttttttgagacggagtctcactctgttacccaggctggaatgcagtggcgcaatcttggctcactttaacctccacttccctggttcaagcaattcccctgcctttgcctcccgagtagctgggattacaggcacacaccaccacgcccagctagtttttttgtatttttagtagagacggggtttcaccatgcaagcccagctggccacgtaggttttaaagcaaggggcgtgaagaaggcacagtgaggtatgtggctgttctcgtggtagttcattcggcctaaatagacctggcattaaatttcaagaaggatttggcattttctcttcttgacccttctctttaaagggtaaaatattaatgtttagaatgacaaagatgaattattacaataaatctgatgtacacagactgaaacacacacacatacaccctaatcaaaacgttggggaaaaatgtatttggttttgttcctttcatcctgtctgtgttatgtgggtggagatggttttcattctttcattactgttttgttttatcctttgtatctgaaatacctttaatttatttaatatctgttgttcagagctctgccatttcttgagtacctgttagttagtattatttatgtgtatcgggagtgtgtttagtctgttttatttgcagtaaaccgatctccaaagatttccttttggaaacgctttttcccctccttaatttttatattccttactgttttactaaatattaagtgttctttgacaattttggtgctcatgtgttttggggacaaaagtgaaatgaatctgtcattataccagaaagttaaattctcagatcaaatgtgccttaataaatttgttttcatttagatttcaaacagtgatagacttgccattttaatacacgtcattggagggctgcgtatttgtaaatagcctgatgctcatttggaaaaataaaccagtgaacaatatttttctattgtacttttcgaaccattttgtctcattattcctgttttagctgaagaattgtattacatttggagagtaaaaaacttaaacacgaaaaaaaaaaaaaaaaaaaaaaaaaaaaaaaaaaaaaaaaaaaaaaaaaaaaaaaaaaaaaaaaaaaa

SEQ ID NO: 30061 - DNA, 6095 bp, Homo Sapiens
gcgccgtgcggcccgtgcgactcgccggacctcgcgggcgtccctgtacggagccctcggccggtcctagcagggattgtccccatttccagctccggagcgggcggctgcgccccgctcgtcgaggagctgcgctcacctcaggggcgggcccccgcctgcgttcgcggcgccagcagaagactgatttttggaaatatgtatttgggagacagtcacgtcctattgaataccttgtgctggtgctgccatcgaaaaatctggttacactctggggaggactgctaccactgcagaactgaaccacttcggccgtgagatgagtgtccggcctgagcaggcacaccatgaatagatacacaacaatcaggcagctcggggatggaacctacggttccgtcctgctgggaagaagcattgagtctggggagctgatcgctattaaaaaaatgaaaagaaaattttattcctgggaggaatgcatgaaccttcgggaggttaagtctttaaagaagctcaaccatgccaatgtagtcaaattaaaagaagttatcagggaaaatgatcatctttattttatcttcgagtacatgaaggaaaatctttaccagctcattaaagagagaaataagttgtttcctgagtctgctataaggaatatcatgtatcagatattacaaggactcgcatttattcacaaacacggcttctttcatcgagacttaaagcctgagaacctcctctgcatgggaccagaacttgtgaaaattgcagactttggtttggcccgagaaatacgatcaaaacctccatatacagattatgtatctaccagatggtacagggctccagaagtactcctgaggtctaccaactacagctcccccattgacgtctgggcggtgggctgcatcatggcagaagtttacaccctcaggccactcttccctggagccagtgaaattgacacaatattcaaaatttgccaagtgctggggacaccaaaaaagactgactggcctgaaggctatcaactttcaagtgcaatgaacttccgttggccacagtgtgtacccaataacttaaagaccttgattcccaatgctagcagtgaagcagtccagctcctgagagacatgcttcagtgggatcccaagaaacgaccaacagctagtcaggcacttcgatatccttacttccaagttggacacccactaggcagcaccacacaaaaccttcaggattcagaaaaaccacagaaaggcatcctggaaaaggcaggcccacctccttatattaagccagtcccacctgcccagccaccagccaagccacacacacgaatttcttcacgacagcatcaagccagccagccccctctgcatctcacgtacccctacaaagcagaggtctccaggacagatcacccaagccatctccaggaggacaagccaagcccgttgcttttcccatccctccacaacaagcatccacagtcgaaaatcacagctggcctggagcacaaaaatggtgagataaagccaaagagtaggagaaggtggggtcttatttccaggtcaacaaaggattcagatgattgggctgacttggatgacttggatttcagtccatccctcagcaggattgacctgaaaaacaagaaaagacagagtgatgacactctctgcaggtttgagagtgttttggacctgaagccctctgagcctgtgggcacaggaaacagtgcccccacccagacgtcatatcagcggcgagacacgcccaccctgagatctgcagccaagcagcactatttgaagcactctcgatacttgcctgggatcagtataagaaatggcatactctcgaatccaggcaaggaatttattccacctaatccatggtctagttctggcttgtctggaaaatcttcagggacaatgtcagtaatcagcaaagtaaattcagttggttccagctctacaagttctagtggactgactggaaactatgtcccttcctttctgaaaaaagaaatcggttctgctatgcagagggtacacctagcacctattccagacccttcccctggttattcctccctgaaggccatgagacctcatcctgggcgaccattcttccacacccagcctagaagcactcctgggttgataccacggcctccagccgcccagccagtgcatggccggacagactgggcttccaagtacgcatctcggcgatgactgtctgccttggtgatgaatctcttcctagggagaagcaggatactttccctcagctgactggtgttctacctgcaagatgtgcagagggcataaaagcaaatcaacactttatagttattcttctgaactaagacatgtcaatattcttttttaaagtttttttttaaaatattgatttgaatgcagtaggcttttttgtataaaattattttattctaaaactgggtcccattattttcttaaacaacagcattttgtatatatggattatgttttagcattttatacagtcaactttgtaatgaactttttaaaaattaattgattttcctttggggttccagataatattttctacagattttgaaaaatgtaataatattaatgcagtattgcaacaggggtgcaatttaaggctatgtgatagagggttatttactcagtgtgtgcagatatttatgaagtggtgaaatttcaagtgtggctcactaggtacttcaggccttcttggactgttgttagaaaagtgatcctctgcttttcttagtaggtcattggtttgatttttggataccactctgctgttctaaaaggactattatattatataattcactttgttttacttttgttccccagatgaaagaactctaagtaaatacattttaaaaaatttttctgacaccctttaatgtggttgcagatctcagatgaaaccaagcttaattatactatgccattatattctaatttattccatttttgaaatcaagttgtatgtgtaccaataaaagagatttctgcttcaaaaggctctcaacatgaaggttaacacagtcaatcaaacttacattcctgccaagatgcatggccaaaaaactaagtatcaaagcagcagaaggtttttgattatagtaactgagatggaattttgtgcctagctcagttctccagatctggctaggagcagtcaatgactaatgttctgtcctagccaaattctcaggacaatttggggagcagaaagagttatggcagaggttccactcatctacaaagtcacagtcacatgccacatttgatctcctaaccctggtgtagtttctttcaagagtgagaactttatttgttgggcagaggctgttccattgagaggaatgtttacagcagtttcaaaaatgacaaagtcagtttggagacagaaaaagacaaaaggtccagtctcatccatctctatatggtacatttgcctcacttatggttgccttaaaggcaagagggaaggtcaccatcagtgaacgcaatgcaatctcaacagtgtattgattcatattctcctagggctcaaactactctctattggttccaggataatgacaaattgaaccatatgtaagtaatcttttattttttattttttttttgagacagagtctcactctgtcacccaggctggagtgcagtggcgcgatcttagctctctgcaacctctgcctcccaggttcaagcctcctgagtaactgggactacaggcgcccgccaccacgcccagctaattttttgtatttttagtagagacggggtttcactgtgttagccaggacggcctcgatctcctgacctcgtgatccaccctcctccacctcccaaagtactgggattacaggcatgagccactgcacccagccaagtgatcatttttataggttaaaatgataggtgaaatgaatatagacactttcatatggttcaacctaatgacttggtaaattattgccttggtgtattaataatatgttgcattctgaacaaataaccatggcttccaaagggccctaacctaaaatcggagagtaatttatgctttggagaatttgactcaaatatatacttgaccaagcaccatgatccctaggggcatgagaaaagcacataatggatgtggatgtgataggtggtcttttcctgttaacaagctggcagcaaagcttcagaaaatatatatgcaagcacaacttgaagctgaattcatttctgtattatattctcaactcgttatctaaagcatcagaacatgtgttttcagagatgagtcctttactataaggttaatatttattttcattttctgtattatatatgaaaagtaaattaatgtgaaacctggcccagcttgctggaaagcaggttttaaattgtaaatattccttagaggagcaaatggattgtttaataccatagtctcagtaatctagcttatataaggtcattacattttttaactgaaaaacctagttacctgattattgcacattataaaattgtttttctaatactttatagggcccaacttcagaaaatacttcgcttttttctttttatgctttcgtttgtttaccagcaagcaacttccctggggaagccaaacacatattcataaaaaaaatcaagtagctgatgtgcagttgagaaaactagaggactgaaaaaacaaattttaactagcaaatgctgtgaattactcttcctccccttctctgaaatgggtaaaggacaaattgtgtaaaaaaacctatgcactatagaagggaatagtaaccatttcttttgtctctctgtttctgttctgactgagaacctgcagccatttcttgttacatgaaaacaaaatgctacttgttacctctattttttgttactatacaattatgaaatgtaatgtaagacaccaacagaaatgatatacctgtaactgtacctatcaggactatacctcatttacagtcagaaagcttactgggatgtcaggaaatgatacagggttggttctcatttcgtgccgaaatgagacagaaattcagtgacgaaggtgcgttgtaggggtattgatgtgccccaggtagtgccagcagagtagggaaaactgcatttgcataaaaactactcttgacatgattgttcattttacaaaaaaattccattaattaccaagccctcacccagcccatgtgtgataggatttatgtaggaagaaacttgattttcaaataattttttaaatgtatctcttgcctaaaggactatatacatctaataaagtaacactgtgtcatcttctggagttatcaaaaattgtatacaatcaagacaacacaagaattattttatttttgagtgcaaatacaggtactgttggagttgatgggcaccatgctttctcatgaagtagcatttccctaccatcaagccattgttttgtgccattcaggagaggaaaaaaaggaatttatgctgtacatttcagttcagtgtatgaccaaaagcaatatgtttataagaagatgtttgacatactaattattttatatcatttaaaccatactgtagcaacataatatatggagctaatttgtagaattatttttacgatttccaaacaaatgtactgtactgttatataatttattgtgaggaccttctcatggaagccattaggaaaacaaactagaggtaaatatcacattaatctgtattatcaatttctcatagacactgtgctaatgtgaattttaaatgacctgcatcaagtcttctgatctcagataactcagtacagatagcaattagtcagctgatttgattacaatggagtaaccgacaatatatttatttataaagcacatattcataataacgagaagaattcagaaaaccacttaagcaagacccttctgaaataaaaaatgttgctttttaaatagtttgtcctaaggtgtttaaaacatgtcaaccttatgtaaggaaaaatttcctggtccaaataaagttgaagtttaagaaaaattg

SEQ ID NO: 30062 - DNA, 5610 bp, Homo Sapiens
ctaatttttggtcggcggcggtgctgggccaggggaaggaagggacacggaggccgccctcgtcccgccacctcctacccgcttccccccagccccggctccgggagatgtgccgggcggggggcccgggttcgccgagccgcaggagagacacgctgggccgaccccagagaggcgctggacaggctggtggtccaggccgtggtgcctgccaggtgatgtggggcaaagccccccgcacaggccactgagagctccggacacgcacccggctgccaccatggcccgcctagccgcagtgctctggaatctgtgtgtcaccgccgtcctggtcacctcggccacccaaggcctgagccgggccgggctcccgttcgggctgatgcgccgggagctggcgtgtgaaggctaccccatcgagctgcggtgccccggcagcgacgtcatcatggtggagaatgccaactacgggcgcacggacgacaagatttgcgatgctgaccctttccagatggagaatgtgcagtgctacctgccggacgccttcaagatcatgtcacagaggtgtaacaaccgcacccagtgcgtggtggtcgccggctcggatgcctttcctgacccctgtcctgggacctacaagtacctggaggtgcagtacgactgtgtcccctacatcttcgtgtgcccagggaccctgcagaaggtgctggagcccacctcgacacacgagtcagagcaccagtctggcgcatggtgcaaggacccgctgcaggcgggtgaccgcatctacgtgatgccctggatcccctaccgcacggacacactgactgagtatgcctcgtgggaggactacgtggccgcccgccacaccaccacctaccgcctgcccaaccgcgtggatggcacaggctttgtggtctacgatggtgccgtcttctacaacaaggagcgcacgcgcaacatcgtcaagtatgacctacggacgcgcatcaagagcggggagacggtcatcaataccgccaactaccatgacacctcgccctaccgctggggcggaaagaccgacattgacctggcggtggacgagaacgggctgtgggtcatctacgccactgagggcaacaacgggcggctggtggtgagccagctgaacccctacacactgcgctttgagggcacgtgggagacgggttacgacaagcgctcggcatccaacgccttcatggtgtgtggggtcctgtacgtcctgcgttccgtgtacgtggatgatgacagcgaggcggctggcaaccgcgtggactatgccttcaacaccaatgccaaccgcgaggagcctgtcagcctcaccttccccaacccctaccagttcatctcctccgttgactacaaccctcgcgacaaccagctgtacgtctggaacaactatttcgtggtgcgctacagcctggagttcgggccgcccgaccccagtgctggcccagccacttccccacccctcagcacgaccaccacagccaggcccacgcccctcaccagcacagcctcgcccgcagccaccaccccgctccgccgggcacccctcaccacgcacccagtgggtgccatcaaccagctgggacctgatctgcctccagccacagccccagtccccagcacccggcggcccccagccccgaatctacacgtgtcccctgagctcttctgcgagccccgagaggtacggcgggtccagtggccggccacccagcagggcatgctggtggagaggccctgccccaaggggactcgaggaattgcctccttccagtgtctaccagccttggggctctggaacccccggggccctgacctcagcaactgcacctccccctgggtcaaccaggtggcccagaagatcaagagtggggagaacgcggccaacatcgccagcgagctggcccgacacacccggggctccatctacgcgggggacgtctcctcctctgtgaagctgatggagcagctgctggacatcctggatgcccagctgcaggccctgcggcccatcgagcgcgagtcagccggcaagaactacaacaagatgcacaagcgagagagaacttgtaaggattatatcaaggccgtggtggagacagtggacaatctgctccggccagaagctctggagtcctggaaggacatgaatgccacggagcaggtgcacacggccaccatgctcctcgacgtcctggaggagggcgccttcctgctggccgacaatgtcagggagcctgcccgcttcctggctgccaaggagaacgtggtcctggaggtcacagtcctgaacacagagggccaggtgcaggagctggtgttcccccaggaggagtacccgagaaagaactccatccagctgtctgccaaaaccatcaagcagaacagccgcaatggggtggtcaaagttgtcttcatcctctacaacaacctgggcctcttcctgtccacggagaatgccacagtgaagctggccggcgaagcaggcccgggtggccctgggggcgcctctctagtggtgaactcacaggtcatcgcagcatccatcaacaaggagtccagccgcgtcttcctcatggaccctgtcatcttcaccgtggcccacctggaggacaagaaccacttcaatgctaactgctccttctggaactactcggagcgttccatgctgggctactggtcgacccaaggctgccgcctggtggagtccaacaagacccataccacgtgtgcctgcagccacctcaccaacttcgctgtgctcatggctcaccgtgagatctaccagggccgcatcaacgagctgctgctgtcggtcatcacctgggtgggcattgtgatctccctggtctgcttggccatctgcatctccaccttctgcttcctgcgggggctgcagaccgaccgcaacaccatccacaagaacctgtgcatcaacctcttcctggctgagctgctcttcctggtcgggatcgacaagactcagtatgagattgcctgccccatcttcgccggcctgctgcactatttcttcctggctgccttctcctggctgtgcctggagggcgtgcacctctacctgctactagtggaggtgtttgagagcgagtattcccgcaccaagtactactacctgggtggctactgcttcccggccctggtggtgggcatcgcggctgccattgactaccgcagctacggcaccgagaaggcctgctggctccgagtggacaattacttcatctggagtttcatcgggccagtctccttcgttatcgtggtcaacctggtgttcctcatggtgaccctgcacaagatgatccgaagctcatctgtgctcaagcccgactccagccgcctggacaacattaaatcctgggcgctgggggccatcgcgctgctgttcctgctgggcctcacctgggctttcggcctcctcttcatcaacaaggagtcggtggtcatggcctatctcttcaccaccttcaacgccttccagggggtcttcatcttcgtctttcactgcgccttacagaagaaggtgcacaaggagtacagcaagtgcctgcgtcactcctactgctgcatccgctccccacccgggggcactcacggatccctcaagacctcagccatgcgaagcaacacccgctactacacagggacccagagccgaattcggaggatgtggaatgacactgtgaggaaacagacggagtcctccttcatggcgggtgacatcaacagcacccccaccctgaaccgaggtaccatggggaaccacctgctgaccaaccccgtgctgcagccccgtgggggcaccagtccctacaacaccctcatcgccgagtcagtgggcttcaatccctcctcgccccctgtcttcaactccccagggagctaccgggaacccaagcaccccttgggaggccgggaagcctgtggcatggacaccctgcccctgaacggcaacttcaataacagttactccttgcgaagtggggatttccctcccggggatgggggccctgagccgccccgaggccggaacctagccgatgcggcggcctttgagaagatgatcatctcagagctggtgcacaacaacctgcgggggagcagcagcgcggccaagggccctccaccgcctgagccccctgtgccacctgtgccagggggcgggggcgaggaagaggcgggcgggcccgggggtgctgaccgggccgagattgaacttctctataaggccctggaggagcctctgctgctgccccgggcccagtcggtgctgtaccagagcgatctggacgagtcggagagctgcacggccgaggacggcgccaccagccggcccctctcctcccctcctggccgggactccctctatgccagcggggccaacctgcgggactcaccctcctacccggacagcagccctgaggggcccagtgaggccctgcccccaccccctcccgcaccccccggcccccccgaaatctactacacctcgcgcccgccagccctggtggcccggaatcccctgcagggctactaccaggtgcggcgtcctagccacgagggctacctggcagccccaggccttgaggggccagggcccgatggggacgggcagatgcagctggtcaccagtctctgagggcacctcatggaccaggggctggtggcccaggccagggagggaaccctgggcagggctctggtgggagagggagacagatggaggcagtggctggtgggccactctctccaggtgcccctcagccatgggccctacagtcccctcaggggactctaacctgggggcctgaggtgccagggttcacagacagggtttcccaccagccacacgcaccagctctatttgggggaagtgtagtgaggaggagcccagaggaccccaggggagtgaggagggagaacttggaagggtgcagcccacttccagactctcccctctcccacccttctaccctgtgaagggaaatgagggctttagtttcctgggcagggaggggcagcttctgaggttgccaaaggcccccactggatggaacctgttagctgctcctctccgcagccagaaatgctgccggctgcacccagagggagcagtgaggcaggacagatggacaggttcctcctgcgctgtaattccctgctccctggagactgggaaaaggccgcagggcagggggactgggcggtggtggctggtggtttaaaggttgaactttctctgaagctcctttccccttgctcttggtccctgccccgcaagcaaacctgccccctctgcctcccagtgcacccaatgaccccctcccttggggcgactcctgatgaagcacaactccccgcagggcccccagcccacaggggtggccatatttgggcagttcccagtcctgtgggctcggctatctggggagcagattttgggtctggatctccctggggagtgggtcctgggcttggatctttccctagggggccctcttactccttcctctctcctcctccttccccattgctgtaaatatttcaacgaaatggaaa

SEQ ID NO: 30063 - DNA, 3823 bp, Homo Sapiens
cgcctaggctggagcgccgtggtacagtcttgactcactgcaattctgcctcctgggttcaagtgattcttgtgcctcagccattgagtagctgggatgacaggcacatgcctagctaatttttgtattttttgtagagacggggtttcaccatgttgaccaggctggtcttgaactcctgaactcaattgatccgcctgccttggcctcccaaagtgctgggattacgggcatgagccactgcacccagcaatgagtagtcttaatgaggaaagtaggtcatagtaatctgcagaatactgtagataaagaaactgagaaaaacctatttggttcccatttagtaaatatctatattccttataatatgtctatttctcctaagaaactttccactttagacacttgtaagaaaaattaaaattggttgttattgcagttgtttgtcttatttcactttttttccccgggtttcccttcagtaatcagttcaagaagttccctcagatgacctcatatcaccggatgctattacaccgggtagctgcctattttgggatggaccacaatgttgatcaaactgggaaagctgtcatcatcaacaaaactagtaacacaagaatccctgaacagaggttctcagaacatataaaggatgagaagaatacagaatttcaacagaggttcattctcaagagagatgatgccagtatggaccgagatgataaccaggctgatgtcatttagatatccgttctggccagtgggaaccgtgaaggactgagccgcacctcaagcagccgccagagcagcacagacagcgaactcaaatccctggagccacgcccttggagcagcacagactctgatggctctgtccggagcatgcgaccccctgtcaccaaagctagcagcttcagtggaatctctatccttacccgaggtgacagcatcggcagcagtaaaggcggcagtgcgggaaggatctccaggccaggtatggcactaggtgccccagaagtgtgcaaccaggtcacctcatcccagtctgtccgggggcttctcccttgtactgcccagcagcaacagcagcagcagcagcagcaacttcctgctctcccacccacgcctcagcaacagccacccttgaataatcacatgatctcacaggcagatgacctcagcaacccctttggacaaatgagccttagtcgccaaggttctactgaagcagctgacccatctgcagctctattccagaccccacttatctcccagcaccctcagcagactagcttcatcatggcttccacgggtcagcccctccccacttccaactattccacctctagccatgcaccacctactcagcaagttctgccaccccaggggtacatgcagccccctcaacagatccaggtttcttactatccccctggacaatatcctaactccaaccagcaatatcgacctctctctcacccggtggcctatagcccccaacgtggtcagcagctgcctcagccatcccagcagcctggtttacagcccatgatgcctaaccagcagcaggcggcttaccaaggcatgattggggtccagcagccacagaaccagggcctgctcagcagccagaggagcagcatggggggccagatgcaaggcctggtggttcagtacactccactgccttcttaccaagttccagtgggtagtgactcgcaaaatgtggtccagccgcctttccagcaacccatgctggtccctgtgagccagtctgtgcaaggaggcctcccagcagcgggggtaccagtgtactatagcatgatcccacctgctcagcagaacggtacgagcccttctgtagggtttctgcaaccccctggctctgagcagtaccagatgcctcagtctccctctccctgcagtccaccacagatgccacagcagtactcaggagtgtcaccttctggaccaggtgtagtggtcatgcagctgaatgtccctaatggaccccagccccctcagaacccatccatggtccagtggagtcattgtaaatactacagcatggaccagcgggggcagaagcctggagacctgtacagtcctgacagcagcccccaggccaacacacaaatgagcagcagccctgtcacatctcctacccagtctccagcaccctctcctgtcaccagcctcagcagtgtctgcacaggactcagtcccctgcctgtcctcacacagttcccccggcctgggggtccagcacagggtgatgggcgctactcccttttgggccagccattacagtacaatctgtccatctgccctcccttgctccatggccagtcaacttacacggtgcaccagggacagagtggactgaagcatggaaaccggggcaagagacaagcactcaaatctgcctccactgacctggggacagcagatgttgtcctggggcgggtgctggaggtgacagatctccctgagggcatcacccgtactgaggcggacaaactcttcacgcagctcgccatgtctggcgccaagatccagtggctcaaggatgctcaggggctgcctggagggggtgggggggacaacagtgggactgctgagaatggccgccactcggacctcgctgccttgtacaccattgtggctgtgttccccagccccctggctgcccaaaatgcctcccttcgtctcaacaactccgtgagtcgcttcaaacttcgaatggccaaaaagaactatgacctgaggatcctggagcgagccagctcccaataaatggaggaggggaaagggactgtcacagaaggagcaagggcagggtggagggggttgaaggatcctgacagaccatggacagaggcaggaagtaaggaaactgatgttaaactggaacctaagacagtgatgaagatggaaacacagatacctacactggcattggactccttcttgctcccctgccatgggtcctctctttttccctggttgaccccccttgcatcactcttcttcccatcctcttctttttttttttttttttttttttgagacggagtttcgctcttgtcaccccagctggagtgcagtagcacgatcttggctaactgcaacctccagctcctgggttcaggtgattctcctgcctcagcctcccaagtagctggcactacagacacgcgccaccatgcccggctaatttttgtatttttagtagagacggagtttcaccatgttggccaggctggcctcaaactcctgacctcaggtgatccacctgccttggccttccagagtgctgggattacaggcgtgagccactgtgcctggcttccatcctcttctatcatttttttaaatctcttctcctatcataaaattaatttctcattttttggtcaggtagaattgggaaagtcccacactgtcctcctattaccttaacatcccaagcttcctttccttttttggtctttatgaatatatttatatggacagaattaagataaacaaaattgattgccccattctctcacttccccatcttgtcttcctagaccccacagagttaaaacttgggattcccctggcccccccagaacacttgtatattgtttgtttgaggttcgtgccgcagtaacagacacagtatttaattgcacatacagatgtttgctgggtatattcactgtaaattttatttaatctgtttttttgtttgtttgggggttatttggggggaggttggttttgtttttaaatataaaaaaaaaaatctgtcactggaaaaaaaaaaaaaaaa

SEQ ID NO: 30064 - DNA, 7434 bp, Homo Sapiens
gctggatcctgcagtaaccacaacagcatcctctccctgcgccagggacctgccagccggagagatgactgattagatcagattagatccggagccccgctctgcagaagggggccccaggggcgggggaggaggaccccagctggcctgagctggggggaggggtgccttggggctcgcagagttagagctttccagcgcggggatcacacctcagaagccgccacaatgaaagacggaacacatttctacacccagtgactggccaggtcccagaggaaaacaaaaaatttgacttgaaaatatcgaccttggacatgtccaataaaacaggtgggaaacgcccggctaccaccaacagtgacatacccaaccacaacatggtgtccgaggtccctccagagcggcccagcgtccgggcaactcgcacagcccgcaaagccgtcgcctttggcaagcgctcacactccatgaagcggaaccccaatgcacctgtcaccaaggcgggctggctcttcaaacaggccagctccggggttaagcagtggaacaagcgctggttcgtcctggtggatcgctgcctcttctactataaagatgagaaggaagagagtatcctgggcagcatccccctcctgagcttccgggtagccgcagtgcagccctcagacaacatcagccggaaacacacgtttaaggctgagcatgccggggtccgcacctacttcttcagtgccgagagccccgaggagcaagaggcctggatccaggccatgggggaggctgctcgagtacagatccctccagcccagaagtcagtgccccaagctgtgcggcacagccatgagaagccagactcggagaacgtcccacccagcaagcaccaccagcagccaccccacaacagcctccctaagcctgagccagaggccaagactcgaggggagggtgatggccgaggctgtgagaaggcagagagaaggcctgagaggccagaagtcaagaaagagcctccggtgaaagccaatggcctcccagctggaccggagccagcctcagagccgggcagcccttaccccgagggcccaagagtgccagggggtggggaacagcctgcccagcccaatggctggcagtaccactccccaagccggccagggagcacagctttcccgtctcaggatggagagactgggggacaccggcggagtttcccaccacgcaccaaccctgacaaaattgcccagcgcaagagctccatgaaccagcttcagcagtgggtgaatctgcgccggggggtacccccgcctgaagaccttcggagtccctctaggttctatcctgtgtctcgcagggtccctgagtactatggcccctactcctcccagtaccccgatgattatcagtactacccgccaggagtgcggccggagagcatctgttccatgccggcctatgatcggatcagcccgccctgggccctggaggacaagcgccatgccttccgcaatgggggtggccctgcctaccagctgcgagagtggaaggagcccgccagctacgggcggcaggatgccaccgtctggatcccaagcccctcccggcagccagtctattatgatgagctggatgccgcctctagctccctgcgccgcctgtccctgcagccccgctcccactctgtgccccgctcacccagccagggctcctacagccgtgcccgcatttactcccctgtccgctcacccagtgcccgttttgagcggctgccacctcgcagtgaggacatctatgctgaccctgctgcctatgtgatgaggcgatccatcagctcccccaaggtccctccatacccagaagtgttccgggacagcctccacacctacaagttaaacgagcaagacacagataagctgctgggaaaattgtgtgagcagaacaaggtggtgagggagcaggaccggctggtgcagcagctccgagctgagaaggagagcctggaaagtgccttgatggggacccaccaggagctggagatgtttggaagccagcccgcctacccagaaaagctgcgacacaaaaaggattcactgcagaaccagctcatcaacatccgcgtggagctgtctcaggcgaccacggccctgacaaacagcaccatagagtatgagcacctcgagtctgaggtctctgccctgcacgatgacctctgggagcagctcaatttggacacccagaatgaggtgctgaaccggcaaatccaaaaggagatctggaggatccaggacgtgatggaggggctgaggaagaacaacccctcccggggcacggacaccgccaagcacagaggaggacttggcccctcagccacctacagctccaacagcccggccagccccctcagctctgccagcctcaccagccccctgagccccttttcactggtgtcgggctctcaggggtcccccaccaagcctggctccaacgagcccaaggcaaactatgaacaaagcaagaaagacccccaccagacattgcccctggacacccccagagacatcagccttgtgcccaccaggcaagaggtagaggcagagaagcaggcagctctcaacaaagttggcgttgtgccccctcggacaaaatcgcccactgatgatgaggtgaccccatcagcagtggtaagaaggaatgccagtgggctcaccaatggactctcctcccaggaacgccccaagagtgctgtgtttcctggcgaggggaaggtcaagatgagcgtggaggagcagattgaccgaatgcggcggcaccagagtggctccatgagggagaagcggaggagcctgcagctcccggccagcccggcccccgaccccagtccccggccagcctacaaagtggtgcgccgccaccgcagcatccatgaggtagacatctccaacctggaggcagccctgcgggcagaggagcctggcgggcatgcctacgagacaccccgggaggaaattgcccggcttcgcaaaatggagctagagccccagcattatgacgtggacatcaataaggagctctccactccagacaaagtcctcatccctgaacggtacattgacctggagcctgacactcccctgagccctgaggagttgaaggagaagcagaagaaggtggagaggatcaagacactcattgccaaatccagtatgcagaacgtggtgcccatcggcgagggggactctgtggacgtgccccaggactcagagagccagctgcaggagcaggagaagcggattgaaatctcctgcgccctggcgaccgaggcctcccgcaggggccgcatgctgtctgtgcaatgtgccaccccaagccctcccacctcccctgcttccccggctcctccagcaaaccccctgtcgtctgaatccccacggggcgccgacagcagctataccatgcgggtctgagctctgactgcaagccctggctgaggccaatgctgtgaagctccacagagccacattctgaagccgtcctctgcccacctgaggtcctggctccccaccctggccccctgcccctgcactcccatgggaatgccgcagggagccaggctggggccatgggctgctgccagaggaccgtggatacctcagtgtccacacacccaccatgcccagccctggagccatcactactcacaccgtggtcctgggccagggcctgagatgacagtggggagcaccatcctcattaatgtccaagtcacagggagcctcagccttgccctggctggggttgtggtgactccagtggaacattccctgatgggggacatgccgtggtggagaacacacctgtggctatcttatgtgaggactagaggtgaagaggagatggacactgcctctggagccagcctgacaccaaggacagcacttgtcatcatccctatcctcgtcagccccaccctgctgcctcagctggacccagggctttgacacaaacccagtgctttgcttatgggtgctcgctggggtccggtggagactgaccaccctgcttgagccaaagacaaggtgatgagagatggggagaggccattggctcccagagggaacagtgctggctgtggctagagaacagcaggtctgtgcagtgtctgagggcaggttgggaagggtagcagagagagagagacagaaagagagagagagagagagagagagagagatcctcagagtggaaggagggggaagcagcaggacacattggcaagtcaagcaggaaggagggagatggaaaggggatatcagattggtttcccccggtggagccttaggttagtgcccagtgcagtgccagactgtctcctctgctcctcccacctcatccctaggaggacccaccagtggagcacatgcagcctcagtggagatgcttggtgtggggatctgggtgaagggggttgagtagcgactgcctgggagatggctgttagtaggtctgcgcctggtgtctgcctcgccatcctggggtaaggggcagagagaaggacttgtcttatgtagggtgtggtcagccttggggccttacctacccagttccatgatatttcttgccctgttccccctggaatgtgcagtgggccagctgagagtacgccttgaggaggggggatgaggccttaatctgggaggcctatccccctatcccaggcatcccagacgaggactggctgaggctaggcgctctcatgatccacctgccccgggagggcagcggggaagacagagaaaagcaaacacattcctcctcagctccacccacctggagacgaatgtagccagagaggaggaaggagggaaactgaaaacaccgtggcccctcggccttctctctgctagagttgccgctcagaggcttcagcctgacttccagcggtcccaagaacacctactaattcctctccactccttcatggctgggacagttactggttcatatgcaagtaaagatgacaatttactcaacaaatatttatcgagcaccttttatgtaccaggcactgttgtaggtgcttaggatattctcatgtttctgagggattacagcctgggaggattccaccgatcttcacttctagcaggttttttaaacgtgacccttggctgtatttcccatcttcacagttcaagcaccccaaacctgccctttctcccctgcagactggcaggtgggattggctcccaggtcatttcctctctctctctttctcccaagcctttctccctccacaggaaacagatttttcagggccttccatgcctgccactttgtccgtctctttttttttttttaaagtaatattttttagaaatacatgtaaaataccaagaaataatgtctgcgcctctgccacctctctctcatctcttatttcataaagctggctctttatgttgctttacatgccttaatatatgttttatggagattatacatattatagatctatatatgtaatatatttgtttggatgtctgatcttttcctacagttcctgcccaggcctgtttttctctcccttattttccacatcattcctagcatatcaagaccataccccttgcctttttgatccaaagaaggggagaggaaagacttattttaagacatctattttatgcttttgtttaaaaaaagcaaatctattttcaaattgtgcaatgtctgaatggaattggcaaatgaggtgaggagatggggtaactgcctttaggtcccaaccctgtgcctgtccctctgccacagtggcttccttccatcctattccccagtcacgaaagggctggtccccagagctcacccagaaagcatcttgccgggggcagggcattccctcggaagtcctggcctaaggattttattacactgtctgctcctgatgaccctctgcggttgtcaggcgtgaatcctctggaaggaactgtttgcagttgtatgcacaaaggagacccatgcaggcatgcaccccagatgggctgctagactacccctcttcatcagcctgctggaaagagcagacagcgtaacagcagcctatgccaaacagcactaaggatgtcagtgtacgagacggtgcgaagcccagaggaggcggcttgggatcctctgggccatccctggccctgtagcacagacacatacaagttccttggacttgtcacactccttttcacttgatccctctctggcctgggtcacatttatgacatcccccctctgcaacctttctctctgggggctgtaccaaaggcatggtacctcagtctggtatccagactgtgaaatcagcctctgggccaaggagggtcctacagacaaggtggcatctcaacctcacccaagaaacccccgggactttaccccagcaggctgccactggggcaccgaactaagccagctcagccttccaagctgcttagcctttgtcaaccatcaaagtggggaaagggtctctggccttgcaaggatttgggcaggatggaagtctttgtctaggtctgaaatcaagggcttgggaatctagagcagagctcctggccagcgtttgaagcctggcctcccacctggggcatttactgacaccctgtcgccagcctagaacatcctgctctgaatgaacagagcccagatgggggtccagagctaagtgacccacctggggaagctctgattattcatccagggccttctcaatgagcacattacctccatgatcaataaccaagaggctgcagtcaaatactgctactgtcactttgaagattttctaagggcacaagtggcacacttgctctccggcctttgggagaggcatgttcttgggcagggctggctacggcaagagggaaccaattcctttcccctttaggcaccctctacctggcagctcttaaaactaagaaaaaatatgatatacacacacattatatatatatatatatatacacacacacacacacacacacgtatatctatttatgcacatattggggccaatttgatttgctagtattagacaataaactgtacaaggaaatttattatctcagtgtctttatttagcataaaagtggccttagaagaagggtgaaggttagatagatggaatctctgtcaggggacaaacagctgtagcatccccttagcatctttctagccaatgagccccctccccaggaggagggatggcctgactgaaacaggtgagagtttgcttccccctttcagcagcattctttttagatttaggtactgaagaatcccagtgagttctgcatttgtatcttgcaagtttgtataaacccaatacaggaaataaaatgaatggtttgtaaaaaaaaaaaaaaaaaaaaaaaaaaaaaaaaaaaa

SEQ ID NO: 30065 - DNA, 5493 bp, Homo Sapiens
gggttcggcctcaacatggcggttccggccgggcagtgaccaaggttttgccgtccgaaggactaagtggtgactgtcggcgtctccacctatcggggtggaatgcgagcacgcggggacgagcgctgagaagcggcggtgacgggaaggggggggtcagtggattgtgccccagaaaccgaagcggcggcgtctgttccttcttgtttctaggctccagtgcgttcggggccccgcccggccgggccaggccggcgggcggcggcggtagctgctgcagccgcaggataacctcgcagggtgggccggagggcgggcgccgccgctgcctgtgctgcggcgatggcccagtgtgtacaatcagtgcaggagctaatcccggactccttcgtcccctgtgtcgctgcgctgtgcagcgacgaagccgagcggctcactcgtctcaatcacctcagcttcgcggagctgcttaagcccttctcccgcctcacttccgaggttcacatgagagatcctaataatcaacttcacgtaattaaaaatttgaagatagcagtaagcaacattgtcacccagccacctcagcctggagccatccggaagcttttgaatgatgttgtttctggcagtcagcctgcagaaggattagtagctaatgtgattacagcaggagattatgaccttaacatcagtgccactactccatggtttgagtcttacagagaaacctttcttcagtcgatgccagcatcggatcatgaatttctgaaccactatttagcatgtatgttggtagcgtcatctagtgaagctgaacctgtggaacagttttcaaagttgtcacaagaacagcatcgaattcagcacaacagtgattattcctaccccaagtggtttataccaaatacacttaaatactatgtacttttacatgatgtaagtgcaggagatgaacagagagctgaatcaatttatgaagaaatgaaacagaaatatggaactcagggttgctatttacttaaaattaattctcgaacatctaatcgagcatcagatgaacagataccagatccttggagtcagtatctccagaaaaatagtattcaaaaccaggaatcatatgaagatggcccttgtactataacttcaaataagaattctgataataacttgctttcattggatggattagataacgaagtcaaagatggcttaccaaataactttagagctcacccacttcagttggagcaatccagtgacccttctaacagtattgatggcccagatcatctaagatctgcttcatcgttacatgaaacaaagaaaggaaatactggaataattcatggtgcatgtttaacacttactgatcatgatagaattcgacagtttatacaagagttcacatttcggggccttttgccacatatagagaaaacaattaggcaattaaacgatcagctaatatcaagaaaaggtttgagtcgatctctattttctgcaactaaaaaatggtttagtggcagtaaagttccagaaaagagcattaatgacctgaaaaatacatctggcttgctgtatccgccggaagcaccagaacttcaaatcaggaaaatggctgacttatgttttttggtgcagcattatgatttggcttacagttgctatcatactgcaaagaaagattttcttaatgatcaagcaatgctttatgcagctggtgccttggaaatggcagcagtgtctgcttttcttcaaccaggagcacctaggccatatcctgctcattacatggatacagcaattcagacatacagagatatctgcaagaatatggtgttggctgaaagatgtgtgttgcttagtgctgaacttttaaaaagccaaagcaaatattcagaggctgcagctctcctaatacggttgaccagtgaggattctgatcttcgaagtgcacttcttttggaacaggcagcacattgctttataaacatgaaaagtcccatggttagaaaatatgcatttcatatgatattggcaggccatcgatttagtaaagcagggcagaaaaagcatgctttacgctgttattgtcaagccatgcaagtttacaaaggaaaaggctggtctcttgcagaggatcacattaatttcactattgggcgccagtcctatactcttagacagctggataatgctgtgtctgcttttaggcatattctaattaatgaaagtaaacaatctgctgctcaacagggggctttcctcagagaatatctttatgtttacaagaatgtaagtcagctgtcaccagatggtcctttgccacagcttcctttaccgtatattaacagttcagcaacacgggttttttttggccatgacagacgaccagcggatggtgaaaaacaagcagctactcatgtaagtcttgatcaagaatatgattctgaatcctctcagcagtggcgagaacttgaggaacaagttgtttctgtggttaacaaaggagtaattccatccaattttcatcccacacaatactgtttgaacagttactcagataattcaagatttccacttgcagttgtagaagaaccaattacagtggaagtggcttttagaaaccctttgaaagttctacttttgttgactgatttgtcattgctttggaagtttcatcctaaagatttcagtggaaaggataatgaagaagttaaacaactagttacaagtgaacctgaaatgattggagctgaagttatttcagagttcttaattaatggcgaagaatcaaaagtggcaagactaaagctctttccccatcacataggggagctgcatattctgggagttgtttataatcttggcactattcagggctctatgacagtagatggcattggtgctcttcccggatgtcacacaggaaaatattccttgagtatgtcagtccgagggaagcaggatttagaaattcaaggtcctcgacttaacaacacaaaagaagagaaaacatctgttaaatatggccctgatcgacgtttagatcccataatcacagaagaaatgccactgttggaggtgttctttatacattttcctacagggcttctctgtggagaaatccgaaaagcatatgtagaatttgtcaatgtcagcaaatgtccacttactggattgaaggttgtttctaaacgtccagagttctttactttcggtggtaatactgctgttctaacaccactaagtccctcagcttctgagaattgtagtgcttacaagactgttgtgacagatgctacctctgtgtgtacagcactcatatcatcagcttcttctgtagactttggcattggcacaggaagtcaaccagaggtgattcctgttccccttcctgacactgttcttctacccggagcctcagtgcagctgccaatgtggttacgtgggcctgatgaagaaggtgtccatgaaattaactttttgttttactatgaaagtgtcaaaaagcagccaaaaatacggcacagaatattaagacacactgcaattatttgtaccagtcggtctttaaatgtacgggccactgtctgcagaagtaattctcttgaaaatgaagaaggcagaggaggcaatatgctagtctttgtggatgtggaaaataccaatactagtgaagcaggcgttaaggaattccacatagtgcaagtatcaagtagtagcaaacactggaagttacagaaatctgtaaatctttctgaaaacaaagataccaaacttgccagtagggagaagggaaagttttgctttaaggcaataagatgtgagaaagaagaagcggccacacagtcctctgaaaaatatacctttgcagatatcatctttggaaatgaacagataataagttcagcaagcccatgtgcagacttcttttatcgaagtttatcttctgaattgaaaaaaccacaagctcacttgcctgtgcatacagaaaaacagtcaacagaggatgctgtgagattgattcaaaaatgcagtgaggtagatttgaatattgtcatattatggaaggcatacgttgtggaagacagtaaacagcttattttggaaggtcaacatcatgttattcttcgcactataggaaaagaagccttttcatatcctcagaaacaggagccaccagaaatggaactattgaaatttttcaggccagaaaacattacagtttcctcaaggccatcagtagagcagctttctagtctcattaaaacgagtcttcactacccagaatcatttaatcatccatttcatcaaaaaagcctttgtttagtaccagtcactcttttactttccaattgttctaaggctgatgtagatgtcatagttgatcttcggcataaaacaacaagtccagaagcactggaaatccatggatcattcacatggcttggacaaacacagtataaacttcaacttaaaagccaggagattcacagtctgcagctgaaagcatgctttgttcatacaggtgtttataaccttggaactcctagggtatttgccaagttatcggaccaagttacagtgtttgaaacaagtcagcagaattccatgcctgccctgatcatcatcagtaatgtgtgacaacttggaaatttgtactgaaatccacaataatcagtttttgctggatgggttttacagcagtatttgatatacctaacttgttatggaggttgattgatatctgatccctgcaaaatactttgacttgtcattttgttgatgatgcaaagcacgttggactgagaatacttaacattctttttctgtatttctttaaaccctgagaataatttacatgctcataatacaggatatcagcatatttgtgcaccttattaagccccatcttaagaaaacacaaagtctaagtctgctgttacaacttgtcaatggtatacgaatattaggagatgattctgagaaaggaaaggccttgttggcagtactcctgttaagccattagtctctaaattccagctttactgtgaagttctatagagtgttaaatacaaattttcctgtcttgcttcacacagttccttaaaatcagttttgaactttggtcatagagtcttcatatttcagtatttggtggtccctatgacttatacataactttgtaaaaagaaaaaaaaattttttctgatgctttgaatatagttttgaaaggagttttgacttttttcccctcattcatctcagtatagagtgcgctatttcacaatacaatttttgtcattaaaattaccatattctttattatataacgttaactattgagttgatctgtttaaaatataaatctcaagttaattaaaaataagcttttcaaaaatgtattatatttataacaaatatactgtaaatagaataaagacatgctattcactgtaaaaaaaaaaaaaaaaaaaaaaaaaaaaa

SEQ ID NO: 30066 - DNA, 4256 bp, Homo Sapiens
cgagaccccagacgaggaccaggattcatgaaatcagtcgcaggggccggggcaggggcctctggctcccgacactggccgagaggtgatgagtgaggttcgaagaacggaagatttaaaaagcagccggggcctccgtattgaatgaaagacccagtgcaaagacatcaccatgaacactagcattccttatcagcagaatccttacaatccacggggcagctccaatgtcatccagtgctaccgctgtggagacacctgcaaaggggaagtggtccgcgtgcacaacaaccacttccacatcagatgcttcacctgtcaagtatgtggctgtggcctggcccagtcaggcttcttcttcaagaaccaggagtacatctgcacccaggactaccagcaactctatggcacccgctgtgacagctgccgggacttcatcacaggcgaagtcatctcggccctgggccgcacttaccaccccaagtgcttcgtgtgcagcttgtgcaggaagcctttccccattggagacaaggtgaccttcagcggtaaagaatgtgtgtgccaaacgtgctcccagtccatggccagcagtaagcccatcaagattcgtggaccaagccactgtgccgggtgcaaggaggagatcaagcacggccagtcactcctggctctggacaagcagtggcacgtcagctgcttcaagtgccagacctgcagcgtcatcctcaccggggagtatatcagcaaggatggtgttccatactgtgagtccgactaccatgcccagtttggcattaaatgtgagacttgtgaccgatacatcagtggcagagtcttggaggcaggagggaagcactaccacccaacctgtgccaggtgtgtacgctgccaccagatgttcaccgaaggagaggaaatgtacctcacaggttccgaggtttggcaccccatctgcaaacaggcagcccgggcagagaagaagttaaagcatagacggacatctgaaacctccatctcaccccctggatccagcattgggtcacccaaccgagtcatctgcgctaaagtggataatgagatccttaattacaaagacctggcggctctccccaaggttaagtctatctacgaggtacaacgccccgacctcatttcctatgagcctcattccagatacatgtccgacgagatgctggagagatgtggctatggagagtcgctgggaacattatctccctactcccaggacatctacgagaacctggacctccggcagagacgggcctccagcccggggtacatagactcccccacctacagccggcagggcatgtcccccaccttctcccgctcacctcaccactactaccgctctgggcccgagagtggccggagctctccataccatagccagttagatgtgaggtcctccactccaacctcttaccaggctcccaagcactttcacatcccagctggagacagtaacatctaccggaaacccccgatctacaaacggcatggtgatttgtctacagcaaccaagagcaaaacaagtgaagacatcagccagacctccaagtacagtcccatctactcgccagacccctactatgcttcggagtctgagtactggacctaccatgggtcccccaaagtgccccgagccagaaggttctcgtctggaggagaggaggatgattttgaccgcagcatgcacaagctccaaagtggaattggccggctgattctgaaggaagaaatgaaggcccggtcgagctcctatgcagatccctggacccctccccggagctccaccagcagccgggaagccctgcacacagctggctatgagatgtccctcaatggctcccctcggtcgcactacctggctgacagtgatcctctcatctccaaatctgcctccctgcctgcctaccgaagaaatgggctgcacaggacacccagcgcagacctcttccactacgacagcatgaacgcagtcaactggggcatgcgagagtacaagatctacccttatgaactgctgctggtgactacaagaggaagaaaccgactgcccaaggatgtagacaggacccgtttagagcgccacctgtcccaggaagagttctaccaagtctttggcatgaccatctctgagtttgaccggctggccctctggaagaggaatgaactgaagaagcaagcccggctgttctaggcagaggctctataaatatatatgcatttatataaagatatatgtaaaatctctctactgaagctcggtataatcctctcttgtctaatgggacacactgcctgccatgagacttgcttttctgtactgtcaggcaagcccacgtcatcgagatatttttatgctccttactttctcttttctaagtgctgtgggatctgggaagggatttgaggggactctgtccttttattggggatcctttttatactgaaacatctgtcctaacttgagtgccccaaggtccaactctctttcctaaagaaggtgcctgaagaagtctctcttctctctgcttcgtggcccctttcttaaatttctagggctgatgctgaccatgtggtttccacaccttattggccccagaggggccctcccatgggaagatctgcagcagtctccccaaatcagtgagcacctttgagcgcccacgaagaactttctcaacacccccaattaggagctcagtgctctcttggggcaatgcagttaaaagggtgagcctcaaatctagtcattacaccagtcaacagaagtggacagggcctaggcctctcctcagctccttaaccctcctccttctgccctggattgtaacctctcccttgtccaaatctaggattcctggtaggaaaaggaaaaggcccttcccttccctccaccacttccaactggcccctttgcctgacctggacttggagaaccagaggaaaagagagggagcggaagtgggagatggagcagggcacctgttagaatcagagctgcaggatttcttgggaccctcctctctccctcactgctcccagcacctcctgacccttccctctttcaaggagaagcccatgattgcagcttgtattctttagccttattacaatctatgtgcctgacaactcaacacaccgcagggctaatgttcccaccagagctccaactgaacaaccagacagacaactctcatcatcctccagagagaaaataggccgtgtctcaaagaaaggttcttggtctatgcctctggtctgtgggctggcagggcaaccataccatactcccgccagtcctcggctcctgctgcaaagttggccatgtttcacagggaaacttttggaagagtggctgcttatgagattccaaaatgaagtgttggccaacaccgctcatggccatcctggattttcccagtggcttcccttcctgctcgcctccctgaacaggggagaaagcttaacctctcttctcctctccaaacctttcaccttgaatgggtaatgtttggtgggggctgttccttcttggagaagccttgagtcggaccattttgagatcatggaggaaggatgaagaagtgaaaatgacaataatgactctcaagaggctggcgatgtgacatggcaaatgtagaactgacttaaattgaacaaaccctcactgagcacctctgatgttgagcacctgctgaatactgagcactgaatgggggagggggaggggagcacggggtgagtcaacctgggactcggtctcagggatatgcctaccaatagcgggtatcgtaaggcatgtacccaaacataacggatgtaaggcagaaagtgatcggagaaggaatgagaaagtgtgcgtgatgttaatgaaaagtcatatgcagctagagcagacccaggaaagctttctggaagagattgcatctgaggaaattcaggaaggatctttgtagattggggggagattctaaattgaaggggtgatagggtgaggggccagagggaagtctgctgtgttctcatgtaggatgtcagccctccctgcaacttctctttttggccaatgtcttttcactttcctgaccctttagaatcatccccagccagacgcaatcatggaagttgccttattgtcactggttaagaacttggcgagattgaagggcttttgttattgttgttggatatttttgtttcccataaaagcacatcatttcaaccct

SEQ ID NO: 30067 - DNA, 5246 bp, Homo Sapiens
agttccgggtgcgcggccccggatgttggctgctcttgctgccgccgccgctctcggggctgctcggggcctcgaccgctcgcagtaggcaccgttgggacctttcccgggggggcggagacgcacggagcggccgggggctcggccgggccgtcccggcctgcgcagcctgagattctctttgtggccagatgggtttgtatggacaggcttgtccatctgtaacttcattaaggatgacatctgaactggagagcagcctaacgtctatggactggttaccacagctcaccatgagagcagccatccaaaaatctgatgctacacaaaatgcacatggaacaggaatttctaagaagaatgcactccttgacccaaatacaactctggaccaggaagaagtccaacagcacaaagatgggaaacctccatacagttatgccagcctcattacatttgcaattaatagctcacccaaaaagaaaatgactttaagtgaaatttatcagtggatttgtgataacttcccatattatagagaggctggcagtggttggaagaattccatacgacataatctgtcattgaacaaatgtttccttaaagtgcctcgatctaaggatgaccctggaaaggggtcctactgggcaatagacaccaatccgaaggaagatgtgctgcctactcggccaaagaagagggcacgatctgtagaacgggcctcaactccatatagcatagattcagattctttgggaatggagtgtattatttcgggaagtgcctctccaactctggcaatcaacactgtgactaacaaagtaacattgtataacactgatcaggatggtagtgatagcccacgcagtagccttaacaacagtctctcagaccagagtttggcatctgttaatttgaacagtgttggaagtgtgcatagttatacaccggtgacaagccatccagaatcagtctctcaatcattaactcctcagcagcaaccacagtacaaccttccagaaagagacaagcaactacttttctcagaatataattttgaagatcttagtgcctcatttcggagcctttataagtcagtttttgagcagtcacttagtcaacaaggtttgatgaacatcccttctgaatcttcccagcagtcccacacttcatgtacctatcagcactctcccagcagtacagtgagcactcacccacacagcaaccaaagcagcctgtccaacagtcatggcagtggcctcaacaccacaggcagtaattcggttgcacaggtctcactgtctcacccccagatgcacacacagccatctccacatcctccccatcgaccgcatggtttaccgcagcatccgcagcgttccccacacccagcaccacacccacagcaacacagccagctccagtcccctcacccccagcatccctctccacatcaacacatacagcaccatccgaaccatcagcatcagacgttaacacatcaggcacccccacccccacaacaggtatcctgtaattctggtgtttcaaatgattggtatgcgacacttgatatgctaaaagaaagctgtcgaattgccagcagtgttaattggtcagatgtagacctttcacagtttcaaggtctgatggagagtatgagacaggcagatctcaagaactggtctttagaccaggttcagtttgccgatctttgttcttctcttaatcagttctttacacaaactggccttatacattcacagagtaatgttcaacaaaatgtttgtcatggtgccatgcatccaacaaaaccttcccaacacattggaacaggaaatttgtacatagattctaggcaaaatctccctccttcagtgatgccaccccctggttatcctcatatcccacaggcactcagcactccaggaacaacgatggcaggccatcacagagccatgaaccagcagcacatgatgccttcccaagccttccagatgcggcgttccctgcctccagatgacatccaggatgactttgattgggattcaattgtgtagggcttgtttctgcaagacaccagaccctaacgttacctttctgtgcagtgaagggaaaggtttaagagaatccagttgagaaaacaaacttgctaatcactttaccaatgttatcaaaattacttttgaagacaatcagaaggattttagctggataacttactgcttttatctgacccaagcaagtactacatgtttgtctccctgccagctgccctatgtagctcctaactgttgtgtgatttggacggctttttgcatatttgtgtcagtttgatgttaaccacaagtgccagactgatttttcagacggagcctattttgctgcaagcagtttatataaagatacatatgtgtaaatatatgtacaaaaattactgaaaggcttcagttttttctaattggattattatgtcttgaaagttattgtcagtttttattccttgttaggctattttctgcaggatgcttttaactgatgtaggaaactgaaaggaaatagattttttccaaaacccagttccccttatttaatcttttttagaaatgtgggtaatgaattctatctaataagtcaaggaaaccagaatttgacacactccaacaatccaaaggggcatgttgctcctgagcagcatgaagaactgaccaaattggttttgatgcttgggggatcatagagtatttatgtctgcttttctaaatctgcattataatagctctaaaatttgttgattggtaagaaattgggcattgcttggctctttaaacacatcagtgcttccacattcacctatgtatttattattcaaaagtgtcattttaatatttattgctaccttctgtgaatgcttagctcctgtcgggttcattaaggagaaatgtgtctgaaagcacagaactattattatttttttctttttttgagatggagtcttgccctgttgcccaggctggagtgcagtggcacgatctcggctcactgcaacctccgcctcccgggttcaagcaattctcctgcctcagcctcccgagtagctgggagtgcaggtgcacaccgccatgcctggctgattttttgtattttagtagagatggggtttcaccatgttgcctgggctggttgcaaactcttgagctcaggcagtctgcctgcctcagcctcctagagtgctgggattacagacatgagccactgcgcctggcccagcgttacttttcttgataagaatttacagataagacactcagagagacattgtgtcattctctatcatcactccttttaccatgtgaatagatttctctgtcttggcattcttgctgattcagacttattagttaaatcggatttttctggaatttgaatcagatttcatttgggcaacaacagcagggcagggtttctaaagcaggtttccccactcatctaggttgtcttgaaaggaggatagagccacttacagttttatttgcttcagtgtttaatgtagatattatgtggcctgctgtttctgttgtcttgtatgtctgtgtatgcatgacatttggtccctttctttgaaatgcagcccctcttacgggttttttagtggtggtggtttgttttgtttcatatcatatcacagtttgcatggactgattatcttagttttatgataaaactagaagaaatgagggtttttttttaatgaatagattttgaattgattctttagaccccccaaaaagtgtcagttctaatggggaaatatattccatcaagtcaaagagtaataactgctcactagttgctttttagcatctctggtcttatcagccatgctaaatcactttaattagccttagtgattctatggttgagtaatctctacttgaactaaacaaacatcttttgtttctgtgtgtgtgtgctgtgtgtgagagtgtgcgcgcgcgtgtgtgtgtgtgtgttttaatggagtgttgccttgaatgaatcactgggaagccagccatggtaagggctggtgaggttggggagaaaggaagagctttatgtttctctgttgtttggaccctacttggcatgaaaaaggaagctcagttccagccccttggatcaacgaaaatcagaggattctggaaaggcagccaacttgcgcctcttagaaggatcagaggcaagatgagatggcagcctgcagagtaaatgcttgaaaaaagaggggtgattttcaatggtttgcttaagtcactgttttctagacaccaaaatagctgttttgaaactgttttaattgcttgggtagcaatgtgcactttaaacaatttggatattggaatgcagtctcatactgagtgatttgagtagaaccactgatgatgattttataaattgtgtgaagcgaatttcccatttggcaatcatttactgatttgcagtgatgaatatttttatgagaatttaaacttagcaagaatggccatggaggcaaagccttcacccagacccatcccactctcctgtgatccaggtggtccaggagcccaggacaggccttttctgtgggccctggccagacagggttacctggtgaggtgcagagagtccctctagtggccattttgtatggtagttgctaatgcagaacaagttctgtcttgggcttaaattgactgaagactttagggggaaagaatagtaaatgcatgtaaacaaatggggacactctgttcaggagaataatccgactggcatttgtggcagtttttgaaatgtaaatgtattcatgtgtgttcttgtaaatacgtgtcgctcagatgtcctttgaagtgggagggaatcaatccggggataatttcaaatggaatagagtattttgatattgttcattcagagggtgatgtgtacatatctatattgtatatatgtgatgaaaatgcattggctttttgtgcagatacaacctgctctctgtactgctgttggacagtcagtgttttaatgtttctacagttttgctattgcacgatttcatattttgcctctatgatgaacggcaaccattatttgtaactgtttagtgctgtaaagaaatattccaagtgtcattaggattgttgctgccagaactgatatgcatgaatggcacttaaaataaatatattatgttaactctatttacaacaaaaaaaaaaaaaaaa

SEQ ID NO: 30068 - DNA, 3022 bp, Homo Sapiens
ggaaatctagttcgggaaaagtgtgaggggctcttcacgtggggaaggaacagcaggcgcggaggagggggcaagcgtgtgtgagattcagtggtccatgcgtgcgtttgtcgtgtgctggtgattgggtgtggcaactcagaactgagtgagcaactgtatgatgtgggctatcgggatatagtgaacatcgacatcagtgaggttgtcatcaagcaaatgaaggaatgtaatgccacccgacggccccagatgagcttcttgaagatggacatgacgcagatggagtttcctgatgcctcgttccaggtggtgttggacaagggcaccctggatgctgtcctgacagatgaggaagagaagaccttacaacaggtggacaggatgctggctgaggttggccgtgtcctgcaggtgggcggtcgctatctctgcatctccctggctcaggctcacatcctgaagaaagcagtgggccacttctcccgggaggggtggatggtgagggtgcaccaagtggccaacagccaggaccaggtgttggaagcagagcctcagttctccttgcctgtctttgccttcatcatgaccaagttcaggccagtccctggctctgcccttcagatctttgagctgtgtgctcaggagcagcgcaagcctgtgcggctggagagtgccgagcggctggccgaggcggtgcaggagcgacagcagtatgcctggctgtgcagccagctgcgccgcaaggccaggctggggagtgtgtctctggacttgtgcgatggggacacgggggagccacgctacaccctccacgtggtggacagccccactgtgaaaccatcgcgggacaatcattttgcgattttcatcatccctcagggccgggagaccgagtggctctttggcatggatgagggccggaaacagctggcggccagtgctggcttcaggaggttgattacagtggcccttcaccgaggtcagcagtatgaaagcatggaccacatccaagctgagctgtcggctagagtcatggagctggccccagctgggatgcccacccagcagcaggtcccctttctgtctgtgggtggggacattggggtccggaccgttcagcaccaagactgcagccccttgagcggtgactatgtcattgaggatgtgcaaggggatgacaagcgatacttccgtcgactgatcttcctcagcaacaggaatgtggtgcagtccgaagccaggttgctgaaggatgtgtctcacaaagcccagaagaagcggaaaaaggacaggaagaagcagcggcctgctgatgcggaggacctccctgcagccccggggcagtccattgataagagttacctgtgttgtgaacaccacaaagccatgatcgctggccttgccctgctgagaaacccagagctactcctagagatcccactggcattgttggtggtaggcctgggcgggggcagcctccccctctttgtccacgatcattttccaaagtcctgcattgatgctgtggagatcgatccctccatgttggaagtggccacccagtggtttggcttctcccagagtgaccgaatgaaggtccacattgcagatggcctggactatatcgccagcttggcaggaggaggagaagcacggccttgctacgatgtcataatgtttgatgttgacagtaaggacccaacactgggaatgagttgtccgcccccagcatttgtggagcaatcttttctacagaaggttaaaagcatcttgactcctgaaggtgtttttattctcaaccttgtgtgccgagacttggggctaaaagactcagtgctggctgggctcaaggcagtgttccccctcctatatgtccggcgaattgagggtgaagtgaatgagatcctgttctgtcagctgcaccctgagcaaaaacttgccacaccagagctcctagaaacagcccaggctttggagcggaccctgaggaagcctgggaggggttgggatgacacgtatgtcttgtcagatatgctcaagacggtgaaaattgtgtgactgcttaggccaagcagccctcctgcctagactgaccttggactcccagcctgccagagaatgaagaaatacaacgcacagtacttttgaagcttcgtatttttcttggtttcacactcagctacatgtgacctccagcttggtgaggttgcctgaagattagggaaaataaaaatgtccttcccatcttgtcctcttcagtaccacttgggttggtttgtctttgcttcctacaccacgtccttgagtggagttccctgctgaagcccctagcacacactgcatgccttaacaagtgtgtgcaagcccctcagaactcaagacatccaaattttattgcgtctctacttatactggtttgcttttgatttattcctctattagttctataggagtgatctcaagtgagatagcagagcaagatgccaaaagaccataaatagagtaaggtttctatagatgtgagacagatttgagagagcatttactctgtctccctgtggatgaaactgctgctgaaatggttccaatttttaggaatctgcttacccacttcattatttgacagctttccttggtgacccaaaccttgtagcctaagccatttgtctttttctcagtggagggagtgtatggacctggccccatggctttgcatgttagagacctggcagactaaagtctctagtgtttgtttgctcacatttgctgagtgacagctatgtgccagactgcataaagggtggtggcagaagtgaaaatgtttaagaatgaccaaaaacattagtaatgaaagttaatgtgttccaggcattcttctaagtggtttacatgcactgtctcatttaatctgagataaaggatacttaagcccaaactatatctaaacccaaatctcacttggctggaaacatcaatcttaaccatttattcagaaccattaaaccaatgattccaagac

SEQ ID NO: 30069 - DNA, 4623 bp, Homo Sapiens
gatgctgggccaggagctttgtgtacacccctccacttcagctgagccagggcatgtctgcggcccaggccagggcgcagtgtgtgccctgggggcccaggcctgcatggctcctctgggtagggggtcgggggcacccccaaggatggtcccttagggtgatgttttggctttggggtgacttcagcaatgtccctgcgagacaagggcggggaagaagaatgttttgaatacgactgccaggatgaagagaggaagccaacccacaggcagcatgacacccaggacctcttggaagaggttttatgtgctgaaagagttggccagatgactaagacatataatgacatagatgctgtcactcggcttcttgaggagaaagagcgggatttagaattggccgctcgcatcggccagtcgttgttgaagaagaacaagaccctaaccgagaggaacgagctgctggaggagcaggtggaacacatcagggaggaggtgtctcagctccggcatgagctgtccatgaaggatgagctgcttcagttctacaccagcgctgcggaggagagtgagcccgagtccgtttgctcaaccccgttgaagaggaatgagtcgtcctcctcagtccagaattactttcatttggattctcttcaaaagaagctgaaagaccttgaagaggagaatgttgtacttcgatccgaggccagccagctgaagacagagaccatcacctatgaggagaaggagcagcagctggtcaatgactgcgtgaaggagctgagggatgccaatgtccagattgctagtatctcagaggaactggccaagaagacggaagatgctgcccgccagcaagaggagatcacacacctgctatcgcaaatagttgatttgcagaaaaaggcaaaagcttgcgcagtggaaaatgaagaacttgtccagcatctgggggctgctaaggatgcccagcggcagctcacagccgagctgcgtgagctggaggacaagtacgcagagtgcatggagatgctgcatgaggcgcaggaggagctgaagaacctccggaacaaaaccatgcccaataccacgtctcggcgctaccactcactgggcctgtttcccatggattccttggcagcagagattgagggaacgatgcgcaaggagctgcagttggaagaggccgagtctccagacatcactcaccagaagcgtgtctttgagacagtaagaaacatcaaccaggttgtcaagcagagatctctgaccccttctcccatgaacatccccggctccaaccagtcctcggccatgaactccctcctgtccagctgcgtcagcaccccccggtccagcttctacggcagcgacataggcaacgtcgtcctcgacaacaagaccaacagcatcattctggaaacagaggcagccgacctgggaaacgatgagcggagtaagaagccggggacgccgggcaccccaggctcccacgacctggagacggcgctgaggcggctgtccctgcgccgggagaactacctctcggagaggaggttctttgaggaggagcaagagaggaagctccaggagctggcggagaagggcgagctgcgcagcggctccctcacacccactgagagcatcatgtccctgggcacgcactcccgcttctccgagttcaccggcttctctggcatgtccttcagcagccgctcctacctgcctgagaagctccagatcgtgaagccgctggaaggttccgccacacttcaccactggcagcagttggcccaacctcaccttgggggcatcctggacccccggcccggtgtggtcaccaagggcttccggacgctggatgttgacctggacgaagtgtactgccttaacgactttgaagaagatgacacaggtgaccacatttctctcccacgcctagctacctccactccagttcagcacccagagacctcaggtgagaggtcccaagcacgtgtgactgtctcaggcagcagaagttacccgagccggcctcaggcttccccagaggagatgcaggagccgccagcggccacggaggaggaggaggaggaggaggaggaggaggggtctggtgagggcaccacgataagtcctgtaaacttggcacctttcccggaggcagagttttgggccattctcacctctgttccaggcaccatccgtagtggttctctgtctgtagcttccgctcgtctgtgtgggtgatgattaaagcattctcattgcacagttctgtttttaaatacagagtctgatgcctcctatttgtaacaatgggtgtagctcccctgcccatcttggaggtgcatggcccatcagggatctttaaagtgggagcaggaaaggctgctaaaaaaaaaaaaaaaaaaagtgggcttttgggtccctgaaaacatcagtgcccttcttcctggtctgggtgtctccctgagtctaaggggaagattctcaagtcccctggtgatttccaagtggagctgagcagttttagggaaattgagtgctgggtcattcagaaggtaaatgagatcatctgttacctgtacgctgtattaaaatagaaccaggaaaggctcaggatttcagacatttcgtcagccttttcactttcccagcttcaatggaggtatatatgtcattttcttttcagcttacacatgtgttcaaagtggatttttaaaaagtgttttagcaatactccttaaccaaataaaccttcggagaacatcactaagcttttccagagagaagaccctagatgaagttggaaaagagctctggctgactccacccactgtccccaagcattaaaggtgtggccatgagtttacagaattacccacattccagttgccactgggatgaaaagctttgtgctcagagctctgggaatcatgggatcacatggttactgtttaccccaacagcatgctctgtctagactggacctcccagccccttgtgttgggaaggcaaagcttttgtggagtcaggggggagactgagaaaaaatgaattaaccctgtgttgtcatcctcatgacattcctgaggattcaccaggttagaagtgaggacgtttatctttgtgattcataattttcatttgtgaaggccacaacactccccttgaaatacagggcaggaaagagctgaggttcttggtggtgtctcccattcccctggctaatttcagacagctgtggtcaagggattttacttgggatcaacttttccttttttccttgacattaattttagagaagtcatcaagtcatgtgatttgtttagcacataggcttatttatggtttgattttttttaggcagttatattactagattaagcttgtgagggaatgaaaatgttttttatttgttatctacacactcgaaaaagagaaaccagctgcggtactgtcccatttttgtcatcagcaccagtgtccgtcaggaaggcaggtggtggtgcagaaacatgatgcctggctgattttcgtggctaaaggggtaggccttatgttgattgggatgctcccctacagccttacaggtagaatagaaggtgagttctggaagtgcaaagaagcaccattaagtgcatcttctagaagttgtacagaaggactaaagcttatcaagtcaacaaagaacttaccttggaggatagagagagagaagggaccaattatgaggactgacatcctggccactctccttaaaataaacactgacatttttcttgcttgttctctctgtactcaaacctgtggcaaattcatcctagcaacgttatttgacgaggggcatgaacatttatagttgaaactgtagaaagggtcaggttggaggtgtgtaataaaaaagaattacctaggttgccaaaggtaatttaggaagggtctgatcatttagatgagagttctttggggcttattttctgggtaaggctcatctttaaaaactggcttcagaggggagaggggagaacaatgaattggctctattttctctattgggaattacaggaccattttgattcttagaatgtaaaaagcatatcgctaagtaaatcatcctggaggtcccaagtagctctatgcctgcaatcatggagacacaggcagacagataagcttcatggggaaggcatggggcatcctctgtcttgggatttgtatccatggtggtctggtccctgccttttaatccgtcctctacgcttgggcttttctgttaccaaacagcactatcccaggaactattgtctgcctgggaacactcagtagggagacactttggagacaggaggtgatgaacctttttatgtgcagctggtatgatagaaggaaattgggaaaacttgtatgctaggcacttttgtccagagcctgctgtcccatggagaaaaagttttaagcactgaaaaaatttgattaatgtatttaaatgtattatttgaagcatcattcacttgttgatttttacaatcccatgtcttaaaaaggatgaatccatgttattgtattgtaaataatttagattattaaaatggattgtttaaaaaaaaaaaaaaaaaa

SEQ ID NO: 30070 - DNA, 4935 bp, Homo Sapiens; identical to SEQ ID NO: 23075

SEQ ID NO: 30071 - DNA, 7690 bp, Homo Sapiens; identical to SEQ ID NO: 23385

SEQ ID NO: 30072 - DNA, 4470 bp, Homo Sapiens; identical to SEQ ID NO: 27084

SEQ ID NO: 30073 - DNA, 3765 bp, Homo Sapiens; identical to SEQ ID NO: 26741

SEQ ID NO: 30074 - DNA, 7444 bp, Homo Sapiens
gctggctgcggaaggggagggggggggagaaggcgattggatgcggcggcggcggcggatcccggagagccccggagtgagcggagtagcgagtcggcaacccggaggggtagaaatatttctgtcatggctcattcaaagactaggaccaatgatggaaaaattacatatccgcctggggtcaaggaaatatcagataaaatatctaaagaggagatggtgagacgattaaagatggttgtgaaaacttttatggatatggaccaggactctgaagaagaaaaggagctttatttaaacctagctttacatcttgcttcagatttttttctcaagcatcctgataaagatgttcgcttactggtagcctgctgccttgctgatattttcaggatttatgctcctgaagctccttacacatcccctgataaactaaaggatatatttatgtttataacaagacagttgaaggggctagaggatacaaagagcccacaattcaataggtatttttatttacttgagaacattgcttgggtcaagtcatataacatatgctttgagttagaagatagcaatgaaattttcacccagctatacagaaccttattttcagttataaacaatggccacaatcagaaagtccatatgcacatggtagaccttatgagctctattatttgtgaaggtgatacagtgtctcaggagcttttggatacggttttagtaaatctggtacctgctcataagaatttaaacaagcaagcatatgatttggcaaaggctttactgaagaggacagctcaagctattgagccatatattaccaatttttttaatcaggttctgatgcttgggaaaacatctatcagcgatttgtcagagcatgtctttgacttaattttggagctctacaatattgatagtcatttgctgctctctgttttaccccagcttgaatttaaattaaagagcaatgataatgaggagcgcctacaagttgttaaactactggcaaaaatgtttggggcaaaggattcagaattggcttctcaaaacaagccactttggcagtgctacttgggcaggtttaatgatatccatgtaccaatccgcctggaatgtgtgaaatttgctagccattgtctcatgaaccatcctgatttagcaaaagacttaacagagtatcttaaagtgaggtcacatgaccctgaggaagctattagacatgatgttattgtgtcaatagttacagctgctaaaaaggatattcttctggtcaatgatcacttacttaattttgtgagagagagaacattagacaaacgatggagagtacgcaaagaagccatgatgggacttgcccaaatttataagaaatatgctttacagtcagcagctggaaaagatgctgcaaaacagatagcatggatcaaagacaaattgctacatatatattatcaaaatagtattgatgatcgactacttgttgaacggatctttgctcaatacatggttcctcacaatttagaaactacagaacggatgaaatgcttatattacttgtatgccacactggatttaaatgctgtgaaagcattgaatgaaatgtggaaatgtcaaaatctgctccgacatcaagtaaaggatttgcttgacttgattaagcaacccaaaacagatgccagtgtcaaggccatattttcaaaagtgatggttattacaagaaatttacctgatcctggtaaggctcaggatttcatgaagaaattcacacaggtgttagaagatgatgagaaaataagaaagcagttagaagtacttgttagtccaacatgctcctgcaagcaggctgaaggttgtgtgcgtgaaataactaagaagttgggcaaccccaaacagcctacaaatcctttcctggaaatgatcaagtttctcttggagaggatagcacctgtgcacatagataccgaatctatcagtgctcttattaaacaagtgaacaaatcaatagatggaacagcagatgatgaagatgagggtgttccaactgatcaagccatcagagcaggtcttgaactgcttaaggtactctcatttacacatcccatctcatttcattctgctgaaacatttgaatcattactggcttgtctgaaaatggatgatgaaaaagtagcagaagctgcactacaaattttcaaaaacacaggaagcaaaattgaagaggattttccacacatcagatcagccttgcttcctgttttacatcacaaatctaaaaaaggacccccccgtcaagccaaatatgccattcattgtatccatgcgatattttctagtaaagagacccagtttgcacagatatttgagcctctgcataagagcctagatccaagcaacctggaacatctcataacaccattggttactattggtcatattgctctccttgcacctgatcaatttgctgctcctttgaaatctttggtagctactttcattgtgaaagatcttctcatgaatgatcggcttccagggaaaaagacaactaaactttgggttccagatgaagaagtatctcctgagacaatggtcaaaattcaggctattaaaatgatggttcgatggctacttggaatgaaaaataatcacagtaaatcaggaacttctaccttaagattgctaacaacaatattgcatagtgatggagacttgacagaacaggggaaaattagtaaaccagatatgtcacgtctgagacttgctgctgggagtgctattgtgaagctggcacaagaaccctgttaccatgaaatcatcacattagaacaatatcagctatgtgcattagctatcaacgatgaatgctatcaagtaagacaagtgtttgcccagaaacttcacaaaggcctttcccgtttacggcttccacttgagtatatggcaatctgtgccctttgtgcaaaagatcctgtaaaggagagaagagctcatgctaggcaatgtttggtgaaaaatataaatgtaaggcgggagtatctgaagcagcatgcagctgttagtgaaaaattattgtctcttctaccagagtatgttgttccatatacaattcaccttttggcacatgacccagattatgtcaaagtacaggatattgaacaacttaaagatgttaaagaatgtctttggtttgttctggaaatattaatggctaaaaatgaaaataacagtcacgcttttatcagaaagatggtagaaaatattaaacaaacaaaagatgcccaaggaccagatgatgcaaaaatgaatgaaaaactgtacactgtgtgtgatgttgccatgaatatcatcatgtcaaagagtactacatacagtttggaatctcctaaagacccggtactaccagctcgtttcttcactcaacctgacaagaatttcagtaacaccaaaaattatctgcctcctgaaatgaaatcatttttcactcctggaaaacctaaaacaaccaatgttctaggagctgttaacaagccactttcatcagcaggcaagcaatctcagaccaaatcatcacgaatggaaactgtaagcaatgcaagcagcagctcaaatccaagctctcctggaagaataaaggggaggcttgatagttctgaaatggatcacagtgaaaatgaagattacacaatgtcttcacctttgccggggaaaaaaagtgacaagagagacgactctgatcttgtaaggtctgaattggagaagcctagaggcaggaaaaaaacgcccgtcacagaacaggaggagaaattaggtatggatgacttgactaagttggtacaggaacagaaacctaaaggcagtcagcgaagtcggaaaagaggccatacggcttcagaatctgatgaacagcagtggcctgaggaaaagaggctcaaagaagatatattagaaaatgaagatgaacagaatagtccgccaaaaaagggtaaaagaggccgaccaccaaaacctcttggtggaggtacaccaaaagaagagccaacaatgaaaacttctaaaaaaggaagcaaaaaaaaatctggacctccagcaccagaggaggaggaagaagaagaaagacaaagtggaaatacggaacagaagtccaaaagcaaacagcaccgagtgtcaaggagagcacagcagagagcagaatctcctgaatctagtgcaattgaatccacacagtccacaccacagaaaggacgaggaagaccatcaaaaacgccatcaccatcacaaccaaaaaaaaatgtccgtgtaggacgctccaaacaagcagctactaaggaaaatgattcaagtgaagaagtagatgtgtttcagggtagctctcctgtcgatgatattccacaggaagaaacagaggaggaggaagtttctacagtaaatgtacggcggcgaagtgctaaaagggaacggcgatgaacaaatgtaattaataactttctctgtgaaagctttggaaaaatcttttttttttttttttttttttggtcaagcttgaggctgaataaagcctttgatgcacaaaatgggactgctgaagagtggacagttggaccttactttggtgaccccatacatttgtggtcacatgctttagccatacacatggtaacattgactatggagtcttgtgaaagtgtaatgtgcgatggctatgtagacataaagaagaaacttgtaaatatcttttttcttttttttaatgtttctgatttctgaagtgcttgtatagcttttatctgcggctttaaactgacagtacccgactgtttattggatctattgatttgaaaagaatttgttaggatagatcttaagcagtaatctgtcagtgtttgtatttgtattctctgcaattttactgtgaaaaaaaatttgttttcaacaattggtgtcattttcttgatgtcactatttgttggagagttaaatggtctcttccctttgtgtatcttacctagtgtttactcctgggcacccttaatcttcagaggtgctaaattgtctgccattacaccagaaggatgcctctgataggaggacaaccatgcaaattgtgaaatagtcctgaagttcttggattactttacacctcagtattgatttgtcccagaattttctggcctttcatggcaatgaaaattttaagaagaaagatttaaagtattttaattttaaagagtgtgttataaaataatgtactgaattctttatcccattttatcatcctttcagtttttattaatctactgtatcaataaaattctgtaatttgaatgagtttttaatagtctagaatgttattgtgtatagatatttcctcttgaacgttatgttcagaaaatgcaaattacactataatataaaacctgatatatacacattagaaatattccagttctccgtaacagtgtaaagttaatcagaaagaaaaaattttattgatgcagtgtgtctttataaagctgttcttgaaagccaagtgttttgtattttatagtgagttgcatgtttttgaaaaaaagtgctgaaaatgggatgtgctgttttctgtaaattcatatttagccatagtatatgatagattgccccataacatagtttttcatcaagagtttattattgtactttattttggagccaaaaaattgattctggggggtgggggcagcgtagaagtggtatatccaagtatatcagctactgtagttgtcacagtcttgtgaactttgaatgaaattccactttgtccagattgggagaagtggaaatttatttggatttagagcaggtctttttttttcttcattgtaatctgcaaaatgtagaaataaattacttaaggcagtatcctttatacagttgtataaactgtattttgaaccaaaacatataggttactacttaatgcttacctaatttcattttagtattttaggtgctgttatgttttttcatggttaacaccagaggggaaaaaatcatattctaacttattaaatttatcacattgaatagtggaacattttcatatgatacaccattatgtttaagatatatttccaagattggttataatagatggggcatataataaagaagctactattttggaaaatgacattttactatttgccaatgtatattgcaattgatgtgattatttttcttttaaagatttgtttgtgtttatgaaacagccatttattttttaaaaagtgttttgaattgtgtcttaatctctccatattcaactattcttcatttacaacaatagtgacaccagtaattatgagaggctgtcatatatcaaagcagctcaggtgggatcaacatacattggttttgaaatgtttccttagctcggttctcccaaacacataatttctgtttcagcagtacaaaggcatgttttaaaatctataacataaagaataaggaatagctttgtatttttgtcattgattaaattgcaccagaaatgtttatggaaatattaagaacattttataaaacatacgaaaaagtgattgtgaaggatttttatttgcatgattatagttaagcaaatttcatttcacatttttgtaatgctgtacagcagttcacaaaaaaatgttcattgtagattttgttatgttcaatgccaatgagtctgtaattttacgacctgtctgttctttttttgggtggattacgatgtaaatttttcttttctttctttctttttttttttttttgtgtagaaaaataggtgcaataatgatcaaagttttgatgtcttgagtctccatcttaggggattatcttacgtttaagcttaacatttcatgtagtaagatttggagagccacatactttacagtaaaattaagtgtgtataaaacattaattgctaacaattgttagcaaactatttcagtgataatgttcattttgaaaatatgtactgtataacattaagaaaatatttaactccctgtaacaagttccattatgaaaatcttattcctcagtgaggttatcttgctgcactctgtagcaaatttgtttaatctacattataataaaatttcttgctgcagtgcaacaggaggctttttcagtgatcttcactgtatatgtaaattacaaatgtggctgtaaaacttattccaggtattaaaggttaaattgctttctatatcttcttataacttgtaagtctgatttttaagatttccttttgtccacttgtaagaatgtcaggaatttaagaatttgtttaaattaggcatatctctgccatcacatagtattatgtcaccataatgaacaattgctatttaaatagataaccaattttcagacacatttttggatttctgtgaagttgaataaacataaaagctaa

SEQ ID NO: 30075 - DNA, 5383 bp, Homo Sapiens
gggaggaggagccgccgaggagaccccgggcgaggagctgcgagccggaggaggccgcgcggactccgggctttccgccgtcgcggggatctcggggggcaaagggatcgccggggagggggaccagagagccgcgcccgccgcgcggagcgccccttcgcgtcccctgcaccatgagctggggcaccgagctctgggatcagtttgacaacttagaaaaacacacacagtggggaattgatattcttgagaaatatatcaagtttgtgaaagaaaggacagagattgaactcagctatgcaaagcaactcaggaatctttcaaagaagtaccaacctaaaaagaactcgaaggaggaagaagaatacaagtatacgtcatgtaaagctttcatttccaacctgaacgaaatgaatgattacgcagggcagcatgaagttatctccgagaacatggcatcacagatcattgtggacttggcacgctatgttcaggaactgaaacaggagaggaaatcaaactttcacgatggccgtaaagcacagcagcacatcgagacttgctggaagcagcttgaatctagtaaaaggcgatttgaacgcgattgcaaagaggcggacagggcgcagcagtactttgagaaaatggacgctgacatcaatgtcacaaaagcggatgttgaaaaggcccgacaacaagctcaaatacgtcaccaaatggcagaggacagcaaagcagattactcatccattctccagaaattcaaccatgagcagcatgaatattaccatactcacatccccaacatcttccagaaaatacaagagatggaggaaaggaggattgtgagaatgggagagtccatgaagacatatgcagaggttgatcggcaggtgatcccaatcattgggaagtgcctggatggaatagtaaaagcagccgaatcaattgatcagaaaaatgattcacagctggtaatagaagcttataaatcagggtttgagcctcctggagacattgaatttgaggattacactcagccaatgaagcgcactgtgtcagataacagcctttcaaattccagaggagaaggcaaaccagacctcaaatttggtggcaaatccaaaggaaagttatggccgttcatcaaaaaaaataagcttatgtcccttttaacatccccccatcagcctccccctccccctcctgcctctgcctcaccctctgctgttcccaacggcccccagtctcccaagcagcaaaaggaacccctctcccaccgcttcaacgagttcatgacctccaaacccaaaatccactgcttcaggagcctaaagcgtgggctttctctcaagctgggtgcaacaccggaggatttcagcaacctcccacctgaacaaagaaggaaaaagctgcagcagaaagtcgatgagttaaataaagaaattcagaaggagatggatcaaagagatgccataacaaaaatgaaagatgtctacctaaagaatcctcagatgggagacccagccagtttggatcacaaattagcagaagtcagccaaaatatagagaaactgcgagtagagacccagaaatttgaggcctggctggctgaggttgaaggccggctcccagcacgcagcgagcaggcgcgccggcagagcggactgtacgacagccagaacccacccacagtcaacaactgcgcccaggaccgtgagagcccagatggcagttacacagaggagcagagtcaggagagtgagatgaaggtgctggccacggattttgacgacgagtttgatgatgaggagcccctccctgccatagggacgtgcaaagctctctacacatttgaaggtcagaatgaaggaacgatttccgtagttgaaggagaaacattgtatgtcatagaggaagacaaaggcgatggctggacccgcattcggagaaatgaagatgaagagggttatgtccccacttcatatgtcgaagtctgtttggacaaaaatgccaaagattcctagaggggagtgcctgcgagcctcgggtgagccttcctggaggagcctccgtctgcttgttcccacaggcctccagcgccctgccctgtggacagcccacccctccgcagccccatccctgcggggcggtctctctctctctctccagcatgctccctgcggccctgccctcccgcccagcccgggccacctcgtgggggacaagtctcgccagcgcccacccccatggctcgggtcagtcctcatcgctccccctccccaccccgcgcaggccactgagacggtgggacacacgcccccacctgctccttcctgggccctcagtccacccgggctcgtcctggcagcccttccgcgcttcacacagtgccttttgtgaaagtgtcatcacgggtcccctgaggagacaaggcaggtccagcgcacatcaggcggactgagcactcgatgtcatccgtgtcgatgtcatccgtgtgtcccagactgcctgctgtagaaaacacttcctcctctcctgagtctgtgaagtcctcagtggtcctttttggattctaggcttgcacctcatactaaacattgaccctttcactatgccctcaacctgggagcatctggcaggcaggggggcaggtacacacacacccacaggcacacccaccagtacacacgcgtgcgcatacacacattttggtttgacgccctgttttcagtggcctggggaggtccacactggaagtcgaattccagctcgccttgttgactcgcctgtgtccaccggccatgaggagcccacgcctgtcctccccatcactttcctgtccctgagaactgtagatcatgcgcttgtgagcgaggccctcccctctgcaccagctcattgcaaagcgaacatcctctcctttccaggagccccaggattagcatctgaaaagggtagcacttccttttttgttgttgtttttttttttttttttgagacgggagtctcgctctattgttcagactggagtgcagtggcatgatctcggctcactacaacctccacctcctgggttccagcgattctcctgcctcagcctcccaaatagctgtgattacaggcgtgcaccaccacgcccggctaatgtttgtatttttagtagagacagggtttcaccgtgttggtcaggctggtctcaaactcctgacctcaggtgatccgcccgcctcagcctcccaaagtgctgagattacaggtgtgagctaccgcaccccgccgaggttagcactttcatcaccaaagaccccgtgcctctcgtggtcctttgagggatcccgccgccaccacccttgtattttatcacgtgctcttcagggcatgtggaattcgttgagtttgcttttagagccaagtttctttccctgtgtgggtttttgaggaaaacctgaggtcccctaatctgtggccaccaccccccccccgccgccacgccttagagcagagcagcccctcctctcatttggtgcagaaacactcaagaggaaccattggcctagagctcctgtgaccgagagcgccacggaagcctggggatgatgtcgggcagctttattctttgcttggctttggtaactaggtggtcccctcaagcatcctcagttcctcttgctgtttatgaatctaagacaaggaagtcctatagaagccaaagggacagggacggaaaggacaggtcccaagggatggggctgtctttacttgtggaaaccaggaaattgctcctctcagccaaccaaggttgaccacacaccacccttccggagcagctcagtcagccctcggggacgagaaaccacaagcgcagagacgctgaggcccaggcaggtgaagaggaagtggctttgggtttttaaagtaggtgagcgtgagcctctctgactgcttcttccccgggggggactgcaaaccgctcagggttgcggcagagccatggacttccggtccctgcaacgggtgacctaagcgtggtgcacccatcagtcacgcaggaggactgacttgacagacgaaagacaagcccggatgacacagggtgagaagagtcagggccgcacctctgtccctgcaaaccaacaggtgcatggtgagtgtggcagtccccacagctccacaatgggctcccccgccaacggggacgacagggatcttcaggaacttctgacctcaccaagtcaagtggaccactctccactccacgaggatgtgaaacggttctttaaaatgggattttagagcctcgggaatgcatgtgcgtcgcatctttcatattatgggtcaggatagattcatttcttgcaacatagtggaaaagatataagctgcagtaatttgctctttgaatgaccgtcacccccagtataggatatgcttgtatccccccgtcactcctccgcctgttttttaaacttttccaccacctgcgtccaaaaagaatgttatagcgagtgctcttaaatgttgaacctgggtgttgcttccgggccagtctgcgtggctccatgaaaagctcactgctgccccagccgggcttcttagaggaggtcagttgtcctatgtatcatcatttactctgggaatcctactgtgaaatcatgtctgtatttttctggagcagttcacatagagtagaatgtggaatttcccgtgaacgtctccttcctcccccgtatctgccgcctgtcacttcgccaccgtgctagaatactgttgtgttgtaagatgactaattttaaaagaacctgccctgaaaagttcttagaaacgcaatgaaagggaggaacttgtcctttacccagtttttcctttgtaggatgggaaagtataaaaaggcacagaaggttgtcatgggctgttccttgggggtttttatcctgctcaccgtggagataagcctgcggcttgtctaaccagcgcagcgcaaaggtctcaatgccttttggtaacatccgtcattgcagaagaaagtttacacgacgtcaaaaagtgacgttcatgctaagtgtttttccagaaatattggtttcatgtttcttattggctctgcctcctgtgcttatatcatccaaaaactttttaaaaaggtccagaattctattttaacctgatgttgagcacctttaaaacgttcgtatgtgtgttgcactaattctaaactttggaggcattttgctgtgtgaggccgatcgccactgtaaaggtcctagagttgcctgtttgtctctggagatggaattaaaccaaataaagagcttccactggaggcttgtattgaccttgtaactatatgttaatctcgtgttaaaataaaatataacttgtg

SEQ ID NO: 30076 - DNA, 5680 bp, Homo Sapiens
ataaactctaaggaagacagtgatggagtgaagtgggctgggggcgatagagaggatggggtggggcaccaggcgagagatgcgaaggaagccagaacgaaaagagagcgaccgaggagagaagagagcagagcaatacaaaagcagcctcggatctagccggagctgcaagcgttaaggggaggcggagagtgacgcggtttgcgtctggagcggctccttggagtccacagcatccaccgccggagcctcgccttcctttctccctctgcagacacaacgagacacaaaaagagaggcaacccctagaccaccgcgaaggacccatctgcaccatgaccgagaccaccaagacccacgttatcttgctcgcctgcggcagcttcaatcccatcaccaaagggcacattcagatgtttgaaagagccagggattatctgcacaaaactggaaggtttattgtgattggcgggattgtctcccctgtccacgactcctatggaaaacagggcctcgtgtcaagccggcaccgtctcatcatgtgtcagctggccgtccagaattctgattggatcagggtggacccttgggagtgctaccaggacacctggcagacgacctgcagcgtgttggaacaccaccgggacctcatgaagagggtgactggctgcatcctctccaatgtcaacacaccttccatgacacctgtgatcggacagccacaaaacgagaccccccagcccatttaccagaacagcaacgtggccaccaagcccactgcagccaagatcttggggaaggtgggagaaagcctcagccggatctgctgtgtccgcccgccggtggagcgtttcacctttgtagatgagaatgccaatctgggcacggtgatgcggtatgaagagattgagctacggatcctgctgctgtgtggtagtgacctgctggagtccttctgcatcccagggctctggaacgaggcagatatggaggtgattgttggtgactttgggattgtggtggtgccccgggatgcagccgacacagaccgaatcatgaatcactcctcaatactccgcaaatacaaaaacaacatcatggtggtgaaggatgacatcaaccatcccatgtctgttgtcagctcaaccaagagcaggctggccctgcagcatggggacggccatgttgtggattacctgtcccagccggtcatcgactacatcctcaaaagccagctgtacatcaatgcctccggctagcagcccctcgtcctccggcaacacaatggcccctccatctttgtcagccccctgtttctctcctgcctctctgtttctccatctcctcgtcttgactgttttccctacttgctgacttaaccccccatagtgtgggggacctgcagagaaccatggcattccctattccacagtcatctttggacagactttcctctagtctccgggttgggggtgggtgagggaatggggtgggagtcgggggaagtgcagtccttggagatgtactggtgtccgtctcccagcatgctctagagaggcggctctggtgcccatcctcccagcacgctctggggaggcggctctggtgcccatcctcccagcatgctctagagaggcggctctggtgcccctcctcccagcatgctctggggaggcggctctggctcttgccttcccagcatgccctttactacaaagggctatttttcttttctttcttttgtttatttatttttctttgttcactccctgtagaacttggatgaaatcagtgtccatggttctttatgtttgtagtcttgatgtgctcctgtggtattacttcccctctgataggacattgtagccagcctcagcactcagtgagttcatcagggccacacccagtagagaaggccaagcaacctccacttcttcagcaccacacacacgcacacacacacacacgcacacatgcgtgtgcacccgcgcacgcacatacacacacacatatagcagtagcagcagcagcagcagcagcagcaacctttgatcaggagtgagattttcgggttctgaaacctgggacacgagtctgtgaatagtcggttttctcagaataatttgaatctgttttcttagtttcaaatgaccatttccctgatgctctgagcttatgatcacacagagccagtccatcctcatttcctggtggcatctgttcatttacctttgtggactgtagctgatggcacagtgcgggttccctaccagccaggggtttccaagggacctttggaggccatgcttagacacattcctgtacctgagaacaaccacataggcaggaccagatccacatcgtgcagtcgtgtcataaaaaaacaaaacaaaacaaaaaaacactaggagtccactcaaccctggaggtctttgctaattggaattatgtattgtctgttgggctgggaaatgtctctttcatattgtaagtccaggatgaactaggagaaagcaatttgttgccctgatgataactgatgattttcaccctctctagctgaggtaactcagacagtgcatgaggtcagtttcttcttgagaagcagtgccttggtcttgtttctgtggttggttctagcccctgcagagcctgggagctgcaggaactgtctgagaaaatctccctaataggggagtgggttcccagaagggagatctgggaggggtcaggagccactaagttgcttcactccttttttctctaattttctaccttcctctctgttcctgcagacagttttgccagctttgcttctggttactagggtctcatgcgtgtcctgcttggagagccataaggaaattgctgtcttgtgctttgtgtctctcatccagtctctggctcttgggattctggtctttgagaaatagtccctgagtattaggatacttttatcaaaatctagtaccagctacggccagaaagggccaggtgggacctgaaagcaaagacaatgttctttaccacacgtttcacatctgcaacatccttcaattgcgggaaaaggaacttgatttaacagaagaacatggtagagcagcatccagaaagtctgttattcctcttggattttttgaaataatcttcagaggaaggaaggaaaatcctattttggggtatcagtgtttgactagggatcatgaaataataaactgaaaaaaactttagagttcagttgatccaacactttcctttaaaagttgagggagcagaggcccatgggattaaatggctggtccaggtcagccagcaggtgtagggcctgacaagaacatattgtttccctgacccctaggccgtcacaccacaccctccatttcctcatgttgctgaccaggtgcccatatgatttctacacttcccaagccttaccctggcatctttcttttaaattatatctgtcccaggtgctctccacacataggatggtaatgccagtcccaggggagggtgtgatagtaaggaaggccactgttaggtttcctttagaaataaagagatctcagcagcttggaagaaatcccagaagcggactccatcaatccaagaaagagttgctttgtggaaggtgaaggaagacccacagagtgctcaggatgatgctattgctggagagcgaaagatggaacagccttgtccaggcagaacagtcataagccaggaaatgaaacaaaggaaaacaggtgcctgaatttcctggggaaacatggcttgtttaaggacttggagttatggatggaatttatgggacccacgtgagcagacctgaggaaggctcgatttcttttgtttcttggtccactctgtcactctgctctggtcaagccccatttggtctacagcccatgagaaggaatgaggctggttctgcactctcagcatgcagtccgaaagcatgtgggagtggggagggaaagtgagatgaattaagacaaagaacaggtgccatagaagtagatttctaggaatgaagtggggcagatcttatctttgtggattacaggcactgtactaaaaacaggtttcctatttaatataaaaagaaagtgaatcttcttttggatagaatcatccattcccatcgccgcaccccctaccccccaaacacacacacacacacacacacacacacacacacacacacacacacacacgccctactcttcatttgctaggggaaggtcacagcacaactaaatccaggacaggacattgtgaccatgacccagccacagtcaataccagaaagatgattcagagtctgaagtggtgccccaggtgccaacaggataacctctaccccccgactttgtctctggggtcctgttccttcctgcaaagcccaatccaagactggcatggctcagaggttgtgagaaaggcatggactggaacaatcatgtccagaggggtctggagctttgtttcctgttcaccagcaaaaaatgtctctcccatttttctgaaagtggctgatgtaagaacaggcagaaggaaaaccctttttgtcaataactctgtccttaaggaatggtcctctgggagggctgtgctgctagtgggtacctcagtcacacacccccaaccccaggcagcctctagagccttcttgctttcattttccttgaatgtacataggaacaagggggaaagtctcttactgaagtgcctgaaacccaaagctagagcttctagagacgccgttcttcctgtctcagcttggccagcctttcaacaatgttctctagtttcaagctccagcttctcagaaagaattaaagaacttgctgttcaaattaagtagaaagtgagactcaataataactgaactacagcaaaaggcagagaattacagggagaaaaaacttgtacttaccagcccaattctactctcctcaaactgacacacacacacacacacacacacacacacacacacacacactcttttaggggactaagagagagaagcatgttattacattttactcatccaaacagtaatgcaaaaataaaacggtagaatatgaaaagctcaggatctctcccaaggctacctactgcaggagggccaacaggtgagatgggaagaatggaaacagggaccgattttgtagctcatacaattaggacaccttaggaatagcattgtagtaatggtgatgaatatgctctgccaaattcatccagtctgcaccatcttatagctgcccagcacactcgactgttcatgtggtctctttgtagtgtgagtttggagtgtcctattagcctgttctggttaggaatgagttaacggctctttccctcaaccttagtctagtcccagggctgaggattcagctggatccacatggtcttgagggttggcatgaggagggggaagcttttttgaatcgctttttgatcacataatctgccattttaagagtaagatttgctttatggaaatcaattcattaataaaaaatgatattcaagttgcaataccatttcacagtgaaatattttgagtacaattttgttgctagaatagtcatgggcaagagttttatgcaaaatgtttcaattatgttaataaataagacaatgcaaaaaaaaaaaaaaaaaaaaaaaa

SEQ ID NO: 30077 - DNA, 9908 bp, Homo Sapiens
caaccatgtaagcagcttcgcttcctgccgcaaccgtccgcggcctgaggagcccaccgccgctctcgggggccgacttccgggggctgagccgttgaagcggaggctggggcggggggcagccggcgcggccggggcaggaggcgcagactcatgaaatggccacagatgataagacgtccccaacactggactctgctaatgatttgcctcgatctcctactagtccttctcatctcacacactttaaacctttgactcctgatcaagatgagcccccttttaaatcagcttatagttcttttgtaaatctctttcgttttaacaaagagagagcagaaggaggccagggagaacagcagcctttgagtggaagttggaccagccctcagctcccttcgaggacacagtctgttaggtcacccacaccttataaaaagcagcttaatgaggaactccagcggcgctcttcagcattagacacaagaaggaaagcagaacctacctttggaggtcatgaccctcgtacagctgttcagcttcgaagcctcagcacagtattaaaacgcctcaaggaaatcatggaggggaaaagccaggatagtgacctgaaacaatactggatgccagatagccaatgtaaagagtgctatgactgtagtgagaaatttacaacctttaggcgcagacaccattgccgactatgtgggcagattttctgcagtcgttgctgtaatcaagaaatccctggaaaatttatgggctatacaggagacctccgagcttgcacatattgtagaaaaatagccttaagttatgctcattccacagacagtaattctattggggaagacttgaatgctctttcagattctgcttgctctgtgtctgtgcttgatccaagtgaaccccgaacacctgttgggagtaggaaagccagccgtaacatatttttagaggatgatttggcctggcaaagtttgattcatccagattcctcaaatactcctctttcaacaagacttgtatctgtgcaagaggatgctgggaaatctcctgctcgaaatagatcagccagcattactaacctgtcactggatagatctggttctcctatggtaccttcatatgagacatctgtcagtccccaggctaaccgaacatatgttaggacagagaccactgaggatgaacgcaaaattcttctggacagtgtgcagttaaaagacctgtggaaaaaaatctgccatcacagcagtggaatggagtttcaggatcaccgctactggttgagaacgcatcccaactgcattgtaggaaaggaattagtcaactggctaatccgaaatgggcatattgccacaagggcacaagctatagcaattggacaagcaatggttgatggacgttggctggattgtgttagtcatcacgaccagcttttcagagatgagtatgcgctgtatagaccactgcagagtacagaattttctgagacgccttctcccgacagtgactcagtgaactccgtggaaggacactctgagccatcctggtttaaagacataaagtttgatgacagtgacacagaacagatagctgaagaaggtgacgataatttggctaattctgccagtcctagcaagcgcacatcagtcagcagtttccagtccacagtggacagtgactcagccgcttctatcagcctgaacgtggagctggacaacgtgaacttccatatcaagaagccctccaagtacccacatgtgccccctcaccctgctgaccaaaaagagtatttgatttctgacactggaggacaacagctctcaataagtgacgctttcatcaaagaatccttatttaatcgccgagtagaggaaaaatccaaagagctgcctttcacacctttgggctggcatcataacaacctggagctcctgagggaggagaatggggagaaacaagccatggagaggttgctttcagctaatcataaccacatgatggcactactccagcagttgctccatagtgactcactgtcatcatcttggagggacatcatcgtgtcattggtctgccaggttgttcagacagtccgacctgatgtcaagaaccaggatgatgacatggatatccgtcagtttgtccacatcaaaaaaatcccaggtggaaagaagtttgattctgtggttgtcaatggctttgtttgtaccaagaacattgcacataaaaagatgaattcttgtattaaaaaccctaaaattcttctgttgaagtgttccattgagtatctctacagagaagaaactaagtttacttgcattgatcctattgtgcttcaggaaagggaattcttgaagaattatgtccagcgaatagttgatgttcgacccaccttggttcttgttgagaaaacagtgtctcggattgcccaggacatgttattggaacatggcattactttggtcattaatgtaaagtcacaagttttggaacgaatcagtcgaatgacccaaggtgatttagtgatgtcaatggaccagctgcttacgaaaccacacctgggcacttgtcacaaattttatatgcagatatttcagttgcctaatgaacaaaccaagacactgatgttttttgaaggttgtccacagcacctaggctgtacaatcaagctaagaggaggctctgattatgagctggctcgagttaaggagatcctaatatttatgatctgtgttgcttatcattctcaactagaaatatcctttctcatggatgaatttgctatgcctcccacattaatgcaaaacccttcattccattccctgattgagggacgagggcatgagggggctgtccaagagcagtacggtggaggttccatcccctgggatcctgacatccctcctgagtctctgccctgtgatgatagcagtttgctggaatcgaggattgtgtttgagaagggtgagcaggaaaataaaaatcttccgcaggctgttgcctctgtgaagcatcaagaacatagcacaacagcttgcccggcgggtctcccttgtgctttctttgcacctgtaccggaatcattgttgccactccctgtggatgaccaacaagatgctttaggcagcgagctgccagagagtttgcagcaaacagttgtgctgcaggatcccaaaagccagataagagcctttagagaccctctacaggatgacactggattatatgttactgaggaagtcacctcctctgaagataaacgaaagacttattctttggcctttaagcaggaattaaaagatgtgatcctctgtatctccccagtaatcacattccgagaaccctttcttttaactgaaaaggggatgagatgctctacccgagattattttgcagagcaggtttactggtctcctctcctcaataaagaattcaaagaaatggagaacaggaggaagaaacagctgctcagggatctctctggacttcagggcatgaatggaagtattcaggccaagtctattcaagtcttaccctcacatgagctagtgagcactagaattgctgagcatctgggcgatagccagagcttgggtagaatgctggccgattatcgagccagaggaggaagaattcagcccaaaaattcagacccttttgctcattcaaaggatgcatcaagtacttcaagtggcaaatcaggaagcaaaaatgagggtgatgaagagagagggcttattctgagtgatgctgtgtggtcaacaaaggtggactgtctgaatcccattaatcaccagagactttgtgtgctcttcagcagctcttctgcccagtccagcaatgctcctagtgcctgtgtcagtccttggattgtaacaatggaattttatggaaagaatgatcttacattaggaatatttttagagagatactgtttcaggccttcttatcagtgtccaagcatgttctgtgatacccccatggtacatcatattcggcgctttgttcatggccaaggctgtgtgcagataatcctgaaggagttggattctccagtacctggatatcagcatacaattcttacatattcctggtgtagaatctgcaaacaggtaacaccagttgttgctctttccaatgagtcctggtctatgtcatttgcaaaataccttgaacttaggttttatgggcaccagtatactcgcagagccaacgctgagccctgtggtcactccatccatcatgattatcaccagtatttctcctataaccagatggtggcgtctttcagttattctcccattcggcttcttgaagtatgtgttccactccccaaaatattcattaagcgtcaggccccattaaaagtgtcccttcttcaggatctgaaggacttctttcaaaaagtttcacaggtatatgttgccattgatgaaagacttgcatctttgaaaactgatacatttagtaaaacaagagaggaaaaaatggaagatatttttgcacagaaagagatggaagaaggtgagttcaagaactggattgagaagatgcaagcaaggctcatgtcttcctctgtagatacccctcagcaactgcagtcggtctttgagtcactcattgccaagaaacaaagtctctgtgaagtgctgcaagcttggaataacaggttgcaggaccttttccaacaggaaaagggtagaaagagaccttcagttcctccaagtcctggaagactgagacaaggggaagaaagcaagataagtgcgatggatgcatctccacggaatatttctccaggacttcagaatggagaaaaagaggatcgcttcttaacaactttgtccagccagagctccaccagttctactcatctccaattgcctacgccacctgaagtcatgtctgaacagtcagtgggagggccccctgagctagatacagccagcagttccgaagatgtgtttgatgggcatttgctgggatccacagacagccaagtgaaggaaaagtcaaccatgaaagccatctttgcaaatttgcttccaggaaatagctataatcctattccatttccttttgatccagataaacactacttaatgtatgaacatgaacgagtgcccattgcagtctgcgagaaggaacccagctccatcattgcttttgctctcagttgtaaagaataccgaaatgccttagaggaattgtctaaagcgactcagtggaacagtgccgaagaagggcttccaacaaatagtacttcagatagcagaccaaagagtagcagccctatcagattacctgaaatgagtggaggacagacaaatcgtacaacagaaacagaaccacaaccaaccaaaaaggcttctggaatgttgtccttcttcagagggacagcagggaaaagccccgatctctcttcccagaagagagagaccttacgtggagcagatagtgcttactaccaggttgggcagacgggcaaggaggggaccgagaatcaaggcgttgagcctcaagatgaagtagatggaggagatacacaaaagaagcaactcataaatcctcatgtggaacttcaattttcagatgctaatgccaagttttactgtcggctctactatgcgggagagtttcataagatgcgtgaagtgattctggacagcagtgaagaagatttcattcgttccctctcccactcatcaccctggcaggcccggggaggcaaatcaggagctgccttctatgcaactgaggatgatagatttattttgaagcaaatgcctcgtctggaagtccagtccttcctcgactttgcaccacattacttcaattatattacaaatgctgttcaacaaaagaggcccacggcgttggccaaaattcttggagtttacagaattggttataagaactctcagaacaacactgagaagaagttagatctccttgtcatggaaaatcttttctacgggagaaagatggcacaggtttttgatttgaagggctctcttaggaatcggaatgtaaaaactgacactggaaaagagagttgtgatgtggtcctgctagatgaaaatctcctaaagatggttcgagacaaccctctatatattcgttctcattccaaagctgtgctgagaacctcgatccatagtgactcccatttcctttctagccacctcattatagattattctttgctggttgggcgagatgatactagcaatgagctagtagttggaattatagattatattcgaacatttacatgggacaaaaagcttgagatggttgtgaaatcaacaggaattttaggtggacaaggtaaaatgccaacagtggtgtctccggagttgtacaggactaggttttgtgaggcaatggacaagtatttcctaatggtaccagaccactggacaggcttgggtctgaattgctgaaatcaagcacatattttgaaatggactgtgaaggaaaaggggacaggaacaaaggaccaaaaataagctacatgttttatttcttcatcgtgttcaccactgtatgccaaggcttttcagttctgtgtctgtttagactgtccgtaatggaatggtaaaactccatgaatttgcactttggtttttgatacctgtggagctgtctgtacgttgggaagtggcatgaaaattttcttaagctaaaatacagacatgtttcaaagggctaaagttggagatgagtagatagggtgaaaaatgggttaaatttgctagcttaattgttttaagaagaaaacagtgtctcataaattgactatcctggcatcacatttaacatgttatctacttagaaagcatttgtagagctgctgaatttgttttgtgtttttctgtaataatttaatgttacttattatcagaatttctgaaacctttacaaaaattctgatttattccattaatggccagttaaacacgtgggcatttattgttttattgaggaatttgacttaaactgggaatcctgtcatgttgtttatctttccagcttgcctgtttttgagtatgtttgatgtttttaaaattttgtcttctctgtggatgacaggaggctacagcaattaactttaagcctccttttagagatatttttaaagcttgtttaaaatttttgtgcaattcatatattaaattgcacttacttgcatacgctcatattctagggttttttctctatttttagggtatcatagtaaatcattagtaaatgagtctgtagttactaaaccctaatggaataattattaatgaaagatttttgaaatataaaaaataaattaggcccaatccaagaaattgagtgagaaggaaacacttgttttattcacagaggtaaagtgtcttttcaatataaccagcaatttaggtggcatctataaaataaaaaatttctactgtggacatccccttttccaactttctacataatggctagttctgactactaagaaatgttaagaaataggccaagtgcggtggctcacgcctataatcctatcactttgggaggcctaggcaggcagatcacctgaggtcaggagttcaagaccagcctggccaacatgaggaaaccccatctctactaaaaagacaaaaaattagctgggcatggtggcatatacctgtaaccccaactacttgggtggctgaggcaggagaattgtttgaacctgggaggcggaggctgcagtgagctgggattacaccattgcattccagcctgggcaacagagcaagactgtctcaaaaaacaaaacgaaacaaaaaaagaaagttattcttagtaaggaacttcttgtttaatagcatttttgtttattttaaaaagtgatcagaagtagtaaactatctttgaggaaatactgtaaccccagaatatttcctcttgacttctttttgtaacaaggataatttagggatttataaagttgtaaggatttcactgttttcggactgcctataataatagcacattaaccttcacataataagaaatctggacaagttcagttacacagtatgatgaatacttgaattaggaacattgtggaaaatttgctttagagaatcaaggcagtagtttggtatttggtgcttattaaaaatgtggtttgttttgaactggaagcaagttgaccaaggacttatgactaatgtgatgctaagttccacttggccccttttaaaaacgtgtatgtgccttttgaagatacacaaaacactgaggattttagttttgaaatcaaagactattaaaggagctgtacagaggtaaaaaaataaatgtggaacattattaacttattttgtgtctaggaacaatggattttgtatctgatttaaaatgccaacactgttttgtctctgttcattttttctgtgaggatacttaaggttattattcctgtctgtttcctgtactcccctagtcatgagcacttgaagtacaaggtgtctccccctaggtgcaattaggttgtttctttgtttttagtttcaattctatgtgcatagcaggaatgctccacaggaatggcttctgacaataatctgtcctgttgattttgttttccttgcccatgacttgaacaactgtgttttaaagtactgtagtctagtaggtaactttgtggcaaaaattttcaatataatacattctgaaacaatagttgctgccttgcaaaggtaatctctcattttaaaattggacagtattaatgaaggggaaatatacaatttatttctattgagtggtagaactatatgtctggtcccttgctgctcttgtttaggccactatcatagatatatttcaaatattgtactactcagtgttaagtattgaatgactgtttccctttccttcaaggcctagagtatattctgaaaatttaggaatgaggaagaaatcttaatacttccttccttaacatacaacatgagtcccgagaataattgatagtagcaagagaaaactatgtcagtaacatgttgctttgtataaaaatcttatttataaatgtgaagctttttgatgccatcaaaacttattaaaaaataggatttacttttttctaattctgacctaagaaaaataatgagaacaagctgttgcaagctcttttgtagtctattgaatattttatagatattcaaaatttcctacaaactataattttttccatgatttagcagtgagtgattttctagctttggctcttattaggtattgtaaatagtagggttatatcgatatcagcttttgtgatggcattgtggtcatcagcttcatgacattttacccatttgcagtgatcctgtgtaaaactgccaaggaaagtaattacctgtaggagtttgctgagcttgaagagtgaaaactgttgtgaatgagcctgatcataaaacggaccaggccattcattattcctcaagtgttaatatactgacttatgcagtattcaaaccatctagtgcaatgtttttgtttttgttttttttttttttggtaacacaggtgcagtgtattatagaaaaaataaaaactacaatcattagcagttttaatactgctgtgtcagttttgtaaaaaatgtacattatgtcttttgacatgttgaattttaaactagggaaatgacattgtaaatcatagtagcctcttttaatttaatatgaaaaatgccactatattgaaagtacttaatgtattgtatatatttctctactttggttctagctattttatatgattgacatgttatttaaaagataactgccttgaacttttggagacttgtactgtaaataaagaaatcttaacaataaactcagaatctacttactccaaaa

SEQ ID NO: 30078 - DNA, 6307 bp, Homo Sapiens
gcgagcggctgttggaggaaggaggtgggggccgggagcgcaaatggcgttgagatggtycarggccctgttcaaactccagcactgaccattcaccggcggaagcggcggcgcaggaggcggcggcggcccagcgggggcacacagcaggctctgttaccagctccagcagtggcggccagcgagagctaggcccgsgcccggccggcggcgctcgaggcggggagggaagttgcggggccgccgctcctgcccccccaaccgggcttcctatttaccgaaagcagagtccctcgcctctctcggctctcacctgccggccctgctctcccgcgcgagggttccgcgcccgcccgcgggccgtarggagcgggagaaggcggargcggccccgtggccaaagcacccgccaggcttccgaggagaatatgaaactggtgtcaaaatgacatccagatttgggaaaacatacagtaggaaaggtggaaatggcagttcaaaattcgatgaagtcttttccaacaaacggactacccttagcacaaaatggggagagaccacatttatggctaaattagggcagaagaggcccaatttcaaaccagatatccaagaaattccgaagaaacctaaagtggaagaagaaagtactggagatccttttggatttgatagtgatgatgagtctctaccagtttcttcaaagaatttagcccaggttaagtgttcctcttattcagaatctagtgaagctgctcagttggaagaggtcacttcagtacttgaagctaatagcaaaattagtcatgtggtcgttgaagacactgtcgtttctgataaatgcttccctttggaggacactttacttgggaaagaaaagagcacaaaccgaattgtagaagatgatgcaagcataagtagctgtaataaattaataacttcagataaagtggagaattttcatgaagaacatgaaaagaatagtcaccatattcacaaaaatgctgatgacagtactaagaaacccaatgcagaaactacagtggcttctgaaatcaaggaaacaaatgatacttggaactcccagtttgggaaaaggccagaatcaccatcagaaatatctccaatcaagggatctgttagaactggtttgtttgaatgggataatgattttgaagatatcagatcagaagactgtattttaagtttggatagtgatccccttttggagatgaaggatgacgattttaaaaatcgattggaaaatctgaatgaagccattgaggaagatattgtacaaagtgttcttaggccaaccaactgtaggacgtactgtagggccaataaaacgaaatcctcccaaggagcatcaaattttgataagctgatggacggcaccagtcaggccttagccaaagcaaacagtgaatcgagtaaagatggcctgaatcaggcaaagaaagggggtgtaagttgtgggaccagttttagagggacagttggacggactagagattacactgttttacatccatcttgcttgtcagtttgtaatgttaccatacaggatactatggaacgcagcatggatgagttcactgcatccactcctgcagatttgggagaagctggtcgtctcagaaaaaaggcagatattgcaacttctaagactactactagatttcgacctagtaatactaaatccaaaaaggatgttaaacttgaattttttggttttgaagatcatgagacaggaggtgatgaaggaggttctggaagttctaattacaaaattaagtattttggctttgatgatctcagtgaaagcgaagatgatgaagatgatgactgtcaagtagaaagaaagacaagcaaaaaaagaactaaaacagctccatcaccctccttgcagcctcccccagaaagcaatgataattcccaggacagtcagtctggtactaacaatgcagaaaacttggattttacagaggacttgcctggtgtgcctgaaagtgtgaagaagcccataaataaacaaggagataaatcaaaggaaaataccagaaagatttttagtggccccaaacggtcacccacaaaagctgtatataatgccagacattggaatcatccagattcagaagaactgcctgggccaccagtagtaaaacctcagagtgtcacagtgaggctgtcttcaaaggaaccaaatcaaaaagatgatggagtttttaaggctcctgcaccaccatccaaagtgataaaaactgtgacaatacctactcagccctaccaagatatagttactgcactgaaatgcagacgagaagacaaagaattatatactgttgttcagcacgtgaagcacttcaacgatgttgtagaatttggtgaaaatcaagagttcactgatgacattgagtacttgttaagtggcttaaagagcactcagcctctaaacacacgttgccttagtgttattagcttggctactaaatgtgccatgcccagttttcgaatgcacctgagagcacatgggatggtagcaatggtctttaaaaccttggatgattcccagcaccatcagaatctgtccctctgtacagctgccctcatgtatatactgagtagagatcgtttgaacatggatcttgatagagctagcttagatctaatgattcgacttttggaactggaacaagatgcttcatcagccaagctactgaatgaaaaagacatgaacaaaattaaagaaaaaatccgaaggctctgtgaaactgtacacaacaagcatcttgatctagaaaatataacgactgggcatttagctatggagacattattatcccttacttctaaacgagcaggagactggtttaaagaagaactccggcttttgggtggtctggatcatattgtagataaagtaaaagaatgtgtggatcatttaagtagagatgaggatgaagagaaactggtagcctcactatggggagcagagagatgtttacgagttttagaaagtgtaactgtgcataatcccgaaaatcaaagctacttgatagcatataaagattcccaacttattgtttcatcagctaaagcattacagcattgtgaagaactgattcagcagtacaaccgtgctgaggacagcatatgcttagctgacagtaagcctctgcctcaccagaatgtaactaaccatgtaggcaaagcagtggaggactgcatgagggccatcatcggggtgttgcttaatttaactaatgataatgagtggggcagcaccaaaacaggagagcaggacggtctcataggcacagcgctgaactgtgtgcttcaggttccaaagtacctacctcaggagcagagatttgatattcgagtgctgggcttaggtctgctgataaatctagtggagtatagtgctcggaatcggcactgtcttgtcaacatggaaacatcgtgctcttttgattcttccatctgtagtggagaaggggatgatagtttaaggataggtggacaagttcatgctgtccaggctttagtgcagctattccttgagcgagagcgggcagcccagctagcagaaagtaaaacagatgagttgatcaaagatgctcccaccactcagcatgataagagtggagagtggcaagaaacaagtggagaaatacagtgggtgtcaactgaaaagactgatggtacagaagagaaacataagaaggaggaggaggatgaagaacttgacctcaataaagcccttcagcatgccggcaaacacatggaggattgcattgtggcctcctacacggcactacttcttgggtgtctctgccaggaaagtccaatcaatgtaaccactgtgcgggaatatctgccagaaggagacttttcaataatgacagagatgctcaaaaaatttttgagttttatgaatctcacttgtgctgttggaacaactggccagaaatctatctctagagtgattgaatatttggaacattgctagctgctttacctttgcttcaggtgctcggtaatgctggagctatccttagacaaagaaaagtcaagtcatgaaagaagtccttgaagatataccaagaacattcatcagtatcattcgtgtttggatttttaaggccacctgatttcttcgtcatgcattcggcatttgctaaatgacagttactacatcaatctgcaactatcaaaaatgaggggaaaaggttcaggctgttaacaattccatgcagtatttaaatacatttactttggcagagtttataccctccccttgttttcttgctttattctgggcaagtttgaaggggaaaatttgtgctgctgttagtgcaactgctgtgtatgttgagccactgttgtcatgccagccaggtgcaaaggcagcttagctactgaggtagcgaatgttctgaggacattctagacaacagcttagttcctttttcaggctcatttgcttttgcttttttgttgaatgattccaatcgtaaataaagcttttaataattttgtgaattttttggttgttgttccctgaactactgtctatatttaaaattagatggaatccaaagatacacgggattaatagtatatttttttattcttgattaggtttgggttattgaactattttttacttttgagaccacaaccatattcaatatcataccataatgtgtcatagctataggcacaagaaaaacaacagtttgagagaatattatataagatgatgtgccctgttaaaaggaggaggcaaaatagtcaaacccagggtagtttacacttaatgctagggaggctcttaaaacattattagattttgaggaaagactctctagatatattttctaatgttcagtacaataaatataaggaagctaaaacaccaatgtggaattcctgtttccagataacatgtatattcttctatagagtgacaggatcaattgcataagcgcaaagccttaaattgctggtttagagaagacccttttttcattcagattctttgttcgtagagcagttatttgaaaaacagttatggaacacaaaacattttatagatttaatatcataacattgcaaatttttcttgtattattgttcacaccactggttatacttttttttttccttttttattgattgggcctgaatacaggctttctagagatctttttcattaatacttttaaatacctttcaggtagttacatcatgtttcttcattggatttgtaaaacttgaagccataaaaatattagtttggtgtgtattggggaaaatagctaaaagtctaatttttacccatttagactttgttatttccttgtataaagtgacaaatcggggctcttgtatcagtgccagctgtaatgtttttaaatgcagtggctgccttctattgtcttcctatttttgataatgcagattgttgggaaatctgtaaggaagtaactgattccaggcaaattgttttcttccttctacccaccccaacccctacccatcaccttttaagaacatagtacgccagtgtaacgtgggaaccattgagattgtatttgccctgagtattaaagctagcttagcaaaatacttttaaaaacatattggtaaatgatacccataaaattaaattagttatattttattttaaaatgcaaaatacattgatatttattaatcattggatttagggaaagggacagatttttggtgaacctgacttgtggcagatggtaaggaatattataaaacatttggatgagaacaatcagggcgaactgcatttttctgttacactggtaatcatttgaaaattgatttacctcagtgtttaacagttttttgttttgttttgttttttaaataataactaattgtcgagcactgatagagatgcagattttggtggggggaggtggtgggggagataatcacttcaccaactgcagtgcatttgtgtgtttttaaccctcagagaactctgcattttagggtacttgaggctgacttaactaaaagttttaaagtaaccttttttccattgtaaatatttctgtaaatactaccaattggaaattagaacagtagagtacttttctgaatccaatcctatttttattttatacagtatttctcagctgtgatctttggagcaaaagccaacggcaggaaaaaatagtttgtaccagtttcatgaagtatgtctttgggtttttgtaaataattttaactcaaataaaattgctactttcaatac

SEQ ID NO: 30079 - DNA, 8583 bp, Homo Sapiens
ggcttccgctggtggcctagagcggggcccggtatggaggtgggctagaggccgacgccagccagagagcgaaatgttcttttggggccagagtctgggcatatatgaatgcaaatccgtgttttgttcacaactaagcccagctgagacgatcacttttctgtaggccatttgtccaggtacagaatgagcacatgttgttggtgtacgccaggtggtgcttccaccattgacttcctaaagcgctatgcttccaacactccgtccggtgaatttcaaacagccgacgaagacctctgctactgcttggagtgtgtggctgagtaccacaaagcaagagatgaattgccattcttgcatgaggttttatgggaattagaaaccttacgtctcataaatcactttgaaaaatccatgaaggcagaaattggagatgatgatgagttatatatagtagacaataatggagagatgccactgtttgacatcactgggcaagactttgaaaataagcttcgagttcctcttcttgaaatactgaaatatccttacttgcttctacatgaacgtgttaacgagttatgtgttgaagcactttgtcggatggaacaagccaattgctcctttcaggtgtttgataaacatccagggatctatttgtttttagtccatcccaatgaaatggttcggcgttgggctatcttgactgcaagaaacttggggaaagtggacagagatgattattatgacttacaagaagttttactttgcctttttaaagtcattgagttggggcttttagagagtccagacatttatacttcttctgtcctagagaagggtaaactgattcttctgccctcacacatgtatgatactaccaactacaaaagctattggttaggtatttgcatgttgctgaccattcttgaggaacaagccatggattccctgttgttgggctcagacaaacaaaatgattttatgcaatcgatacttcacactatggagagggaagcagatgatgatagtgtggatcctttctggccagcgttacactgttttatggtgattctggatcgccttggatctaaggtctggggtcaacttatggatcctattgtggcatttcaaaccattatcaacaacgcaagctacaatagagagatccgacatatacggaacagctctgtaaggaccaagttagaaccggagtcctatctggatgatatggtgacttgcagccagatcgtatacaattacaatcctgaaaagaccaaaaaggattctggatggagaacagccatttgcccagattattgtcctaacatgtatgaagaaatggaaacattagccagtgtacttcagtcagatattggtcaagacatgcgtgttcataacagcacatttctatggttcatcccttttgtccagtccctcatggatcttaaggatttgggtgtggcttacatagcacaggttgttaatcatctgtactctgaagtcaaagaagtcctcaaccaaacagatgctgtgtgtgacaaagtcactgaattttttcttctaattttggtatcagtgattgaactgcatagaaataaaaaatgtttgcatttgctgtgggtaagttcccagcaatgggtggaagccgtcgtcaaatgtgccaagcttcctaccactgcgtttacacggagttctgagaaatcatctggaaattgctccaaaggaacagcaatgatatcttcactgtcattgcattccatgccatctaactctgtacaacttgcttatgtgcagctgattagaagtctccttaaagaaggttatcagcttgggcagcagtctctttgcaagcgattctgggataagctcaacttattccttagaggaaatttatctctaggttggcagttgactagtcaggaaacccatgagctacaaagttgcttaaagcaaattattagaaacataaaattcaaagcacctccatgtaacacttttgtggatctgacttctgcatgtaaaatctctcctgcatcttataataaagaagaaagtgaacaaatggggaagacgtctagaaaagatatgcattgtttggaagcttccagcccaacattttctaaagaaccaatgaaagtgcaagacagtgtatcgatcaaagcagataacactatagaaggtgacaataatgagcaaaattatataaaggatgtgaaactagaggaccatctcttagctgggtcatgcttaaagcagagtagtaaaaacatttttactgaaagagctgaagatcaaattaaaataagtacaaggaagcagaagtctgtaaaagagatctcttcatatacaccaaaggactgtacttcaagaaatggtccagaaaggggatgtgacagaggaataatagtatcaacacgtttgttgactgattctagcactgatgctttggaaaaagtgtccacatcgaatgaagatttctctttaaaggatgatgctcttgctaaaacctcaaaacgaaaaactaaggtacagaaagatgaaatctgtgcaaagttatcacatgtaataaagaagcaacacaggaagagtactttggtcgataatactatcaatttagatgaaaatttgactgtatctaacattgagagtttctattcaaggaaagatacaggagttcagaaaggagatggtttcatacacaatctttctttagaccctagtggtgttctggatgataagaatggagaacaaaaatctcaaaacaatgtattgccaaaagagaaacaattaaagaatgaagaattagttattttctctttccatgaaaacaattgtaaaatacaggaatttcatgttgatggtaaagaattgatcccttttacagaaatgaccaatgcttcagagaagaaatcatctccctttaaagatcttatgactgtacctgaatcaagagatgaggagatgagtaatagtaccagtgtgatttattctaacttgacaagagaacaggcccctgacatcagtcctaaatctgacaccttaacggattctcagatagacagagaccttcacaaattatctttactagctcaagccagtgttattacgttcccatccgattcacctcagaactcatcgcagctgcaaaggaaagtaaaagaagataaaagatgtttcacagctaaccaaaataatgttggagatacctcccgtggacaggttattattatttcagattctgatgatgatgatgatgaaagaatcctgagtcttgagaaactcactaaacaggacaaaatatgccttgagagggaacatccagagcagcacgtttcaacagttaatagtaaggaggaaaagaatccagtaaaggaagaaaagacagagactctttttcagtttgaggaatctgattctcagtgttttgagtttgaaagttcatctgaagtgttttcagtttggcaagatcatccagacgataataattcagttcaagatggtgagaaaaaatgtttggctcctatagccaatactacaaatggtcagggttgtacagattatgtatctgaagttgttaaaaaaggagcagagggcattgaagaacacacaagaccacggagtatttctgttgaagaattttgtgaaattgaagtaaaaaagcctaagagaaaacgatctgaaaaaccaatggctgaagatcctgtgaggccttcatcttctgtcagaaatgagggccagtctgatactaataagagagagcttgtgggaaatgattttaaaagtattgatagaaggacttcaactcccaattcacgtattcagagagccactacggtttcacaaaagaagtcttcaaagctttgtacttgtacagaacccatcaggaaagttccagtttctaagacccctaagaaaactcattcagatgccaaaaaaagacagaatagaagttcaaattacctaagttgtagaacaactcctgctatagtgccgccaaagaaatttcgtcagtgtcctgagccaacttcaacagctgagaaacttggcctgaaaaagggtcctcgtaaggcatatgagttgtcccagcggtctttggattatgtagctcaattacgtgatcatggcaaaactgttggagtagttgatacccgaaaaaagactaaattaatttctcctcagaacctgtctgtcagaaataataagaaacttctgactagtcaagaacttcagatgcaaaggcagatcagacccaaatcacaaaaaaatagacgaagactttctgattgtgaaagtacagatgttaaaagagcagggtcacatacagcacagaattctgacgtatttgtaccagaatctgataggtcagattataattgtacaggaggaactgaggtacttgccaacagtaacagaaaacagttaataaaatgcatgccttctgaaccagaaaccataaaagcaaaacatgggtctccagcaactgatgatgcttgccctttgaaccagtgtgattctgtagtgttaaatggaacagtaccaacaaatgaagtaattgtctccacttcagaagaccctctgggtggaggtgatccaacagcacgtcatatagagatggcagctttgaaagaaggagagcctgactccagcagtgatgcagaggaagataacttatttttaacccaaaatgatcctgaagatatggatttatgttcacaaatggagaatgacaattataaactcattgaactaattcatggaaaagatacagttgaggttgaagaagattctgtaagtcggcctcagttggaatctttgagtggcacaaagtgtaagtacaaagattgtcttgaaaccacaaaaaaccagggtgaatactgcccaaaacactctgaagtgaaagcagcagatgaagatgtatttcgtaaacctggcttgcctcctcctgcatctaaacctttgagacctaccactaagatttttagctcaaagagtacttcacgaattgctggtctttctaaatctttggaaacttcttcagcactttcaccgtctctaaaaaataagtcaaaggggatacagtcgattttgaaagtaccacagccagttcccctcatagctcagaagccagttggtgaaatgaagaattcgtgcaatgttcttcatcctcagtctccgaataattccaacaggcaaggttgcaaagttccatttggtgaaagcaaatattttccatcttcctctccagtaaacattcttttgtcatcacagtctgtctctgacaccttcgttaaagaggtcttaaaatggaaatatgaaatgtttttgaactttggtcagtgtgggccccctgcaagtctttgtcagtccatctcaagacctgtgcctgtcagatttcacaattatggagattattttaatgtttttttccctttgatggtattgaatacttttgaaacagtggcacaagaatggctcaactctccaaatagagagaatttctatcagttgcaagtacgaaaatttcctgccgattatataaaatactgggagtttgcagtttatctggaagaatgtgaactggctaaacagctttatccaaaggaaaacgatttggtgtttttagctcctgagagaataaatgaagagaagaaagatacaaagagaaatgacatacaagatctccacgaatatcattctggttatgttcataaatttcgccgcacgtcagtcatgcgtaatgggaaaactgagtgttacctttccatccagactcaagagaactttccggccaatttaaacgaacttgtgaattgtattgtaatcagttctctggtaactacacaaaggaagttgaaagccatgtctctgttgggtagtcggaaccaactggctagagctgttctgaatccaaaccctatggacttctgtacaaaagatttactgactacaacatctgagagaattattgcgtacttaagagatttcaatgaagatcaaaagaaagcaatagaaactgcatatgctatggtgaaacactcaccatcagttgccaaaatctgcttgattcatggaccacctggaacaggaaaatcaaaaactattgttggcctcctctatcgtctactgacagagaaccagaggaaggggcattcagacgaaaactccaatgccaaaatcaaacaaaaccgtgtcctcgtgtgtgcaccttccaatgcagctgttgatgaactcatgaaaaaaattatccttgaattcaaagaaaaatgtaaagacaagaagaatcctttaggaaactgtggagatataaatttagtacgactgggtccagaaaagtctattaatagtgaggttctaaagttcagtttggacagccaagtaaaccacagaatgaaaaaagagttaccttctcatgttcaggcgatgcataaaagaaaggaatttctagattatcagctggatgagctttcccggcagcgagctctatgccgaggtggacgggaaatacagaggcaagaattagatgaaaacatttccaaagtttctaaggaaaggcaggaacttgcttctaaaattaaagaggttcaaggacgcccacagaaaacacagagtatcatcatcttagagtcccatatcatctgctgcacgttgagcacaagtggtggtttactacttgagtctgctttccgtgggcaagggggtgtccccttcagctgtgtcattgttgatgaggctggacagtcttgtgaaattgagactcttactccactcatccatcgctgcaataagctcatcctagtaggagatcctaagcagctccctccgacagtcatctctatgaaagcacaggagtatggctacgaccagtcaatgatggctcgcttctgcagactgctggaagagaatgtagaacacaacatgatcagcaggctgcccattctacagctcactgttcagtacaggatgcatccagacatatgcctcttcccttctaattatgtttataacagaaacttaaaaacaaatagacagacagaagccattcgatgttcatcagattggccatttcagccataccttgtgtttgatgttggagatggttcagaaagacgggataatgactcatatataaatgttcaagaaataaaactggtgatggaaataattaagcttattaaagacaaaagaaaggatgttagttttcgaaacattggcataataactcattacaaggcccagaagacgatgattcagaaggatttggacaaagagttcgatagaaaaggaccagcagaagtagacactgtggatgcattccagggtcggcagaaggattgtgttattgttacgtgtgtcagagcaaatagcatccaaggttcaattggattcctggcaagtttgcagagattgaatgtcaccatcacacgagccaagtacagcctcttcatcctcggacatttgaggaccctgatggaaaaccagcattggaatcagctgattcaggatgctcagaagcgtggtgccattattaagacctgtgacaaaaactatagacatgatgcagtgaagattctgaaactcaagcctgtgctgcagagaagtctcactcaccctcctaccatagccccagaggggtccagaccccagggtggtttgcccagcagcaagctagacagtggatttgccaagacatctgttgctgcttctctataccacacaccctctgactccaaggaaattactcttactgttacttcaaaggaccctgaaagacctcctgttcatgaccaacttcaggacccacgactgctgaagaggatgggcattgaggtcaaaggaggaatattcctttgggatccacaaccctcgagcccccagcatcctggagcaacacctcctacgggcgagccgggcttccctgtcgttcaccaggacctgagccatatacagcagcccgctgctgtagtggctgctctgagcagccacaaacctcccgtgcggggcgaacctccagctgccagtcccgaggcttccacgtgtcagagcaaatgtgatgacccggaagaggagctctgtcacaggagagaggccagggctttcagtgaaggggagcaggagaagtgtggttccgagacccatcacaccaggaggaactctaggtgggacaagaggacactggagcaggaggacagcagttccaagaaaagaaagcttttataggaaagcccagtgacatgggccagcagccacagcatattgtaaactgaagatgaccagctcgtgggaccatctagataagcttgttttttgtaaggagtttgtgtgctgttggaaaacatggaaaatgcatccttaacacctgagcctctggtcatcttcagtattttctgtcatttgcaaaagctttcagagggcattgtgtatccgtaataatgtccttgaagtcagagactggaaatgttgatctcttagtcttctatagacaaggaggtcagactggagtgaatgttgtaaaagttgaaatgtatatttgtatagcaaataacaaaatccttttaaaattcaaaaaaaaaaaaaaaaaaa

SEQ ID NO: 30080 - DNA, 4030 bp, Homo Sapiens
gcgcgacggtgcggctggcggacccgggctggcttgtggggaaacgaaactgagggaggaggcggcggctctggcagcggcggcgacagtgtcggcctgaccccccctccgctccccggcagctcgctctctcccctcagcttaacgatgaagaggagaactgacccagaatgcactgcccccatcaagaaacagaaaaaaagagttgcagagcttgccctgagcctcagctccacgtccgatgatgaacctccctcctctgtcagtcatggagcaaaagcatctactacaagccttagtgggtctgatagtgagaccgaggggaaacaacacagctctgactcttttgacgatgcattcaaagcagactctcttgtggaaggaacttcttctcgctattccatgtataatagcgtctcccagaagcttatggccaagatgggcttcagggaaggtgaaggattgggtaaatacagccagggtcggaaggacatcgttgaggcttccagtcagaaaggtcgaagaggcttgggtctgacactccggggctttgaccaggagctgaacgtggactggcgagatgagccagagcccagtgcttgtgagcaggtgtcatggtttccagaatgtaccactgaaattcctgacactcaggaaatgagcgattggatggtggtgggaaagagaaagatgattattgaagatgaaacagagttttgtggggaagagctgcttcacagtgtgttgcagtgtaagagcgtgtttgatgtcttggatggggaagagatgcggcgagctcggactcgggccaatccctatgagatgatccgaggagtcttctttctaaacagggcagcaatgaagatggctaacatggattttgtatttgatcgcatgttcacaaatccgcgggactcttatgggaagccactggtgaaggaccgggaagctgagcttctgtactttgctgatgtctgcgcaggcccaggtggcttctcagagtatgtgctgtggaggaagaagtggcatgcaaagggctttggaatgactttgaagggccctaatgacttcaagctggaggacttctactctgcttccagtgaactcttcgaaccctactatggtgagggtgggattgatggagatggagatatcacccgcccagagaacatctctgcttttcggaattttgtcctggataacacagatcgcaagggtgtccattttctgatggctgatgggggtttctcggtggaggggcaggagaacctgcaggagatcctcagcaagcagctgcttctgtgtcagttcctcatggcgctgtccattgtccggacaggaggccacttcatctgtaaaacctttgacctgttcacaccgtttagtgtggggcttgtctacctgctgtactgctgctttgaacgagtttgtctcttcaagcctattaccagccgtcctgccaactcagagaggtatgtggtgtgcaagggcctgaaggtgggcatagatgatgttcgggattacctcttcgcagtgaatattaaactcaatcagctgcggaacacggattccgacgtcaacttggtggtccccctggaggtgatcaagggagaccatgaatttactgactacatgatacggtccaatgagagccactgtagtctgcagatcaaagctctggcgaaaatccatgcctttgttcaagacacgacactgagtgagcctcgacaggcagagatacggaaggagtgcctccgactctgggggatcccagaccaggctcgtgtggctccttcttcctccgaccctaaatcgaagttctttgagctaatccagggcactgagattgacatcttcagctacaagcccacactgctcacctctaaaaccctggagaagatccgccctgtgtttgactaccgctgcatggtatctggcagtgagcagaagttcctcatcggcctggggaaatcccagatctacacatgggatggccgccagtcagaccgctggatcaagctagacctgaagacagagctgccccgggacactctgctatctgtggaaattgtgcatgagctgaaaggggaggggaaggcccagaggaagatcagtgccatccacatcctcgatgtccttgtgctgaatggcaccgacgttcgggagcagcactttaaccagcgaattcagcttgccgagaaatttgtgaaagccgtttccaagcctagtcggcccgacatgaatcccatcagggtgaaggaggtgtacagactggaagagatggagaagatttttgtcaggttggagatgaagatcatcaagggctccagtggcaccccaaagctcagctacacagggcgtgatgaccggcactttgtacccatgggcctctacatcgtcaggacagtgaatgagccctggactatgggattcagcaaaagcttcaagaagaagttcttctacaacaagaaaaccaaggactctacttttgacctccctgcagactccattgccccatttcacatttgctactatggccggctcttctgggagtggggggatggcattcgtgtgcatgactcccagaagccccaggaccaggacaagctgtccaaggaggacgtcctctccttcatccagatgcacagggcctaagagcctcagaatgtgccacccctgcagaatgccctgtcattcctgagatggggccacctggggcccacagtgctggcttcttccccctcttgaaaagggactggggagcattgcacctggcatgaggagtgggtggcctcctctccatcccctgaagagctcaggcagggccctgcagagaacactcatgttccttctgggacacctgcctgggaactttcccctgccaggactcagcctgaaggagctgctcctgaggcaggtatgaggtcagtgcctagggcacgtgggacttatggaggacatatcagagtggcagagctgtgggctctgctgttctctcctgcatcctgtagactcacttttctgagttccatgcactgccctgagggtagccatgcccttgctttgcccaactttttattgggccatccctgagtgggtggagacctgctgtcatgagctggccaggagaacctgctataaaaaaatcaaggttttgtttctttgaacttactctgttttgatgccaaattggagaccattttcttgtctccttcccccactcatcctggccttccctggagttcttcctagcccagagctctgacagtccagcagggtgggaaggagggagtttgggcaaactctcatccctgataccacattgagatcctgggagccctcttttcgtactgagtatggagttgtagagccatcctaggtgccatccccttttggtccaaacattgggcagcgctagatggcaggaagcagccttgaagacccgtctttcccccacagcagcaggggccccagcagtaacaaagggtacctccaggggtttgggtagcgctgccctctggcagtcatgcaccgctgtctgccatagccgctctagggtcttggcagaattctgagcttgaagtgcagctcccttactaccctttcccttcctttttcttccctaataggaggtacaatctgcttttgtttgtcgttaagtggtcactcccatttcctttatcttggccgacaacacagagaggagggggagctgggcagtagcttggggtgggggtgggcacctgtggttgtttttaatgggaaatacctctcagagatgttcatgcaggctccctagggccccatcccagtgccaggctggtttccatggagatagggcactgaggctcccgtgaggttggaatcgacttcaccatgggggtccttcagccagcatccagctccccacccccaggctggcagtagcactgctgagatgctgtatttccacccaattctgggtatatcagtgtgtcttgcagaatcttggatcattaaagataaacatatttttaaaaaaaaaaaaaaa

SEQ ID NO: 30081 - DNA, 3719 bp, Homo Sapiens
gaggttgaggggcgtccgaggcgcggaggggctggctgggcaggaggggttggcggggcagcagggccgcggccatggggagcttgaaggaggagctgctcaaagccatctggcacgccttcaccgcactcgaccaggaccacagcggcaaggtctccaagtcccagctcaaggtcctttcccataacctgtgcacggtgctgaaggttcctcatgacccagttgcccttgaagagcacttcagggatgatgatgagggtccagtgtccaaccagggctacatgccttatttaaacaggttcattttggaaaaggtccaagacaactttgacaagattgaattcaataggatgtgttggaccctctgtgtcaaaaaaaacctcacaaagaatcccctgctcattacagaagaagatgcatttaaaatatgggttattttcaactttttatctgaggacaagtatccattaattattgtgtcagaagagattgaatacctgcttaagaagcttacagaagctatgggaggaggttggcagcaagaacaatttgaacattataaaatcaactttgatgacagtaaaaatggcctttctgcatgggaacttattgagcttattggaaatggacagtttagcaaaggcatggaccggcagactgtgtctatggcaattaatgaagtctttaatgaacttatattagatgtgttaaagcagggttacatgatgaaaaagggccacagacggaaaaactggactgaacgatggtttgtactaaaacccaacataatttcttactatgtgagtgaggatctgaaggataagaaaggagacattctcttggatgaaaattgctgtgtagagtccttgcctgacaaagatggaaagaaatgcctttttctcgtaaaatgttttgataagacttttgaaatcagtgcttcagataagaagaagaaacaggagtggattcaagccattcattctactattcatctgttgaagctgggcagccctccaccacacaaagaagcccgccagcgtcggaaagaactccggaagaagcagctggctgaacaagaggaactggagcgacaaatgaaggaactccaggccgccaacgaaagcaagcagcaggagctggaggccgtgcggaagaaactggaggaagcagcatctcgtgcagcagaagaggaaaagaaacgccttcagactcaagtggaacttcaggccaggttcagcacagagctggaaagagagaagcttatcagacagcagatggaagaacaggttgctcaaaagtcctctgaactggaacagtatttacagcgagtacgggagctggaagacatgtacctaaagctgcaggaggctcttgaagatgagagacaggcccggcaagatgaagagacagtgcggaagcttcaggccaggttgttggaggaagagtcttccaagagggctgaactagaaaagtggcacttggagcagcagcaggccattcagacaaccgaggcggagaagcaggagttggagaatcagcgtgtcctgaaggaacaggccctgcaggaggccatggagcagctggaggagcttgagttagaacggaagcaagcacttgagcagtacgaggaagttaaaaagaagctggagatggcaactaataagaccaagagctggaaggacaaagtggcccatcatgaaggattaattcgactgatagaaccaggttcaaagaaccctcacctgatcactaactggggacctgcagctttcactgaggcagaacttgaagagagagagaagaactggaaagagaaaaagaccacggagtgactgagcttgctggcagtcacgtcagttatgtagatactgcatggcaggagagctttacgctaaagacaaaagaaacagctttgggggccgggcgtgggtgtcwcgcctgtaatcccagcactttgggaggccgaggcgggtggatcacctgaggtcaggagttcaagaccagcctggccaacctggtgaaaccctgtctctactaaaaatacaaaaaaaattagctgagcgtggtggcgggcgcctgtaatcccagctacttgggaggctgaggcaggagaatcacttgaacgtgggaggcggaggttgcagcgagctgagatcatgccgttgtactccagcttgggcaacagagtgagactccatctcaaaacaaaacaaaacaaaacaaaacaaaaaaacccggctttgctgcttttaactcttcttccttctgtgcctctctaagtgggtcagtatcctaaggaagccttcttatttatcttcctgcaaacaagggttacctgaaaagaaaaaaaaagtcaacattgtcaagctgtttgtttactctttctttgaaaacatcaccttctgaaatttgtcttttagctctctcagattcttccccaaatgaggcagggtgcagacagcacagtcagctctgcagagtttggaggggctcactgccactgggtactcagaacctctgtggactggatgtcagctctttcctttggcagcgtgtttccttttccgagtatgtgctgttaaactagattggccggttcgctttccatttcctgacacttgacatggaatgcctttgaccattggtgctctgacagagaagtcatggagtcattgccatttcctggttgcccttttggaatgtgatcctgttagtagaggttttctagcttctactaagatatttctttccctaaccatcatacacttggcatgtttcattcccatctcctttcccctcaccttaaaggagactacccctttgccccatattgtcaacctaattttctctcgtactctctctagtgaatgatgtgctaccaagtatatgccaggctgtgagaggattatactgagtagtagaaagaagctaatttgaaataaaaattatttgtataattaagaaagcagattagatgcacatggtcaacaggaagttatccatatgtctgctagttagattcaaaacatcataaagatgatagcatgtcaatatattagcctagccattatgttagcctttgttaggtgggcagcttttctgctttttcccttcctctgtggtgacaacggaggaaatatccaacagaaatacatctaacagggaaattgggatcatagtttatatgcatctgatttgaaaggagtattgaggaaggttttcatatatgatctatctttggattaaaaagaacatttatgaaatcaagccttctaacactagttataattgagaagcaacagtaactccgtggacagcaatcaagcttaaaattgtaaataaatatggggataattcagttgttgcaaaaaaagggcagaattcagtagaataaagtccttttctcttacaggtattaaatgaggacagagaacctcaggtgttcttatgctagtgcttgctgagtgcatactaagaaagcaattccaaatagatgtatacatctagagagagtggtattagagattcagtgtatgtatttatttacatgagaggaaactggaatataatcccataaattatcaccttttatgactggaaaatatttgccaatgaagaaatggtctgtaggtatttgtcttaagatttttggctgtttaataaaaatgtaactttaacggtttaaaaaaaaaaaaaaaaaaaaaaaaaaaaaaaaaaaa

SEQ ID NO: 30082 - DNA, 14807 bp, Homo Sapiens; identical to SEQ ID NO: 22914

SEQ ID NO: 30083 - DNA, 8500 bp, Homo Sapiens
atggtggccctgtccttaaagatttgtgtgcgccactgcaacgtggtgaagaccatgcagtttgaaccatctacagctgtgtacgatgcgtgtcgagtcattcgggaacgggtgcctgaggcacaaactgggcaagcttctgactatggactctttctttcggatgaagacccgaggaaagggatttggctggaagcgggcagaacactggattactacatgttgcggaatggggatattttggaatataaaaagaaacagagacctcagaaaatccggatgctggatggatctgtgaagacagtgatggtggatgattccaagactgtgggggagctcctggtcactatttgtagcagaataggaataacaaattatgaagaatactccttaatccaagaaactattgaagaaaagaaagaggaaggaacgggcacactcaaaaaagacaggacactgttacgagatgagaggaaaatggagaagttgaaggccaagctgcacacagatgatgacctaaattggctggatcacagccgaacattcagagaacaaggagtagatgaaaacgaaacgttgctgcttagacggaagttcttttactctgatcagaatgtagattcgagagaccccgtgcagctgaacttgctttatgttcaggcacgggatgacatcctgaatggctctcaccctgtctccttcgagaaagcttgtgagtttggtggatttcaagcccagatacaatttggacctcatgtggaacataaacacaaacctggatttttagacctgaaggaattcctgcccaaagaatatatcaagcagagaggagctgaaaagaggatctttcaggcacataagaactgcggagagatgagtgagatagaagccaaggtcaagtacgtcaaactcgcacggtccctccgcacatatggcgtgtccttcttcctggtgaaggagaagatgaaaggcaagaacaagctggtgcctcgcctgctggggatcaccaaagactcggtgatgcgcgtggatgagaagaccaaggaagtgctgcaggagtggcccctcaccaccgtcaagcgctgggcagcctcacccaagagcttcacactggattttggggagtatcaggaaagctactattcagtacaaaccaccgagggagagcagatatcccagctgattgcaggctacattgacatcatcctgaaaaagaaacaaagtaaagatcgatttggactagaaggtgatgaggagtcaaccatgttagaagagtccgtttccccaaaaaagtccaccatcttgcagcagcagttcaaccggaccgggaaggcagagcacggctcagtggcgctgccggccgtgatgcgctcgggctccagcgggcctgagaccttcaacgttggcagcatgccctcgccacagcagcaggtcatggttgggcagatgcaccgaggccacatgccgccactgacttcagcccagcaggccctgatggggaccatcaacacaagcatgcacgccgtccagcaggcccaggatgatctcagtgagctcgactcgctgccacctctcggccaggatatggcatctagggtatgggttcagaacaaagtcgacgaatccaaacacgaaatccattctcaagttgatgctatcacggccggaacggcttcagttgttaacctcacagctggtgaccctgcagacactgactacacagctgtgggatgtgcgatcaccactatttcttccaacctgacggagatgtccaagggtgtgaagctattggccgccctcatggatgatgaggtgggcagcggggaggacttgctcagagctgccaggaccctcgctggggcggtgtcagacttgctgaaagctgtgcagcctacttctggagagcctcgacagacagttttgactgctgctggcagcatcggacaagccagtggggatcttctgagacagattggagagaatgagactgatgagcgattccaggatgttttaatgagtttggccaaagctgttgccaatgcagctgccatgttggtactaaaggcaaagaatgttgcccaagtggccgaagacactgtcctacagaacagggtaattgctgctgccacccagtgtgccctctccacctcccagcttgtggcatgtgccaaggttgtgagccccactattagctcccctgtgtgccaggagcagctgattgaagcagggaagctggtggaccgctcggtggagaactgtgtccgtgcctgccaggcggccactaccgatagtgagctcctgaagcaggtcagcgcagcggccagcgtggtcagccaggccctccatgatctcctgcagcatgtgcggcagtttgccagccgaggcgagcccatcggccgctacgaccaggctactgacaccatcatgtgtgtcaccgagagcatcttcagctccatgggtgacgctggtgaaatggtgcgccaggcgcgggttctggcccaagccacatcagacctcgtcaatgccatgaggtcagatgcagaagccgaaatcgacatggagaattcaaagaagctcctggcagcagcaaaactcttagctgactccactgctcgcatggtggaagctgcaaagggggctgcagccaacccagagaatgaggaccagcagcaaaggctgagagaagctgcagaaggcctccgggtagcaaccaacgcagctgcccagaatgctattaagaaaaaaattgtcaaccgactggaggttgcagccaagcaggccgcagcggcagctacacagaccatcgccgcctcccagaatgcagctgtttccaacaagaaccctgcggcccagcagcagctggtccagagttgcaaggcagtggctgatcacatccctcagctggtccagggagtgagggggagccaagctcaagctgaagacctgagtgcccagctggctctcatcatctccagccagaacttcctccagcctggaagcaagatggtgtcctctgccaaagccgcagtgcccaccgtgagtgaccaggccgcagccatgcagctgagccagtgtgccaagaacctggccaccagcttggcggagctgcgtaccgcctcgcagaaggcccatgaagcttgtggtccgatggaaatcgattcagctctgaatacggtgcagacgcttaagaatgaactgcaggatgccaagatggcagccgtggagagccagctgaagccacttccaggggaaacgctggaaaaatgtgctcaggacctgggaagcacatccaaggcggtgggctcctccatggcacagctgctgacctgtgctgctcaaggcaacgaacactacacaggggtggctgctagagagacggcccaagctctgaaaacactggcccaggccgcccgtggagtggctgcatcgacaaccgaccccgcggccgcccatgccatgttagattctgctcgagacgtgatggagggctccgccatgctcattcaagaggccaagcaggccctgattgcacctggagatgcagagcgtcaacaaagactggctcaggtggctaaagccgtctcacactccttgaataactgcgtaaattgcctccctgggcagaaggatgtggacgtggccttgaagagcatcggggagtccagcaagaagctgcttgtggattcgctacctccaagcacgaagcctttccaggaagcccagagtgaactgaaccaggcagcagctgatctgaaccagtctgctggggaagtggtccatgccacccggggccagagtggagagttggctgcagcctctggaaagttcagtgatgattttgatgaattcctcgatgctggcattgagatggctggccaagctcagacaaaagaagaccagatccaagtgatagggaacctcaagaatatctcgatggcatccagcaagctgctgttagctgccaagtctctctctgtagatccaggagctcccaatgcgaaaaatctcctggctgcagctgcaagagctgtgacagagagcatcaatcaactcatcactctgtgtacccaacaagctccgggccagaaagagtgcgataatgccctgcgggagctcgagactgtgaaggggatgttggacaatcctaatgaacctgttagtgacctctcttactttgactgcattgagagtgtgatggaaaactccaaggttctgggtgaatcgatggcagggatttcacagaatgccaagaccggagacctccctgcctttggggaatgtgtggggattgcatccaaggctctctgtgggctgacagaggctgcagcccaggctgcatacttggttggcatctctgatccaaacagccaggcaggccaccagggcctggtggaccccatccagtttgccagggctaaccaggccatccagatggcatgccagaacttggtggaccctggcagcagcccatcacaggtcctgtcagccgccacaattgttgccaagcacacgtcagccttgtgtaatgcctgccgcatcgcctcatccaagacggccaacccagtagccaagaggcacttcgtccagtcagccaaggaagtcgccaacagcactgccaacctggtgaagaccatcaaggccctggatggggatttctctgaagacaaccgcaataagtgtcgcatcgccaccgcacccttgattgaagctgtggagaacctgacagcgttcgcctcaaaccctgagtttgtcagcattcctgcccagatcagctccgagggttcccaggcacaggaaccaatcctggtctcagccaagaccatgctggagagttcatcgtacctcattcgcactgcacgctctctggccatcaaccccaaagacccacccacctggtctgtactggctggacattcccatacagtgtccgactccatcaagagtctcatcacttctatcagggacaaggcccctggacagagggagtgtgattactccatcgatggcatcaaccggtgcatccgggacatcgagcaggcctcgctggccgccgtcagccagagcctggccacgagggacgacatctctgtggaggccctgcaggagcagctgacttcggtggtccaggaaatcggacaccttatcgatcccatcgccacagcggctcggggagaagcagctcagctgggacataaggtgacacaactggcaagctattttgagcccttgatcttagccgcagttggtgtggcctccaagattcttgatcatcagcagcagatgacggtgctggaccagaccaagactctcgcagagtctgccttgcagatgttgtatgcagccaaagaaggtggcggaaaccccaaggcacaacacacccatgacgccatcacagaggccgcccagttgatgaaggaagccgtggatgacatcatggtgacgctgaacgaagctgccagtgaagtggggctggttgggggcatggtggacgccattgcagaagccatgagcaagctggatgaaggcactcctccagaaccaaagggaacatttgtcgactatcagacgactgtggttaaatactccaaagccattgcggtgacagctcaggaaatgatgactaagtcggttactaacccggaggagttgggaggactggcttcacaaatgaccagtgactatgggcacctggctttccagggccagatggcagcagccacggcggaaccagaggagatcggattccagattcgcactcgtgtgcaggacctgggccacggctgtatcttcctggtgcagaaggcaggggccctccaggtctgccccacagacagctacaccaagagggagctgatcgaatgcgcccgtgccgtcacggaaaaggtctccttggtgctctcggctctccaggccgggaacaaaggaacccaggcatgcattacagccgccaccgctgtgtctgggatcattgccgacctggacaccaccattatgtttgcaacagcggggacgctgaatgcagagaacagtgagaccttcgcagaccacagggagaacattctcaagacggccaaggccttggtagaagacacgaaactacttgtgtcaggagctgcgtccactcctgacaagctggcccaggcggcccagtcctcagcagccaccatcacccagctcgcagaagtggtcaagctgggggcagccagcctgggctccgacgaccccgagacccaggtggttttgatcaatgccatcaaagatgtggccaaggccctttctgatctcatcagtgctaccaagggagctgccagcaagccagtggacgacccttccatgtaccagctcaagggggctgccaaggtgatggtgaccaatgtcacctcgctcctcaagactgtaaaggcagtggaggatgaggccacccggggcaccagggcgcttgaggccacaattgaatgcataaagcaggagcttacggtgttccagtcaaaagacgtacctgaaaagacatcatcacctgaagaatccataaggatgacgaaaggcatcaccatggcaacagccaaagccgtggcagctgggaactcatgtagacaggaggacgtgattgctactgccaacctgagccggaaagccgtgtcagatatgttgacggcttgcaagcaagcatccttccaccccgatgtcagtgacgaggtgagaaccagagccttgcgtttcgggacggagtgcacccttggctacttggacctcctggagcacgtcttggtgattcttcagaaaccaaccccagaattcaagcagcagctggccgctttctccaagcgagtcgccggcgctgtgacagagctcatccaggcggcggaagccatgaaaggaacagagtgggtggatccagaagacccaactgtcattgcagaaacagagttactgggggctgcagcatccatcgaagctgctgctaagaagttagagcaactgaagccaagagcaaaaccaaaacaagcggatgagaccctggactttgaggaacagatcttggaagctgctaaatccattgctgctgccacaagcgccctggtcaaatcggcctcagcagcccagagggagctggtggcccaaggaaaggtgggctccatccctgccaatgctgcagacgacggacagtggtcacaggggctgatttctgctgcccggatggtggcggctgcgaccagcagtctctgtgaggcggccaatgcctccgttcagggacacgccagcgaggagaagctcatctcatctgccaagcaggtcgccgcttccacggctcagctgctggtggcctgcaaggtgaaggccgaccaggattcagaggccatgaggcggctacaggcggcaggaaatgctgtgaaaagagcctcagacaatcttgtccgtgcagcccagaaggcagcttttggcaaagctgatgacgacgatgttgtagtgaaaaccaagtttgtggggggcattgctcagatcatcgccgcccaggaagaaatgctaaagaaagagcgagaactggaagaagcaaggaaaaaactggcccaaatccgccagcagcagtataagtttttacccaccgagctgagggaagatgagggctaaaggtgcgagcccagatggcgagccccaggggatggccctggctgaactggacagacagtgttcctgagaggctgggcacttagctggaaaccgcccacctccctcccgggtgagcctggagccctgcgtgcttgttctcacatctctgtcccgtcggcactggctgcatgatcgtgatgtcacacggtacaatgtcctacccacaactcctctgccgcctcccctcatgcctcaccgtgtctcaggagagaggggtgcacgtttcatggactgttaccaacaaagaaaagtcagtattatgttgttctcagacactttggcttttgttggtccttctcttaggcctgctcctggacctctttatgatattgtgatagggaaaaaaatcattgacgtcatagaatattcttcttcctctcaggagaagacggaagctggagttggacatggttcataaaagccagaaacacaaacccgtgtggactccgggagggtgactcaggtcctccttccatgtcttgagcactggctcacccagggggtgaaaaattcccgcccctgtttgcacgctttcttgcctccgtgtgtaagctccttgtacaacccagacccatcttgtattttgtggcccagaaaactgaacgattattttgttcctccgtagtccaaagggcagagttgcggaaggccgtcggggcttggtgagcaggggctgtaatacagtctgtgggctccttaccctgcagaggctgtttcagctcacacagagtcatccacacaaacccacggctcccagttgacagtcagtggaatgctcgtctccttagcgtccagggtggggattctgctggaataaagagcttcctcagtg

SEQ ID NO: 30084 - DNA, 6919 bp, Homo Sapiens
gtgctgtggcggcggcggcggcggtagtggcggcggcggcggtgcctgggcggcagcagcagcagtagcggcagccctgaggacggtgagacggccgcggcggcggcgacagcgcggaagtcgcgcgggacccagagcttcccccctgtcgctagtgctgaggctttcgcctttcctacccagcttcttgctcacggcccgggctgggctgggcagggcaacgcgcccccggggaggggcggagctgtagatatggtgtaagatacttcttcaagattggacagctggggaccttcttctgattaaccttaaaccaacttgtagccatagagacacctcacaaggttcccatttttgttgttgttgttgttgattttctgctcacacctttcctgaccttgcaaccatgtatggaagtgcccgctctgttgggaaggtggagccgagcagccagagccctgggcgttcacccaggcttccacgttcccctcgcttgggtcaccgtcgaaccaacagtacgggagggagttcgggaagcagtgttggaggtggcagtgggaaaaccctttcaatggaaaatatacaatctttaaatgctgcctatgccacctctggccctatgtatctaagtgaccatgaaaatgtgggttcagaaacacctaaaagcaccatgacacttggccgttctgggggacgtctgccttacggtgttcggatgactgctatgggtagtagccccaatatagctagcagtggggttgctagtgacaccatagcatttggagagcatcacctccctcctgtgagtatggcatccactgtacctcactcccttcgtcaggcgagagataacacaatcatggatctgcagacacagctgaaggaagtattaagagaaaatgatctcttgcggaaggatgtggaagtaaaggagagcaaattgagttcttcaatgaatagcatcaagaccttctggagcccagagctgaagaaggaacgagccctgagaaaagatgaagcttccaaaatcaccatttggaaggaacagtacagagttgtacaggaggaaaaccagcacatgcagatgacaatccaggctctccaggatgaattgcggatccagagggacctgaatcagctgtttcagcaggatagtagcagcaggactggcgaaccttgtgtagcagagctgacagaggagaactttcagaggcttcatgctgagcatgagcggcaggccaaagagctgtttcttcttcgaaagacattggaggaaatggagctgcgtattgagactcaaaagcagaccctaaatgctcgggatgaatccattaagaagcttctggaaatgttgcagagcaaaggactttctgccaaggctaccgaggaagaccatgagagaacaagacgactggcagaggcagagatgcacgttcatcacctagaaagccttttggagcagaaggaaaaagagaacagtatgttgagagaggagatgcatcgaaggtttgagaatgctcctgattctgccaaaacaaaagctctgcaaactgttattgagatgaaggattcaaaaatttcctctatggagcgtgggcttcgagacctggaagaggaaattcagatgctgaaatcgaatggtgctttgagtactgaggaaagggaagaagaaatgaagcaaatggaagtgtatcggagccattctaaatttatgaaaaataagattggccaggtgaaacaggagctgtccagaaaggacacagaactactcgccctgcagacaaagctagaaacactcacaaaccagttctcagatagtaaacagcacattgaagtgttgaaggagtccttgactgctaaggagcagagggctgccatcctgcagactgaggtggatgctctccgattgcgtttggaagagaaggaaaccatgttgaataaaaagacaaaacaaattcaggatatggctgaagagaaggggacacaagctggagagatacatgacctcaaggacatgttggatgtgaaggagcggaaggttaatgttcttcagaagaagattgaaaatcttcaagagcagcttagagacaaggaaaagcagatgagcagcttgaaagaacgggtcaaatccttgcaggctgacaccaccaacactgacactgccttgacaactttggaggaggcccttgcagagaaagagcggacaattgaacgcttaaaggagcagagggacagagatgagcgagagaagcaagaggaaattgataactacaaaaaagatcttaaagacttgaaggaaaaagtcagcctgttgcaaggcgacctttcagagaaagaggcttcacttttggatctgaaagagcatgcttcttctctggcatcctcaggactgaaaaaggactcacggcttaagacactagagattgctttggagcagaagaaggaggagtgtctgaaaatggaatcacaattgaaaaaggcacatgaggcagcattggaagccagagccagtccagagatgagtgaccgaatacagcacttggagagagagatcaccaggtacaaagatgaatctagcaaggcccaggcagaagttgatcgactcttagaaatcttgaaggaggtggaaaatgagaagaatgacaaagataagaagatagctgagttggaaagtctcacctcaaggcaagtgaaagaccagaataagaaggtagcaaatctgaagcacaaggaacaggtggaaaaaaagaagagtgcacaaatgttagaggaggcgcgacgacgggaggacaatctcaacgacagctctcagcagctacaggtggaggagttactgatggccatggagaaggtaaagcaggaactagaatccatgaaagcaaagctgtcctccacccagcagtctctggcagaaaaggaaactcacttgactaatcttcgggcagagagaaggaaacacttagaggaagttctggagatgaagcaagaagctcttctggctgccattagtgaaaaagacgccaatatagctctcttggagctttcgtcctctaagaagaagacccaagaggaagtggctgccctgaagcgggagaaggatcgtctggtacagcagcttaagcagcagacgcaaaatcgaatgaagctaatggccgacaactacgaggatgaccacttcaaatcctcccattccaatcaaacaaatcacaagccctccccagaccaggatgaggaggagggtatatgggcatagccaatcagaggcttagttcagccattttgttcagaacgatcatccagcccctcttagaacttgaccaaaatagaagtaaattaaagttgtacattggacacctgacaaccctctgccatgaccgagaccccctgatcctccgtggactcactccaccagcttcctataacttggacgatgaccaggcggcttgggagaatgagctgcagaagatgacccgggggcagcttcaggatgagttagagaaaggtgaacgggacaatgcagaactgcaggagtttgccaacgccattcttcagcagatagcagaccattgtcccgacatcctagagcaagtggtcaacgccctggaagagtcctcttgaccctgctttatggggaagcctgaggtagtcaacccaggagccaagaaaagagaactacgaggaacaggtgcccggaaccttcttggcaccaaacactacaaacttcatcccaacttgctcacttgaagaagtgtgattccagcaccgtttctacatctgccatcttactctgcctttctgctttggatgtggtctctacactaaccttcttgatgtccagggtagataaagggtcgaatctctctgaagaactgccacctggtcatcagcagtggagaactgtgggagctggtggctctgccctgacagagagccatggagcagaggagcctctcacctcctgtcctctgacatgagaatgaaaccaggaatggacttggagttcaacaggctgagaggatgcctccaatggaccagagagctgagtgttctaatatcacaataggtgctttctcctaaaagggcaaaaaacaatctcaaaaagattagaaaaagagaaggggggaagggaagagaaaatcgactcttctttttactgtctcttctgcttactttccacatgagatgctttgtaccggggagctgtgagcaggcctcacgatggcttgggagcactcgttctcccaaggtctgagtcttcatccagccctgcctgtctgtcgcagccttcctcactctgttcctcggccagttaacaagaagatggtgtgaggtgttctccaccagtctctcctgtttgagactgttgacgttatcatactgaggtgttagatcaaatatctctaattgaagaacatgtgaggttgaaagagcaccagccagggcaacatagcgtgaccctgtctctacaaaaaattaaaaagagaacatacaaagttgacatatgagaccctgttgtccccgcctgcagctttgccccagtaacagatgcccgttgctcttgggctggtttcccctgaacacctccaagaggctgcctgccttgccagcacccgtgtcctgagctcctgcagcccagtggctgctgaagttgtgatccctcactcaccctgctagctttgcccttgactcgtcttctctgaacctcagcctcgtgcattgcctggaaccttcttctagcataaatgaaggtttttcctcctacacacattccttcctcggttatttcattcagagaatatttatgaaatgcctactgtgtgcaagtcatccatccttgaaaaggccacttctcagtgagggagagatgtagtggattctgtgagacatacctgctggagttgaagcagtaaatagcatgtccttcccctccccgatcttaaggtgtgttttctagaaaagttccctaatggaattcatgagtttgggggtctcagtcacccgcttgcctgtaggattccatttgatgattctggatttttgctgtttgttattgcccttagaggggctctgagtatctacttgtgggtggccatttcctgacatctgcatgtacctcgtggaattcagccagcttcatgttgcaaatcagaaagctgaccccaagactgcaaatcaatgaaggtattggcattgttaaggacgtagcgtagacaacagcagtcataaataattaggcaggaacttaacccaaatctagttctttgaccacctctaccaccagaacccagcagacactcacatctcctgataagagttgctggactcgatgtttttgttttgcattttctcctctccttccccacttactcagagaatttaaagtctgtagagtcagcacagccccatcagtccaggaacttcccaccaccagcccttgactgtcccattaactgacatggtcagatttccagctccccctactccctgctgtgaaacaatccctctccctgtgagaggaaactgtggagcgtttcttatcgaaggttaaatggactctgctcataaacctcttactgagatgcttcctgatagccaggctggccagagaggggtgcaggggttagatagtaagtggtggtcgtttgtggtcagttacctcaattctgttcattgcagtgcccgtaaaccatgtagaaagctcccagcactgaaaggcaggagtgttagcatctcgctttatccaccataacgtaaagaactgcggtgtgataacagccttcacggggccacggtggaaccaagacagcaggcgaggccatgcctaaacaagtggtctggcacgggcactggccagctgctctctccaagcaggtggcccagatcccacccacgtggactttctcatcaggtgcagcgcctgccactctcagccactgggtgtgtgactctcctcttcatctcagcattctccatcacttcccctccagaaaaacggatggaaggaagccctctgtgacactgcttctgagaagaagcatttccgggaccgatatcatctgtctggtctctgtgaacagcaaggaatcttcttgaccgttcttgggcactggaggctggctaggagttcagtaataaacgtggccttcgtgctgtagggcagagtggatgcagtttgtagctttcagagtgtctcattgagtctagatcattgaaccaacacttaaccaaatgtcccactcccatcacactaggacttgtcattccatgcccctctcctagtggtcatggtttcatatgggcatacaactgctactgaagttatatagccttgaaaactcagtgcaggttgcccttaattttccccaaacccctccatcggcaagtctagttgccctttagcacctaaagatctgcaccccaaaccaatgtcaccataaagagggcacgaagaagagtgggtgtgatcccaacggggttttgtaactgaagaagcccagtgtgagcttctcatcttttcatatacctctaacccccggtactcattgaatcattgatgaggtatctcaattgagatttgcaaggactttgataccatttgaaatggaaaaattttgaacgggctttaacatgtttaagaaatatggatggggccggccacagtggctcacgcctgtaatcccagaactctggaaggctgaggcaggcggatcacctgagatcaggagttcgaggccagcctggccaagatggcaaaaaccccgactctactaaaaatacaaaattagccaggcgtggtggcgtacgcctgtaatcccagctactcaggaggcaggagaatcgcttgagcctgggaggcagaggctgcggtgagccgagatcgtgtcactgcactccagcctgggtgacagagactccattt

SEQ ID NO: 30085 - DNA, 6655 bp, Homo Sapiens; identical to SEQ ID NO: 24855

SEQ ID NO: 30086 - DNA, 6409 bp, Homo Sapiens
agaggaacagggcaaacctctgacttccggcggcattttgaggcggtcctcctagcggcctgtagtacaaaatgtcaaaaattagaaggaaggtcacagtggaaaataccaagactatatctgatagcacatcccgaagacccagtgtatttgagaggcttggacccagcactggcagtacagcagagacacagtgccgtaactggctgaagactggcaactgcctctatggaaacacatgtagattcgtacatggcccttcacctcgtggtaaaggttatagcagcaattatagaaggtcaccagaaagacctacaggggatcttagagaaagaatgaagaacaagcgccaagacgtggacactgagccccagaaacgaaatacagaggagtcatcctcacctgttaggaaagaatcttcaagagggagacatagggaaaaggaagacataaaaatcactaaggaaagaactccagaaagtgaagaagaaaatgtagaatgggaaactaatagagatgattctgacaatggagatattaattatgattatgttcatgaattgtcattggaaatgaagcgtcagaagatacagagggaattaatgaagctggaacaagaaaacatggagaagagagaagaaattatcattaaaaaggaggtttcaccagaagtggttagatcaaaattgtccccgtcaccttctctaagaaagtctagcaaatctccgaagcgaaaatcaagcccgaagtcgtcttcagctagcaagaaagataggaagacatctgcagtatcttctcccctgttggaccagcagagaaattcaaaaaccaaccaaagtaaaaagaaaggaccacgtactcctagtccaccccctcctataccagaagatatcgctctggggaaaaaatacaaagaaaaatataaagtaaaagacaggatagaagaaaaaacaagagatggaaaggacagaggacgagattttgaacgacaaagagaaaagagagacaagccaaggtctacttccccagcaggacagcatcattctcctatatcttctagacatcactcatcttcctcacaatcaggatcatctattcaaagacattctccttctcctcgtcgaaaaagaactccttcaccatcttatcagcggacactaactccacctttacgacgctctgcctctccttatccttcacattctttgtcgtctccccagagaaagcagagtcctccaagacatcgctctccaatgcgagagaaagggagacatgatcatgaacgaacttcacagtctcatgatcgacgccacgaaaggagggaagatactaggggcaaacgagacagagaaaaggactcaagagaagaacgagaatatgaacaggatcagagctcttctagagaccacagagatgacagagaacctcgagatggtcgggatcggagagatgccagagatactagggaccgaagggaactaagagactccagagacatgcgggactcaagggagatgagagattatagcagagataccaaagagagccgtgatcccagagattctcggtccactcgtgatgcccatgactacagggaccgtgaaggtcgagatactcatcgaaaggaggatacatatccagaagaatcccggagttatggccgaaaccatttgagagaagaaagttctcgtacggaaataaggaatgagtccagaaatgagtctcgaagtgaaattagaaatgaccgaatgggccgaagtagggggagggttcctgagttacctgaaaagggaagtcgaggctcaagaggttctcaaattgatagtcacagtagtaatagcaactatcatgacagctgggaaactcgaagtagctatcctgaaagagatagatatcctgaaagagacaacagagatcaagcaagggattcttcctttgagagaagacatggagagcgagaccgtcgtgacaacagagagagagatcaaagaccaagctcaccaattcgacatcagggaaggaatgacgagcttgagcgtgatgaaagaagagaggaacgaagagtagacagagtggatgataggagagatgaaagggctagagagagagatcgggaacgagaacgagacagggagcgggagagagagagggaacgtgaacgggatcgggaaagagaaaaagagagagaactagaaagagagcgtgctagggaacgggagagagaaagagaaaaagagagagatcgtgaaagggatagagaccgagaccacgatcgagagcgggaaagagagagggaacgagacagggaaaaagaacgggaacgagaaagagaagagagagagagggagagagagcgagaacgggagagagagcgagagcgagaacgggaacgagaaagagcgagagaaagggataaagaacgagaacgccaaagggattgggaagacaaagacaaaggacgagatgaccgcagagaaaagcgagaagagatccgagaagataggaatccaagagatggacatgatgaaagaaaatcaaagaagcgctatagaaatgaagggagtcccagccctagacagtccccgaagcgccggcgtgaacattctccggacagtgatgcctacaacagtggagatgataaaaatgaaaaacacagactcttgagccaagttgtacgacctcaagaatctcgttctcttagtccctcgcacctcacagaagacagacagggtagatggaaagaggaggatcgtaaaccagaaaggaaagagagttcaaggcgctacgaagaacaggaactcaaggagaaagtttcttctgtagataaacagagagaacagacagaaatcctggaaagctcaagaatgcgtgcacaggacattataggacaccaccagtctgaagatcgagagacatctgatcgagctcatgatgaaaacaagaagaaagcaaaaattcaaaagaaaccaattaagaaaaagaaagaggatgatgttggaatagagaggggtaacatagagacaacatctgaagatggtcaagtattttcaccaaaaaaaggacagaaaaagaaaagcattgaaaaaaaacgtaaaaaatccaaaggtgattctgatatttctgatgaagaagcagcccagcaaagtaagaagaaaagaggcccacggactccccctataacaactaaagaggaattggttgaaatgtgcaatggtaagaatggtattctagaggactcccagaaaaaagaagatacagcattcagtgactggtctgatgaggatgtccctgaccgtacagaggtgacagaagcagagcatactgccaccgccacgactcctggtagtaccccttctcctctatcttctcttcttcctcctccaccgcctgtggctactgccactgctacaactgtgcctgcaactcttgctgccactactgctgctgccgccacctctttcagcacatctgccatcactatttccacctctgccacccccaccaataccaccaataatacttttgccaatgaagactcacacagaaaatgccacagaacacgagtagaaaaagtagagacgcctcacgtgactatagaagatgcacagcatcgcaagcctatggatcaaaagaggagcagcagcctcgggagcaatcggagtaaccgtagtcatacgtctggtcgtcttcgctccccatccaatgattcagcccatcgaagtggagatgaccaaagtggtcgaaagagagtactgcacagtggctcaagagatagagaaaaaacaaaaagcctggaaatcacaggagagagaaaatctaggattgatcagttaaagcgtggagaacccagtcgaagtacttcttcagatcgccaggattcaagaagccatagttcaagaagaagttctccagagtcagatcgacaggtccattcaagatctgggtcatttgatagcagagacaggcttcaagaacgagatcgatatgaacacgacagagagcgcgagagagagaggagagatacgaggcagagagaatgggaccgagatgctgataaagattggccacgcaacagggatcgagatagattgcgagaacgagaacgagagagagaacgagacaaaaggagagacttggatagggaaagagagagactaatttctgattctgttgaaagggacagggacagagacagagacagaacttttgagagttctcaaatagagtctgtgaaacgctgtgaagcaaaactggaaggtgaacatgaaagggatctagaaagcacttcccgagactctctagccttggataaagagagaatggataaagatctgggatctgtgcagggatttgaagatacaaataaatccgagagaactgagagtctggaagcaggagatgacgagtccaagttagatgatgcacattcattaggctctggtgctggagaaggatacgagccaatcagtgatgacgaactagatgaaattctggcaggtgatgcagaaaagagggaggaccaacaggatgaggagaagatgccagatcccttagatgtgatagatgtggattggtctggtcttatgccaaagcatccaaaagaaccacgagagcctggggctgcactcttaaaattcacacctggagctgttatgctaagagttgggatttctaaaaagttggcaggttctgaactctttgccaaagtcaaagaaacatgtcagagacttttagaaaaacccaaaggtagtttcattttactttaactatataatgtctgttaaccatttaagatgccatctgaaggggattctgatctgttcttatgtagcacttaacactgtgtagaaactattttttgagaaatcattttataatcattatttaaccctcatggtcaaagtttctctttaaaatttattttgagaagaagagttatcccacagaaaagttgggaaaagagtacaatgacctttttgtatgaaaattacttattaacaggccaggcgtggtgttgcatgtctgtagtcacagctactcagggaggttgaggcagcaggattgctggagcccaggaaattgaggctgcagtgagccatgattgagccaccacactccaacctaggtgacagagcaagaccctgtctcaaaaaaaaaaaaacaaattaaccaataagttctaatatcaaagtgctcagtggtttgcccttggctaaatgaagcagagccaggaaaaacagactacatatttttcatgtctaaagaaattgggtattttggcagccctttcccctagacatctacccaaatgcaggtgtgtaggttgagtctttaacaaagtgattaagagcttggtctgtaaggccggatgatctggatttcagtaggcacaccacttactggctattacttaatctgtgtgttagtgtcatcatctgtaagtcaggaataatcataccaccaacttcctatggtaattaggagcaaatgagttattacaggcaaaacacttagaacagttcctggcatatagtaatacccaataaatattaactgctactttgaaaatatcctatcacgctgatttttgacctcactgcagcaattttcagttattccagattatctagcttatggattctggtggtaggggttgtttggttttggttttcactgtctctgtctcatctagtacctaccttagtttattttgcaacttactaatactttattaatggggagggacgagtagatggtaaaaagaaggaaaaggaggtaaaaggtgaaaggaacaacattaattaacaattttacgtcatgtccctggacataaaagtttagttagtattaaatttttcactaatacaaaataaaaaaatattgttttatgagttttatgaattcatgcccttcctttactctattagcataagcagtaaatttttttattttaatatagcccaataaacctagagtatacatgtacaaaatacatataattgttaacgtgtattaaccgaaaaatgacccaagacttagttcttgccctactgtatctgccttgtttggttggttctgtgaccttaagcaaataactcctgtgagcctcaattttatttgtaaagtgatggaataaaacccctaaaatcttacccacctctaaagatatttgtttctgtgaccttttgctagtagcatttcaagttaaaatctggtttgattttgctacccatgaaatacagttcggcccttacttattgatgacttaacctaaacagtgaaaatatgcactgtaaagggtggggtgatgtggcttaacaatcagacttcttctatttttgctgctatggtggttgtattagagaactgatgtattatcttgaataaagactttgtcttgtttactgcc

SEQ ID NO: 30087 - DNA, 10551 bp, Homo Sapiens
gcggccgctgctcgcgctgaggtgcgtcggtgcccggccccccgcgcccccgcgcgccgcggctcctgttgacccggtccgcccgtcggtctgcagcgcggctgaggaaacttggctgtaacttcaaaagaagatttgattctttatttctggactgcatatatatatataacaaggccattaaaatgtcgggagcctcagtgaaggtggctgtccgggtaaggcccttcaattctcgagagaccagcaaggaatccaaatgcatcattcagatgcaaggcaactcgaccagtattattaacccaaagaatccaaaggaagctccaaagtccttcagcttcgactattcctactggtctcatacctcacccgaagatccctgttttgcatctcaaaaccgtgtgtacaatgacattggcaaggaaatgctcttacacgcctttgagggatataatgtctgtatttttgcctatgggcagactggtgctggaaaatcttatacaatgatgggtaaacaagaagaaagccaggctggcatcattccacagttatgtgaagaactttttgagaaaatcaatgacaactgtaatgaagaaatgtcttactctgtagaggtgagctacatggaaatttactgtgaaagagtacgagatttgctgaatccaaaaaacaagggtaatttgcgtgtgcgtgaacacccacttcttggaccctatgtggaggatctgtccaagttggcagttacttcctacacagacattgctgacctcatggatgctgggaacaaagccaggacagtggcagctacaaacatgaatgaaacaagtagccgttcccacgctgtgtttacgattgttttcacccagaagaaacacgataatgagaccaacctttccactgagaaggtcagtaaaatcagcttggtggatctagcaggaagtgaacgagctgattcaactggtgccaaagggactcgattaaaggaaggagcaaatattaataagtctcttacaactttgggcaaagtcatttcagccttggccgaggtgagtaaaaagaagaagaaaacagattttattccctacagggattctgtacttacttggctccttcgagaaaatttaggtggcaattctcggactgcaatggttgctgctctgagccccgcggatatcaactacgatgagactttgagcactctgagatatgcagatcgtgcaaaacaaattaaatgcaatgctgttatcaatgaggaccccaatgccaaactggttcgtgaattaaaggaggaggtgacacggctgaaggaccttcttcgtgctcagggcctgggagatattattgatacatccatggggtccctcacttcatccccatcttcctgctcactcagtagtcaggtgggcttgacgtctgtgaccagtattcaagagaggatcatgtctacacctggaggagaggaagctattgaacgtttaaaggaatcagagaagatcattgctgagttgaatgaaacttgggaagagaagcttcgtaaaacagaggccatcagaatggagagagaggctttgttggctgagatgggagttgccattcgggaagatggaggaaccctaggggttttctcacctaaaaagaccccacatcttgttaacctcaatgaagacccactaatgtctgagtgcctactttattacatcaaagatggaattacaagggttggccaagcagatgctgagcggcgccaggacatagtgctgagcggggctcacattaaagaagagcattgtatcttccggagtgagagaagcaacagcggggaagttatcgtgaccttagagccctgtgagcgctcagaaacctacgtaaatggcaagagggtgtcccagcctgttcagctgcgctcaggaaaccgtatcatcatgggtaaaaaccatgttttccgctttaaccacccggaacaagcacgagctgagcgagagaagactccttctgctgagaccccctctgagcctgtggactggacatttgcccagagggagcttctggaaaaacaaggaattgatatgaaacaagagatggagaaaaggctacaggaaatggagatcttatacaaaaaggagaaggaagaagcagatcttcttttggagcagcagagactggactatgagagtaaattgcaggccttgcagaagcaggttgaaacccgatctctggctgcagaaacaactgaagaggaggaagaagaggaagaagttccttggacacagcatgaatttgagttggcccaatgggccttccggaaatggaagtctcatcagtttacttcattacgggacttactctggggcaatgccgtgtacctaaaggaggccaatgccatcagtgtggaactgaaaaagaaggtgcagtttcagtttgttctgctgactgacacactgtactcccctttgcctcctgaattacttcccactgagatggaaaaaactcatgaggacaggcctttccctcgcacagtggtagcagtagaagtccaggatttgaagaatggagcaacacactattggtctttggagaaactcaagcagaggctggatttgatgcgagagatgtatgatagggcaggggagatggcctccagtgcccaagacgaaagcgaaaccactgtgactggcagcgatcccttctatgatcggttccactggttcaaacttgtggggagctcccccattttccacggctgtgtgaacgagcgccttgccgaccgcacaccctcccccactttttccacggccgattccgacatcactgagctggctgacgagcagcaagatgagatggaggattttgatgatgaggcattcgtggatgacgccggctctgacgcagggacggaggagggatcagatctcttcagtgacgggcatgacccgttttacgaccgatccccttggttcattttagtgggaagggcatttgtttacctgagcaatctgctgtatcccgtgcccctgatccacagggtggccatcgtcagtgagaaaggtgaagtgcggggatttctgcgtgtggctgtacaggccatcgcagcggatgaagaagctcctgattatggctctggaattcgacagtcaggaacagctaaaatatcttttgataatgaatactttaatcagagtgacttttcgtctgttgcaatgactcgttctggtctgtccttggaggagttgaggattgtggaaggacagggtcagagttctgaggtcatcactcctccagaagaaatcagtcgaattaatgacttggatttgaagtcaagcactttgctggatggtaagatggtaatggaagggttttctgaagagattggcaaccacctgaaactgggcagtgccttcactttccgagtaacagtgttgcaggccagtggaatcctcccagagtatgcagatatcttctgtcagttcaactttttgcatcgccatgatgaagcattctccacggagcccctcaaaaacaatggcagaggaagtcccctggccttttatcatgtgcagaatattgcagtggagatcactgaatcatttgtggattacatcaaaaccaagcctattgtatttgaagtctttgggcattatcagcagcacccacttcatctgcaaggacaggagcttaacagtccgcctcagccgtgccgccgattcttccctccacccatgccactgtccaagccagttccagccaccaagttaaacacgatgagcaaaaccagccttggccagagcatgagcaagtatgacctcctggtttggtttgagatcagtgaactggagcctacaggagagtatatcccagctgtggttgaccacacagcaggcttgccttgccaggggacatttttgcttcatcagggcatccagcgaaggatcacagtgaccattatccatgagaaggggagcgagctccattggaaagatgttcgtgaactggtggtaggtcgtattcggaataagcctgaggtggatgaagctgcagttgatgccatcctctccctaaatattatttctgccaagtacctgaagtcttcccacaactctagcaggaccttctaccgctttgaggctgtgtgggatagctctctgcataactcccttcttctgaaccgagtgacaccctatggagaaaagatctacatgaccttgtcggcctacctagagctggatcattgcatccagccggctgtcatcaccaaggatgtgtgcatggtcttctactcccgagatgccaagatctcaccaccacgctctctgcgtagcctctttggcagcggctactcaaagtcaccagattcgaatcgagtcactggcatttacgaactcagcttatgcaaaatgtcagacacaggtagtccaggtatgcagagaaggagaagaaaaatcttagatacgtcagtggcatatgtgcggggagaagagaacttagcaggctggcggccccgtggagacagcctcatccttgagcaccagtgggagctggagaagctggagctcctacatgaggtggaaaaaacccgccactttttgctgctgcgtgagagacttggtgacagcatccccaaatccctgagcgactcgttatcccccagcctcagcagtgggaccctcagcacctccaccagtatctcctctcagatctcaaccactacctttgaaagcgccatcacacctagcgagagcagtggctatgattcaggagacatcgaaagcctggtggaccgagagaaagagctggctaccaagtgcctgcaacttctcacccacactttcaacagagaattcagccaggtgcacggcagcgtcagtgactgtaagttgtctgatatctctccaattggacgggatccctctgagtccagtttcagcagtgccaccctcactccctcctccacctgtccctctctggtagactctaggagcaactctctggatcagaagaccccagaagccaattcccgggcctctagtccctgcccagaatttgaacagtttcagattgtcccagctgtggaaacaccatatttggcccgagcaggaaaaaacgaatttctcaatcttgttccagatattgaagaaattagaccaagctcagtggtctctaagaaaggataccttcatttcaaggagcctctttacagtaactgggctaaacattttgttgtcgtccgtcggccttatgtcttcatctataacagtgacaaagaccctgtggagcgtggaatcattaacctgtccacagcacaggtggagtacagtgaggaccagcaggccatggtgaagacaccaaacacctttgctgtctgcacaaagcaccgtggggtccttttgcaggccctcaatgacaaagacatgaacgactggttgtatgccttcaacccacttctagctggcacaatacggtcaaagctttcccgcagatgcccgagccagtcgaaatactaagtgactctgccgagtgccctcactcgccttcgagagataaagaaagcgttacctctcatttctctttgtgattcttgacggtgactcttgtatgtaatcctgtggcttaactacttctccctccttgtccagcacttttctagctctcccgttccccatctccattgctctgtactcttttcttttttcttgtgctgagaatctcgttagtagcatgtggcctaacaaaaggaaaaaatgtttttaaacacacacacacacacacacacacacacacacatacacagacaaaaacacaaaaactctgaggggatctggtgaatctccaaattattgtgggtgtactttggcttccttttgtatgataggtccccatcatgaccacctctgatgtctgtgctgctgtcaccaggcacctttgtttttcaagacaacatactttttttttcttttctctgtttgtgatatcactttaatttttcttgggtggcttagagactaagggaggagacatctggcctttttagaacctgagaggaaaaaaagagtctttttttcccctctgtctctttttgccatggctaatccctgcatttccattcagggaaaaggtggtagtgagcatagaactgcaacagttatattctgagtcaaagttggggctttttacggcataattatggaatttttatttactggtagagaggagacgagaggctttttcagtgggcctgggacagtggctgctcttgactttgtgtgaagggaaatgccaaggatgcttctggtggacttcaggggaccccagggtttggccgtgggccgtgatggcagcaggcggtgggatgcttgtagctcctcacagcaggattcctgcccactgttttttctctgttgggagggaagctcttttctaggagtgtctcagttctgcttttggcattagtgatggtggtggtacagttggaattagtgccatgtcatacacaaatgttccacaaggcgggagtgtttcactttctggtgataaacttgatggtcattgttatgattaagataatgccgggcaggccgggcacagtggctcacgcctgtaatccaagcacttggggaggccgaggcgggcagatcacgagatcaggagttcaagaccagcctggccaatatgatgaaaccccgtctctactaaaaatacaaaattagtcgggtatggtggcacatgcctgtaattccagctgcttgggagcctgaggcaggagaactgcttgaacccaggaggcagaggttgcagtgagccaagatcgcgctattgcactccagcctgggtgacagagcaagactctgcctcagaaaaaaaaaaaaataataatgctgggtagtgaccttgtgattgttacagctccctttgatcaaagaaatatagctttcaggcataaacctggaagtctccctctgaatccagcagttgttttcattgatgcttgtcaggttgaagatgctttcagtgatgctctctatactcataaataagcaaatgtggcaggctttgctttctggatcccaggattaaaactaaccgtgaccactactccaaacaaaacacaatatgcctaggggcacggatgaacgtccagggagcccgggccccaggctttgttgcgtgttccctgctcctctccatctggtgtggaaacactgcccagggagaaaggaggaagctcactgtggacagtcttctttccttctgacagaccaggtcatctggcttccgagatcatcagagaagataagtctgtctctttcagctgccagtaagttttccaggatgagaggggaaaaagaaagcctccagtgacttcagttgctttgccagttgtcttgggattgttttacaccatcctttacttcccttgctcagacctctctgtttcaccattgctcaggcattcaggaaagtatctgctcactcccacttggtgagtcctcggccttgaggttgctgactctcaggcgttaggcagctggatgacttcccgcttcacgcagcaaaggccaggggcttgcgcgcctctgcagagttgttgctagggagacttgtgtcatcatccacaaccttgtttctcacttcctggttgggctcatctctgaagaacaggtctcccagcttcgctccttatcactgcattgtgaagaggaggaaaagtgaatcacggagagagaaaggaaaggatagaatcacaggctgcgtctgcacctgaaaagtgacccgcggaaactctatggcggattttttttttaactttcttcttcctgttaaaacataggtcactaactgtgatgttatttgttttctaagtggtatgtgagattttctaatgtagttagaagtttcattgtctgatggacacaatatgcccttccggttctattcaaaccagcaggatctgtcggtgcttagagatggctgcctggactggaatcaaatctaatttcagggaaatgaagatggaatttgaaggtcacttttaaaattaagtcattgatgctgctgttacagagtgtgacagaggatccatgtctgtgacacaggacggtgggaagcctgagagagagtgaaattatgtgatacactgaaatgacttttgtttttcttctaactcatacaaaactggtttggaaagtctttgctttggaagcgtcagacattagaacaggccaaactggactgtctgttcatagcgtgcctgaataagaaggcctcttagggagccagagggagcagagtggtcgtgtcctgcgtgctcttcaccctctggggcgcccctgctgcggctggcaggtgcagacagcctttgctggtccccagcacgtccagggtgggtgctcccttgcccgacagaaccatccccactgtgaggctgtgagagatttgtggcaggaactgtttatgaggctctagttgttgctgttgtggcgggaaagttaagaaacatagcccttaaggaaaccacctttatgtattttcttaaagcacgcctttaaataagcaaaaactttaaaaggcaggaaagagaattcttaggcaaattcagagaaataagtgctagttaatactaatcacctcctcctctgtctctcatcctcctttctcccatcaaagcaaaatatggcctcaccaccagccccaaatcagtgctcagaccctctctgtgtctgtgtgccctcctgggagtcagtcagcgctcaggccaggactgtgcagggccagccagcccatgcgctagtcaggagcacaggcaaggggtgcttgtggcagtggccgggcacctgagccccagctcgttgttaaacgtgctgacggcaaggggcaatggagtgagtttcccaactaagaaaccactattatatattttttcccttcagtcacatagacttcagacaactctcctattttttatggatttttcagctcatttcagatgaaggaactaagtcattgtgaactgtctcttgagatctaaaaacaagatgacttttcctggcacatattccaaagcaaagactttgttgcctgctgcttattgtctaatttacagggatatttaattttgtcaggtctatgtatatttatccagctatacttacttgcacagtggattggagagaaaggattctccagtgtgcacactcatcggtactctttctgcatttccctcgtgctgtgtcccgctcgggttccaatggacagtatcagggcttgtttgacttaggtctttcagttttcctttcggttcccttttaaaaatgtgattgttaacctgcctcttgaaagattcaaccgggtgtggtggctcacgcctgtaatcccagcacattgggaggccaaggcaggtggatcacctgaggtcagaagtttgagaccagcctggccaacatggtgaaaccccgtctctactaaaaatacaaaaagtagccaggcgtggtggcgtgtgcctgtagtcccagctacttgggaggctgaggcaggagaatagcttgaacctgggaggtggaggctgcagtgagttgagactgcaccattgcactccagcctgggtgacaaagcaggactccgtctcaaaaaaaaagaaaagattcatgatgctgctgctcccagaaggtttgctggatgtgtttacataggactctaacttgtgtgcactacagttgttcaccagggccagtgattcaccccagtgtgtggccagaccatgactgtgtagcaggaatgttttaatttgtgcttccttagtaaattgaaatatcagctgagagattatttgctgctgttattcaaaaggccatttatgaagttagtatttgagccccataagatctttaaaaagcctccaatcatttaaaggaagaaatcagagttgctataaaattcagtaaaaagctcatagccaaacggctgtgctcagatggaaagtctgagctgaggttggtctcttgccaaaccgtggctgttgtgtgttgttcttcatgtcttcgagttcattttttttcattctgcctattctggcatcagctcacttgaggagtccctcagccttcttgtatttaaggcatcgtcttagactttgtggctctaaagtacctgtctgttgagatttcaagtctcttgtcaccatcctcacacatgacaacaaaacccataatgcataagtggcctttttgaaccaagactttgcaaactgatctctcccccgtgaaggagttgagcacattagcaacaatgtacattaattttggattttcattttcatgttttattttgtaaatattatctgatgtttggagcttgagtatacagactgtaaatatagttcttgtatttgtactaattctgattcttttgctgtatagccttagatgtgcaatgcagacactatctaactgtgtgtggtaaccttgcgtcacggagctgttagtgaacgaggtaaaaataataaaggtacagccagtgcaaaaaaaaaaaaaaaaaaaaaaaaaaaaaaaaaaaaaaaaaaaa

SEQ ID NO: 30088 - DNA, 6139 bp, Homo Sapiens
cgcggggggaggaggaggagggactgagcggcggcggcccccgcgtcccgtgcctctatgggggaagcagacaatggattatgatttcaaggcgaagctggcggcggagcgggagcgggtggaggatttgtttgagtacgaagggtgcaaagtgggacgcggcacctacggtcacgtctacaaggcgaggcggaaagatggaaaagatgaaaaggaatatgcattgaagcaaattgaaggcacaggaatatccatgtcggcttgtagagagattgcacttttgcgagaattgaagcaccctaatgtgattgcattgcagaaggtgttcctttctcacagtgacaggaaggtatggctgctgtttgattatgcagagcatgacttgtggcatattattaagtttcaccgtgcatcaaaagcaaataaaaagcccatgcagttgccaagatctatggttaaatccttactttaccagattcttgatggtatccattacctccatgcaaattgggtgcttcacagagacttgaaaccagcaaatatcctagtaatgggagaaggtcctgagagggggagagtcaaaatagctgacatgggttttgccagattattcaattctcctctaaagccactagcagatttggatccagtagttgtgacattttggtatcgggctccagaacttttgcttggtgcaaggcattatacaaaggccattgatatatgggcaataggttgtatatttgctgaattgttgacttcggaacctatttttcactgtcgtcaggaagatataaaaacaagcaatccctttcatcatgatcaactggatcggatatttagtgtcatggggtttcctgcagataaagactgggaagatattagaaagatgccagaatatcccacacttcaaaaagactttagaagaacaacgtatgccaacagtagcctcataaagtacatggagaaacacaaggtcaagcctgacagcaaagtgttcctcttgcttcagaaactcctgaccatggatccaaccaagagaattacctcggagcaagctctgcaggatccctattttcaggaggaccctttgccaacattagatgtatttgccggctgccagattccataccccaaacgagaattccttaatgaagatgatcctgaagaaaaaggtgacaagaatcagcaacagcagcagaaccagcatcagcagcccacagcccctccacagcaggcagcagcccctccacaggcgcccccaccacagcagaacagcacccagaccaacgggaccgcaggtggggctggggccggggtcgggggcaccggagcagggttgcagcacagccaggactccagcctgaaccaggtgcctccaaacaagaagccacggctagggccttcaggcgcaaactcaggtggacctgtgatgccctcggattatcagcactccagttctcgcctgaattaccaaagcagcgttcagggatcctctcagtcccagagcacacttggctactcttcctcgtctcagcagagctcacagtaccacccatctcaccaggcccaccggtactgaccagctcccgttgggccaggccagcccagcccagagcacaggctccagcaatatgtctgcattgaaaagaaccaaaaaaatgcaaactatgatgccatttaaaactcatacacatgggaggaaaaccttatatactgagcattgtgcaggactgatagctcttctttattgacttaaagaagattcttgtgaagtttccccagcaccccttccctgcatgtgttccattgtgacttctctgataaagcgtctgatctaatcccagcacttctgtaaccttcagcatttctttgaaggatttcctggtgcacctttctcatgctgtagcaatcactatggtttatcttttcaaagctcttttaataggattttaatgttttagaaacaggattccagtggtgtatagttttatacttcatgaactgatttagcaacacaggtaaaaatgcaccttttaaagcactacgttttcacagacaataactgttctgctcatggaagtcttaaacagaaactgttactgtcccaaagtactttactattacgttcgtatttatctagtttcagggaaggtctaataaaaagacaagcggtgggacagagggaacctacaaccaaaaactgcctagatctttgcagttatgtgctttatgccacgaagaactgaagtatgtggtaatttttatagaatcattcatatggaactgagttcccagcatcatcttattctgaatagcattcagtaattaagaattacaattttaaccttcatgtagctaagtctaccttaaaaagggtttcaagagctttgtacagtctcgatggcccacaccaaaacgctgaagagagtaacaactgcactaggatttctgtaaggagtaattttgatcaaaagacgtgttacttccctttgaaggaaaagtttttagtgtgtattgtacataaagtcggcttctctaaagaaccattggtttcttcacatctgggtctgcgtgagtaactttcttgcataatcaaggttactcaagtagaagcctgaaaattaatctgcttttaaaataaagagcagtgttctccattcgtatttgtattagatatagagtgactatttttaaagcatgttaaaaatttaggttttattcatgtttaaagtatgtattatgtatgcataattttgctgttgttactgaaacttaattctatcaagaatctttttcattgcactgaatgatttcttttgcccctaggagaaaacttaataattgtgcctaaaaactatgggcggatagtataagactatactagacaaagtgaatatttgcatttccattatctatgaattagtggctgagttctttcttagctgctttaaggagcccctcactccccagagtcaaaaggaaatgtaaaaacttagagctcccattgtaatgtaaggggcaagaaatttgtgttcttctgaatgctactagcagcaccagccttgttttaaatgttttcttgagctagaagaaatagctgattattgtatatgcaaattacatgcatttttaaaaactattctttctgaacttatctacctggttatgatactgtgggtccatacacaagtaaaataagattagacagaagccagtatacattttgcactattgatgtgatactgtagccagccaggaccttactgatctcagcataataatgctcactaataatgaagtctgcatagtgacactcatcaagactgaagatgaagcaggttacgtgctccattggaaggagtttctgatagtctcctgctgttttaccccttccattttttaaaataagaaattagcagccctctgcataatgtagctgcctatatgcagttttatcctgtgccctaaagcctcactgtccagagctgttggtcatcagatgcttattgcaccctcaccatgtgcctggtgccctgctgggtagagaacacagaggacagggcatacttcttgtccttaaggagcttgtgatctgtgacagtaagccctcctgggatgtctgtgccatgtgattgacttacaagtgaaactgtcttataatatgaaggtctttttgtttacttctaaacccacttgggtagttactatccccaaatctgttctgtaaataatattatggaagggtttctatgtcagtctaccttagagaaagccagtgattcaatatcacaaaaggcattgacgtatctttgaaatgttcacagcagccttttaacaacaactgggtggtccttgtaggcagaacatactctcctaagtggttgtaggaaattgcaaggaaaatagaaggtctgttcttgctctcaaggaggttacctttaataaaagaagacaaacccagatagatatgtaaaccaaaatactatgccccttaatactttataagcagcattgttaaatagttcttacgcttatacattcacagaactaccctgttttccttgtatataatgacttttgctggcagaactgaaatataaactgtaaggggatttcgtcagttgctcccagtatacaatatcctccaggacatagccagaaatctccattccacacatgactgagttcctatccctgcactggtactggctcttttctcctctttccttgcctcagggttcgtgctacccactgattccctttacccttagtaataattttggatcattttctttcctttaaaggggaacaaagccttttttttttttgagacggagtgttgctctgtcacccaagctggagtgcagtggcacgatcttggctcactccaacctccaccttccaggttcaagtgattctcctgcctcagcctcccgagtagctgggactacgggcacgcaccaccacgtctggctaatttttgtatttttagtagagatggggtttcaccctattggtcaggctggtcttgaattcctcacctcaggtcatccgcctgtctcggcctcccgaagtgctgggattataggtgtgagccaccgcacccagttgggaacaaagcctttttaacacacgtaagggccctcaaaccgtgggacctctaaggagacctttgaagctttttgagggcaaactttacctttgtggtccccaaatgatggcatttctctttgaaatttattagatactgttatgtcccccaagggtacaggaggggcatccctcagcctatgggaacacccaaactaggaggggttattgacaggaaggaatgaatccaagtgaaggctttctgctcttcgtgttacaaaccagtttcagagttagctttctggggaggtgtgtgtttgtgaaaggaattcaagtgttgcaggacagatgagctcaaggtaaggtagctttggcagcagggctgatactatgaggctgaaacaatccttgtgatgaagtagatcatgcagtgacatacaaagaccaaggattatgtatatttttatatctctgtggttttgaaactttagtacttagaattttggccttctgcactactcttttgctcttacgaacataatggactcttaagaatggaaagggatgacatttacctatgtgtgctgcctcattcctggtgaagcaactgctacttgttctctatgcctctaaaatgatgctgttttctctgctaaaggtaaaagaaaagaaaaaaatagttggaaaataagacatgcaacttgatgtgcttttgagtaaatttatgcagcagaaactatacaatgaaggaagaattctatggaaattacaaatccaaaactctatgatgatgtcttcctagggagtagagaaaggcagtgaaatggcagttagaccaacagaggcttgaaggattcaagtacaagtaatattttgtataaaacatagcagtttaggtccccataatcctcaaaaatagtcacaaatataacaaagttcattgttttagggtttttaaaaaacgtgttgtacctaaggccatacttactcttctatgctatcactgcaaaggggtgatatgtatgtattatataaaaaaaaaaacccttaatgcactgttatctcctaaatatttagtaaattaatactatttaatttttttaaagatttgtctgtgtagacactaaaagtattacacaaaatctggactgaaggtgtcctttttaacaacaatttaaagtactttttatatatgttatgtagtatatcctttctaaactgcctagtttgtatattcctataattcctatttgtgaagtgtacctgttcttgtctcttttttcagtcattttctgcacgcatccccctttatatggttatagagatgactgtagcttttcgtgctccactgcgaggtttgtgctcagagccgctgcaccccagcgaggcctgctccatggagtgcaggacgagctactgctttggagcgagggtttcctgcttttgagttgacctgacttccttcttgaaatgactgttaaaactaaaataaattacattgcatttattttatattcttggttgaaataaaatttaattgactttg

SEQ ID NO: 30089 - DNA, 6862 bp, Homo Sapiens
gccgagcggctggcggtgcctgggccagatgggggcggtggcacgggcccatggtgggctgcgggtggcccgggcccgcgaaagtgtcgccgggggcaggcaccgaggtgcaggacgccctggagcgcgcgctgccggagctgcagcaggccttgtccgcgctgaagcaggcgggcggcgcgcgggccgtgggcgccggcctggccgaggtcttccaactggtggaggaggcctggctgctgcggccgtgggccgcgaggtagcccagggtctgtgcgacgccatccgcctcgatggcggcctcgacctgctgttgcggctgctgcaggcgccggagttggagacgcgtgtgcaggccgcgcgcctgctggagcagatcctggtggctgagaaccgagaccgcgtggcgcgcattgggctgggcgtgatcctgaacctggcgaaggaacgcgaacccgtagagctggcgcggagcgtggcaggcatcttggagcacatgttcaagcattcggaggagacatgccagaggctggtggcggccggcggcctggacgcggtgctgtattggtgccgccgcacggaccccgcgctgctgcgccactgcgcgctggcgctgggcaactgcgcgctgcacgggggccaggcggtgcagcgacgcatggtagagaagcgcgcagccgagtggctcttcccgctcgccttctccaaggaggacgagctgcttcggctgcacgcctgcctcgcagtagcggtgttggcgactaacaaggaggtggagcgcgaggtggagcgctcgggcacgctggcgctcgtggagccgcttgtggcctcgctggaccctggccgcttcgcccgctgtctggtggacgccagcgacacaagccagggccgcgggcccgacgacctgcagcgcctcgtgccgttgctcgactctaaccgcttggaggcgcagtgcatcggggctttctacctctgcgccgaggctgccatcaagagcctgcaaggcaagaccaaggtgttcagcgacatcggcgccatccagagcctgaaacgcctggtttcctactctaccaatggcactaagtcggcgctggccaagcgcgcgctgcgcctgctgggcgaggaggtgccacggcccatcctgccctccgtgcccagctggaaggaggccgaggttcagacgtggctgcagcagatcggtttctccaagtactgcgagagcttccgggagcagcaggtggatggcgacctgcttctgcggctcacggaggaggaactccagaccgacctgggcatgaaatcgggcatcacccgcaagaggttctttagggagctcacggagctcaagaccttcgccaactattctacgtgcgaccgcagcaacctggcggactggctgggcagcctggacccgcgcttccgtcagtacacctacggcctggtcagctgcggcctggaccgctccctgctgcaccgcgtgtctgagcagcagctgctggaagactgcggcatccacctgggcgtgcaccgcgcccgcatcctcacggcggccagagaaatgctacactccccgctgccctgtactggtggcaaacccagtggggacactccagatgtcttcatcagctaccgccggaactcaggttcccagctggccagtctcctgaaggtgcacctgcagctgcatggcttcagtgtcttcattgatgtggagaagctggaagcaggcaagttcgaggacaaactcatccagagtgtcatgggtgcccgcaactttgtgttggtgctatcacctggagcactggacaagtgcatgcaagaccatgactgcaaggattgggtgcataaggagattgtgactgctttaagctgcggcaagaacattgtgcccatcattgatggcttcgagtggcctgagccccaggtcctgcctgaggacatgcaggctgtgcttactttcaacggtatcaagtggtcccacgaataccaggaggccaccattgagaagatcatccgcttcctgcagggccgctcctcccgggactcatctgcaggctctgacaccagtttggagggtgctgcacccatgggtccaacctaaccagtccccagttccccagccctgctgtgacttccatttccatcgtcctttctgaaggaacagctcctgaaaccagtctccctgggctgagacaacctgggctcttcttaggaaatggctctccctccccctgtcccccaccctcatggcccacctccaacccactttcctcagtatctggagagggaagggaagtcaggcttgggcacgggaggttagaactcccccaggccctgccattgggttgtctgtctccgtcatggggagggtccctgctcagttctggagacactggagttggggtgggggtggttctgcattcccttctcctgctgatagcagtcagcttgaggaggatgaaggaaggcagcctcagacaggaattaaggcaatgcccaggcgggcctgggcactgtattctgagcaagggcctgggcccaggagccagccagggatgagtgccatcatggctctccactcagactgtgcctggcccctgcacttacaacttcctgccgctctgtggccttgccctgtaatcactcagtgcccttagctagcctgactaagtcccagatcccctacagcttccttcggtgtggtatcttttgccacatccagggcgagggttgaggcaaaccagccctccctctgacttccttgtcactgcagccagctttgctgcacttgctggtgcacaggagcctcctgtttgggcctgggtctgggcatggggaggccgtgcctcaaagcccaccctaccccatgccttggtgctgtgcctcaggctccttcctggtctggcccagctggcttccccagcccctcagccatccagggctacccactgcttactcagggaccaggcagcccccatggcagtaaaagcagcctagacagaacctgcagctctgtggaaagaggcaaagtcctgaaaaggcaaagggttgtcacttagggcagcttctccaactttaacatgcatccaagtcacctgggaatgttgttaaaatcaggagatctggggtggggcctaggactctgcatttcttacagattcccaggtgagctgatgctggtggttaagggtagcaaatctctaaagcacgaagccctcacaaatctttgccatttcccaaacactccgctccatggtctccagtcatcagagcaactctacctggtattatcatccccattttacagataatgacactgaggctcagaaaggttgaggataagcccactttcctgtcattagtggcagccccagatccagacctaggcctcctggcacccagtccactggcagtggaattgctttcctgagaatcattctgaggctgggctattgcttctcccttgcttcaaagaatctagcagcgggggataggattttgcaacaaaaagctgacccagaggccatacagagcaggaatatcccattgccccctcctccactgggttcagagggtaagaaagcaccctccaataaacccaggctccaggccgtgggggctgctgaaggctctttccccgcaagggccaggtgttgacaccttaaagctggctgcgcccccagccccactcttggctgtgctggccaggtgactcctagttcttggccacatcatcagaaagtcaaaggtctcactccaggtttggggctccttccttccactcccctccctgccagagtctgtcttggccagtgccagcctcgatgctttggttttgaccccacctgatcctcctttcctcatgcagcacaagtgctcaccggggccagagccagggcatggatatgacaagcagggcagcctggacactgccctcacaggacagcgccaataacaatacagtgtctgagtatctccaggggatgatttctggctctttgtctccaatcagtcccactccctcctgaggtccccaagggcagtattcagagaggtttcctgcgttttatttctatttggtataccctccactgttgtccactgccctgtgtggccttctggttgacctctgcccgatcttctgtctctctgagggaatcagagtccagcatccagccccagctggaacagctgaagtcacaagcctcctctaagccaaggccagtgtgttcagaggtgactgccacccatactaggacaaacacagctcagatcaccaggtcaagcacctaggcctggcttctcctgagacagaggactcagaagtggcctttcctccaaagcctgctcagacacaggtctgtagggccagggtgttctgcttggctgggctgcagctgctacccctcggttggggctgagtcagccagatcctccccctacttctccccaagggccaagaactgctcagggacattaaaggtcaaaagtccagccacactcattcatcctttccccaggcccatgaagagaggcatctcattgtagaatgtatgaggaagtgggaagtatctcagagaatcagctaagtttcctaacttgtccatccaaatgtgatcaccacgattcaacaatttggggcattgctgatctagccgttcctagtggggcttgctcaaggttgcacagcgagtcagtagaagccctggctggccccacttggtaccaatccaccaggcagctcagggctcctgcccagcccagcagcttctgttgtctaacgtatggcaggcagactgggagcaggaaaacagagggccccaaagcccaaggcaccagaaggtttgtttcagtttgctgaagctgatttgtaatgattggcactcttcagccaggggagtgggtaggccatagccaaggatcgattccccaaccacagcaaaggcaacactcttcctccagagatcaccaagcccctcttacctccctccctccttcccaaggctggcactaaccaggtaccacattcattgttaaggaatggctgatgactgctacacgtgttgggaacctggttggggctgtgcagtttgggctggaaggagagatgccagccctcgtgctgcctctggtccctgaagtgtcacctctctcaggacctctcctctggcctgtggggttataagtgatggatagcagaaagggagaactgactcctgtcccaaatagctcctctgccacctgtcctgcagtgggcctgtgtgggttatgattctagatcctagacagaggctgggtcagctgtggatggggtggtgccttggtctctcttgactacctcgtccaaagagagcactgcccttagacaagagttgcttgtcctgctgtgggctgggcttccagctgcagacctccagttgcttggtgttcactttgctcctcttgccctctgtcttctggtccaggcagatcaggggctctggggaaactgctggaactcgaggtgaggatcagccttttccagcatcctgtgagagaccagagagagagtttggatttcatgtggggaaccctcaaggcctgtctggagaagtgacacaggatttactggggtgggctggtccaggtagctctcctgaacctcctccttccccaagctgagaagctgagagctggaggacaatatccagggacatggctctggaaaataactttttttttttaagagacagggtcttgctctgttgtccaggctggagggcagtgacataatcatagctcactgtacccttgaactcctgggctcaagtgatcctcctgcctcagcctccttagtagctgggactaccagtgcataccaccatgcctgggtgattttttaaattttttatacagacaaggtcttgctatgttgcccaggctgatcttgaattcccgggctcaagtggtcctcctgcctcagcctcccacaggatcgggattacaggcaagagcctccacgcccggccatgaaatataattcttaatatcatacaggaaaaagtcagcgggtcaagctagcctgtggcccagccacaactagctgacaaagcttcctggccttccctttaacacagttctgctgccatagttccatctataaaatgggaatggagggaaataggggaactgggagagagaacacagccttgccaagcagcaatgttagcctgatccttcctccacctagctcgccatctcgcccttggaaaatggctcctggaggattaggcagccatctgcaaggagaggggcaacctgggacaagacacccagagggtaaggattccaggaatgaagctgccatttctggttgggaggagaagaggaaacttttaagagaaagggctccattatgagcatgggttcagggccctgcattacccaatcagaacagccgggatgagcaggaggccagctcccaggaggaaggggaaccccttcataaagttcagagtggctgggtagagtgagttgaagatgccggaggccgtcagcatggccaggctattcacacaggccacagcagaaaagagagcacctgtgaagaaataaataccatactctggagtccgaaagggccatattccaactctggcaccaccacctcacagctgtgtgaccgggagtagtcacttaacctatgtctccccttcctcaccagtaaatcctgctacatcatgtactgtgacaaggattcagtaaggtcatatgtggacagtagctggcacagaggggctactaaacaaatggctgctattaaatccacattaaaagtacatgtgatctgacagaacccagcacataaaagaaaaaaaaaagt

SEQ ID NO: 30090 - DNA, 5876 bp, Homo Sapiens
caagggccccctgcgtggctaccgcagccgctggttcgtgttcgacgcgcgccgctgctacctttactatttcaagagtccgcaggacgcgctgcccctcggccacttggacatcgcggacgcctgcttcagctaccagggccccgacgaggcggcggagccgggcacggagccgcccgcgcacttccaggtgcacagcgcgggagccgtcacggtgctcaaggctcccaatcgtcaactcatgacttactggttacaggagcttcagcagaagagatgggaatattgtaacagtcttgacatggtcaagtgggacagcaggacctctccaactcccggggattttcctaagggtcttgtagccagagataacactgatttaatttacccacacccaaatgcttctgcagaaaaagccagaaatgtcctagctgtggagactgtgcctggagagctggtgggagaacaagctgcaaatcagcccgccccagggcatccaaattccattaatttttactctttgaaacagtggggcaatgagctcaagaattcgatgtcttctttccgtcctgggagaggacataatgatagtcggaggactgtgttttataccaatgaagagtgggaacttttagacccaacccctaaggacctagaggagtccatagtacaggaagaaaagaagaagctgacccctgaaggaaacaaaggagtaactggctcaggattcccctttgattttggacgtaacccctacaaaggaaagcgccctttgaaagacataattgggtcgtacaaaaatcgtcacagcagtggtgacccttcaagtgaaggcacatcaggcagtggcagcgtcagcatcaggaagccggcctccgaaatgcaactgcaggtccagagccagcaggaagagctggaacagttaaagaaagacctgtccagtcagaaggagcttgttcgactgctccagcagacagtccggtcatcccagtatgacaagtatttcacaagcagccggctctgtgagggggtcccaaaggacacgctcgagcttctgcaccaaaaggatgatcagattctgggccttaccagccagctggagaggttcagcttggagaaggagagtcttcagcaggaagtaaggacgctgaagagcaaagtgggcgagctcaacgagcagctgggaatgctcatggagaccatccaagccaaggacgaggtcatcatcaagctcagcgagggcgagggcaacgggcctcctcccaccgtggcgcccagctccccttcggttgtgcctgttgccagggaccagctggaactggacaggctgaaagataatctacaggggtacaaaacccaaaacaaatttctaaataaggagattttggaactctcagctctacgaagaaatgcagaaaggagagagagggatctgatggcaaagtattctagcctggaagccaagctctgccagatagaaagtaaatacctgatattgctccaagaaatgaagacaccagtgtgctcagaagaccaggggcccacccgggaggtcatagcccagttgctggaggatgctctgcaggttgagagccaagagcagccggagcaagcatttgttaaacctcatcttgtcagtgaatatgatatttatgggttcaggactgtacctgaggatgatgaggaagagaaattggttgccaaggtccgcgcgttggatctgaagactctctacctcacagaaaaccaggaagtctccactggggtcaagtgggaaaactattttgcaagtacagtgaacagggagatgatgtgctctccagagttaaaaaacctcatccgtgcgggcattccccacgagcaccgttccaaggtgtggaagtggtgtgtggaccgtcacaccaggaagttcaaggacaacactgagcctggccacttccagaccttgctgcagaaggcgctggagaaacagaacccagcctccaagcagattgagctggacttgctgcgaactctgcccaacaacaaacattactcctgccccacctcagaaggcatacagaagttacgcaatgtcctcctcgccttctcctggcggaatccagatatcggctactgtcaaggcctaaacaggttggtggcagtggccctcctgtacctggaacaagaagatgctttctggtgtctcgttaccatagtggaagttttcatgcctcgagactattatacaaagactcttttaggatcccaggtggaccagcgggtgttcagagaccttatgagtgagaagctgcctcggttgcatggccactttgaacagtacaaagtcgactacactctcatcactttcaactggtttctggtggtatttgtggatagtgtcgttagtgacatcctctttaaaatatgggactctttcctttatgaaggaccaaaggttattttccgttttgctctggcactttttaagtacaaggaagaggagattttgaaattgcaagattcgatgtctatatttaagtatctccgctacttcactcgcactatccttgatgctagatccggaaccgacgcgcctaccacttggagaaagtccggctggagctgaccgagctggaggccatccgtgaggacttcctgcgtgagcgggacaccagccctgacaagggtgagctggtcagtgacgaggaggaggatacctgagtgggctcgggatgctgctcttccttccttcacaaccaaagtgtgcccaaagggtgaaagtgcacttaaaagccagaatgtaacgtgtgtgtcctctggggatctgctgggcagatgtcccaagccaggctgcccttcctcatttcccactgtgcggggggcaggggtgggaggtctaatctgtttacaaccatttccgtgccatgcttttggttacacgtatctcagtcacgctttctgcctggttggtggatcctcaggcttaccagtggctatttgcaagagcctgtttccagcctccgtcagcctgtcggtgctctgaccctctgaaaccttgctttgctgggcatctccccatattctctctcctgtacatagtgggcagtggtgtgtggttttgaatggcagtgctataaaggatgccagctgtgctttaggcacctgtaggccagagggttgctgcctcaggcataaggttggtatgaaaaggggctgccttagaaaagcaggcacatcccttgttcagaaatggccactgtaggaaagcctgtgaacctcccaccagtggctttaagctgccagccatgccccatttctagaatagcctttgctcttccacacgcaacccttccatcagtgtcttccagcctgcatggggagggcctggctgcccagacacccaccctcacttctcatggccagcctgtgtttgcagatcactgggctgctctgtccccagcttgccccgtgccaggcatggctctgtgagattctgtggaatgcccttcttgacttgtggaaatcattcaccaagtacgatgggatgggattccaagtaaacagtggaccgtcatattgcaaagcaggcccacgcctgggctggccttggttgaggggatggaggaatgttttcgggggtgctttgcagggcagtggtgcagccgcagcgtgaacgctcttggacagctgaaaaccatggcctccttggggatggccagtgctcctggtgtctccacctgcctgggttgtgcaggaggccggctgccagtgcctggggctgggaaacttttttgcttggggcaggcttgggtgagctctcccagatgtgtgcccaccccaccactgcctggaacatccttgttctctgccaggatgcaggggcactgttgcctctgacacagcagtttctgggaactcagaggactgcctttctgaaggctggggagaggctttgagcaaggagcttgtttttgcttaatcgctctagaccatccctgatgcgtagatgtgagaggatgttttctggcacagtgttatgaaaatacaagataaatgatctcagtggaatgtttcatattacccgaaaaaaactggaaatcatcctttgttgtgaacacactgagactaagaattgaagcaatgcagttttaagaagtatttttcctattttttgctgtcaactttttggcaatgccacggcaaagttggtgtttcagcacatgctagagtgagctccggcttcgtgtctttaaccaactccactaatgtttcactgggtagacggagctggcctctatatttagccagaagcctttgcctcttttcaggcatcaaaaatgggttttgtcattgtctttgtctttgagagcagcagtttgaggtctgactccttcagttgtcctgtgagctgggcgttgcagtctgctcgaatcaagtgttggaaaccccccacccctcagcccatcgtgaaacgacagctgtcagcctggggggcggctgctgaggaggtgcagcaggaatggggctgggccctgaggttttactttccgagccaatggcccctggaacatgccagcacacactgccatgtcctggggctaagagctgcctttagggacaggctcgtgttgtccagtttgccctgagagatgcacctgaccaggggcccgtcgtggctgcaacccacggtggtatgttagtgtttccaggcagttgtcagcagctgccgggtagtgtgtgtgtgcgacagcaggagagttcctggaggaaagggactggggacactttctcagaggttctcctgcctggaatcaagtgatgcgtgtccagaaggcaagagagggcggctccgcctggttaaagtttgggaacgggacggagccaactcctccttccaggactgtgggccccactcttttgcgctaacacttcccctccctcgggtcactgaggaaagagctgctctgtcccctccagtgccctgaaggtccctggcctccactggctgccatggcagggggcccttctgacaggggctgccccaagctgctgttcctcctctgaaccttcaccccaacacccagcccgtggcccctgcaagggggaccctgccagctgggaaacccaaaggcctgtccaaacgtgcgcaccaggaccgaggggagctccctcccaacacctgctaggaattgccaacttttaaatggatggggttttttatgggttgaacctctgttaatacttttgtacactctcactacagtttatatttttataggctattttctcaaggtgtttctagattccacatatctattttatataacaagttattatgttatgtgtgtgactcccttgtgtgtatctgtgccagcctcagcctccgagttgcttttccctctggccctgactctcactgactcaccgatgtgatgtgcaggcccacttcttaccccagatagcctcgggcgctgcctgtagtcatgctgacagctgtacagtagccgccaagactgctgacagctggagacggttctggtttcaactacggtatattgatatcggaagtattctagacagatcctcggttgggttttctagctacatgtttgtattgcacagatccccacctgccatcctatagtgttgtcttcctgtgtgttccggggcttctgggcagctgggcctgcccggggaagtccttgcaggtgggaggccatacagagacccactgtgtgccactgagcgtcccactgctgctgggcaactggaggactgcagggggcgccaggtgactctctccttttatatcacagcagctcctgtgctgaccttcaagttacgttttggaactgtaatactaaaggaagaaataaactactaatttgtataat

SEQ ID NO: 30091 - DNA, 3578 bp, Homo Sapiens
gcagacagacatcggcacgtatggacggcgcgagccggtactgcgttccggaggagccatccggcgtcacaggctgtgctggggaggtggggtgaccgtcctcagaaacccccgcgggcggggcgctgcacacacgtccacctatagggtgtgtgtgcgtgcgtgaggtgtgcagcccctgtcaggatctggcgagagaagctgaccgggatggaggtcagaggatcgacaagaccatgctggcaagtctgaaggtcaagaagcaggagctggccaacagctcggatgcgaccctcccagaccggccgctctcccctcctctcacggcacctcccaccatgaagtcgtcggagttctttgagatgctggagaaaatgcaggggatcaagcttgaagagcagaagccgggaccccagaagaacaaggacgactatatcccataccccagcatcgacgaggttgtggagaagggaggcccgtaccctcaggtcatcctgccacagtttgggggctattggatcgaggacccggagaacgtgggcaccccaacatcgctggggagcagcatctgtgaggaggaggaagaggacaacctcagccccaacacatttggctacaagctcgagtgcaagggtgaagccagggcctaccggaggcacttcctggggaaggatcatctaaacttttactgtaccggcagcagcctggggaacttgatcctgtccgtcaagtgcgaggaagcagaggggatcgagtacctccgggtcatcctcaggtccaaactgaagacggtacatgagcggatccccttggctggactgagcaagcttcccagtgtccctcagattgcaaaggctttctgtgatgatgcagtgggactgagattcaatcctgtcctgtaccccaaggcctcccaaatgattgtgtcctatgatgagcatgaagtcaacaacacattcaaattcggagtcatttatcaaaaagccaggcagaccctggaggaggagctatttgggaacaatgaggagagcctagcttttaaggagttcttggacctgctgggggacacgatcacactgcaggatttcaaaggtttccgaggaggcctggacgtgacccacggacagacaggggtggaatcagtgtacacaacattccgggacagggagatcatgtttcacgtttccacaaagctgccatttaccgacggagacgcccagcagctccagagaaagagacacattggaaatgacatcgtggccatcatcttccaagaggaaaacacgccgtttgtcccagacatgatagcctccaatttcttacatgcctacatcgtcgtgcaggtcgagaccccaggcacagagaccccatcctacaaggtctctgtcactgcgcgggaagatgtgcccacctttggtccacctctgcccagtccccccgttttccagaagggcccggaattcagggagtttctgctcaccaagctcaccaatgccgagaacgcctgctgcaagtcggacaagtttgcaaagctggaggaccggaccagggctgccctcctggacaaccttcacgatgagctccacgcccacacacaggccatgctgggactgggcccagaggaggacaagtttgagaatggaggccacggggggttcctggagtcttttaagagggccatccgcgtacgcagccactccatggagaccatggtgggcggccagaagaagtcgcacagtgggggcatccctggcagcctcagcgggggcatctcccacaacagcatggaggtcaccaagaccaccttctcgcctccagtggtggcggcaacggtgaagaaccagtcacggagtcccatcaagcgacgctcggggctcttcccccgcctgcacacgggctcagaaggccagggcgacagccgggcacgatgtgacagcacatccagcacacccaagaccccagatggtggacactcctctcaggagataaagtctgagacctcatccaatcccagctctccggaaatctgccccaacaaggagaagcccttcatgaagttgaaggaaaacggccgtgccatctcccgctcctcctccagcaccagcagcgtcagcagcactgcaggggagggcgaggccatggaggagggcgacagtgggggcagccagccgtccacgacctcacccttcaagcaggaggtgtttgtctacagcccgtccccgagcagcgagagccccagcctgggggcagctgccaccccgatcatcatgagccggagtcccacagatgccaaaagcagaaactccccgagatcgaacctgaaattccgctttgacaagctcagccatgccagctctggtgcgggtcactaatgtgaaagtggagtccttcgcctgtccaagggaatcccctcttctgtcctggaaaaggctcctgtaccagcagtttgggagtgccgtccacgaccctgacagtcccagccctgctgccccatggccacgtgcccacagatgtgctgttggtccaggtgtcccagtctggccacagccctgcctccgccctcacctacatgccctcccagcccctcccatctctggacgaggcctccttcctcaggttcctcctgctcctgacctcccagtgtgatgtccgggtcctttatcatcctattcatcctggagaggaaaagtgtcgggcaaagggggatctggggggagctcagcagtgactggggagctggtctgcctcagagacagagtagggggtgggagcagagcctcggtgagggtcttggccacagggcagtgccttcctgaacgtggcaggctttactaccaggaacgcactcggtggtggaggccccatgttcccaggagccaagattcgtagcatccttgaggccatcctgataaaattcggcgctattgcccccgtagctctggagctctaaaccgtctatctgcttctgtgctgaacgcctttcccatctgctgacgtaggcccagggctgccctgcccctgctgccagtgtaccgtgagcggggctccagccagttcaagctcagagccagagctggacgggccagaactgcgctgcacacttcctggactgaggcggggactttgggtcccacccggtttctcctgattatggctgctgtggggtgaggggagggaggggcagccccgaggcagtctcttccctttgagaagatattttcctgctccttagcatgcgtgcagctctctcctgttttgggtgttacccttggacactccagctcggggactgctggcgtgtgagtgtgcagattcccctgtgtggtcgaacctaagaactgtggcttggaagtgatgctccatgtgacgacgactttgctttctttcctcttagtgaggaggcgattcgtagatcccaactgcctatgtaatgtaaataatgtacatttaatttattgctatggtagcacattgtatttgttaatgtacaaaacaaattctaaaaggttgacaaatgtatattttgttgcttaaatgtgtctttgcagaaattgacaataaataacatattttgtgtc

SEQ ID NO: 30092 - DNA, 6794 bp, Homo Sapiens
gtgagcggcgctcggggcgcgctaggcggggagccgagccgggctggcggcaggcggacggggcgggcgcgtgcggcgcgagccgggcgctgaggacaagggccgctggtagggccggccggccggcgggcggagcgccgccgccgacgcacacgaggtgaccaggcattgatgcacccccaggaaggccacgcgctcaggagccccccccgccgctggctgctgctcacatggtgtctgggcccttggcactccggtggtgcgcgtgggcagggcgcggggacatggggcccgacatggagctgcccagccactcgaagcagctcctgctgcagctgaaccagcagaggaccaagggcttcctgtgtgacgtcatcatcatggtggagaactccatcttccgggcccacaagaacgtcctagccgccagcagcatctatttcaagtccctggtcctgcacgacaacctcatcaacctggacacagacatggtcagctccacagtgttccagcagatcttggacttcatctacacaggcaagctgctgcccagcgaccagccagccgagcccaacttcagcaccctcctcactgccgccagctacctccagctgcccgagttggcagccctctgccgccgcaaactcaagcgagccggcaagccctttggctctgggagggcggggtccactggcatggggcggcccccccgcagccagcggctgtccacggcctctgtcatccaagctcggtatcaggggctcgtggatgggcgcaagggggcccacgccccccaggagctcccccaagccaaaggctcagacgatgaactctttcttggtggctctaaccaggatagcgtgcaaggtctgggccgggctgtctgcccagctggcggggaggcgggtctggggggctgcagcagcagcaccaacgggagcagcgggggctgcgagcaggagctgggcttggacctgtccaagaaaagcccacccttgccccctgccaccccaggtccccacctcactcccgatgacgcagcccagctgagcgacagccaacatggctcgccccctgcggcctctgctcctcccgttgccaacagtgcctcttattctgagctggggggcacccctgatgagcccatggatctggagggggccgaggacaaccacctgagcctgctggaggcgcctggtgggcagcctcggaagagcctccggcactccactcggaagaaggagtggggcaagaaggagcctgtggctggctccccctttgagcggagagaagcagggcccaagggtccctgcccgggagaggagggtgagggggtcggggacagggttcccaatggcatcctggctagtggggctggccctagcgggccctatggggagcccccctacccctgcaaggaggaggaggagaacggcaaggatgcaagtgaagacagtgcgcagagcgggagcgaggggggcagcggccactccagcgcccactacatgtaccggcaggagggctacgagacggtgtcctacggggacaacttgtatgtgtgcattccctgcgccaagggcttccccagctctgagcagctcaatgcgcacgtggagactcacacggaggaagagctgttcatcaaggaagagggggcctacgagacaggcagtgggggtgccgaggaggaggccgaggacctgtcagcacccagtgcggcctacacggctgagccccggcccttcaagtgttcggtctgcgagaagacctacaaggacccagccacgctgcggcagcacgagaagacgcactggctgacacggcccttcccctgcaacatctgtggcaaaatgttcacgcagcgcggcaccatgacgcgtcacatgcggagccacctgggcctgaagcccttcgcctgcgatgagtgtggcatgcgcttcacccgtcagtaccgcctcacggagcacatgcgtgtgcactcgggcgagaaaccttacgagtgccagctgtgcgggggcaagttcacccagcagcgcaacctcatcagccacctgcgcatgcacacctccccctcctagaagccaaagacccgcgggcgccctctgccaccttgctccccgggaacccatggaaggagaagcgaggtgatgcagcagcaggggcaagaccctgggtccagtggaggctccgggtggcccctctggcccccactgcccacacccagagctttaatggacagtccgtaccaagcagagccgagaggagggaagccaggggtcccagcccgtctacctccccatcccacccaggcccccagctccccgcgggggccaccgcagggcctgtgggctgggtcacgtgggtctcgctgggacctggtccctttgttgcaggcggcttggagaaagggcagtgggacgctggccacggccagggtggtgtcgggagcaggcctcaccccgctggccgtgtctgtgtgtgtgcacgtgtgcttgtgtctgtgcgggcgcgtgcagccctggttctgcagggaacaggtgctgggggtgcagatccctccctccttgagccagggtggcactgttcactggcgctgggacagtcagggtgaccccaccgcctacctctctacaactaaagagccctctgggcctgtgttgctgttattcctactgatctgttcctctgtttttctttttgatttttgttttttaaaccaaaacagacaatagcttattttctttccgccccctccggggctgagcctgggtctgaagactgaatgtaacaggggccgctggcactcctgcgcgtcccccggctctggcgctgcaggggtgtcggcgcgccacctctccaggccccagaagcccttcttgcccaaaggcttccctggtccctgagccctgcctcggctgcctcaggggagagtgcttttcctgtagtttccaaggaatattctttgtttagaggtacttgttttttattaagagaaaaaccagtgtaacgtttatgtgactgtttgaactggaaggtctggggttccggggggtggggggaggctagactcaatgccggggccgtcggtactcttgttttcatttgtgtgtgcgtgcgtgtgtgtgtgtgtatgtgcgtatgtgtgtgtctatgtgtggtgtgtgccgtatgcatgggcagatgtttcgctttccctccttcctcgctgaacaaggtggagacttctgaccttttgctacctcttgaattcatgacaacgatatgttggtgactggcagtggaagcccttgacactcttgttttccttcgcttagcacctaggaagtcgtgtgcaggagccagcagggcgccaagtggcccagtgcctgcagctcacctgtgggttttccctttgagcctttggccacatccacctcgaggggaccctggcaccccgggcacacaaacctctgtggtataggtgaggggtgtgaggccccagcctggagccaggcactgggtgctgacaggggaaccatgaggagggtggcaggtctttgcagctcccggccagggtgaggcggaagtgagccctcatcctgccactcctatcctccattcctgcaagagttttaagcttgagagagctgaccacagggccccccggggaacagggatggcacttccctgagcagtcctggcccccggccactgtctcggggcccacctctcgcccctcatcttggtaattagccagcctcagatacttctgtgggccctgaagtgggctctcaaggtcagaccaaggttgctgatctcagtcccactgtcttcagccagctgaagctgtggggctgggctggcagcctttattgtcatcttgcttcaccatttttttttctctctcttttcattctattttaagtttagaccaaaaaaatacagagtcatcccctacccccacccctctagagaccctccagctaaaaacagagcctgagttcagggacccaagtggtgagcggcgtcttttgggggtgagggagcttgggtagatgaggctcctggctgagccctccctgtggtgatcccagcctaagatggcccctcttccctcctggtgggagacagaggactggaccctgggtctcaggttccagcaagtcaggctagggacctggggggaggagacccatggacttcacccatactcagtgagggggctcctgccgtcctgacgccaccccgccccatcagcacttaagccacatgacacaaagtctgtaccgcacgggaaatgttcacgcgcctggccgtgtgcatggcctcccgggctgtgggcagccgcatctgtgaggtgactcgtgaaagtaggtgattcctttgcagaacttcagggactgggagcagaggcccctcactcaacgacgtttgtgcgacatagtattgtatccaccttagtattgtatcgagccttttctgtgttttaatgagaaagcagaacactagtttcctatttaagactttaagggtttgtggggcggggcgggattaacacaacatttggctttgttttctttttcctttgatttccacatcaggtgtgtgcgagtgtgtgtgtgtggagatgttaagagcctcacaaggaaactgggttattggaggccaaggcggcttacagttctctgcgttcgtcacttaattcctgaatgtttcagagaaacaggaatcagaaaatagcagatatcatgtaggaaagagaggataaacaaagaaaaaagaaaaaaaaataagctcatacccaaattcacaaagcctattttttaaaccaaagcacattttgaatgagtatggaacctccatgggctcagaaaaaagatgctaatatatttatctcattgtttacataagcttttacagtttcagacctcagcagctgtaaggccagtccagggaaccctcccctgctgctggaaacccttctgagttggccctggagtggctcacgggcagagaagggtagccctggggctgggggagggattggaagcctccctggagtcacctgagccctcgtccccattcccagggcccctccaagcccagctggcaccaaagagcttgggcccgtgctgaccagcccccaaggccctctggccggaccatgctggtcctgaccagctagcctacgcggggatggccgtcagttctggccacaggacccgagtctgggcttgggtccccctgctgctctgcccgtgacccttggggatgggttgatgcgagggtcccactcaagccaaaaagccgggacctttgcgcagctctgtcgactctggtgggtccccactcctggggccccctaaccccaccccaggcagcggaaggggctgactgggtctggtccttaccaacatagacggtgcaaacactcttaacagtgttgtttttgtatcaatatgtttgtgcagtgatgaatgtatttatttctcagacttggggcgagtgagcgggtggcaggccgggctccgccactgcatgctcccgccggaccgagccccagcaagggctcctccaggattgcaaaaaaaaaaggaagagaaaagatgaacctttaagcaaataagaatctcagagactcgcagcatagccatacacctcagcctgtgaaatgaacgatccggaccctcaccaactttccccacctcaggcagccctgtgtgtttaccgttcatcaccactcgggggcaccgggccgcccacccactcccaaaatccgtcagtattcactggacctcaggccctgtgcaggagtgcgatccgggctgggccgctgggcaggctgaccccctgccctcctgcggccatcctgagttggggtgaggcctgggcagccggagggcagggctcagggagcaggaggctgcatccgtccacccccaggcgtgggggacaaaagccaaaggtgccaggccttagagcagacaagggctctcagccctggcatgccccctaaagggaccaaggtcctcctatttcccagaaccccgttggggcagatgttactgaacctgtgaatcagacgccaggagtgagggctggggagggacctaactggagcctcagtctgacattccacgccggggtgggggtgggcatgagcggtgggaactgaggctgcccaggacccccttcctaggatgccccggcttcagtcaccccactttaactttctaccaggaccccctccccctacctcaccttgctatttattgctgtaatttattgacctcaaaaatgctgcataacagacctcactggggcagggaggatccccagggctcccaccctccacttggcgggccccgtggggccaggtgctgaggggagcctctctaccccacccatcactagcttccctctgccctctcccaccccgggggggacccaggttgggcactggctcatttctcgcaaatacctcgaaggggaggggggagggatggggttatagctgttttgtttaattggaactggaagagggatcatgttttgttttatgcccttcccagaaggggggagggacaccgggatcgcactcctgtactggccaccgccgctgtcacttgtcacattgagttcatgtcccttgagagtttgtataaattcaggtcagagctgcagctacacagctgcccagtgtcatagaaaagcaattcaccaacgactgatctctccattcagaagtgtgcagtcttaaatgtacagcgataagaaactgttattttatgatcttttcattaaaagcttgattg

SEQ ID NO: 30093 - DNA, 6618 bp, Homo Sapiens
cggcgtctctctcccccgcgccagctcccgtacacggagccgcattccttggcccccccacccccctccctcggggcccccccgcccccctcgggaaaaaaatccaccccgaatcactcgaacccgagggaggcttcctttcacccttggggagacgagctttcaacggttacctcttcttcgtctccccccaagcccccgtcccctccccctgctcccacccccttctggcgccgggtgtaaggtccctttaaggcgacggcgccttcctcgggtcagactaccggcggcgacgaccacaggagcatggcggacaccgacctgttcatggaatgtgaggaggaggagttggagccatggcagaaaatcagtgatgtcattgaggactctgtagttgaagattataattcagtggataaaactaccacagtttctgtgagccagcagccagtctcggctccagtgcccatcgctgcccatgcttctgttgctgggcacctctctacatccaccaccgttagtagcagcggggcacagaacagcgacagtacaaagaagactcttgtcacactaattgccaacaacaatgctggcaatcctttggtccagcaaggtggacagccactcatcctgacccagaatccagccccaggtctgggcacaatggttactcaaccagtattgaggcctgttcaggtcatgcagaatgccaatcatgtgactagttcccctgtggcctcacaaccaatatttatcactacgcagggatttcctgtaaggaatgtccggcctgtacaaaatgcaatgaatcaggttgggattgtgctgaacgtacagcaaggccaaacggttagaccaattacactagttccagccccaggtacccagtttgttaagccgacagttggagttccacaagtgttctcccagatgacccctgtgaggccaggctccacaatgcctgtgaggcccaccaccaacaccttcaccaccgtcatcccggccactcttaccattcgaagcaccgtcccacagtcccagtcccagcagaccaagtccactcccagcacttctaccactcccactgccacacagccaacctcactggggcaactagctgttcagtctccaggccagtcaaaccagaccacgaatcccaagctagctccctccttcccctctccacctgcagtgagcattgccagctttgtcactgtgaagcgacctggtgttacaggcgaaaatagcaatgaagtggccaaattggtgaatacccttaacaccatcccttccctgggccagagtcctgggccagtggtggtgtccaacaacagctctgctcatggctctcaaagaaccagcggacctgagtcttcaatgaaagtgacctcttccatcccagtatttgacctccaggatggtggacggaaaatatgtccacgatgtaatgctcaatttcgtgttactgaagctttgagaggtcacatgtgttactgttgcccagaaatggttgaataccagaagaaaggaaagtccctggattcagaacccagtgtcccatcagcagcaaagcccccatcccctgagaaaacagctcctgttgcttccacaccctcttctacacctattcctgctctgtcaccgcctaccaaagtaccagaaccaaatgagaacgtgggcgatgccgtccagaccaaactcattatgcttgtagatgacttctactatggacgggatggtggcaaagtagcccagctcacaaatttccctaaggtcgccacatctttccgatgcccacattgtaccaaaaggctaaaaaacaatattcgattcatgaaccatatgaaacaccacgtagaactcgatcagcagaacggtgaggtagatggtcacactatctgccagcactgttaccgccagttttccactcccttccagcttcagtgccacttggaaaatgttcatagtccctatgaatctactaccaagtgcaagatctgtgaatgggcgtttgaaagtgagccactatttctccagcatatgaaggatactcataagcctggagagatgccttatgtttgccaggtgtgtcaatatcgctcctcactctactctgaggtagatgtccattttcggatgatccatgaggatacccggcatctgctctgcccttattgcctgaaggtcttcaaaaatggcaatgcattccaacagcattacatgaggcaccagaagagaaatgtttatcactgcaacaaatgccggctgcagtttctctttgccaaggacaaaattgaacacaagcttcaacaccataaaaccttccgtaaacccaagcagctggagggcttgaaaccaggcaccaaggtgacaatccgggcttcccgagggcagccacgaactgttcctgtatcctctaatgatacacctcccagcgccttgcaggaggcagcaccgctgacctcctcaatggaccctctgcctgtcttcctttatccccctgtccagcgcagcatccagaagagagctgttaggaaaatgagtgtcatgggccggcagacatgcctggagtgcagcttcgagatcccagacttccctaatcatttccctacttacgtacactgctctctgtgtcgctatagcacctgctgttctcgagcttatgccaaccacatgatcaacaatcatgttccacggaagagccccaagtatttggctttgtttaaaaattctgtgagtggaatcaagctggcctgcacttcatgtacctttgttacctctgtgggcgatgctatggccaagcatttggtattcaacccctctcacagatccagcagcatcctgccacggggactcacttggatagctcactcaaggcatggccagactcgtgaccgagtgcatgaccggaacgtgaagaatatgtaccctcctccttccttccccactaacaaagctgccactgtgaaatctgcgggggccaccccagctgagcctgaagagctactaactcccttagccccagcactcccatcaccagcctcaactgcaaccccaccaccaacccccactcacccgcaggctttagcccttccaccgctggctacagagggagccgaatgtctgaatgttgatgatcaggatgaagggagcccagtcacccaagaacctgagctagcatcaggtggtggtggtagtggtggagttggcaaaaaggagcagctgtctgtgaagaagcttcgagtagtactgtttgctctatgctgcaatacagaacaggcagctgaacacttccgaaatccccagcgacgtattcgccgttggcttcgacgtttccaggcctcccagggggagaatctagagggcaaatatctgagctttgaggcagaagagaaactggctgagtgggtgctaacccagcgcgaacaacagctacctgtaaatgaggagaccttgttccagaaggccaccaaaataggacgttctttggaaggggggtttaagatctcctatgagtgggctgtgcgtttcatgctgcggcaccacctgactccccatgcccggcgagctgtggcccacaccctacctaaggatgtagcagagaatgcaggactcttcattgattttgtacaacggcagattcacaaccaggacttacccttgtctatgattgtggctattgatgagatctctttgttcctggatacagaggtgctgagcagtgatgatcgaaaggagaatgccctgcagacagtgggcacaggggaaccttggtgtgatgtagtcctagccattctggcagatggcactgtccttcccaccctggttttctacagagggcagatggatcagcctgctaacatgccagactccatattgctagaggcaaaggagagtggctacagtgatgacgagatcatggagctgtggtcaactcgagtgtggcagaagcacacagcttgccagcgcagcaaaggcatgcttgtgatggactgtcatcgcactcacttgtcagaagaggtactggctatgcttagtgcctctagcactttgcctgcagtggtcccagcaggctgtagctccaaaattcagccattagatgtatgcatcaaaagaactgtcaagaacttcctgcataaaaaatggaaggaacaggctcgggaaatggcagatactgcatgtgattctgatgtcctgcttcagctggtgcttgtctggctgggtgaagtgctaggtgtcattggggactgtccagagctagttcagcgctccttcctggtggctagtgttctgcctggccccgatggcaacattaactcacctacaagaaatgctgacatgcaggaggagctaattgcctccctagaggagcaactgaagctgagtggggaacattctgagtcttccactccacgacccagatcatctcctgaagagacaattgagcctgaaagtcttcaccagctctttgagggtgaaagtgagaccgagtctttctatggctttgaagaagctgacctagatctgatggagatttgagtgttggggtcatgagggggtgtggagtgagggtgggaacatgtgagggagggtaaaggggcttagggaaaagggggcataccaggtggggtatttggtttctattttttaattttataccaccactcccccctgaagttgacttacacttccctgtggatttgtggattaattaggaaaaccaatagtaatcacgtctgagccaaggagctggcccattggtcattcacttctgctaaaaacaggtttttgtgactttttttttttttaaatttaaatcactgtgtttggtatttttctgacaaaattaagaaaaagaaaaaaaattatttgtgggcaaatgttaaatttttttgtttccccttttacctcaattgtatcatagtactgggtttttttgtttgttttattgtgtggccaatgtctttgggcatgatgctatctaatcattgttaatgtgagaacatttctgaagatgggaaagacaaattatgtagctcacaaactggtttattatatatatggataaaaaacttttttcattgtggtcttaacacttttatataaaaatgaaaatggaaaaaaagtcccactgaactctctcttccttctccttttctttccttccctctccagagatgttggtttctacagcaaccctagatataaaattgtggctttaaaaatgcatgaaaccacctttaattatccagaatgaatagatttgtcttttcctcaccaccttccctccaaaacatgacataaacaatattttttgcacttgtgatccttggcccctttccccattctcaacaccatccatccctctggacaaaggatcatacaggtgttattagcaagcaagagatactgaagcgatcaaacagttttagggtggaagccattcccagtttgagtcttcatcctgtaagcccccaggggcagtccctgctttactgaacttcatcctgttagatggagagcatgcctgtttaagggattactggtcctacagccaggagctaattgttcaagaagtgttgaactttaaaaagacaagaccacttgttgaaatccagcgtgctctgtggctttcccctatttctcttaatacttagggaagaatctgacaggaagaagcgcacaggggtgtgcacaaagaaaatgacatgaatctttatttttcactgccagcttcaaggaaagaaaattttttctacaatttgcatgagggatttttttaattgtatgtactcatggttgtaaaccaaaacgtactgtaccgtacagagaaaaggagcaaaaaaccaagtcttctgtttatcctgaggctttccacaatgttcccctcctgtgagccaaggaggcaaactgcacaagcttgtaaatggttcgtctttaaaatgtacataagtggaacatttaataaaatgaggggaaatggatttataaacttgttttttttctaggtgaccctgtttaataggctttcacagactggggaatgctcaagatgtgatgggcctggtggtacaggtgtgacatttgttaccacccatttctcccaccccaccctgcttttttgtttgtttgttttttcatcccccagcacactataatatagtgaactggaaaagtcccttccagaaacagcttggccagctttgtgaacctttgacatctgaaaacaaccaaggatccatctgggcttctcttccccagctttttgcctgatgccattttattgacagacaatggactttgaagtcagcctttgcctttgagaaagttcaagaactatggttggtcacgtctatctacaacctaatcctactctttggtagtctctgcagcagccacagccttagcagagctggggttcctgtcttctgcacacgattgactttcttgatgggtaattttttttaagattataccaacagtggatcagctgggttttggccaggaagttgtctttgtggactctgcctgcatggcttagtagtagaaggaaatttttttttggttttgttttttataattcagtttaatcaataaacatgtatttattgactgtta

SEQ ID NO: 30094 - DNA, 5776 bp, Homo Sapiens
ggagtccttgcagcccaaagcatgaggaggtccctgtaggattctggactgaagacgttcttgtcaggtttggggcgtgaggaggttcctgtcagttggggaagcgttaagattcctctatcgtccagagaggacgcgtgctgccgcctcccgcccctcttgacacgacgaacctggccggccgcagaacgctccagggccgagcgaagatggcctcggtgccggtgtattgcctctgccggctgccttacgatgtgacccgcttcatgatcgagtgtgacatgtgccaggactggtttcatggcagttgtgttggtgttgaagaggagaaggctgctgacattgacctctaccactgccccaactgtgaagtcttgcatgggccctccattatgaaaaaacgccgtggatcttcaaaggggcatgatacacacaaggggaaaccagtgaagaccgggagccctacgttcgtcagagagctccggagtaggacttttgacagctcagatgaagtgattctgaagcccactggaaatcaactgaccgtggaattcctggaagaaaatagcttcagtgtgcccatcctggtcctgaagaaggatgggttgggcatgacgctgccctcgccatcattcactgtgagggatgttgaacactatgttggttctgacaaagagattgatgtgattgatgtgacccgccaggctgactgcaagatgaagcttggtgattttgtgaaatactattacagcgggaagagggagaaagtcctcaatgtcattagtttggaattctctgataccagactttctaaccttgtggagacaccgaagattgttcgaaagctgtcatgggtcgaaaacttgtggccagaggaatgtgtctttgagagacccaatgtacagaagtactgcctcatgagtgtgcgagatagctatacagactttcacattgactttggtggcacctctgtctggtaccatgtactcaagggtgaaaagatcttctacctgatccgcccaacaaatgccaatctgactctctttgagtgctggagcagttcctctaatcagaatgagatgttctttggggaccaggtggacaagtgctacaagtgttccgtgaagcaaggacagacacttttcattcccacagggtggatccatgctgtgctgacgcctgtggactgccttgcctttggagggaacttcttacacagccttaacatcgagatgcagctcaaagcctatgagattgagaagcggctgagcacagcagacctcttcagattccccaactttgagaccatctgttggtatgtgggaaagcacatcctggacatctttcgcggtttgcgagagaacaggagacaccctgcctcctacctggtccatggtggcaaagccttgaacttggcctttagagcctggacaaggaaagaagctctgccagaccatgaggatgagatcccggagacagtgcgaaccgtacagctcattaaagatctggccagggagatccgcctggtggaagacatcttccaacagaacgttgggaagacgagcaatatctttgggctgcagaggatcttcccagccggctccattcccctaaccaggccagcccattccacttcagtgtccatgtccaggctgtcactgccctccaaaaatggttcaaagaagaaaggcctgaagcccaaggaactcttcaagaaggcagagcgaaagggcaaggagagttcagccttggggcctgctggccagttgagctataatctcatggacacatacagtcatcaggcactgaagacaggctctttccagaaagcaaagttcaacatcactggtgcctgcttgaatgactcagatgacgactcaccagacttggaccttgatggaaatgagagcccattggccctattgatgtctaacggcagtacgaaaagggtgaagagtttatccaaatctcggcgaaccaagatagcaaagaaggtagacaaggctaggctgatggcagaacaggtgatggaagacgaatttgacttggattcagatgatgagctgcagattgacgagagattgggaaaggagaaggcgaccctgataataagaccaaaatttccccggaaattgccccgtgcgaagccttgctctgaccccaaccgagttcgtgaaccaggagaagttgagtttgacattgaggaggactatacaacagatgaggacatggtggaaggggttgaaggcaagcttgggaatggtagtggcgctggtggcattcttgatctgctcaaggccagcaggcaggtggggggacctgactatgctgccctcaccgaggccccagcttctcccagcactcaggaggccatccagggcatgctgtgcatggccaacctgcagtcctcatcgtcctcaccggctacctctagcctgcaggcctggtggactgggggacaggatcgaagcagtgggagctccagcagtgggctgggcacagtgtctaacagtcctgcttcccagcgcaccccagggaagcggcccatcaagcggccagcatactggagaaccgagagcgaggaggaggaggagaacgccagtctggatgaacaggacagcttgggagcgtgcttcaaggatgcagagtatatctatccttcactggagtctgatgatgatgaccctgctttgaaatctcgacccaagaaaaagaagaattcagatgatgctccatggagtcctaaagcccgcgtgaccccaactctgccgaagcaggaccgtcctgtgcgtgaggggacccgggtagcctctattgagacaggtttggctgcagcagctgcaaagctggcccagcaggagctacagaaggcccaaaagaagaaatatatcaagaagaagcctttgctgaaggaggtagaacagcctcgccctcaagactccaatctcagtctgacagtaccagcccccactgtggctgccacaccacaacttgtcacctcctcctcacccctgcctcctcctgagcctaaacaagaggccctgtcaggaagtctcgctgaccatgagtacaccgctcgtcccaatgcctttggcatggcccaggcaaaccgcagcaccacacctatggcccccggtgtcttcttgacccagcggcgcccttcagttggctcccagagcaatcaggcaggacaaggaaagcgtcccaaaaagggcctggccacagcaaagcagagactcggccgtatcctgaaaatccacagaaatggcaaactacttctgtgagccctcctgtgtcccacccctcacccctttacccccattgccttctccattgtcaactcttggggcactcctggatcctatctgccctggacaaggtgctgaggtgcattgtcctgctttcttgggacttaccaaaggcacggacccctccaccgactccttctagttcccttccccactttcactagagcatcctgcctgccttctccactgaggagcaggtaaatgggagaggtttccagctgactagaaccctcttttctactcgtccaaaccactcccgtcacctgccttgtctgttctttattcttcatcccccgctagagctggaaggcaggatgaggagaggtatgaaggagcctgagccatgaagtgggaagcccagtgcttgacactttctgcaactctagccctatatccagaagcctgcccacctccacccattctgtttgccccatttccccagtccagtggacatgccccacctccagacttgctcatgggagaaggctgtggtctctgccccctcttgccaaatgcttcatggaaatgaagaggaaggcctagagcctccttcctgccccactgtgggccatttccagaagtggcctagaaatgccaacttcacttacctttcaaaagaaaggtgattcctatcacttgtcaaggtagggagaggtcagatgcccaagcctttgaccacggttttgtagcctgttggaggaagctacttttagctggctacacatgaggccacttgttttagggtgagctccagggatttgcctggattttgaaatcatgtagaacattatccacgtggctgtggctgtggctgtggctgggccctggcaggtggaaaaccatctcccagaaacctgaaagcacctgccaatgacgcagataaccctggccctacagcctgcttgctccgcctataccacagagcacagcctggacattatggagggtgtggcgggacggcccacacctgggtcctccgtcgggaacttttcatgcttctttctccacctgaggtcttggtctgaagaagacctcaggactcacatcttcactcctgggcctttgcacttccagacgacaggtcatcgttcaagcagaatgcagacaggccattcacgagcccaagttgaagagaagagacgcccatccgtgaaggagcagaccatccatccgatcctccccttcccctgtccttccttcgtggattgtctccattgtccagacagtgcccccacctcccaccgccttgcctcactggcaatctggactcgatggagaacatccccccacctccatttggcactacccaagtggagtgtacccttgccctttccacctgtaccacccactccaacctcaccccagcttgcccaatgcttctggggaatttaatagctaccatgcaggccacagggaatttgtgaggcttcttttgtcatctttgtatctccagtttgtctttcttttctccatagccctgcctctactttccttccttggaatcaggggttcctttagcccatttgctttctctaccttggggaccccaggggccaagcagttctccatctagtcacaccaaaggcaaaaagcctggctacctcccccctagcacgtgagtccctactcccctcccctctgtttctgcccagctttgcttattttggggatttcaaggcagcagagggtagtgaggggagagcaggagaagcctctgtcctgtataggcaactgcctgactatgcggtgactgctgtaaccaagatcaggtccccagcccttttgtccattaacaccccttcttgatctttcaaaggcagctaattgctagcaaatccccccgattccggccttttccctctatttctttgttagaagttttctgtggagctgaaacccagcctctgtttgactgggtttcatttagcttagttgggttcttggagccccctgtttgttgttttgtgttgtttccaatgaaaagcaagtttaccctcagagttatgcttttccaaagaggctgatgtctttgtttttgttttttttaatgtttcaggttctaagtgaagtgagttggggaggggttgggagtgttagtaatcaaggtttagaacaccatgagatagttacccctgatctccagtccctagctgggggctggacagggggaagggagagaggatttctattcacctttaatatatttttacaaaaaaagcaaacaatttaaaaacaagcccaccgcttctgtacatgtctaaatatatttttagaagtgggtaggattgtgaatttctgatgcagggcctttttataaataggttagggtagcatcattcagacttctctgttgtttttgtccctgtctttttcttatgttgtgttactaatgtaatttatattttttttagatcctccctttcctatagagataaaagtgatttatcttggcaaaaaaaaaaaaaaaa

SEQ ID NO: 30095 - DNA, 5737 bp, Homo Sapiens
taggcaggcggctgagccggcggcgggtggcctgcccaacgtgtgctgggtgggagaaggcgaggcggcagcgatgctgtctcttccgtgaggagcgcagaggaggtcgcggcgccggaggccccagaaggctcgaaggcgccgcgggctggggtcggtggcttagggagcccgtccggccatggtggccgcgggtggtggttggcgcggctgcgctgcggcccggggcagtgcggagccgggacagtcgcggcgctgacgcccgcgggccccagctgcagatatgaagcggagccgctgccgcgaccgaccgcagccgccgccgcccgaccgccgggaggatggagttcagcgggcagcggagctgtctcagtctttgccgccgcgccggcgagcgccgcccgggaggcagcggctggaggagcggacgggccccgcggggcccgagggcaaggagcaggatgtagtaactggagttagtcccctgctcttcaggaaactcagtaatcctgacatattttcatccactggaaaagttaaacttcagcgacaactgagtcaggatgattgtaagttatggagaggaaacctggccagctctctatcgggtaagcagctgctccctttgtccagcagtgtacatagcagtgtgggacaggtgacttggcagtcgtcaggagaagcatcaaacctggttcgaatgagaaaccagtcccttggacagtctgcaccttctcttactgctggcctgaaggagttgagccttccaagaagaggcagcttttgtcggacaagtaaccgcaagagcttgattgtgacctctagcacatcacctacactaccacggccacactcaccactccatggccacacaggtaacagtcctttggacagcccccggaatttctctccaaatgcacctgctcacttttcttttgttcctgcccgtaggactgatgggcggcgctggtctttggcctctttgccctcttcaggatatggaactaacactcctagctccactgtctcatcatcatgctcctcacaggaaaagctgcatcagttgcctttccagcctacagctgatgagctgcactttttgacgaagcatttcagcacagagagcgtaccagatgaggaaggacggcagtccccagccatgcggcctcgctcccggagcctcagtcccggacgatccccagtatcctttgacagtgaaataataatgatgaatcacgtttacaaagaaagattcccaaaggccaccgcacaaatggaagagcgactagcagagtttatttcctccaacactccagacagcgtgctgcccttggcagatggagccctgagctttattcatcatcaggtgattgagatggcccgagactgcctggataaatctcggagtggcctcattacatcacaatacttctacgaacttcaagagaatttggagaaacttttacaagatgctcatgagcgctcagagagctcagaagtggcttttgtgatgcagctggtgaaaaagctgatgattatcattgcccgcccagcacgtctcctggaatgcctggagtttgaccctgaagagttctaccaccttttagaagcagctgagggccacgccaaagagggacaagggattaaatgtgacattccccgctacatcgttagccagctgggcctcacccgggatcccctagaagaaatggcccagttgagcagctgtgacagtcctgacactccagagacagatgattctattgagggccatggggcatctctgccatctaaaaagacaccctctgaagaggacttcgagaccattaagctcatcagcaatggcgcctatggggctgtatttctggtgcggcacaagtccacccggcagcgctttgccatgaagaagatcaacaagcagaacctgatcctacggaaccagatccagcaggccttcgtggagcgtgacatactgactttcgctgagaacccctttgtggtcagcatgttctgctcctttgataccaagcgccacttgtgcatggtgatggagtacgttgaagggggagactgtgccactctgctgaagaatattggggccctgcctgtggacatggtgcgtctatactttgcggaaactgtgctggccctggagtacttacacaactatggcatcgtgcaccgtgacctcaagcctgacaacctcctaattacatccatggggcacatcaagctcacggactttggactgtccaaaatgggcctcatgagtctgacaacgaacttgtatgagggtcatattgaaaaggatgcccgggaattcctggacaagcaggtatgcgggaccccagaatacattgcgcctgaggtgatcctgcgccagggctatgggaagccagtggactggtgggccatgggcattatcctgtatgagttcctggtgggctgcgtccctttttttggagatactccggaggagctctttgggcaggtgatcagtgatgagattgtgtggcctgagggtgatgaggcactgcccccagacgcccaggacctcacctccaaactgctccaccagaaccctctggagagacttggcacaggcagtgcctatgaggtgaagcagcacccattctttactggtctggactggacaggacttctccgccagaaggctgaatttattcctcagttggagtcagaggatgatactagctattttgacacccgctcagagcgataccaccacatggactcggaggatgaggaagaagtgagtgaggatggctgccttgagatccgccagttctcttcctgctctccaaggttcaacaaggtgtacagcagcatggagcggctctcactgctcgaggagcgccggacaccacccccgaccaagcgcagcctgagtgaggagaaggaggaccattcagatggcctggcagggctcaaaggccgagaccggagctgggtgattggctcccctgagatattacggaagcggctgtcggtgtctgagtcgtcccacacagagagtgactcaagccctccaatgacagtgcgacgccgctgctcaggcctcctggatgcgcctcggttcccggagggccctgaggaggccagcagcaccctcaggaggcaaccacaggagggtatatgggtcctgacacccccatctggagagggggtatctgggcctgtcactgaacactcaggggagcagcggccaaagctggatgaggaagctgttggccggagcagtggttccagtccagctatggagacccgaggccgtgggacctcacagctggctgagggagccacagccaaggccatcagtgacctggctgtgcgtagggcccgccaccggctgctctctggggactcaacagagaagcgcactgctcgccctgtcaacaaagtgatcaagtccgcctcagccacagccctctcactcctcattccttcggaacaccacacctgctccccgttggccagccccatgtccccacattctcagtcgtccaacccatcatcccgggactcttctccaagcagggacttcttgccagcccttggcagcatgaggcctcccatcatcatccaccgagctggcaagaagtatggcttcaccctgcgggccattcgcgtctacatgggtgactccgatgtctacaccgtgcaccatatggtgtggcacgtggaggatggaggtccggccagtgaggcagggcttcgtcaaggtgacctcatcacccatgtcaatggggaacctgtgcatggcctggtgcacacggaggtggtggagctgatcctgaagagtggaaacaaggtggccatttcaacaactcccctggagaacacatccattaaagtggggccagctcggaagggcagctacaaggccaagatggcccgaaggagcaagaggagccgcggcaaggatgggcaagaaagcagaaaaaggagctccctgttccgcaagatcaccaagcaagcatccctgctccacaccagccgcagcctttcttcccttaaccgctccttgtcatcaggggagagtgggccaggctctcccacacacagccacagcctttccccccgatctcccactcaaggctaccgggtgacccccgatgctgtgcattcagtgggagggaattcatcacagagcagctcccccagctccagcgtgcccagttccccagccggctctgggcacacacggcccagctccctccacggtctggcacccaagctccaacgccagtaccgctctccacggcgcaagtcagcaggcagcatcccactgtcaccactggcccacaccccttctcccccacccccaacagcttcacctcagcggtccccatcgcccctgtctggccatgtagcccaggcctttcccacaaagcttcacttgtcacctcccctgggcaggcaactctcacggcccaagagtgcggagccaccccgttcaccactactcaagagggtgcagtcggctgagaaactggcagcagcacttgccgcctctgagaagaagctagccacttctcgcaagcacagccttgacctgccccactctgaactaaagaaggaactgccgcccagggaagtgagccctctggaggtagttggagccaggagtgtgctgtctggcaagggggccctgccagggaagggggtgctgcagcctgctccctcacgggccctaggcaccctccggcaggaccgagccgaacgacgggagtcgctgcagaagcaagaagccattcgtgaggtggactcctcagaggacgacaccgaggaagggcctgagaacagccagggtgcacaggagctgagcttggcacctcacccagaagtgagccagagtgtggcccctaaaggagcaggagagagtggggaagaggatcctttcccgtccagaggccctaggagcctgggcccaatggtcccaagcctattgacagggatcacactggggcctcccagaatggaaagtcccagtggtccccacaggaggctcgggagcccacaagccattgaggaggctgccagctcctcctcagcaggccccaacctaggtcagtctggagccacagaccccatccctcctgaaggttgctggaaggcccagcacctccacacccaggcactaacagcactttctcccagcacttcgggactcacccccaccagcagttgctctcctcccagctccacctctgggaagctgagcatgtggtcctggaaatcccttattgagggcccagacagggcatccccaagcagaaaggcaaccatggcaggtgggctagccaacctccaggatttggaaacacaactccagcccagcctaagaacctgtctcccagggagcaggggaagacacagccacctagtgcccccagactggcccatccatcttatgaggatcccagccagggctggctatgggagtctgagtgtgcacaagcagtgaaagaggatccagccctgagcatcacccaagtgcctgatgcctcaggtgacagaaggcaggacgttccatgccgaggctgccccctcacccagaagtctgagcccagcctcaggaggggccaagaaccagggggccatcaaaagcatcgggatttggcattggttccagatgagcttttaaagcaaacatagcagttgtttgccatttcttgcactcagacctgtgtaatatatgctcctggaaaccatc

SEQ ID NO: 30096 - DNA, 11468 bp, Homo Sapiens
aagccgcaggggccgccgtcgtctcctccgcgtccccgcccgccggctgctgtcggaggttgacaggtcgaggcggggaggcggcggcggcggctgcagagccaggcgcccaagacggagaccccatggggaacgctccgagtcacagcagtgaagacgaagcggcagctgccggtggcgagggctggggcccacaccaggactgggccgcggcctcgggcacgacccccggcccgggcgtcgcggctccagcgctaccacccgccgcggcgctgctggagccggccaggctgcgagaggctgctgcagcgttgctgcccacacccccctgcgagtcgctggtgtcgaggcatcgcggcgcgttgtttcgctggctggaagagcggctgggccgcggcgaagagtctgtcactctggagcagttccgggagctgctggaggctcgcggcgccggctgctctagcgagcagttcgaggaggcctttgcccagtttgatgctgagggtgatgggacagttgatgccgagaacatgttggaggccctcaagaattccagtggagctaatcttcagggggagctgagccacatcatcagacaactacaggcctgctctctggttccaggtttcacagacatattttcagagtcgaaggagggccttgatattcactcgtcaatgatactgcgcttcctgcaccgcaatcggctctccagcgcggtgatgccctacccgatgctggagcactgcaataacatgtgcaccatgcggtcttccgtcctgaaggagtctctggatcagctggtacaaaaggaaaaggaaagccctggagatctaactagaagtccagagatggataaactcaagtcagtagcaaagtgctatgcttatatagaaacatcctccaactcggcagacattgacaagatgacaaatggagaaacctcatcctactggcagtcagatggcagtgcctgttcacactggattcgtttaaaaatgaagccagatgttgtgcttaggcacctgtccattgcagtggctgccactgaccagagctacatgccacagcaggtgacagtagctgtagggaggaatgccagcgatcttcaggaagtccgagatgtgcacatccccagcaatgtcactggctatgtgacgctgctggaaaatgccaacgtcagtcagctctatgtccagattaacataaagcgttgtcttagcgatggctgcgacactagaattcatggtctcagggctgttggctttcagagagttaagaagtctggggtctcagtctcagatgcttctgcaatatggtattggtctctgctgacatctctggtgacggcttctatggagacaaatcccgcctttgtccagacagtgctgcacaatactcagaaggcgctgcggcacatgcctccactctctctctcaccaggatctacagatttctcaactttcctctcccctaatgtgctggaagaagtggacagtttcctcataaggataactagctgctgttctaccccagaggtagaactgactcttctggcttttgctctcgcaagaggaagtgttgccaaagtcatgagctctctatgcaccatcactgaccatctggacacgcagtatgatgcctcatccctcatcttgtccatggcgtcagtcagacagaacctgctcctcaaatatggtaaacctctccagttgactcttcaggcatgtgatgtcaaaggaaaagaagataagtctggacccgaaaacctccttgttgaaccgtggacaagggatggttttcttacggaaactggaaaaaccagagccagcactattttttctaccggaactgaatctgccttccaagttacacagataagaattatggttcgacgtggtggcattggtgcccagtgtgggttggtgtttgcctataactcatcttcagataaattttgtgcggaagaacacttcaaaaggtttgaaaaatatgacaaatggaagcttcaggagctcaggcaatttgtaaaaagcaggattggttgctcatctgatgaccttggagaggatgatcctattggctggtttgaactggaagaagaatgggatgaagcagatgtgaagctgcaacagtgcagagttgccaaatatttgatggtgaagttcctctgcacccgtcaggagtcagcagagcgcttgggagtgcaaggcttgaccatcagtgggtacctccggcctgcaagagcagaagcagaacagagcgtcacctgtgcacactgcagaaaggacacagaggagagtgtctgtggggccacgttgctcctcaggacccttcagtttatccagcagctcgcccatgacctggtgcagcagaaggaaagtggcttaaaatataaatcttttctggacttcgcgggtcttgatttgcagatcttctggaatttttacagtaaattaaagcaaaacccgagggaagaatgcgtctctgcccaaaccctgcttctgcagctactccagagctgcttctctgtgctgcagggagatgtactggctgcttctgaggaggaaaaggctccaatccaaagccctaaaggagtagaggctgccaaggagctgtacacacacttgtgtgatgtggtggacaaggtggatggagactctgtgcccatggagatactaaaacaagaagtcaggaatacccttctcaatggggctgccatcttctttcctaatcgacagacccgacggaaccatctcttcaccatgatgaatgtcaccgagcaggagcacaagcagtccctgcagctcactttccgttcactgtgcacgtattttagtgacaaggatccaggcggccttcttcttttacctgagaagaacgacctggccaagatgaacatcagtgaagtcctggcggtcatggacactctcgtctctgttgctgctcgagagtgcgagctgttaatgctcagtggggccccaggggaggtgggctctgtgctcttctccctgttctggtccgtccaaggcagcctgctatcctggtgctacctgcagctgaagagcacggactctggagccaaagatcttgccgtggaccttattgaaaaatatgtgggccagtttctggcaagcatgagagcgattttggaatcccttttctcacagtacagtggaaaaaccatagtagaaagattatgtaactcagtgttttcaatggcagctcgtcaactggttatcttcctgctggacttctgcactttagacatcccacactgcgtgctcttgagagagttcagcgtcctcacagaactcctgaagaagctctgtagtggccccgaaggaggactgaggaagctggatgttgagacctggcaacaggaacagcctgtggtgttacatacgtggacgaaggaatctgcccacaactatgaaaataattgccatgaggtatccgtctttgttagcccaggggcaacctattttgaagtggaattcgatgacaggtgtgaaactgaaaaaaggtatgattatctggaatttaccgacgctagaggtcggaaaacacgctatgacacaaaagttggcactgataaatggcccaagaaagtgaccttcaaggccggtcctcggttgcagttcctctttcactctgacagcagtcacaacgaatggggctacaaattcactgtcactgcctgtgggctgcccgatgttgccgtgtcttgggggctggatttacagctcctcgtctcccggctgatgggacgcctggcttcccagtgcatggcgctcaagtctgtgcgccagttaggaagtaacatggtagtacctcaggcaaaaatggcattagtcctaagctccccactgtggaaacctgtcttcaggcatcaggtttgtccagagttggaattagaagcaagctggcccactcacccacaccggaatagtaaggaggttaagaacattcctgacgacccctgccgccattttcttcttgattttgcccagtcagagcctgctcagaacttctgtgggccatattcagaacttttcaaaggattcatacaggcatgtagaaaacaggccccaaagacagatatagttgctggttccactattgatcaagctgtgaacgccacctttgctgctctggtgtatcgcactccagatttatatgagaagctgcaaaaatatgtcaacagtgggggcaaaatagccctgagtgaagagtttgcccaggtttattccttggcagatgggattcgaatatggatgttagagatgaagcagaagtccctgatgagcctggggaatgaagcagaagaaaaacatagttcagaagctactgaggtgaaccctgagagcctggcaaaagagtgcattgagaagagtcttctattactaaaatttctgcccacgggcataagttcaaaagaaagctgcgaaaagttggagactgctgatgaaaccagtcatctccagccactcaacaagcgtcagaggacaagctctgtggtggaagagcatttccaagcctcagtatctcccactgaagccgcaccccctgccacaggagaccagagtcctggcctgggcacccagccaaagctgccatccagcagtggccttcctgctgcagacgtgtcccctgccacagctgaagagcccttgtcaccttccacacccacccgccggcctcccttcacccgagggcgactccggctgctctcctttcgatccatggaggaggccagactggtgcccacagtgaaagagaaataccctgtgctgaaggacgtcatggacttcattaaggatcagtcgctctcgcacaggagtgttgtgaaggttctttccctgaggaaagcccaggcccagagcatcctggaagtcctgaagataactcagcactgtgcagaatcccttgggcagccccactgcttccatccacctttcatacttttcctgttggaacttctgacctgtcagaaagattttaccaattattttggacacctggaaggctgtggtgctgatctacacaaagaaattcgagacacttactatcaacttgttctgtttttggtcaaagcagttaaaggatttagtagcctaaatgacaggtccttgctccctgccttatcctgtgttcagacagccctgcttcatcttttggatatgggctgggaacccaatgatctcgccttctttgttgatattcagttaccagatctcctcatgaaaatgtcacaggagaatataagtgtccatgacagtgtgatcagccaatggagtgaagaagatgagcttgctgatgccaagcagaattcagaatggatggatgagtgtcaggatggcatgtttgaggcctggtatgaaaaaatagcccaggaagatccagagaagcagaggaaaatgcacatgttcattgctcgctactgtgacctgttaaatgtggacatctcttgtgatgggtgtgatgagattgccccctggcatcgataccgctgtctgcagtgcagcgacatggatctctgcaaaacttgcttcctaggtggggtgaagcctgagggccacggagacgaccatgaaatggtcaacatggagtttacctgtgaccactgccagggtttgatcataggccggaggatgaactgcaatgtttgcgatgactttgatctttgctacggatgctatgcagcgaagaaatactcctacggccatttgcctacccacagcatcacggcccacccaatggtaaccattcggatcagtgaccggcagaggctcatccagccatatatccataactactcctggctgctctttgctgccctggctctctatagcgcccacctggccagtgcagaggatgtggatggggagaagctggacccccagacgcgcagcagtgccaccaccctgcggagccagtgcatgcagctcgtcggggactgtctgatgaaggctcatcagggaaaaggccttaaagctctagctttgctgggtgtattgccagatggggactcgagcctagaagatcaggccctaccagtcactgtgcccaccggagcgtcagaggagcagctagagaagaaagctgtccagggtgctgagctgtcagaagcaggcaatggaaagagagctgttcatgaggaaatcagacctgtagatttcaagcagagaaataaggcagataaaggtgtatcattatcgaaggatccttcatgccagacccaaatttcagattcacctgcagatgctagcccacctacaggacttccagatgctgaagattcagaagtgtcatctcagaagcccatagaggaaaaagcagttactccaagccctgagcaagtgtttgctgagtgttcccagaagaggattttgggattactagcagccatgttacctcccttaaagtcgggccccacggttcccctgatagacctggagcacgtccttccactcatgtttcaggttgtcatctcaaacgcaggccacctgaatgaaacctaccatctcaccctgggtcttctcggccagttaattatccgtcttttgccagcagaggtagacgccgcagtgatcaaagtcctctcagccaaacacaacctgtttgctgcaggggacagttccattgtgccagatggctggaaaaccacccacctgctctttagcctgggagctgtgtgtctggacagccgggtgggcttggactgggcgtgctccatggcagagatcctgcggtcactcaacagtgccccactgtggcgtgatgtcattgccaccttcacagaccactgcatcaagcagctgccattccagctgaagcacaccaacatcttcaccctgctcgtgctggttggcttcccccaggtcctctgtgtgggaacccgctgcgtttatatggataatgccaatgaaccccataatgtgatcatcttgaagcactttactgagaagaacagggctgtgattgttgatgtcaaaactcggaagaggaaaacagtgaaggactaccagctggtccagaagggaggaggacaagagtgtggtgactctcgggcccagctgagccagtactcccagcactttgcctttatcgccagtcaccttctgcaaagcagcatggacagccattgtcccgaggcagtagaagcaacttgggtcctgtccctggccctgaaaggattgtataaaacactaaaggctcacggttttgaggagatccgtgctactttccttcagaccgatttgctgaagttgctggtgaaaaagtgcagcaaagggactggctttagtaaaacgtggctcctccgggacctggaaattttgtccatcatgctgtactcctcaaaaaaggagatcaacgctttggctgagcacggagacctagagctggatgagcgaggggaccgagaggaagaggtggaacggccagtcagcagccctggcgacccagagcagaaaaagctggacccccttgagggcctggatgagcccaccagaatatgtttcttgatggctcatgatgccctcaatgcccctctgcacattctccgggccatatacgaactgcagatgaaaaagaccgattatttcttcctggaggttcagaagaggtttgatggtgatgagctcaccacagatgaaaggatacggtccctggctcagcggtggcagcccagtaagagtctgaggctggaagaacagagcgccaaagctgtggatacagacatgattatcctgccatgcttgtcccggcctgcacgctgtgaccaagccactgctgaatcgaaccctgtgacccagaagctgatctccagcacagagagcgaactgcagcagagctatgccaagcagcgccgtagcaagagcgccgccctcctgcacaaggagctgaactgcaagagtaagagggctgtccgggactacctcttccgagtgaacgaggccacagctgtcctgtacgcccgccacgtgcttgcatccctgctcgccgagtggcctagccacgtgccagtgagcgaggacatcctggagctcagtggccctgcccatatgacctacattttggatatgttcatgcagctggaagaaaagcatgagtgggagaagatcctgcagaaagtgctccagggctgccgagaggacatgctggggaccatggccctggctgcatgccagttcatggaggagccaggaatggaggtgcaagtgagggagtcgaaacacccgtataacaacaacaccaacttcgaggataaagttcacattcctggtgccatctacctctcaatcaaattcgactctcagtgcaacacagaggagggctgtgacgagttagccatgtccagcagcagtgacttccagcaagaccgacacagcttcagcgggtctcagcagaagtggaaagattttgaacttccaggagacactctgtattaccgcttcacctccgacatgagcaacaccgagtggggctacagattcaccgtgacggccggacacctggggcggttccagacaggattcgagattttgaagcagatgttgtcagaagaaagggtcgtgcctcatctcccattggcaaaaatttgggaatggctggtgggcgtggcctgtcgccagactggccatcaacgattaaaagccatccacttacttctgaggattgtgcgatgctgcggccacagtgacctgtgtgaccttgcgctgttgaagcccctgtggcagctctttacccacatggagtacggcctgtttgaggacgtgacgcagcccggcatcctccttcccctgcatcgtgccctcactgagctcttcttcgtcaccgagaaccgtgcccaggagcttggcgtgctgcaggattacctgctggccctaaccacggacgaccaccttctccgctgtgcggcacaggctctgcagaacattgctgccatcagcctggccatcaactacccaaacaaggccacccgcctctggaatgtggagtgttagcccttggtggggcgtgcatgggactagttcatctgccacagggattttagagcagacatctaacctcattcaggaaaactcctgtagcgccagtgcccagctctccttgagctgaccactccagttaggatgccaagcagccacgtctccaagagctcccgtgcgtaggctggacacaagcacaggctgtagcatggtgaaaataagccaagcagtgcagaatgcctcagaaagggtgggcagggggcccttaagaaggttcagagaccagccttctccagaggctgtcactgcaggagccgtgggcctgggaagacttggaagcggcctctctcaactggtttctgtctccgtggagctggaactgcctgcacttgccttcagagggaggcacagtccacccagatccacctttccagcaagacccccagtggctgcccagcctgggagcacctctttgcttttcacaccaaaccaaaactggcgagagcccctcctagccaccagtgatccccaagcatccagtacagaaccaggcatcgagctagctccctgcacggccgcaccctcccagagaactccttgaggagaacaagtgcccttggggacagccggcaggcgcccctgtacgtctgctcatgcaccaggcagcacagccgcagttcctcagttgttgttttgacatatttcagtttccacctcacgtttttagagcagaaccacactgtctccctggaggggctcgagggcatgaccggggactgaccattctgtgaaaggagcagaatgtgaggagcacgcgtgagcttatgtaccgtgaagatgatcagaggatatcttattttaagagtaaaaacccacataattttatttctgcttgatagtcatggtagtctgtcatacccacctctgggactctgcgtggctgtttggctgtcacttgtagcaataacgacattagttctagtcagtgctgttttacatttttcttttgatgggtttagtcttgccctggagtgccgatgatgattctccctccagagccacgcttgggaacatgaagcaagtctggcgtgtgggctgcgtgccggccttagtgggacccgtggggttggagcatgcctttaggggcagtgtctgggccgaagcacgtcccaccacacagtgccagagccagagaaggggccccaccaccaaggccaagcttgaccaggtcagcattgccatggcccagtgtgccccgtggcctctgaagatccctctgtgcagggtctgcagggatctggattgcaagggcccaagtctgcaggtctggaagcatcttcctataagagcactttcgccttctgggtcaggactccaaggtgcagcgggcttcacagccctacaattgggttctcagctaagccccagagttctggtagaaccatcccggggcgggtggagggtgggatttaagggagacgggaacacatggggcaggtcctggaacttggtggcctgaggactgaggccattgccctggtggaaaggcctggcctggttcctgtggcttgggacctgaataggcaggtgctgctggctccgtagaaacccttttcccatcttttgctctttgccaaacctaccttgctttgggagctgcctgcaccaccccagagaaggccccaccttcttcatccctcagacccgaggaggcctcccagtaaggagtttcccaagaggggactcacaggaaacaagtcttagtgcttgggagggaggccccgctgcgtgctcagactcacagccaacctggaaggtagacgagatagcgccacccacgcccctccacaccccagactccgagtaaagcgggcggtagggccggagtcacctcccctatggcagtggccgccgctgtactccatcctcccgtcaggaagatcagctgtaaataaacgctgggctccccagagcacctgtccgcccactgcccttgctgttctgggatcttcgctgcagttcacgggaaacaagcctgagtccgctcgcacccgcggctgctctcccggctcggcccggccgcctctgtctccggccaccgggtggcgctgccgagccagagccgccgcgtcccggcgctttccaggagccccaggcccggaggaggcgaagcccgcagagcaaaggtggaaacacgtgcctacgctgtaaagaaatcctgttccagagcatacctgttgtacaaacagacactgttcctaacgagaggagtgacgtattttcatcaccgtttttaatttgttttcttacgggtttacgattttgaatttttcttatttggttgaaagaattttgattctatcagcctgagtgagttcagcctgtaaaaaggatgttaagctgtgggtaaaatatgcaaacgaaaagaaatatattgtacaaattctatataataaggtaaaaaaaaaaaaa

SEQ ID NO: 30097 - DNA, 4146 bp, Homo Sapiens; identical to SEQ ID NO: 27812

SEQ ID NO: 30098 - DNA, 4163 bp, Homo Sapiens
ccgcagtccttagcttcccggggacaggaaaccttcaagaccgagctgccacggccgcctccccgcccgccccccattctacgcgcctgcccacaccctcctcccctccttccagcgcctttcggtggagcactgcggcactcagcccgagctgccgttttcccctcgcggggaacgctgtgacccccccgcaggagcggcggggcggggtgggggggcccgggagaagatggcgacgccgggaagcgaaccccaacctttcgtcccggccctttcggtagctactctgcacccacttcatcatccccaccaccaccaccaccaccatcagcaccacggaggaaccggcgcccccggcggggcgggtggtggcggcggtggcagcgggggcttcaacctgcccttgaaccggggtctggagcgcgcgcttgaggaggcggccaactccggggggctgaacctgagcgccaggaaattgaaggaatttccccgtaccgcagcccccgggcatgacctctcggacacggtgcaggcagacttatctaaaaacagactggttgaagttccaatggaattgtgccattttgtatcactggaaattcttaatctgtatcacaactgtatcagagtcattcctgaggccatcgttaatctgcagatgctgacttacctgaacttgagtcgaaatcagctgtccgccctgcctgcctgcctgtgtggtctgcctctcaaagtcttaatcgcaagtaacaacaaacttggatcattaccagaagagataggtcagctcaaacagttaatggagctggatgtcagctgcaacgagatcacagcgttgccccagcagataggtcagttgaaatctctacgagaactgaatgtcagaagaaattaccttaaagttttaccacaagaactagtagatcttcccttggtaaagtttgacttttcctgcaacaaagtgctcgtgattccaatttgttttagagagatgaagcagctgcaagtgttactacttgagaataaccctctgcagtctcctccagcacagatttgcacaaagggcaaagttcacatatttaagtatctgagcatacaagcatgccagattaagacagctgactccctttatctccacaccatggagaggccacatttacaccagcacgtggaagatggcaagaaggattctgattcgggagttggaagtgataatggagataagcgattatctgccaccgagccttctgacgaagacactgttagcctcaatgtgccaatgtcaaacatcatggaagaagaacagatcatcaaggaggactcgtgccatcgccttagccccgttaaaggggaatttcatcaggaatttcaaccggagccttcccttttgggtgacagcaccaactcaggagaagaaagagaccagtttactgatagagcagatggtctccattcggaatttatgaactataaggcaagggcagaagactgtgaagagctgttacggatagaagaggatgtgcactggcaaactgagggcataataagttcatccaaagatcaggacatggatatagcaatgatcgagcagctgagagaagcagtagatttgctgcaagatcccaatggattaagcacagatattacagagagaagtgttttaaacctatatcctatgggatcagcagaagccttagaattacaagattctgcactgaatggtcaaatacagctggagacatctccggtgtgtgaggtgcaaagtgatctaacattacagagtaacgggagccagtattctccaaatgagattagagagaactcccctgcagtctctcctaccacaaacagcacagctccatttggcctgaagcctcgatcagtgtttctaagacctcagagaaatttggaatctatagacccgcagtttacaatccggaggaaaatggagcagatgagagaagagaaagagctggtggaacaacttcgtgagagcattgagatgagattgaaggtcagtctacacgaagacctgggggcagccctcatggatggtgtcgtcctctgccatctggtcaaccacatccgcccacggtcggttgcaagcatccatgtcccatcaccagcggttcccaaacttagcatggccaaatgcagaagaaatgtggaaaactttttggaagcgtgccgaaaattaggagtaccagaggctgacctctgctctccgtgtgacatcctgcagttggattttcgtcacattcgaaagactgttgacactctgctggcactcggggagaaagccccaccaccaacttctgccctccgctccagggaccttataggcttctgtcttgtccatattctctttatagtgctggtctatatcacttaccactggaatgctctgtccgcataacgtctgcacgtgcatccaaacgctgtgctctgtcgccctcaacctttgcagggtccttcctacctttgagcctttgccttgcaaacttccatccctgtcatgtcttcagttatctctcgagttttgaagctgaacagtagcaaatcagattttccagaagcacaaactttgtagaatacagtttagtataattcctctcacttactgaaatacaacgacgacgactgcaaagtgtatgcacaccgcatgcttcctcatccacatagtgccagcagcagtgccacgcagttcctcctctccctcccggtgagctgctgccctgggcagaggggaggagaattccaggacaagagtgtcaaggacagggatttagcatatggaagtctttcctttgggtcagtattgaactagaattctaattcgggactgggcaattgagctgtataggggccaccttgcagggaggacagaaaactaacattttggcccaacttgatctatacaaaactttaataataccactactgaccaagttggacgtgtacacgtactcacactgccttgatggccattcgattggattcctcccaaatttcctaaaaagggagccgcgaagggcgctgggcagtgtggccgccaacttccaccccggcaagcccctctgtcctatgcagaagggcgctccagggaaggaagtgtcgttgctgttagagcctcacgtggaggagtcacttaaacaccagttttttactgcttaattccttgttaggtcttctcttgaggctcttagaaaagcgttttccagagagatttctatttttgaacaatggaacggatcactgcttttttgccacatcacatagtaactgccggtccagaatgtgacggattcgactctattcattttcaaataaagccatgagccgtggaacattcttggtcctggtgcttgggttatgatggcaggagtcaagaagaagattactttcattctagaagaatgtagtttctctaattatttgaaatgttcatttagcctttgattttcactgatattaactagcaaactgctttaagtcagctcaaaggattatatagtaactatatctgcatttggagcaatgtgatcagtttgcatttaaaaggaaaaaaaagaattttatcttagccagaatgtccctggattcaggggtgtctttgtataatatgagagggccttgttccaaggtcaaggcagcctccttattttacatgctgtttgccaaatcttgtttcttagcttggggagatgatggacttagcttcctcaagataaatttctagtttattaagatgcaaacagctctcatagatggctactacgaagaaaatcttatttttctgaacattttcatgaatccaggggacttgaaaatatggaagacccacatagttagaagaatatatttataaagattccttgctgctaagtcagatcagatttgctaacaggaagcattctttacatgacagtatcttgagttatgtgagttttttttcctcctgactttgtgttgattggtgaaatgcagggtatgtggaagttatctaattaacctcagttgtatatgaataacccacagatgtactgaattacttttggtgctatcttgtactcttcaatctgtaacacaataaaatccctttgtacgatgtctaatgagcaccctgagccataaattgcttaataaacacattttgggtgatt

SEQ ID NO: 30099 - DNA, 3186 bp, Homo Sapiens
tggcgcctgccccgtcagacaggggccccatcccactcgctaccctgtccgatggggaaactgaggcacggagctggacagtgactcagacaccaggagctgcctggagtggagctgagagctcaggtctgggctcagccagtccagagtacaaatctactgtcccttcctagctgtgtgatcttgacaggcactggacggggcctgcaggggtctccacagagaccatcaggatgtcgtattttggggagcatttttggggcgagaaaaatcatggctttgaggtcctgtaccacagcgtgaagcaggggcccatctccaccaaggagctggcggacttcatccgggagagggccaccatcgaggagacctactcgaaggcgatggcgaaactctccaagctggccagcaacgggacccccatggggaccttcgccccgctctgggaggtcttccgcgtctcctcggacaagctggcgctgtgccacctggaactgacacggaagttacaggatctcatcaaggacgttctccgctacggcgaggaacagctcaagacccacaagaagtgcaaggaggaagtggtgagcaccttggatgctgtgcaggtactctcgggcgtcagccagctcctgcccaagtcccgcgagaactacctgaaccgttgcatggaccaggagcggctgcggagggagagtaccagccagaaggagatggacaaggcggagactaaaaccaagaaggcggcagagagcctgcggcgctcagtggaaaaatacaactcagcccgagctgactttgagcagaagatgctggactcagccctgcgcttccaagccatggaggagacacacctgaggcacatgaaggcactgctgggctcatatgctcactcggtggaggacacgcacgtgcagattgggcaggtgcatgaggaatttaagcagaacatcgagaacgtcagcgtggagatgctactcaggaagtttgcagagagtaagggcacaggccgggagaagcctggacctctggacttcgaggcatacagtgcggctgccctgcaggaagcgatgaaacgtttgcggggagccaaggcctttcgccttccaggactaagccggcgggagcgggagccggagccacctgcagctgtagatttcctggagcccgattcagggacatgtccagaggtggatgaagaaggtttcactgtccggcctgatgtgacccagaacagcacggccgagccctcccgtttctcgtccagcgactccgacttcgacgatgaagagccccgcaagttctatgtgcacatcaagcctgccccggcccgggctccagcctgcagccccgaggcagcagcggcacagctcagggccaccgcaggcagcctcatccttcctcctggcccagggggcaccatgaaacgccattcttcacgggacgctgctgggaaaccccagagacctcggtctgcccccagaaccagcagctgtgcagagagattgcagtcagaggagcaggtgtccaagaacctctttgggccgcccctggagtcagcctttgaccacgaagattttacaggctctagcagcctgggcttcacctccagcccctcccctttctcctcctcgtcgcccgaaaacgtggaggattccggcctggactctccgtcccacgcggcacctggcccctccccagattcctgggtcccccgcccaggcaccccgcagagcccgcccagctgtagggcgccacccccagaggccaggggtatccgggcaccgcctctgccagactcgccgcagcccctcgcctcgtctccaggcccctgggggctggaggccttggccggaggagacctgatgcctgcacctgctgaccccacagccagggagggcctggcagccccacccaggagacttcgctctaggaaggtgtcctgccctctcacacgtagcaatggggacctgtctcgttccctgagcccctccccactgggctcttcagccgccagcactgccttggaacggcccagcttcttatcccagacaggacacggagtctcccggggtccgagccctgtggtcctgggctcccaggatgccctgcccatagccacagccttcacggagtatgtccacgcctacttccgtggccacagccccagctgcctggctcgagtaactggggagctgaccatgaccttccctgctggcatcgtgcgtgtgttcagcgggaccccaccaccacctgtcctcagcttccggcttgtacacacaaccgctattgagcacttccagcccaacgccgatctgctgttcagtgacccctcccagagtgaccctgagaccaaagacttctggctcaacatggcagctctgaccgaagccctgcagcgccaggcagagcagaaccccactgcctcctactacaacgtggtgctgctgcgataccagttctcccgcccgggtccccagtctgtgcctctgcagctcagtgcccactggcagtgtggagccaccctcacccaggtctcagtggagtacggctaccggcccggtgccacggctgtgcccacaccactcacgaacgtccagatcctgctgcctgtgggggagcctgtgaccaacgtccgcttgcagccggctgccacctggaacctggaggagaagcggctcacttggaggcttccagatgtgtccgaggcaggcggttctggccgcctctctgccagctgggagccgctctcagggcccagcacacccagccccgtggctgcacagttcaccagcgaggggaccactctgtcgggcgtggacttggaactggtgggcagcggttaccgcatgtcgctggtgaagaggaggtttgccacagggatgtacctggtgagctgctgaacccgcaaatgctgctgccccagctctacactgcgccctggtgctggctgaccaccccctgccctcctgccggaccctggggcctcccaccccagcctccctgaggcccatactccacggagaggagccccatgcccagcctggctgagcccgagattcgctcctccccctcatgccaaccccacacaggtcccggccttttaatgttctttgaataaacactttattttctaataaaataaaaaaggaaaaaaaaaaaaaaaaaaaaaaaaaaaaaaaaaaa

SEQ ID NO: 30100 - DNA, 5473 bp, Homo Sapiens
ggaggtgcgagcccctgccgggtcccccctgcgccggaccatgtattcggcccacaggcccctgatgcccgcgtccagcgcggcctcccgtggcctcggcatgttcgtgtggacgaatgtggaacctcgctctgtggctgtgttcccttggcactccttagtccccttcctggcacccagccagcctgacccctccgtgcagccgagcgaggcccagcaacctgccagccacccagtggcctccaaccagagcaaagaacctgctgagtcggcagctgttgctcatgaacggccaccaggtgggacagggagtgctgaccctgagcggccccctggagccacatgccctgagagcccaggacccggacccccacaccctttgggggtggtggaatctggtaagggtccgcctcccaccacggaggaggaggcctccggccccccaggagagccccggctggacagtgagacagagagtgaccatgatgatgccttcctctccatcatgtctcctgagatccagttgcctctaccgcccggaaaacgtcggacccagtccctcagtgccctacccaaggaacgggactcatcttctgagaaggatggacgcagccccaacaagcgggagaaggaccacatccggcggcccatgaatgccttcatgatcttcagcaagcggcaccgggccctggtccaccagcgtcatcccaaccaggacaaccggaccgtcagcaagatcctgggcgagtggtggtatgccctggggcccaaggagaagcagaagtaccacgacctggccttccaggtgaaggaggcccacttcaaggcccacccagattggaagtggtgcaacaaggaccgaaagaagtccagctcagaggccaagcccacgagcctggggctggcaggagggcacaaggagacgcgggagcggagcatgtcggagacgggcactgctgctgcccctggggtgtcctctgagctcctgtccgttgcagcccagacactcctgagctcagacaccaaggctccggggagcagctcctgtggggcagaacggctacacacagttgggggacctggctcagcccggccccgagctttctcccacagcggggtacacagcctggacggcggagaagtagacagtcaggcgctacaggaactgacgcagatggtgtctggccctgcatcgtactctggcccaaagccttctacccagtatggagctccaggaccctttgcagcccctggtgagggaggtgccttggcggccactgggcggcccccgctgctgcccacccgagcttctcgttctcagcgtgcggccagtgaggacatgacgagtgatgaggagcgcatggtcatctgtgaggaggaaggggatgatgatgtcattgctgacgatggcttcggcaccactgacattgatctcaagtgcaaggagcgggtgaccgacagcgagagtggggacagctctggggaggacccagagggcaacaagggctttggtcggaaggtgttttcacctgtgatccgttcctcctttacccactgccgccccccactggaccctgagcccccagggcccccggatcctcctgtagcctttggcaaaggctatggttccgccccatcctcctctgcgtcctcgcctgcttcctcctcagcctcggcagccacctccttctcactgggctcaggaaccttcaaggcccaggagtctggtcagggcagcacagcgggccccctacggcccccaccccctggggctgggggtccagcgacaccttccaaggcaacccggttcctcccaatggatcctgccaccttccggcgcaagagacccgaaagtgtgggtggcctggagccaccaggcccctcagtcatcgcggcccctcccagcggaggaggaaacatcctgcagacactggtgctgcccccaaacaaggaggagcaagagggcggcggagccagagtgccctccgcccccgccccatcactggcctatggggccccagcagctcccctgtcccgtcctgccgccaccatggtcaccaatgtggtgcggcctgtcagcagcactcctgtgcccatcgcctctaagcccttccccacctctggccgggctgaggcgtctccaaatgacacagcaggtgccaggactgaaatgggcactgggtctcgggtgcctgggggctccccgctgggtgtcagcttagtgtattcggacaagaagtcggcagcagccacctcaccagccccacacttggtggctggacccctgctgggcactgtggggaaggcgcctgccactgtcactaacctactggtgggcaccccggggtatggggcccctgcgccccctgctgtccagttcattgcccagggggcccctggtggtgggaccactgcgggctcaggagcaggtgctgggagtggccccaatgggccagtacccctgggcatcctgcaaccaggtgccctgggcaaggctgggggaatcacccaggtacagtacatcctgcccacgctgccccagcagcttcaggtggcacctgccccagcaccagcccctgggaccaaggcagcggctcccagcggccctgcacccaccaccagcatccgtttcaccctcccaccgggcacttccaccaacggcaaagtcctggctgccactgcacccactcctggcatccccatcctgcagtctgtaccctccgccccaccccccaaagcccagtcagtttctcccgtgcaggccccgcccccgggtggctcagcccagctgctgcctgggaaggtcctagtgcctctggccgcccctagcatgtcagtgcggggtggaggggccggccagccactgccactggtgagcccgcccttctcagtacctgtgcagaatggtgcccagccccccagcaagatcatccagctgaccccggtgcctgtgagcacacccagcggcctggtgccgcccctgggcccagccacactccctggacccacctctcagcctcagaaggtcctgttgccctcctccaccagaatcacctatgtgcagtcagcgggcgggcacgcgctgcccctgggtaccagccctgcgtccagccaggctggaacagtcacctcgtacgggcccacgagctctgtagctctaggcttcacctcgctggggcccagcggccccgccttcgtgcagcccctgctctcagcaggccaagccccactgctggctcccggtcaggtgggcgtgtcacctgtgcccagtccccagctgccgcctgcctgtgcagcccccggaggtcctgtcataacagcattttactctggcagccctgcacccacctcctcagcacccctggcccagccatcccaggcccccccaagcctggtctacactgtggccaccagcacaaccccacctgcagccaccattctgcccaagggcccgccagcccctgccactgccaccccagccccgactagccctttccccagcgccacagcaggttccatgacctacagcttagtggcccccaaggcccagcggcccagcccgaaggccccccagaaagtgaaggcagccatcgccagcattcccgtggggtcctttgaggcaggtgcctctgggcggcctggccctgcaccccggcagcctctggagcctggcccagtccgagagccaactgccccagagtctgagcttgaggggcagcccacaccaccagcccctccacccctgccagagacctggactcccacggcccggagcagccccccactgcccccacctgctgaggagcggaccagcgccaagggccctgagaccatggccagcaaattccccagctcatcttcagactggcgcgtccctgggcagggcctggagaatcgtggggagcctcccactcctcccagcccggccccagctccagctgtagcccctggtggcagcagcgagagcagcagtgggcgggcagccggggacaccccggagcgcaaggaggcggctggtactggcaagaaggtgaaggtgcggcccccgcccctgaagaagacctttgactctgtggacaacagggtcctgtcagaagtggacttcgaagagcgctttgctgagttgcctgagtttcggcctgaggaggtgctgccctcccccaccctgcagtctctggccacctcaccccgggccatcctgggctcttaccgcaagaagaggaagaactccacggacctggattcagcacccgaggaccccacctcgcccaagcgcaagatgagaagacgctccagctgcagctcggagcccaacacccccaagagtgccaagtgcgagggggacatcttcacctttgaccgtacaggtacagaagccgaggacgtgcttggggagctagagtatgacaaggtgccatactcctccctgcggcgcaccctggaccagcgccgggccctggtcatgcagctctttcaggaccatggcttcttcccgtcagcccaggccacagccgccttccaggcccgctatgcagacatctttccctccaaggtttgtctgcagttgaagatccgtgaggtgcgccagaagatcatgcaggctgccactcccacggagcagccccctggagctgaggctcctctccctgtaccgccccccactggcaccgctgctgcccctgcccccactcccagccccgcagggggccctgaccccacctcacccagctcggactctggcacggcccaggctgccccgccactgcctccacccccagagtcggggcctggacagcctggctgggagggggctccccagccctcccccccacccccaggtccctccacagctgccacaggcaggtgagggacccctgagaagatgccaggacttatagtaccccctcaggacatggacagtatgtgggggcaggaaggttatctcctcccgggtaaagccatttcgtcctctccagtttggggcggaatgaggcctgctcctcttgtaaatacccccttccctcgaagctccctcccggtgctggggggcagctgaggggctgcaggggcagtctccctcctccaagcccctgtacataacctggagcgtgtgaccttcagagcttttcactttatgcaaaatggctcctgtgagggctgcaagctggagggtggtgcaggccttgggccacagggaggcgcctgtggaatagggggagttcatgcaccccttttttccccagaggggctggactcaggttagtttgggggtgggggctcctgcactttgccacaggcacggggagggttttctcctcaccccctctgccctcccaacttgggttgtactttctaagaaggtgattccccctgcccttgcccccttccccagaacaaaacatgttgatcatgtgcaatatttcttactgtgccgagaagccgcaatgagcgagattaaagctgtttaacacac

SEQ ID NO: 30101 - DNA, 3858 bp, Homo Sapiens
gccaggccggccaggcctgcgccgccgccgccgccgccgtcgccgccgcgccgaccatgtcggcagccaaggagaacccgtgcaggaaattccaggccaacatcttcaacaagagcaagtgtcagaactgcttcaagccccgcgagtcgcatctgctcaacgacgaggacctgacgcaggcaaaacccatttatggcggttggctgctcctggctccagatgggaccgactttgacaacccagtgcaccggtctcggaaatggcagcgacggttcttcatcctttacgagcacggcctcttgcgctacgccctggatgagatgcccacgacccttcctcagggcaccatcaacatgaaccagtgcacagatgtggtggatggggagggccgcacgggccagaagttctccctgtgtattctgacgcctgagaaggagcatttcatccgggcggagaccaaggagatcgtcagtgggtggctggagatgctcatggtctatccccggaccaacaagcagaatcagaagaagaaacggaaagtggagccccccacaccacaggagcctgggcctgccaaggtggctgttaccagcagcagcagcagcagcagcagcagcagcagcatccccagtgctgagaaagtccccaccaccaagtccacactctggcaggaagaaatgaggaccaaggaccagccagatggcagcagcctgagtccagctcagagtcccagccagagccagcctcctgctgccagctccctgcgggaacctgggctagagagcaaagaagaggagagcgccatgagtagcgaccgcatggactgtggccgcaaagtccgggtggagagcggctacttctctctggagaagaccaaacaggacttgaaggctgaagaacagcagctgcccccgccgctctcccctcccagccccagcacccccaaccacaggaggtcccaggtgattgaaaagtttgaggccttggacattgagaaggcagagcacatggagaccaatgcagtggggccctcaccatccagcgacacacgccagggccgcagcgagaagagggcgttccctaggaagcgggacttcaccaatgaagcccccccagctcctctcccagacgcctcggcttcccccctgtctccacaccgaagagccaagtcactggacaggaggtccacggagccctccgtgacgcccgacctgctgaatttcaagaaaggctggctgactaagcagtatgaggacggccagtggaagaaacactggtttgtcctcgccgatcaaagcctgagatactacagggattcagtggctgaggaggcagccgacttggatggagaaattgacttgtccgcatgttacgatgtcacagagtatccagttcagagaaactatggcttccagatacatacaaaggagggcgagtttaccctgtcggccatgacatctgggattcggcggaactggatccagaccatcatgaagcacgtgcacccgaccactgccccggatgtgaccagctcgttgccagaggaaaaaaacaagagcagctgctcttttgagacctgcccgaggcctactgagaagcaagaggcagagctgggggagccggaccctgagcagaagaggagccgcgcacgggagcggaggcgagagggccgctccaagacctttgactgggctgagttccgtcccatccagcaggccctggctcaggagcgggtgggcggcgtggggcctgctgacacccacgagcccctgcgccctgaggcggagcctggggagctggagcgggagcgtgcacggaggcgggaggagcgccgcaagcgcttcgggatgctcgacgccacagacgggccaggcactgaggatgcagccctgcgcatggaggtggaccggagcccagggctgcctatgagcgacctcaaaacgcataacgtccacgtggagattgagcagcggtggcatcaggtggagaccacacctctccgggaagagaagcaggtgcccatcgcccccgtccacctgtcttctgaagatgggggtgaccggctctccacacacgagctgacctctctgctcgagaaggagctggagcagagccagaaggaggcctcagaccttctggagcagaaccggctcctgcaggaccagctgagggtggccctgggccgggagcagagcgcccgtgagggctacgtgctgcaggccacgtgcgagcgagggtttgcagcaatggaagaaacgcaccagaagaagattgaagatctccagaggcagcaccagcgggagctagagaaacttcgagaagagaaagaccgcctcctagccgaggagacagcggccaccatctcagccatcgaagccatgaagaacgcccaccgggaggaaatggagcgggagctggagaagagccagcggtcccagatcagcagcgtcaactcggatgttgaggccctgcggcgccagtacctggaggagctgcagtcggtgcagcgggaactggaggtcctctcggagcagtactcgcagaagtgcctggagaatgcccatctggcccaggcgctggaggccgagcggcaggccctgcggcagtgccagcgtgagaaccaggagctcaatgcccacaaccaggagctgaacaaccgcctggctgcagagatcacacggttgcggacgctgctgactggggacggcggtggggaggccactgggtcaccccttgcacagggcaaggatgcctatgaactagaggtcttattgcgggtaaaggaatcggaaatacagtacctgaaacaggagattagctccctcaaggatgagctgcagacggcactgcgggacaagaagtacgcaagtgacaagtacaaagacatctacacagagctcagcatcgcgaaggctaaggctgactgtgacatcagcaggttgaaggagcagctcaaggctgcaacggaagcactgggggagaagtcccctgacagtgccacggtgtccggatatgatataatgaaatctaaaagcaaccctgacttcttgaagaaagacagatcctgtgtcacccggcaactcagaaacatcaggtccaagagtctgaaggaaggcctgacggtgcaagaacggttgaagctctttgaatccagggacttgaagaaagactaggtgtgtcccatccaagttgagcacgcgccttccccagcttgcagcagcacaccccaagcgctgcttttcacctgtacctttgttttattattattattattattgctgttgttgtcatcgttaactgtgggcatggaatgcgtgaggctggcttctgggttgtccacaccactctctgctgtgttgacttcctgttgtcttcatcaaagcttttttccgtggtattctaaaattaggccagcagtgggggctgggagggcatctgtgttagtcctttcctggctgtgacccgccacactcactgtcagtattaaggcccagcagcctgttgataagctaccctgtctcaccatgtgctggtgtggaaacggggcccagccagcacgcctcaaggtagatggaatccccactggtcagagaaaaagctatgcggacactccagcttggcctgggtcacagcactgactcctcacccgctagtctggctgttaagaggagaaagtgcactgccttccagcccaggaggaggacagcattttgtatttgttccactgatgcagcttagaaccacacccctgagagtcgtggcaaacctttcacaacctggaaaatgttgaaagcaaccattcctatttttgtttgttttttattaaatcttgcacaaaaaaaaaaaaaaaaaaaaaaa

SEQ ID NO: 30102 - DNA, 1272 bp, Homo Sapiens
cccgccgccaggccaccgctgctgcggcagccatggcggaagttcatagacgtcagcatgctcgggttaaaggagaagcccccgcgaaatcctccacactccgagatgaggaggagctggggatggcgtcggccgaaacgctgaccgtgtttctgaagctgctggccgccggcttttacggcgtgagctccttcctgatcgtggtggtgaataagagcgtgctcaccaattacagatttccctcctcactatgtgttggacttggccagatggtggccacagtggcagttctctgggtgggaaaggcgctcagagtagtcaagtttcctgaccttgacagaaatgtacctcgaaagacgtttccactacctctactatattttgggaaccaaatcacgggactgttcagcacaaagaaactgaacttgccaatgtttacagttctgagaaggttctccatcctgtttacaatgtttgctgaaggagttttactcaagaagactttttcttggggtattaaaatgactgtatttgcaatgattattggagcctttgtagctgccagctctgacttggcatttgatctggaaggatatgcttttattctgataaacgatgtcctaacagcagcaaatggtgcatacgtaaaacaaaaattagattcaaaagagctgggaaaatatggactgctctattacaatgcactgttcatgattctgcccaccctggccattgcgtatttcacaggagatgcacaaaaggctgtggagtttgaaggctgggctgacaccctctttcttctgcagttcaccctctcctgtgtgatggggtttatcttaatgtacgccacagtactctgcacgcagtataattctgctcttacaactacaatagttggctgtattaagaatatattaataacttatattggaatggtctttggtggagattatattttcacgtggacaaacttcattggtttaaatatcagcattgctgggagcctggtatattcctatatcactttcactgaagagcagctgagcaaacagtcagaggctaataacaagctggacattaaggggaaaggagcagtgtgaccagaggattgcttcatctgatacgtaggcctaagtttttaatcaactcagaacactggcagttcctacagagacactgaggtgtcttgattatggaggaaataaccattcctttgcacttgtacaatctgaggattgattgctgccttttaaaattttatgaagagagaaa

SEQ ID NO: 30103 - DNA, 3321 bp, Homo Sapiens
atggaggccgagcggggtcccgagcgccggcctgcggagcgtagcagcccgggccagacgccggaggagggcgcgcaggccttggccgagttcgcggcgctgcacggcccggcgctgcgcgcttcgggggtccccgaacgttactggggccgcctcctgcacaagctggagcacgaggttttcgacgctggggaagtgtttgggatcatgcaagtggaggaggtagaagaggaggaggacgaggcagcccgggaggtgcggaagcagcagcccaacccggggaacgagctgtgctacaaggtcatcgtgaccagggagagcgggctccaggcagcccaccccaacagcatcttcctcatcgaccacgcctggacgtgccgtgtggagcacgcgcgccagcagctgcagcaggtgcccgggctgctgcaccgcatggccaacctgatgggcattgagttccacggtgagctgcccagtacagaggctgtggccctggtgctggaggagatgtggaagttcaaccagacctaccagctggcccatgggacagctgaggagaagatgccggtgtggtatatcatggacgagttcggttcgcggatccagcacgcggacgtgcccagcttcgccacggcacccttcttctacatgccgcagcaggtggcctacacgctgctgtggcccctgagggacctggacactggcgaggaggtgacccgagactttgcctacggagagacggaccccctgatccggaagtgcatgctgctgccctgggcccccaccgacatgctggacctcagctcttgcacacccgagccgcccgccgagcactaccaggccattctggaggaaaacaaggagaagctgccacttgacatcaaccccgtggtgcacccccacggccacatcttcaaggtctacacggacgtgcagcaggtggccagcagcctcacccacccgcgcttcaccctcacccagagtgaggcggacgccgacatcctcttcaacttctcacacttcaaggactacaggaaactcagccaggagaggccaggcgtgctgctgaaccagttcccctgcgagaacctgctgactgtcaaggactgcctggcctccatcgcgcgccgggcaggtggccccgagggcccaccctggctgccccgaaccttcaacctgcgcactgagctgccccagtttgtcagctacttccagcagcgggaaaggtggggcgaggacaaccactggatctgcaagccctggaacctggcgcgcagcctggacacccacgtcaccaagagcctgcacagcatcatccggcaccgagagagcacccccaaggttgtgtccaagtacatcgaaagtcccgtgttgttccttcgagaagacgtgggaaaggtcaagttcgacatccgctacatcgtgctgctgcggtcagtgaggcccctacggttgttcgtgtatgatgtgttctggctgcggttctccaaccgggcctttgcactcaacgacctggatgactacgagaagcacttcacggtcatgaactatgacccggatgtggtgctgaagcaggtgcactgtgaagagttcatccccgagtttgagaagcaatacccagaatttccctggacggacgtccaggctgagatcttccgggccttcacggagctgttccaggtggcctgtgccaagccaccacccctgggcctctgcgactacccctcatcccgggccatgtatgccgtcgacctcatgctgaagtgggacaacggcccagatggaaggcgggtgatgcagccgcagatcctggaggtgaacttcaaccccgactgtgagcgagcctgcaggtaccaccccaccttcttcaacgacgtcttcagcaccttgtttctggaccagcccggtggctgccacgttacctgccttgtctaggcactcgctgtccccaaaacctgtgcttggggcaggattccaacctcagttctctgagctgcttctgcaaaggcccccatgtccctccccacaccggccctgggcatagcctcagccccaggcctctgtcctgccgagccatcctcccggcgccacactccgggagcacagcatcctcctctcacctgtgggtcagagcaggacagtgatggtgtccccagggctgagcaccaccccacgccctgccctcacccctcaccaccatctgtgcactgatgagtctccagtttagccaagggctttgttcctggcatggagaatttgttcctggctgctgtgtttccagggggtgctgggggaagggttccgtggagcgagacaaggtgtcctcgggagcagggttccaccgggaagcgtttgggagccctgtatcacacggggcaggcgggtttctcttccggggtctctgctcttatgcatcaggacgaccccgggacggctgtggggccccacactgcacccacagggctctatgcgacaggggcccaggaacagcctgaggccaccacccagcaagcccgccttatcacccattccagctcacccagaaccttcaccagcaaacctcctgctgaggtcctggcaggaggccaccgtcttgttaccgtttccttttcgtttgctgagggtcacagaccccaacagggaaatcagtatctgtcttcccagtggttgccctgctcgccgggcactccacggggtcccgcccttgtgtgagatgggccaggatccttcggcaaggggcgcctggggctggggctgattgtgggcggtggagcgccagacagaaaaggattccaatgagaacttcaggttaaagtcagatgccacctaccagggtctacagtcaaaatgttggctttttcttattttttaatgtatgggagaaaaatgtaaaattccagttcttttctaattgtgtttctgaaattaggagtcagctgccagcgtttttgtgtggctgcagtgtgcctgggcccagctcacgggcagtgggtggacctaactgcccaggcaggcgagagctacttccagagccttccagtgcatgggagggcagggctaggtgtagcggtgtctcctctttgaaattaagaactatctttcttgtagcaaagctgcacctgatgatgctgcctctcctctctgtgttgtctgggcccttgtttacaagcacgcgttacccttcctgaggggagccatgctctagcccctggagggcctgttgcaggggcagggcgggcccgtcgcctttggcagctcctggagagctgtggacatgcagtccccctcagttcgtgctgcaataaaggccatcttctctta

SEQ ID NO: 30104 - DNA, 2393 bp, Homo Sapiens
ctgatcatcccttaggaatgtctgaatctgaacaggctcttaaaggtacttctcagattaaattactctcatctgaagatatagaagggatgcgacttgtatgtaggcttgctagagaagttttggatgttgctgccggcatgattaaaccaggtgtaactactgaagaaatagatcacgctgtacacttagcatgtattgcaagaaattgctacccttctcccctgaattattataatttcccaaagtcttgttgtacctcagtgaatgaagtcatttgccatggaataccagacagaaggcccttacaagaaggtgacattgttaatgtggatatcactctttatcgcaatggttatcatggggacctgaatgagacattttttgttggagaagtggatgatggagcacggaaacttgttcagaccacatatgagtgcctgatgcaagccattgatgcagtgaagcctggtgttcggtacagagaattgggaaacattatccagaagcatgcccaagcaaatgggttttcagttgttcgaagctattgtgggcatggaatccacaagctttttcatacagctcccaatgtaccccactatgctaaaaataaagcagttggagtgatgaagtcgggccatgtatttacaattgagccaatgatttgtgaaggcggatggcaggatgaaacctggccagatggttggactgcggtgacaagagacggaaagcggtctgctcagtttgagcacaccctcctggtcacagacactggctgtgaaatcctaacccggcgacttgacagtgcacggcctcacttcatgtctcaattttaatttctcccaagatggcacatctcagtaccttcttactgtgctatgcattttattgagagtacagaaaggaagaggaacctttttttaatcacttgttttgttttgactatagataagaaaggactacagcatttgatgtgtgtcctcaagaacttgtcttgggtctgaaaaagctgagaagaataaaggaaacattgctcaactcttcagccccctccccctgcacacctgttttctcatttgccctttgagcacttttacttaaacttgcttgtagttgcttttatcactgccgcaaaacagccatcaagagccatctgctttccaggtgaacattggaaatgagaatctttgaaacttagcaatatgtgttgcaccagattttttaaattatatatatggaaatatatatgtatacattttaagttctgtatacataattaccaaacactatgtgacctggagtttgtgttgtttctgctctgacaggtttatatgttcttacaaatggatccatagtttgcagtgatttaattcctggttgggatttggcctcccctctcccccatgctaattatttacccttgtaattgtgcatagggaagcactcacccaatgagactttctccaatgtggactctgtgtgtcagtgaatgaatgtagtaaaattcactttggaaggttatcaggcttttaaaaatctagtttatggcaaaaatagccattttccaagtggtggctgactgttgcagggaatgagaatttcataatacactgctatttcagacctctgtttggtcagaaatggaaaagaaaaagccccctttcttcccttttctgttttacttcaagggcataccttggaggtgctcagagaagcgtgaagtttgcactatggtggaggatggggaaagagttctaaagtgtctccagctgtgaacccaggaggtcaagtgggctattaaaatctaacgttgagtaaatgtgatagtgatgagaaaggaattttgtgtactgtaaccttgcagtagagatgcagctgtccttcgtgtgtggaaacacacctctcctttacatagttgggaacctcattagaaatgacctcagctgccccatatctacgttcctttcagcagttgtccaagtaggagtgtatccagtgaagacatatcaaatcacaaagtcattgtcattagagtgtacttgattactgggcatccttgtaatataatttcataccactgacacattatacttgtaagagaacatctttcccagagtgcctcagaccttattgctttaaaatataataatgttttcattacttttattatttgaatgatttagtaaagttgactgaatctggtatagactttgggagtatgtgtgtgaagtttttatcaaactgtaatatttgtgaatggaatgccttgcaatatgaatgttaatataatgtgtaaagggagattaaaaagtttgaatgattatcctaaaaaaaaaaaaaaaaaaaaaaaaaaaaaaaaaaaaaaaaaaaaaaaaaaaaaaaaaaaaaaaaaa

SEQ ID NO: 30105 - DNA, 6245 bp, Homo Sapiens; identical to SEQ ID NO: 22436

SEQ ID NO: 30106 - DNA, 5936 bp, Homo Sapiens
gctgtcctggccgcgcccctgtcccgccgcctcccgctcctcgcctggcggatgtaggttgttggcctgaggggagctacgtagccgaggtttgcgctgccgccgccaggcccggtccggttccagcctctgcccggacgctagccggcctggccatggctgaccgcgggtgcccgctggaggcggcgccgctgcctgccgaggtgcgggagagcctggctgagctggagctggagctgtcggaaggtgacatcactcaaaaaggatatgaaaagaaaagggcaaagctgcttgcacgttatataccgcttattcaaggaatagacccatctctgcaagcagagaatagaattcctgggccctcacaaaccacggccgctgcacccaagcagcagaagtctcggcccaccgcctcgagggatgagcgcttccggtcagatgtccacactgaagccgtgcaagcagctttggccaaatacaaagagaggaagatgcctatgccttcgaagagacgttctgtccttgtgcattcgtctgtggaaacctacacccctccagacacgtcgtctgcctcagaagatgagggctctttacggcgacccgggcgactcacctccactccgctccagagccattccagcgtcgagccctggctcgaccgggtcattcagggctcgtccacctcatcctctgcatcctccacctcatctcacccgggagggagacccaccactgctcccagtgctgcagccacgccgggggccgccgctaccactgcactcgcaggcctcgaggcccacacccacatagatctgcattctgcccctcctgatgtcaccacgggcctcgtggagcattcgtactttgagcgtccacaggtggcttctgtgagaagtgttcctcgggggtgcagcgggagcatgctggaaacagcagatggtgtccctgtgaacagcagagtgtcctccaaaatccagcagcttctgaacaccctgaagaggccaaagcgccctccactgaaggagttctttgtggatgattttgaggaattgttggaagttcagcaaccagatccaaatcagccaaagcctgagggaagcgagacgagtgtgctgagaggggagcctctcactgcaggtgtcccccgaccgccgtcgctgttggccaccttgcagcgctggggcacaacacagcccaaatccccctgtctgactgccttggatacaactgggaaagccgtctacactctcacctatggtaaactttggagtcggagtttaaaactagcttatactctacttaataaactgacaagtaagaatgaacctctacttaaacctggagacagagtggcgctcgtgtttccgaatagtgaccctgtgatgttcatggttgcattttatgggtgtctcctggcagagctggttcctgtccccatagaagtgccattaacaagaaaggatgcaggcagccagcaggttgggtttctgctgggcagctgtggagtcttcttggccctgaccacagacgcttgtcagaaaggcctccccaaggcacagacaggagaggtggcagctttcaaaggttggcccccgctctcctggctagtgattgatgggaagcatctagccaagcccccaaaggactggcaccctctggcccaggacacagggactgggactgcctacattgagtataaaaccagcaaagaaggcagtacggtgggggtcacagtgtcccacgcatccctgctggcacagtgccgggctctgacccaggcgtgcgggtactcagaagctgaaacattaacaaacgtgctggatttcaaaagggatgctggtctgtggcatggcgtgttaacaagcgtcatgaacaggatgcacgtggtcagcgtcccctacgcgctgatgaaggcgaacccactctcctggatccagaaagtgtgcttctataaagctcgggccgcgctggtgaagtcgcgagacatgcactggtctctcctagctcagcggggccagagggacgtcagcctcagctcactgcgcatgctgattgtggccgatggtgccaacccgtggtcgatctcctcctgtgacgccttcctcaacgtcttccagtccagaggtctgaggccagaggtcatctgtccttgtgcaagttctcctgaggcgctgactgtcgccatccgcaggccacctgatctgggaggaccacctccaagaaaagcagtcctgtcgatgaacggtctaagttatggtgttatcagagtggatactgaagaaaagttgtcagtccttactgttcaggacgttggtcaggtgatgcctggagctaatgtatgtgttgtgaagttagaaggtaccccttatctttgtaaaactgatgaagtgggagaaatatgcgtcagttccagtgcaactggcacagcgtactatggattgcttggaatcacgaagaatgtgtttgaggcagttccggtcaccacaggaggagcacccatctttgacaggccattcaccaggacaggcctgctgggcttcatcgggcctgacaacctggtcttcatcgtgggcaaactggacgggctgatggtcactggagttcgcagacacaatgcagatgacgttgtggccaccgcactggccgtggagcccatgaagtttgtctacagaggcaggatcgctgtgttctctgtgaccgtgctgcacgacgaccggattgtcctggtggctgagcagcggccggatgcctcggaggaggacagcttccagtggatgagccgtgtgctgcaggccattgatagcatccaccaggtgggcgtgtactgtctggccctggttcctgccaacaccttgcccaaggctcctctcggagggattcacatttctgaaaccaaacagcgctttctggaagggacgctgcacccgtgtaatgtgctgatgtgccctcacacctgtgttaccaacctccccaaacctcgtcagaaacaaccagaggttggaccagcctcaatgatcgtggggaacctggttgctgggaagagaatcgctcaggcttccgggagagagctcgcccacctggaggacagcgaccaggcacggaagttcctgttcctggctgacgtgctgcagtggcgtgcccacaccactcctgaccacccgctgttcttgctgctgaacgccaagggcaccgtcacaagcactgcaacctgtgtccagctgcacaaaagggctgagagagtggccgcggctctgatggagaagggaagactgagtgttggggaccatgtggctctggtctacccaccaggggtggacctcattgccgcgttctatggctgcttgtactgtggctgcgtgcctgtcaccgtgcggcccccgcaccctcagaacctcggcaccacactgcccaccgtcaagatgatcgtggaggtcagcaagtctgcatgcgtcctcaccacgcaggctgtcacacggctgctcaggtccaaggaggctgctgctgccgtggacatcaggacctggcccaccatcctagacacagatgacatcccaaaaaagaagatagcaagcgttttcaggcccccctcccccgatgtcctcgcatacttggacttcagcgtgtcaaccactgggatattagcgggagtgaagatgtcgcacgcggccacaagcgccttatgccgctccataaagctgcagtgtgagctgtacccctcgcggcagatcgccatctgcctcgacccctactgtggccttggttttgccctgtggtgtctgtgcagtgtctactcgggacaccaatcagtgctggtgcccccgctggagctggagagcaacgtgtccctgtggctgtcggccgtcagccagtacaaggcccgcgtcaccttctgctcctactctgtgatggagatgtgcaccaagggcctaggcgcacagacgggtgtcctcaggatgaagggggtgaacctgtcatgtgtgcgcacgtgcatggtggtcgccgaggagcggcccaggattgcgctgacccagtccttctccaagctcttcaaggacctgggcctgccggcccgcgccgtaagcaccacgttcgggtgcagggtcaacgtggccatctgcctccagggcacagctggcccggaccccacaaccgtctacgtggacatgcgggcactgcgccatgacagggttcgtttggtagaacggggttctccgcacagcctgccattgatggagtctggaaagatcctccccggcgtgaaggtcatcatcgcacacaccgagaccaaaggacccttgggagactcacacctgggagagatctgggtaagcagcccccacaatgccaccgggtactacaccgtttacggggaggaggcgcttcatgccgaccacttcagtgcccggctgagttttggagacacacagaccatctgggcaaggaccggctaccttggcttccttcggcgaacagagctcactgatgccagtggagggcggcacgatgcactgtatgtggttgggtctctggatgaaactctggagctcagaggcatgcggtaccaccccatcgacattgagacctctgtcatccgagcacacaggagcatcgctgagtgtgccgtattcacctggaccaacctgctggtggtggtggtggagctggatgggctagagcaggatgccctggacctggtggccctggtgaccaacgtggtgctggaggagcactacctggtcgtgggagtggtggtcatcgtggacccaggggtgatccctatcaactctcggggtgagaagcagcgcatgcacctgcgggacggcttcctggctgaccagctggaccccatctatgtcgcctacaacatgtgagcgcagcacaccggcccaggtgccggagatgaatgagccccagcagtccaaggtgtgatgtgggaagacaccgcagagctcactcaccgggactcgcccttcctgtgctcttacagatccctctcaacaatccccgcatctccttttagaaagcacttcctgaattatttaaagaaatattttgaatctgccaagtacatttacaaaaacacggatgctggtattttaacagatggagagacaaggaaaggaaaggaaaggcctggcatgggcattgtgaggaatcacaggcaccgaggttgttctctgctgtactgcaagtttgcactttctttaggctaaaaatatagttcctgatttttaaaattcagttatttattcccacttcaaatgacaagttcatatatagaatttacgggagaaacttgagaccatttacggggagaaacttgattctgggaagatagcagagtacaaaccagctgcctcacttctgtttcacagggaggctgatggaaaaaggaagcaagctggacccatcctccctgctcacagagggcactgtggtcacacacagtgcctcctctgccagttcctttattgaaagaggtgtgctggctggccacggtggcttacacctgtaatcccagcactttgggaggccgaggcgagcagatcacgaggtcaggagaccgagaccatcctggctaacatggtgaaaccctgtctctactaaaaatacaaaaaattagccgggtgtggtggtgggcgcctgtagtcccagctacttgggaggctgaggcaggagaatggtatgaaccagggaggcggagcttgcagtgagccgagatcacgctactgcactccagcctgggtgacagcacgagatgccgtcttaaaaaaacaaaaaagaggtgtgctgcttgtcagcatgtattgtcacggacactcaataagtgccattttggactgtcaaatttagatgctttgtttcagaaagataagccagcatttagttttaaatcactttcctggtttgtaacttgatgctgtttagttaaattg

SEQ ID NO: 30107 - DNA, 5695 bp, Homo Sapiens
tgctatccaccccagctggaatttagaccagacttacaggctttctgctccttccttcagtgaagaagagtctccagggtccctctagtgcaggtcaaagaagtccagtccagctgagttcagctccctagggcctccccagccagtctcctgggccaagagctggctttgcaagaaaacatcctactaaagccctgggaaaagagacaaatggtgaagaggagaatgaaaggttgcaggagggagctcctgttttagccctgccacctacctgggggccctctggctaccagtgtccttggaggggcttccttgctgcttctcccactaaggagctctggagccttaggaccatggacgctctcaataggaaccaaataggccctggatgccagacccagaccatggtgcagaaaggacccttggacctgatcgagacaggcaaagggctgaaagtgcaaacggacaaaccccacctggtgagcctgggcagtgggcgactcagcacagccatcaccctcctgccgctggaggaagggaggacggtgattggctctgcagccagagacatctcactacagggcccaggcctggctccagagcactgctacatcgagaacctgcggggcaccctcaccctctacccctgtggcaatgcctgcactattgatgggctccctgtccggcagcctacccggctcactcagggctgcatgttgtgcctgggtcagtccaccttccttcgctttaaccacccggctgaagccaagtggatgaaaagcatgattccagcagggggccgagcccctgggcccccctacagccctgttcctgcagaatcagaaagtctggtaaatgggaaccacaccccacagactgcaacacggggaccctctgcctgtgccagccacagttccctggtgagctctattgagaaggacctgcaagagatcatggactcactggtgctagaggagcctggagctgctggcaagaagcctgccgcaacctctccactgtcaccgatggctaatggtgggcgctacctgctgtctcccccaaccagccccggcgccatgtctgtgggctccagctatgagaacacctctccagccttctctccactctcttcaccagccagcagtggaagctgtgccagtcactcacccagtgggcaagagccaggaccttctgtgcccccgctggtacctgcccgttcctccagctaccatctggccctacagcccccacagtcccgcccaagtggtgctcgctccgagagtcctcggctgagcaggaaagggggccatgagaggcctcccagccctggcctccggggtctgctgacagacagccctgcagctactgtcttggcggaggcccggagagccactgagagcccccggctgggtgggcagctgcctgtggtggccatcagcctgagtgaatacccagcttctggtgctctcagtcaacccaccagcattcctggcagccccaagtttcagcctccagtccctgctccccgaaacaagattggcacactccaggaccgccctcccagccctttccgtgagcctccaggcagtgagcgggtgctaacaaccagcccctcacgccaactggtgggccgaacattttcagatgggttagccacccgtaccctgcagcctcctgagagtccccgcctgggccggcggggcctggacagtatgcgagaactaccccccttaagtccatctctgtcccggcgagctctctccccgctgcccacccggaccaccccagatcccaagctaaacagggaagtggcagagagtcctcggccccggcgctgggcagcccatggggcttcaccagaggacttctccctgacgctgggggcacggggccgtaggacacggagcccctcacccacactgggtgagtctctggcaccccacaagggcagcttcagtggcaggctgagcccagcctacagtctgggctctcttactggggcttcaccctgccagagtccctgtgtccagaggaagctctccagcggggacttgcgggtgcctgtcacaagggagcggaaaaatagcatcacagagatcagtgacaatgaggacgacctcctggagtaccaccggcgacagcgccaagagcggctccgggagcaggagatggagaggctggaacgccagcgcctggagaccatcctgaacctgtgtgccgaatacagccgggctgatgggggacctgaggctggggagcttcccagcattggggaggccaccgcagcattggcactggcaggccggaggccctcacgaggccttgcaggggcctctgggcggagcagcgaggagcctggcgttgccacccaacgcctatgggagagtatggagcgctcagatgaggaaaatctcaaggaggagtgcagcagcactgagagcacccagcaggagcacgaagatgcacctagcaccaagctccagggagaggtgctagccctggaagaagagcgggctcaggtgctggggcacgtggagcagctcaaggtccgtgtgaaggagctagagcagcagctgcaggagtcagcccgagaggccgaaatggagcgggcactgctgcagggagagagggaggcagagcgggcactgctgcagaaggagcagaaggcagtggatcagctgcaggagaagctggtggccttggagacaggcatccagaaggagagggacaaggaggcagaggccctggagactgagacaaagctctttgaggacttggagttccagcagttggagcgggagagccgcgtggaggaggagcgcgagctggccggccaggggctgctccggagcaaggctgagctgctccgcagcatcgccaagaggaaggagcgcctggccatcctggacagtcaggctgggcagatccgggctcaggccgtgcaggagtcagaacgcctggcccgggacaagaatgcctccttacagctgctgcaaaaggagaaggagaagctgactgtgctggaaaggagataccactcactcacagggggcaggcctttcccgaagaccacatcgaccctcaaagagatggagaagctgctgctccctgctgtagacttagagcagtggtaccaggagctgatggccgggctggggactggccccgctgcagcctcccctcactcttctcccccgcctctgcccgccaaagcttcccgtcagctgcaggtttaccgctccaagatggatggcgaggccaccagcccccttccccggacccgcagcggccccctcccctcctcctctggctcttcctcctcctcctcccagctcagcgtggctaccctggggcgtagcccctccccaaagagcgctctactcacccagaatggcacgggcagccttcctcgcaacctggcagccacactgcaggacatcgagaccaagcgccaactagctctgcagcagaagggacaacaagtgattgaagagcagcggcggcgactggctgagctgaagcagaaagcggcagctgaggcacagtgccagtgggatgcccttcacggggcagcacccttcccagcgggcccctcgggcttcccccctctcatgcaccactctatcctacaccacctgcctgcggggcgggagcgtggggaggagggtgagcacgcctatgatacgctgagtctggagagctctgacagcatggagaccagcatctccaccgggggcaactcggcctgctcccctgacaacatgtccagcgcgagtggtctggacatggggaagatcgaggagatggagaagatgctgaaagaggctcatgcagagaagaaccggctcatggagtcgagggagcgggagatggagctgcggcggcaggccctggaggaggagcggcggaggcgtgagcaggtagaacggaggctgcagagtgagagtgcccggaggcagcagctggtcgagaaggaggtcaagatgcgggagaaacaattttcccaggcacgacccctgacccgctacctgccaatccggaaggaggactttgacctgaagacacatattgagtcatcgggccatggtgttgatacctgcctgcacgtggtgctcagcagcaaggtctgccgtggctacttggtcaagatgggcggcaagattaaatcatggaagaagcgctggtttgtcttcgaccggctcaagcgcaccctttcctattatgtggacaagcatgagacgaagctgaagggagtcatctatttccaggccattgaggaagtgtactacgaccacctgcgcagtgcagccaagaagaggtttttccgcttcactatggtgactgagagcccgaacccagccctcaccttctgcgtaaagacccatgaccggctgtactacatggtggccccatctgcagaggccatgcgtatctggatggatgtcattgtcacaggggctgagggctacactcagttcatgaactaactgtcgtgggcctcctggcagagcacaactggggcttttgtataagaagactttaatattctgtaaggagcttggtcctgtgagtttctgggctctggcctcctgaagaaccagccagaagaagaaaagtagaggtggctttgctgcctcctgggagcccagaacttgcagtaaccctttagggtcctgccccaggcccagccagggctgaggagctgtcacagagagggcctcagctctgacctgacacctgctctccccagcctgttttctcttttctaaaagacaaattatggtaccataagctgccaaagatcccctcctgcctcagacccctttgccaggggctttgggggctgagcagagccacatccagagtggggtaatagctcaggcggcccgcttcccatttctcaaaccccgctctgccccattgttctcctttcccttatactttttattaccttgctcaagggccagagatctcaagtgtcaaccttgaggtcccagctccatcccctagttgcagactcatcaccatggttaccatagtgactgcttcattgccatggttacatactaattgctgcagctctgtggcccagcccactgcttcagctgtgggccatctgagggtacgtgccatcatctctccagcccaggcccctgggcatctcatgctggggggaagggactgaatacctttttccttccccctgcctgtgtcttcagccctgatgcacaggctgccagccccccagtccagccctctcccttccactggtgccttgcttagagccagaagggatgaagccgggggatctatggaacagaggaggagcgatgcagttgggagaggaagctagaagggttatggttggagttctgtacagtgttgagtttccgacagggaaagaggattcctccaatgcgcctagagagaaagcctgagcaggagatgatgcagcagaggggaagggccctgtggtgccgccgcccttccttcagcctccgaagggtgatggaaatggagagtggaggaccaggcctccagctgtctggcctcgcccttcacgccttaacactaagcccacctcccctgctctccttcccagcattgagcccttggttgcctgggcccaggctgggggttttcagtatttgtaagcatttcagcagaacaataaagcctttggactacggaagtg

SEQ ID NO: 30108 - DNA, 5699 bp, Homo Sapiens
ggagttctcagacctccagtttcagccctgccctcagcctccaatccgtaagagacacccagccccagcaattggattgggcagcccgtcttgacacaccactgtgctgagtgcttgaggacgtgtttcaacagatggttggggttagtgtgtgtcatcacattcgagtggggattaagagaaggaaggctgccttgctggagctgtgtggtcttctccaagtgagagtcgcaggcaatagaactactttgcttttggaggaaaaggaggaattcattttcagcagacacaagaaaagcagtttttttttcagggattcttcacttctcttgaacaaggaactcactcagagactaacacaaaggaagtaatttcttacctggtcattatttagtctacaataagttcatccttcttcagtgtgaccagtaaattcttcccatactcttgaagagagcataattggaatggagaggtggtgctgacggccacccaccatcatctaaagaagataaacttggcaaatgacatgcaggttcttcaaggcagaataattgcagaaaatcttcaaaggaccctatctgcagatgttctgaatacctctgagaatagagattgattattcaaccaggatacctaattcaagaactccagaaatcaggagacggagacattttgtcagttttgcaacattggaccaaatacaatgaagtattcttgctgtgctctggttttggctgtcctgggcacagaattgctgggaagcctctgttcgactgtcagatccccgaggttcagaggacggatacagcaggaacgaaaaaacatccgacccaacattattcttgtgcctaccgatgatcaagatgtggagctggggtccctgcaagtcatgaacaaaacgagaaagattatggaacatgggggggccaccttcatcaatgcctttgtgactacacccatgtgctgcccgtcacggtcctccatgctcaccgggaagtatgtgcacaatcacaatgtctacaccaacaacgagaactgctcttccccctcgtggcaggccatgcatgagcctcggacttttgctgtatatcttaacaacactggctacagaacagccttttttggaaaatacctcaatgaatataatggcagctacatcccccctgggtggcgagaatggcttggattaatcaagaattctcgcttctataattacactgtttgtcgcaatggcatcaaagaaaagcatggatttgattatgcaaaggactacttcacagacttaatcactaacgagagcattaattacttcaaaatgtctaagagaatgtatccccataggcccgttatgatggtgatcagccacgctgcgccccacggccccgaggactcagccccacagttttctaaactgtaccccaatgcttcccaacacataactcctagttataactatgcaccaaatatggataaacactggattatgcagtacacaggaccaatgctgcccatccacatggaatttacaaacattctacagcgcaaaaggctccagactttgatgtcagtggatgattctgtggagaggctgtataacatgctcgtggagacgggggagctggagaatacttacatcatttacaccgccgaccatggttaccatattgggcagtttggactggtcaaggggaaatccatgccatatgactttgatattcgtgtgcctttttttattcgtggtccaagtgtagaaccaggatcaatagtcccacagatcgttctcaacattgacttggcccccacgatcctggatattgctgggctcgacacacctcctgatgtggacggcaagtctgtcctcaaacttctggacccagaaaagccaggtaacaggtttcgaacaaacaagaaggccaaaatttggcgtgatacattcctagtggaaagaggcaaatttctacgtaagaaggaagaatccagcaagaatatccaacagtcaaatcacttgcccaaatatgaacgggtcaaagaactatgccagcaggccaggtaccagacagcctgtgaacaaccggggcagaagtggcaatgcattgaggatacatctggcaagcttcgaattcacaagtgtaaaggacccagtgacctgctcacagtccggcagagcacgcggaacctctacgctcgcggcttccatgacaaagacaaagagtgcagttgtagggagtctggttaccgtgccagcagaagccaaagaaagagtcaacggcaattcttgagaaaccaggggactccaaagtacaagcccagatttgtccatactcggcagacacgttccttgtccgtcgaatttgaaggtgaaatatatgacataaatctggaagaagaagaagaattgcaagtgttgcaaccaagaaacattgctaagcgtcatgatgaaggccacaaggggccaagagatctccaggcttccagtggtggcaacaggggcaggatgctggcagatagcagcaacgccgtgggcccacctaccactgtccgagtgacacacaagtgttttattcttcccaatgactctatccattgtgagagagaactgtaccaatcggccagagcgtggaaggaccataaggcatacattgacaaagagattgaagctctgcaagataaaattaagaatttaagagaagtgagaggacatctgaagagaaggaagcctgaggaatgtagctgcagtaaacaaagctattacaataaagagaaaggtgtaaaaaagcaagagaaattaaagagccatcttcacccattcaaggaggctgctcaggaagtagatagcaaactgcaacttttcaaggagaacaaccgtaggaggaagaaggagaggaaggagaagagacggcagaggaagggggaagagtgcagcctgcctggcctcacttgcttcacgcatgacaacaaccactggcagacagccccgttctggaacctgggatctttctgtgcttgcacgagttctaacaataacacctactggtgtttgcgtacagttaatgagacgcataattttcttttctgtgagtttgctactggctttttggagtattttgatatgaatacagatccttatcagctcacaaatacagtgcacacggtagaacgaggcattttgaatcagctacacgtacaactaatggagctcagaagctgtcaaggatataagcagtgcaacccaagacctaagaatcttgatgttggaaataaagatggaggaagctatgacctacacagaggacagttatgggatggatgggaaggttaatcagccccgtctcactgcagacatcaactggcaaggcctagaggagctacacagtgtgaatgaaaacatctatgagtacagacaaaactacagacttagtctggtggactggactaattacttgaaggatttagatagagtatttgcactgctgaagagtcactatgagcaaaataaaacaaataagactcaaactgctcaaagtgacgggttcttggttgtctctgctgagcacgctgtgtcaatggagatggcctctgctgactcagatgaagacccaaggcataaggttgggaaaacacctcatttgaccttgccagctgaccttcaaaccctgcatttgaaccgaccaacattaagtccagagagtaaacttgaatggaataacgacattccagaagttaatcatttgaattctgaacactggagaaaaaccgaaaaatggacggggcatgaagagactaatcatctggaaaccgatttcagtggcgatggcatgacagagctagagctcgggcccagccccaggctgcagcccattcgcaggcacccgaaagaacttccccagtatggtggtcctggaaaggacatttttgaagatcaactatatcttcctgtgcattccgatggaatttcagttcatcagatgttcaccatggccaccgcagaacaccgaagtaattccagcatagcggggaagatgttgaccaaggtggagaagaatcacgaaaaggagaagtcacagcacctagaaggcagcgcctcctcttcactctcctctgattagatgaaactgttaccttaccctaaacacagtatttctttttaacttttttatttgtaaactaataaaggtaatcacagccaccaacattccaagctaccctgggtacctttgtgcagtagaagctagtgagcatgtgagcaagcggtgtgcacacggagactcatcgttataatttactatctgccaagagtagaaagaaaggctggggatatttgggttggcttggttttgattttttgcttgtttgtttgttttgtactaaaacagtattatcttttgaatatcgtagggacataagtatatacatgttatccaatcaagatggctagaatggtgcctttctgagtgtctaaaacttgacacccctggtaaatctttcaacacacttccactgcctgcgtaatgaagttttgattcatttttaaccactggaatttttcaatgccgtcattttcagttagatgattttgcactttgagattaaaatgccatgtctatttgattagtcttatttttttatttttacaggcttatcagtctcactgttggctgtcattgtgacaaagtcaaataaacccccaaggacgacacacagtatggatcacatattgtttgacattaagcttttgccagaaaatgttgcatgtgttttacctcgacttgctaaaatcgattagcagaaaggcatggctaataatgttggtggtgaaaataaataaataagtaaacaaaatgaagattgcctgctctctctgtgcctagcctcaaagcgttcatcatacatcatacctttaagattgctatattttgggttattttcttgacaggagaaaaagatctaaagatcttttattttcatcttttttggttttcttggcatgactaagaagcttaaatgttgataaaatatgactagttttgaatttacaccaagaacttctcaataaaagaaaatcatgaatgctccacaatttcaacataccacaagagaagttaatttcttaacattgtgttctatgattatttgtaagaccttcaccaagttctgatatcttttaaagacatagttcaaaattgcttttgaaaatctgtattcttgaaaatatccttgttgtgtattaggtttttaaataccagctaaaggattacctcactgagtcatcagtaccctcctattcagctccccaagatgatgtgtttttgcttaccctaagagaggttttcttcttatttttagataattcaagtgcttagataaattatgttttctttaagtgtttatggtaaactcttttaaagaaaatttaatatgttatagctgaatctttttggtaactttaaatctttatcatagactctgtacatatgttcaaattagctgcttgcctgatgtgtgtatcatcggtgggatgacagaacaaacatatttatgatcatgaataatgtgctttgtaaaaagatttcaagttattaggaagcatactctgttttttaatcatgtataatattccatgatacttttatagaacaattctggcttcaggaaagtctagaagcaatatttcttcaaataaaaggtgtttaaacttt

SEQ ID NO: 30109 - DNA, 21813 bp, Homo Sapiens
gccaaggagcggagcgcgctcagctgcgcccagagccttcggccggacctgaaaaagcgagagggagagcgagcaaaaggcgcgatccagagagccaggcaagcggggcgccgacctcgggcggccccggcccgcgcccttgcccctcggccgggcggacgttcacttcttcaactgagatggacatgatataatctccattgagtcaaagaatggcatctagtcctgagcttcccaccgaagatgaacagggttcctggggcatcgacgatctccatatttcattgcaagctgaacaggaagacacccagaagaaagccttcacgtgctggataaactcacagttggccaggcacacttctccctcagttatatccgacctattcacagacattaaaaaggggcatgtcctcctggatctgctagaagtactttctgggcaacagttgcctcgggataaaggatctaataccttccagtgtagaatcaatatagaacatgccttgacattcctaagaaaccgatcaattaagctaataaatattcatgttactgatatcattgatggaaacccatccattatccttggcctaatttggacaattatcctgcactttcatattgagaagcttgcccagactctttcttgcaattacaatcagccttccctggatgatgtgagtgtggttgactcatctcctgcctcaagtcctccagctaagaaatgctctaaagtgcaagcaagatggcaaatgtctgcaagaaaggcccttcttttgtgggctcaggaacaatgcgccacctatgagtctgtcaatgtgaccgattttaagtcaagttggagaaatgggatggcttttttggccatcattcatgccttgcgaccagacctaattgacatgaagagtgtgaagcatagatccaacaaagacaatctgagagaggccttcagaattgcagaacaagaattaaaaatccccagattgctggaaccagaagatgtggatgttgttgatcctgatgaaaagtccatcatgacctatgtggcacagtttctgcagtattccaaagatgcccctgggactggagaggaggctcagggaaaggtgaaagatgctatgggctggttaactctgcaaaaggaaaaactacagaagttgctaaaggattcagagaatgatacctactttaaaaagtataatagcctgctgtcctttatggagtcattcaatgaagaaaaaaagtcctttttggatgtcctgtcaataaaacgggatctggatgagctggacaaggatcatttacagttgagagaagcctgggatggcctcgatcaccagattaatgcatggaaaataaagctaaattatgccttgcccccacccctccatcaaactgaagcttggctccaggaggtagaagagcttatggatgaagatttgtcagcctcccaggatcactctcaagccgtgactctgatacaagagaaaatgactttattcaagagcctgatggatagatttgagcatcattcgaacattctccttacctttgaaaataaggatgaaaatcacttgccattggtaccacctaacaaattggaggaaatgaaaagacgaatcaacaacattttggagaaaaaatttattctacttctagaatttcattactacaagtgcttagttcttggtttggtagatgaagtgaaatcaaaattggatatttggaacattaaatatgggagcagagaatctgtggaattattgctggaagactggcataaatttattgaagaaaaagaattcctagctcgacttgatacttcttttcaaaaatgtggagaaatttataagaatttggctggagaatgtcagaatattaataaacagtatatgatggtgaaatctgatgtttgtatgtatagaaaaaatatatataatgtgaagtccactctacaaaaagtgctggcatgttgggctacttatgtggaaaaccttcgcttactaagggcttgctttgaggagacaaagaaggaagaaattaaagaggtaccctttgagacactagcccagtggaatctagaacacgctactttaaatgaagcaggaaatttcttagtcgaagtcagcaatgatgtggttggatcatctatttctaaagaactgagaaggctgaataaaagatggagaaagttggtttcaaaaactcaacttatgaacctgccactgatgataaaaaaacaggatcagcccacttttgacaattctggaaatattctatctaaagaagagaaagcaactgttgagttttcaacagatatgtcagtagaacttcctgaaaattataatcaaaatataaaggctggagagaaacatgaaaaagaaaatgaagaattcacagggcaactaaaagtggctaaagatgttgaaaaactcattggacaagtggaaatctgggaggcagaagccaaatctgttttggatcaagatgatgtggacacctcaatggaagaatctttgaagcatcttattgccaaaggctctatgtttgatgagcttatggcaagaagtgaagatatgttacaaatggatatacaaaatatttcaagccaggagtcctttcaacatgttctcacaactgggcttcaggcaaagattcaagaagctaaagagaaagtccagatcaatgtggtaaaactcattgcagcgttgaagaacttaactgacgtttcaccagatttggacatcaggctgaagatggaagaatcccagaaggaacttgaatcatatatgatgagggctcagcagttactggggcaaagagagagccccggtgaactcatttcaaaacacaaggaagcactaataatttctaatacaaaaagtctggccaagtatttgaaagctgttgaagaactaaaaaataatgtaactgaggacataaagatgtctttagaagaaaagagtagagatgtctgtgccaaatgggagtctcttcatcatgaactgtctttatatgttcaacaactaaaaatagatattgaaaaaggaaagcttagtgacaatattttaaaacttgaaaagcaaataaataaagaaaagaaacttatccgtagaggaaggaccaagggtctcatcaaagaacatgaggcctgcttttctgaggaaggctgcctgtaccagcttaatcaccacatggaagtcctgagggagctgtgtgaagagctgccttcacagaagagtcaacaagaagtgaagagactactcaaagattatgaacaaaagatagaaagacttctgaaatgtgcttccgagattcatatgacactgcagcccacagcgggaggcacgtcgaaaaacgaggggaccatcaccacatctgagaatagaggaggggatccccacagtgaggcaccatttgcaaaatcagataatcagccatcaactgaaaaggcaatggaacccactatgaagtttagcctggcatcagtgttaaggcctctgcaagaagaaagcattatggaaaaggattacagtgcatctataaatagtttactagagaggtatgatacatacagagatattcttgaacaccacctgcaaaacaacaaattcaggattacttctgatttctctagtgaagaggacaggagtagttcttgtctgcaggctaaactgacagatctacaggtcataaaaaatgaaactgatgctcgctggaaagagtttgaaattatttcattgaagttagaaaatcatgtgaatgacataaaaaagccttttgtaattaaggaaagagacacactaaaggaaagagaaagagagcttcagatgactcttaataccagaatggaatctttagagacagcactgcggcttgtgttacctgtagagaaggcatcacttcttctctgtggctcggacctgcctctccataaaatggccatccagggatttcatctcattgatgctgatcgcatctatcaacacctaaggaatatccaagattccatagcaaaacagattgaaatatgtaaccgcttagaagagccaggcaactttgtattaaaggagttacacccatttgatctacacgcaatgcagaatattatactgaaatacaaaacacaatttgaaggaatgaaccacagggtgcagaggagtgaagatactctcaaagctctggaagactttttggcgtctctcagaacagctaaactctctgctgagcccgttacagacctttcagcctcagatacacaggtggcacaagaaaatacgttgacagtaaaaaataaagagggagaaattcatctgatgaaagacaaggccaaacatttggataaatgtttgaagatgctcgatatgagctttaaagatgctgaacggggtgatgacacctcctgtgaaaacctgcttgatgctttttcaataaagttatctgagacacatggctatggggtacaggaggaattcactgaggaaaacaaattactagaggcttgtattttcaaaaataatgaactccttaaaaatattcaagatgtgcagagtcaaatcagtaaaattggtcttaaggatcctactgttccagctgtgaaacatcggaaaaaatcattaatcagactggataaggttctagatgaatatgaagaagagaagagacatttacaagaaatggctaattctcttccacacttcaaagatggcagagaaaaaaccgtgaatcaacagtgccaaaatacagtagtcttgtgggagaataccaaagccttggtcaccgaatgtcttgaacaatgtgggagagttttggagctcttaaaacaatatcagaattttaaaagcatcttgacaactttgattcaaaaagaagagagtgtcatctccctgcaggcttcgtacatgggaaaggagaacctgaagaaaaggatagcagagattgaaattgtcaaagaagaatttaatgagcatttagaagttgtagacaagataaaccaggtctgcaaaaatctacaattttatctaaataaaatgaaaacttttgaagagcccccttttgaaaaagaggctaatattattgtggatagatggcttgatataaatgagaagacagaagattactatgaaaatcttggtcgagctctagctttgtgggacaaactttttaacttaaaaaatgtcattgatgagtggacagaaaaggcccttcaaaaaatggaattacatcaattgactgaagaggacagagaaaggctgaaggaagaattacaagtccatgaacaaaaaacttcagaattttctagaagagtggctgaaatacagtttttgctccaaagcagtgaaatacctcttgaattgcaggtcatggagtcctctattttgaacaagatggaacatgtacagaagtgcttaacaggagaatccaactgccatgcactcagtggcagcactgctgagctaagggaggatctcgaccaagccaagacccagatcgggatgactgaatccctcttaaaagccctgtctccttctgacagcttggagatcttcactaaactagaggagatacaacagcagattctacagcaaaaacacagtatgatattacttgagaatcaaataggttgtctgactcctgaactctctgaattgaaaaagcaatatgaaagtgtcagtgatttatttaataccaaaaaaagtgttttgcaagatcacttttctaagttattgaatgatcaatgcaagaactttaatgactggttcagcaacattaaagtgaaccttaaggagtgttttgaatcatcagaaacaaaaaagagtgtggaacaaaagctacaaaaactttctgatttcttgactcttgaaggaagaaacagtaaaataaagcaggtggacagcgtactgaagcatgtgaagaagcatctgcccaaagcacatgtgaaggagcttatcagttggctcgtgggtcaggaattcgaattagaaaaaatggagtccatatgccaggctcgagcaaaggagcttgaagactccttgcagcagctactgagactccaggatgaccatagaaacctgaggaagtggttgactaatcaagaagagaaatggaaaggaatggaagaaccaggggagaaaactgagctgttctgccaagctttagctagaaagagggaacagtttgaatctgtggcccaattgaacaactctttgaaggaatatgggtttactgaagaagaagaaataataatggaagcaacatgtttgatggatagataccagacattactgagacaactaagtgaaatcgaggaagaggataagttactacccacagaggaccagagctttaatgatcttgcacatgatgtaattcattggataaaagagattaaagagtcccttatggttttgaattcatccgaaggcaaaatgccacttgaggaaagaatccaaaaaatcaaggaaatcattttgctgaagcctgaaggggatgccagaatagagaccatcatgaagcaggctgagagcagcgaggccccgctggttcagaagaccctcactgacatcagcaaccagtgggacaacacactccatttagctagcacctacctaagccatcaagaaaagcttctactagaaggagagaaatatttacaaagtaaggaggatctgagattaatgctcatagaactaaagaagaaacaggaagcaggctttgctctacaacatggtctgcaggagaagaaagctcagttaaagatttataagaaattcctcaagaaagcccaagatttgacatccttgctaaaggagttaaaatctcagggaaactacctcttggagtgcactaaaaatcccagcttcagtgaagagccttggctggaaataaagcatctacacgaaagtcttcttcaacaactgcaggattctgtgcaaaacttggacggtcacgttcgagaacatgattcataccaggtttgcgtcacagacctgaatactacattggacaatttctccaaggaatttgtcagtttttctgataagcctgtggatcaaatagcggttgaggaaaaattgcagaaactgcaggaactagagaatagactcagtttacaagatggcacattaaagaagattttagctttagcaaaatccgtcaagcaaaatacatcttcagtggggcagaagattattaaagatgatataaaatcacttcagtgtaaacaaaaagatttggaaaacaggcttgcatctgctaagcaggagatggaatgttgtctcaacagcattctcaaatcaaaacgctcaacagaaaagaaaggaaagtttactctgccaggcagagagaagcaggccacttctgatgtgcaggagtctactcaggaatcagctgcagtggaaaagttggaggaagactgggaaataaacaaggattcagctgtggaaatggctatgtcaaaacaactttctcttaatgctcaagaaagcatgaaaaacactgaagatgagcggaaagtcaatgagctgcaaaatcaacctttagaattagatactatgttaagaaatgaacaattagaagagatagagaaattatatacccagttggaagcaaagaaagcagccattaagccactggaacaaacagaatgtcttaacaaaacagaaactggggccttggttctccacaatataggatattcggcacagcatttggacaatttgcttcaggcacttattactttgaagaaaaacaaagaaagccaatattgtgtcctcagagattttcaggaataccttgctgcagttgaatcttcaatgaaagccttgttgacagacaaggaaagtcttaaagtaggaccactggacagtgtaacgtatctggacaaaattaaaaaattcatagcatccatagaaaaagagaaagattctttaggcaacttgaaaatcaaatgggagaatttatcaaaccacgtgactgacatggataagaaattgttggaaagccagattaagcaacttgaacatggttgggaacaagtggaacagcagattcaaaagaagtattctcagcaggtagtggaatatgatgaatttacaaccctcatgaataaggtacaggacactgagatttctctgcaacagcagcagcaacatctacagttaaggctgaagtctccagaagaacgggcagggaaccaaagcatgattgccttgaccactgacctccaggctaccaagcatggattttctgttttaaaggggcaagctgaacttcagatgaagaggatttggggagaaaaagaaaagaagaatttggaggatggaataaataacttgaagaaacaatgggaaacattggagccattacacttagaagcagaaaatcagattaagaagtgtgacataaggaacaagatgaaagagactatcttatgggccaagaatttgttgggtgaacttaatccctccattccccttctcccagatgacattctttcacagatcagaaagtgcaaagtgacacatgatggcattctagctaggcagcagtctgtggaatcgttggctgaagaggtcaaagataaggttcctagccttacaacctatgagggcagtgatttaaataataccctagaggacttacggaatcaataccaaatgctggttttaaaatcaactcaaagatcacagcaattagaatttaagttggaagaaagaagcaatttttttgctataataaggaagtttcaacttatggttcaagaaagtgaaacactgataattcccagggtggagacagctgccacggaagctgaactaaaacatcaccatgttactttggaggcatctcagaaggaattgcaagaaattgacagtggaatctcaacacatcttcaggagctaacaaacatctatgaggagctgaatgtgtttgaaagattatttctggaagatcagttgaaaaatcttaagattaggaccaacagaatacaaagattcattcagaatacatgtaatgaagtggaacacaagataaagttttgcagacaattccatgaaaaaacatcagcgcttcaggaggaggctgacagtatacagcgcaatgaactattacttaatcaagaagtaaataaaggtgttaaagaggagatctataatcttaaagacagactcaccgctattaagtgttgcatcttacaggtattgaaacttaaaaaagtgtttgactatattggactaaactgggatttttcacaacttgaccaattacaaacccaagtatttgaaaaagaaaaggaacttgaagaaaaaattaagcagttggacacatttgaggaagaacatggcaaatatcaggcattattaagtaaaatgagagctattgatttgcaaattaagaaaatgactgaagtagtactaaaagctcctgatagctctccggaaagcagacggctcaatgcccaaattttaagtcagagaattgagaaagccaagtgtttatgtgatgagataataaagaaattaaatgaaaataagacctttgatgactcattcaaggagaaagaaatactacaaataaagctgaatgcagaagaaaatgataagttatacaaagttctccaaaacatggtattagaactctcaccaaaagaattggatgaaaagaattgtcaggacaaactagaaacttccttacatgttttaaatcagataaaatctcaattacagcagccattacttataaatttggaaattaaacatattcaaaatgaaaaggacaattgtgaagcatttcaggagcaagtttgggcagaaatgtgtagtattaaagctgtgactgctattgagaaacaaagagaagaaaactcttctgaagcgagtgatgtggagacaaaactacgtgagtttgaagatcttcagatgcagcttaacacaagcattgatttgcgcacaaatgtcttgaatgatgcttatgaaaatctaacacgctataaagaagcagtcaccagggcagtggagagcatcacttccctcgaagccatcattataccctacagagtagatgttggtaatccagaagaatctttagagatgcctcttcgaaaacaagaggaattggaatccacagtagcacgcatccaggacctcactgagaaactgggaatgatatccagccccgaagccaaactacaacttcagtatactttacaggaactagtttctaagaactcagcaatgaaggaagctttcaaagcacaggaaactgaggcagaaaggtatcttgagaattacaaatgctatagaaaaatggaagaggatatttacactaacctcagcaaaatggagacagttcttggacagtccatgtcctcgttgccactgtcttacagagaagctttagagcgcttggaacagagcaaggccttggtgtcaaatcttatatcaaccaaagaagagttaatgaaactacgacagatccttagactcttgagactcaggtgcacagaaaatgatggcatatgtttgctcaagattgtgtcggctctgtgggagaaatggctgagtttgctggaagctgctaaagagtgggagatgtggtgcgaagaactgaagcaggaatggaaatttgtcagtgaagaaattgaacgagaggcaattattttagataatcttcaggaagaactccctgaaatttccaaaacaaaagaggcagccaccacagaggaactctctgagctgctagactgtttatgccaatatggagagaacgtggagaagcaacagctgttactgactctacttcttcagcgcatcagaagtatccagaatgttcctgaaagctcaggggctgtggaaactgttccagcatttcaagaaattacttctatgaaagaacgatgcaacaagcttcttcagaaagttcagaaaaataaagaattggtgcagactgaaatccaagaaagacattccttcacaaaagagataattgctttgaagaatttctttcaacagaccacaacttcattccaaaatatggcattccaggatcacccagaaaagtcagaacaatttgaggagcttcaaagcatccttaagaaagggaaactaacttttgagaatattatggaaaaactgcgaatcaagtattccgaaatgtacaccatagtccctgcagagattgaatcccaggtggaagaatgcagaaaagctttagaagacatagatgagaagattagcaatgaagtcttaaaaagctcaccatcatatgcaatgaggagaaaaatagaagaaattaacaatgggcttcataatgttgaaaagatgttgcagcagaaaagcaaaaatattgagaaagctcaagaaattcaaaagaaaatgtgggacgagttagatctatggcattccaaactaaatgagctggattctgaagttcaggacattgttgaacaggacccaggacaggctcaagaatggatggataacttgatgattcctttccagcagtatcagcaagtatcacagagagcagagtgtagaacctcacagttgaataaggccacagttaagatggaggaatatagtgaccttctgaagagcactgaggcttggatagaaaataccagtcatttgctggccaatcctgctgactatgactctttgaggacactgagtcaccatgctagcactgtgcagatggctttggaagattcagaacagaagcacaatcttttacattcaatctttatggatctagaagacctgtcaataatttttgaaacagatgaattaacccaatccatacaagagttaagtaatcaagtaacagctttacaacaaaaaataatggaaagccttccacagattcagcgaatggctgatgatgtggttgctattgaatctgaagtaaaatcaatggaaaaaagagtttcaaaaatcaaaactatcctattatcaaaagaaatatttgatttttcacctgaagaacatctcaaacatggggaggtcatacttgaaaatatacgtcccatgaagaaaaccattgctgagatagtgtcttaccaagtggaactgaggttgccccaaacaggaatgaaacctctgcctgtgtttcagcggacaaatcagcttttacaagatataaaactattggaaaatgtgactcaagaacaaaatgagttattaaaggtagtcataaaacagaccaatgaatgggatgaagaaatagaaaatttgaaacagatcttaaataattattcagctcagttctcccttgaacatatgtcaccagaccaagctgacaagctgccacaactacagggagaaatcgaacgtatggagaaacagattctgagtttgaaccagagaaaagaagacctgttggtggacttgaaggccaccgtactaaaccttcaccagcatttgaagcaagaacaagaaggagtagaaagagataggctgccagctgtaacatcagaggaaggtggagtggcagagagggatgcttctgagcggaagttgaacagaagaggctccatgtcttacctggcagcagtcgaggaagaggtggaagaaagttccgtgaagagcgataatggagatgagaaggcagagccatcgcctcagtcttggtcttcactttggaagcatgacaaggacatggaagaagacagagcttcctcatcctctggaacaattgttcaggaagcatatgggaaaataagcacctctgataattccatggcacaaatcctcacaccagactcactaaacactgagcaaggcccagaatgttccctaaggcccaaccaaacagaagagggcaccacacctcctattgaggctgacactctggactcttctgacgcgcaaggaggtttggagcccagggtggagaaaactaggccggagcccacagaagtcctgcatgcctgcaagacccaggtggccgagctggagctgtggctgcaacaagccaacgtggcagttgagccggaaacattaaacgcagacatgcagcaggtgctggaacagcagctggtagggtgccaggctatgctaacagagattgagcacaaggttgcctttctgttagagacttgcaaagatcagggcctgggagataatggagccactcaacatgaggctgaagcgctttccctgaaactgaaaacagtgaagtgcaatttagaaaaagtccagatgatgcttcaggagaagcacagtgaagatcagcatcctaccattctaaagaaatcctcagagccagagcatcaagaagctctccaaccagttaacctttctgaattggaatccattgtaactgaaaggccacaattcagcagacaaaaagatttccagcagcaacaggttctggagttaaaaccaatggaacagaaagatttcatcaaattcatagaatttaatgctaagaaaatgtggccccagtattgccaacatgataacgatacaactcaggaatcatctgcaagcaaccaggcatccagccctgaaaatgacgttccagactcgatcttgtcaccccagggccaaaatggagataagtggcaatatctgcatcatgaactctcatcaaaaataaagctcccactccctcagcttgtggagcctcaggtttccacaaatatgggtattctacccagcgtgactatgtataactttagatacccaacaactgaagaactgaaaacctataccacccaacttgaagacctgcgccaagaagcaagtaaccttcagacacaggaaaatatgacagaagaagcatatatcaatttggataaaaaattgtttgaactattcctgaccctcagtcagtgcctcagcagtgtggaggagatgctggagatgcccagactttacagggaggatggttctggccagcaggtgcactacgagacgctggctcttgagttgaagaaactttatttagcgctaagtgacaagaagggtgatcttttgaaagccatgacttggcctggcgagaacaccaacttgctccttgaatgttttgacaaccttcaagtctgcctggagcacactcaggctgcagctgtctgtagaagcaagtccctgaaagctggcctcgattacaaccgcagttaccagaatgaaataaagagattatatcatcagctcattaagagtaagacatctttacaacagtctttgaatgaaatcagtgggcagagtgttgctgaacagcttcagaaagcagatgcatatacagtggagctggagaacgccgagagccgagtggccaaactaagagatgaaggggagaggcttcatttaccttatgctttactccaggaggtttacaaattagaggatgtacttgacagtatgtggggaatgctaagagccaggtacacagaactcagcagccctttcgtcactgagagccagcaagatgctttgttgcaaggcatggtggaactggtgaagattgggaaggaaaagcttgctcatggccacttaaaacaaaccaaaagtaaagtggcgttacaggctcaaatagaaaatcacaaggtttttttccagaagcttgttgctgacatgttgttgatccaagcatactctgccaaaatacttccttctttattgcaaaacagagagacattttgggcagaacaagtaacagaagttaaaatactagaagaaaagtcacgccaatgtggtatgaagctgcagagtttgttgcagaaatgggaagaatttgatgaaaactatgcatctcttgaaaaggacctggaaattcttatatctacattgccctctgtgagtttggtggaagaaacagaggaaagattagtggaaaggatttcattttaccagcaaataaaaagaaacattggtggaaaacacgcccggctttaccaaactctgaacgaaggcaaacagttggtggcgtctgtgagctgtcctgaattagagggccagatcgcaaaactggaagagcagtggttgtccctgaacaagaaaattgaccatgagctccacaggctgcaagctcttctcaagcatctgctcagttataacagagattcggatcagttaaccaagtggttggaatcttcccagcatactctgaattactggaaagaacagtccctcaatgtgtctcaggacttggatacaatcagaagcaacatcaacaatttttttgagttttcaaaagaagttgatgaaaaatcctccttgaagactgccgttatcagtatcgggaaccagcttcttcacctgaaagaaactgatacagctacactgagagcttctttagcacagtttgaacaaaaatggacaatgctcataactcaacttccagatattcaagaaaaacttcaccagcttcaaatggagaaattgccgtctcgtaaagcaatcacagaaatgattagctggatgaacaatgtggagcatcaaacttcagatgaagactccgtgcattcaccaagttctgcatctcaagttaaacatcttcttcagaagcacaaggagtttagaatggaaatggactataaacagtggatagttgacttcgttaaccagtcattacttcagctaagcacctgtgatgtagaaagcaagcgctatgaaagaacggagtttgcagagcacctgggggagatgaaccgccagtggcaccgtgtacatggaatgctgaatagaaagatacaacatttagaacaacttctagaaagtatcactgagagtgaaaataaaatacagatcttgaacaactggctggaagcacaagaagagagactgaaaactttacaaaaacctgaaagtgtgatctcagtgcagaagctgctcctggactgtcaggatatagaaaatcaacttgcaattaaatccaaagcactagatgagttgaaacaaagttatctgactttggagagtggggcagtgccattgttagaagatacagcatcccgaattgatgagttatttcaaaagagaagcagtgttctcactcaggtcaatcagctcaaaacctccatgcagtcagttttacaggagtggaagatttatgatcaactctatgatgaagtgaatatgatgacaatccgattctggtactgcatggaacacagcaagcctgtggtgttatcattggagaccttgagatgccaggtggagaaccttcagtctctgcaagatgaagctgagagcagtgaagggagttgggagaaactccaggaggttatcggcaaactcaaaggtctctgcccctctgttgctgaaataatcgaagagaaatgccaaaatactcataaaaggtggactcaggtgaaccaagccattgcagaccagttgcagaaggcccagagtctgctccagctctggaaggcctatagcaatgctcatggtgaagctgccgcaaggctgaagcagcaggaagcaaagtttcaacagctcgcaaacatcagcatgtctggaaacaacctggcagagatcctgcccccagccctgcaggacataaaggagctgcagcatgatgtgcagaaaacaaaagaagcctttctccaaaattccagtgtcctggatcgactcccacaacccgcagagtccagcacccacatgctcctcccgggccccctgcactctctccagagggctgcttatttggaaaagatgctgcttgtgaaagcaaatgaatttgagtttgttctctcacagtttaaggattttggagtccggctggaatctttaaaaggtcttattatgcatgaagaagagaatttggatagacttcaccaacaggaaaaagaaaatcctgactcattcctgaatcatgtgctggcactgacagcccaatcacctgatattgaacatttgaatgaagtgagcctcaagctcccacttagtgacgtagctgtgaagacgttacaaaatatgaaccggcaatggattcgggccacggccacggcactggagcgctgcagtgagcttcagggaattggattgaatgaaaagtttctttattgctgtgaaaagtggatccaacttttggagaagatagaagaagcactcaaagtggatgtggctaacagccttcctgagctcctggagcagcagaaaacctataagatgttagaagctgaagtttctataaaccagacaattgctgattcctatgtcacccagtccttacaactcctggacacaacagaaatagagaacagaccagaatttattacagaattctcaaagctgacggatcggtggcagaatgctgtccagggtgttcggcagaggaagggtgacgttgatgggctggtgaggcagtggcaagatttcactacttctgtggagaacttgtttcgcttcctcactgacaccagccacctgctatctgcagtgaagggccaggagcgcttcagcctctaccaaaccagaagtctgatccatgagctgaagaataaagaaattcattttcaaaggaggcgaactacctgtgccctaaccttggaagctggagaaaagttactgctcacaactgacctgaaaactaaagagtctgtgggtaggagaatcagtcaacttcaggacagctggaaagacatggagccccagctggcagagatgattaagcagttccagagcactgtagagacctgggaccagtgtgaaaagaaaatcaaggagttgaaaagcaggctgcaagttttaaaggcacaaagtgaagatcctcttccagagcttcacgaggacctccataacgaaaaagagctgattaaggaactagaacagtctttggctagctggactcagaacttgaaagaacttcaaactatgaaggcggacttaacccggcacgttctcgtggaagatgtgatggttttgaaggagcaaatagagcatttgcacagacaatgggaggacctctgcttaagggtggccatacgtaaacaggagattgaagacagactcaatacatgggttgtattcaatgaaaaaaataaagagttgtgtgcctggctggtgcagatggaaaacaaagttctacagacagcggacattagtattgaagaaatgattgaaaagttacagaaggactgcatggaagaaataaacttgtttagtgaaaacaagttacagttaaagcagatgggtgaccagttgatcaaggccagcaacaaatcaagagcagctgagatcgatgacaagctcaacaaaattaacgatcgttggcaacatctttttgatgtcatcggatcaagggtgaagaagctgaaggagacctttgcttttattcagcagttggacaaaaacatgagcaaccttcgcacctggttggctcgaattgagtctgagctttccaagcctgttgtttatgatgtctgcgatgatcaagagatccagaagaggctcgctgagcagcaggatctacagcgagatattgaacaacacagcgcaggggtggagtccgtgtttaacatctgtgacgtcctactgcacgactccgatgcctgtgcaaatgagaccgagtgtgactcgatccagcagaccaccaggagcctggacagacgctggaggaacatttgtgccatgtccatggagcggcgcatgaaaatcgaggagacgtggcgcctgtggcagaagtttttagacgactattctcgctttgaggactggctcaagtcagctgagaggacggcagcctgcccaaattcctcagaggtgttgtacacgagtgccaaagaggaactgaagaggtttgaggcctttcagcggcagattcatgagcggctcactcagctggagctcatcaacaagcagtaccggcggctggcccgggagaaccgcacagacacggccagcaggctgaagcagatggtccacgagggcaaccagcgctgggacaaccttcagaggcgggtcacagccgtcctgcggagactcaggcatttcaccaaccagagggaagaatttgagggcaccagggagagcattctggtgtggctcacagagatggacctgcagctgaccaacgtggagcacttctcagagagtgacgccgatgacaagatgcgccaactgaatggcttccaacaggaaattacattaaataccaacaagattgatcagctcattgtgtttggggagcagctgattcagaagagcgagcccctggatgctgtgctgattgaggatgagctggaggaactccaccgctactgccaggaggtgtttggaagggtctcccggttccaccggcggctcacctcctgcactccgggcttggaagatgaaaaggaggcctctgagaatgaaacagacatggaagaccccagagaaatccagactgattcttggcgtaaacggggagagagcgaggaaccgtcatctcctcagtccctgtgtcatctagtggccccagggcacgagcggtctggctgcgagacccctgtcagcgtggactccatccccctggagtgggaccacacaggcgacgtggggggctcctcctctcacgaagaggacgaggagggcccatactacagcgcactgtcaggtaaatccatttcggatggccactcgtggcatgttcccgacagcccttcctgtcccgagcatcactacaagcaaatggaaggtgacaggaatgttccacctgttccccctgcgtccagcaccccttataaaccaccctatggaaagctactattacctccaggcacggatggtggcaaagaaggcccgcgagtcctgaatggcaacccacagcaggaagacgggggactggccggtatcacagagcagcagtcaggtgccttcgacagatgggagatgattcaagcacaggagcttcacaataagctcaaaataaaacaaaatttgcaacagctgaactctgatatcagcgccatcactacttggctgaaaaaaactgaagcagagctggaaatgttaaagatggcaaagcctccctctgatatccaggaaatagaactgagagtgaagagactgcaggagatactgaaagcctttgacacttacaaggcattagtggtctctgtcaacgtgagcagcaaggaatttctgcaaaccgagagccccgaatccacagagctccaaagtagactccgccagctgagcctgctctgggaagcagcacagggcgcagtggacagctggagagggggcttacgacagtcgctcatgcagtgccaggacttccaccagttgagtcaaaatctgctgctgtggttagcgagtgccaagaaccggaggcagaaggctcatgtcaccgatccaaaggcagacccccgggctctcctagagtgtcggagggaactaatgcaactggaaaaggagctggtagaacgtcaacctcaagtggacatgttacaggagatttcaaacagccttctcattaagggacatggagaagactgtattgaagctgaagaaaaggtgcatgttattgagaagaaactcaaacagttacgggagcaagtgtcccaagatttaatggccttgcagggaacccagaacccagcctcacccctgcccagcttcgacgaggtagactcgggggaccagcctcctgcaacatccgtgccagctccccgagcaaagttcagagcagtgagaactacagaaggcgaggaggagacagagagcagggtccccggcagcacacggccacagcgctccttcctctcaagggtggtccgggcagccctacccctgcagctgctcctcctgctgctgctgctcctggcctgcctgctgccctcctccgaagaagactacagctgcactcaggccaacaactttgcccggtccttttaccccatgctgaggtacaccaatgggccaccccccacatagagggcatagctggccacagtgctacaccacctgcctgattgccaagggtgcccagcacgtggccccagaccaatctgagtgacttagtgttggcaaggtcccgggacctgtgcagacttcttctgggcttacccagcacgggctccctggagcccagggcagctttcagattgtgttcctccccaggagcagggaacctgtgtggcaggtgccccgggtattttggcagaactagttgattagtttagggatctctggaaatgtcagtttcctgaagagccaagcactttgtgaattctggtttgtttgtaaaacagcattattataatgtaggtatggtcaatgagcagtggtgtccatcacatatattatagaagcaagcgaggacattccaccctagaaatggttcagaaactcataggcacccttagctgatggaaacaatcaatcatatttaatacgcttagaatcagttttactccaatcagctggcaattttgagctgccggttatacaccaaaatgttctgttcagtacctagctctgctcttttatattgctttaaatttttaaagaaattgtattgcatggatgtggttatttgtgcatattttttaacaatgcccaatctgtatgaataatgtaaacttcgatttttttttaaaaaaattagattttagctggagcttttgactaatgtaaagtaaatgccaaactaccgacttgatagggatgtttttgtaagttaattttctaagactttttcacatccaaagtgatgctttgctttgggttttaactgtttggccacggcgggggtgggggcggggggttggtacagaaacttgaagctgtttgtgatatgtacaactcagatgtttctcattaaaaaacaaaattagccagaaaaaaaaaaaaaaaaaaaaaaaaaaaaaaaaaaaaaaaaaaa

SEQ ID NO: 30110 - DNA, 5694 bp, Homo Sapiens
gggaaggagcgaaggagcgaaggagcaagcggagcggccgtcgcccaagccaagccgcgctgccaaccctcccgcccgcccgcgctcctgtccgccgtgtctagcagcggggcccagcatggtcatggcggatggcccgaggcacttgcagcgcgggccggtccgggtggggttctacgacatcgagggcacgctgggcaagggcaacttcgctgtggtgaagctggggcggcaccggatcaccaagacggaggtggcaataaaaataatcgataagtctcagctggatgcagtgaaccttgagaaaatctaccgagaagtacaaataatgaaaatgttagaccaccctcacataatcaaactttatcaggtaatggagaccaaaagtatgttgtaccttgtgacagaatatgccaaaaatggagaaatttttgactatcttgctaatcatggccggttaaatgagtctgaagccaggcgaaaattctggcaaatcctgtctgctgttgattattgtcatggtcggaagattgtgcaccgtgacctcaaagctgaaaatctcctgctggataacaacatgaatatcaaaatagcagatttcggttttggaaatttctttaaaagtggtgaactgctggcaacatggtgtggcagccccccttatgcagccccagaagtctttgaagggcagcagtatgaaggaccacagctggacatctggagtatgggagttgttctttatgtccttgtctgtggagctctgccctttgatggaccgactcttccaattttgaggcagagggttctggaaggaagattccggattccgtatttcatgtcagaagattgcgagcaccttatccgaaggatgttggtcctagacccatccaaacggctaaccatagcccaaatcaaggagcataaatggatgctcatagaagttcctgtccagagacctgttctctatccacaagagcaagaaaatgagccatccatcggggagtttaatgagcaggttctgcgactgatgcacagccttggaatagatcagcagaaaaccattgagtctttgcagaacaagagctataaccactttgctgccatttatttcttgttggtggagcgcctgaaatcacatcggagcagtttcccagtggagcagagacttgatggccgccagcgtcggcctagcaccattgctgagcaaacagttgccaaggcacagactgtggggctcccagtgaccatgcattcaccgaacatgaggctgctgcgatctgccctcctcccccaggcatccaacgtggaggccttttcatttccagcatctggctgtcaggcggaagctgcattcatggaagaagagtgtgtggacactccaaaggtcaatggctgtctgcttgaccctgtgcctcctgtcctggtgcggaagggatgccagtcactgcccagcaacatgatggagacctccattgacgaagggctggagacagaaggagaggccgaggaagaccccgctcatgcctttgaggcatttcagtccacacgcagcgggcagagacggcacactctgtcagaagtgaccaatcaactggtcgtgatgcctggggcagggaaaattttctccatgaatgacagcccctcccttgacagtgtggactctgagtatgatatggggtctgttcagagggacctgaactttctggaagacaacccttcccttaaggacatcatgttagccaatcagccttcaccccgcatgacatctcccttcataagcctgagacctaccaacccagccatgcaggctctgagctcccagaaacgagaggtccacaacaggtctccagtgagcttcagagagggccgcagagcatcagatacctccctcacccagggaattgtagcatttagacaacatcttcagaatctggctagaaccaaaggaattctagagttgaacaaagtgcagttgttgtatgaacaaataggaccggaggcagaccctaacctggcgccggcggctcctcagctccaggaccttgctagcagctgccctcaggaagaagtttctcagcagcaggaaagcgtctccactctccctgccagcgtgcatccccagctgtccccacggcagagcctggagacccagtacctgcagcacagactccagaagcccagccttctgtcaaaggcccagaacacctgtcagctttattgcaaagaaccaccgcggagccttgagcagcagctgcaggaacataggctccagcagaagcgactctttcttcagaagcagtctcaactgcaggcctattttaatcagatgcagatagcagagagctcctacccacagccaagtcagcagctgccccttccccgccaggagactccaccgccttctcagcaggccccaccgttcagcctgacccagcccctgagccccgtcctggagccttcctccgagcagatgcaatacagccctttcctcagccagtaccaagagatgcagcttcagcccctgccctccacttccggtccccgggctgctcctcctctgcccacgcagctacagcagcagcagccgccaccgccaccaccccctccaccaccacgacagccaggagctgccccagcccccttacagttctcctatcagacttgtgagctgccaagcgctgcttcccctgcgccagactatcccactccctgtcagtatcctgtggatggagcccagcagagcgacctaacggggccagactgtcccagaagcccaggactgcaagaggccccctccagctacgacccactagccctctctgagctacctggactctttgattgtgaaatgctagacgctgtggatccacaacacaacgggtatgtcctggtgaattagtctcagcacaggaattgaggtgggtcaggtgaaggaagagtgtatgttcctatttttattccagccttttaaatttaaagcttattttcttgccctctccctaacggggagaaatcgagccacccaactggaatcagagggtctggctggggtggatgttgcttcctcctggttctgccccaccacaaagttttctgtggcaagtgctggaacatagttgtaggctgaggctcctgcccttcggtcgagtggagcaagctctcgagggcagcactgacaaatgtgttcctaagaagacattcagacccaggtcttatgcaggattacatccgtttattatcaagggcaaccttggtgaaagcagaaagggtgtgtgctattgcatatatatgggggaaaaggcaatatatttttcactgaagctgagcaaccacatattgctacaaggcaaatcaagaagacatcaggaaatcagatgcacaggaaataaaggaaagctgtgctttgtcattgaatcctaagttcttagctgctgatgcaagttgtcccccaaggccatcacaaagcagtggggcatgagctgtgtttcaggggccactaaataacagctggtactgaccccagaaaccgccttcatctccattcggaagcaggtgacacaccccttcagaaggtgccctgggttgccgagtgtcagaatatactcaggactccagaggtgtcacacgtggaactgacaggagacccgccaccgtggaggcagggggcaagaaactcaagaacgcatcaagagcaccagccctgggccagggaagacaggctcttcctgcagtttctcgtggacactgctggcttgcgggcagtcggtctccagggtacctgttgtctcttttccgatgtaataactactttgaccttacactatatgttgctagtagtttattgagctttgtatatttggacagtttcatatagggcttagagattttaaggacatgataaatgaacttttctgtcccatgtgaagtggtagtgcggtgcctttcccccagatcatgctttaattctttcttttctgtagaaaccaacagtttccatttatgtcaatgctaaatccaaagtcacttcagagtttgttttccaccatgtgggaatcagcattcttaatttcgttaaagttttgacttgtaatgaaatgttcaagtattacagcaatattcaaagaaagaaccacagatgtgttaaccatttaagcagatcatctgccaaacattatattactaataaaacttaaccaacacttacaattcagtcatcaaagtaagtaaaaattagatgctacagctagctaactgtatccctagaaatgatgaataatttgccatttggacagttaacatccaggtgttacaaagtcagtgttaattctaaagatgatcatttctgccctttagaatggcttgtcccatcagcagatgaatgtgttaagcacaaagcatcttccttaaagcacaaagagagggactaactgatgctgcatctagaaaacacctttaagttgcctttcctctttgtagttagcgttcaggcaggtgacgtgtggaaagtctagggggttccattctggccatgcgagcccagctcctaccaacgtcggtaacttgagcagtccctgttgctggccagagactgcctggtcgccagcgctcaccatgggtgccaggatgcttcgcagaggcactgtgctcacggttggacttggtgtcagtgggaaagggcagtgtggggactgtcatttttgtgatttaataacacacagtgaaaatccaggaagaatgaattaagcttcttctgggagttgtttattcctgctcgtgcttaagattgatgatttcgtgaaataaagaacatcatttcatttaagagatcatttcattaagatctctaatctgttttgagtctttacaaaatagccagttataaaatggggcttgatttgtttagactgaaggaagacgttttcccaaaatatactacagaagtgctacaatatttgcgatattaaaatgcctgcagattgaaaatgggggccactcatttcagaactgcaggaatggtgtagttacagatcgacataaactcctgccccccaacaatgccatgagctgcttagcccaggagacctgggagctatggcaggacggttaggccagccgatgagggactgcagagaggctactggaaggttaaggacccagagagaaatcgagaggtgccctacagcagccaggcctatcaggatccgtcacacacggcagcggcgtggacaccggcctgatgcagagcgtgacccctcctgctgggacctgtgttgtaagctcctatttgcttatcttgtttatttcaagcagaaatcaataaattccataaccctctgtattgactgcaatgtaagctgctgaggagactggttctgttggtcagtcaggtgtttgctcagccctgtctgatcacctgtgctgctctgtccctaactagtgacccatggaagcttccaagcagttttctcttcatcactactaacaaacgaaacactaagaaggcttagtatcgctctttttctgcggggctactctgaagtactgacttgctttccagtctgattcacgttagcagtgtgtacactactgtatcatcatcagcttcatcaccctgtaaaccaggctcctctgaagagactttggtgagatgaacgtgaggtaaaaatttcgttcggcaaaaaaaaaaaaaaaaaa

SEQ ID NO: 30111 - DNA, 5289 bp, Homo Sapiens
ccagccccttccgtccgccgcgctccgccgctgtcctccgccggcccgcgtgggaggacgatgggtcagcgcggaaaaagtgaatgagggcggcagcggtggcggcggtagccagcgcctgactcggcgggcccggagcaccgcccgcgtcccggcccccggcaccatggacgcgccgcgcgcctcggcggccaagcccccgaccgggaggaagatgaaggctcgtgctcccccacctcctggaaaggctgccactctgcatgtgcacagtgaccagaagcccccccacgatggggccctcgggtcgcagcagaacttggttcgcatgaaggaggcgctgagggccagcaccatggacgtcaccgtggtcctgcctagcgggctggagaagaggagcgtgctcaatgggagccatgcgatgatggacctactggttgaactttgccttcagaaccacctgaatccatcccaccatgcccttgaaattcggtcttcagaaacccaacaacctttgagttttaagccaaatactttgattgggaccctgaatgtgcatactgtgtttctgaaagaaaaagttcctgaagagaaggttaagcctggtccccctaaggtgcctgagaaatctgtgcgtttggtcgtgaattacctgcggacacaaaaagctgttgtgcgtgtgagccctgaggttcctctccagaatattctcccagtcatttgtgcaaagtgtgaggtcagcccagagcacgtggttctcctcagggacaacattgccggagaggagctggagctgtccaagtccctgaacgagctcgggataaaggagctctacgcgtgggacaacagaagagaaacctttaggaaatcatcacttggcaatgatgagacagataaagagaagaaaaaatttctgggatttttcaaagttaataaaagaagcaatagtaagggctgtttaacgacccccaactccccatccatgcactcacgttctcttacgctgggtccatccctctcgctgggcagcatctcaggggtgtccgtgaagtcggagatgaagaagcgccgagcccctcctcctccaggttcagggccacctgtgcaagacaaggcatcggaaaaggtatctcttgggtcacagattgatttacagaagaagaagcggcgagcgccagctccccctccaccacagccaccaccaccgagtcccctgatccccaaccgcactgaggataaggaggagaacaggaagagcacgatggtaagcctgcccctggggtctggcagccactgcagcccggatggagccccgcaggtgctgtcagaggcggaggagaccgtgtcagttggcagctgttttgcgtcggaggacacgaccgaggactcaggagtgatgagttccccctcagacatcgtctctctggactcgcagcaggacagcatgaaatacaaagacaagtgggccacagaccaggaagactgcagtgaccaggacctcgctggaaccccagacctgggtccccagaagagccccttgtgggagaagaatggctctgagaactcacatctgagaactgaaaaagctgtcacagcctcaaatgatgaagaagacctattaattgctggagagttccgtaaaacccttgcagaacttgatgaagacctggaagaaatggaagacagctatgaaacagacaccagctccctcaccagctccatccatggtgcatccaaccactgcccacaggatgccatgatccctcacggcgacacagatgcaatcccagtaacattcataggggaagtttcagatgatcctgtggattcggggttgttttccaatagaaacaacaatgctgggtctttcgactcggagggtgttgccagcaggagagactccctggcgccacttcaagctgagcacagccagccccatgaaaaggcaagggaggaagtacctgccctgcaccccgcttcccatgacgtcggaaaaggaatccgtgtggccttatctaacatctctaaagatgggaatctaatggaaacggcgcccagggtgacttcttttgcttcgaatcttcacacagacaacctaaatgcaaaagtgaaagacaaagtgtatggctgtgctgacggggagaggactcaagccacagagagagtgaattcccaaccggtgaatgaaaaggacagcaacgataaaaacgctgccttggcaccaacatcatggcaccaacgaggccaaaacccagggaaaagctacagacttaagcacggcctcacaacgtataaaatcattcctccaaagtcagagatgcgatgttacgacagagatgtgtccctctccaccggagccattaagattgacgagctggggaacttggtgagtcctcacgccaccggcatcaggatcatttccctgtcttcgtctgtgcctgaagcagaatctcagcccattgggaaagtcagagagttctggaggtgcaactctgtggaaaaacacctgggccgaccctcagagagctctgccaggggacccccctccacccctgtgcccacgcagacgcagaatccagagagcagactccaagcagaccccaagccaatatcgccccagcagaagtctgcccaccatgagggccggaaccccctaggggaggggagaaaccagccccccaccatgggcatgggtcacgtgagggtgccagcagctcacaccacagaagtcacatttctcaagcctcagagaagaacgtccagccagtatgtggcctctgccattgccaagcgcataggagccccaaaagtccatgctgatgtggtgaggccacacggttatgccgagaagggttatgcaggcaaggcgccagtgctggctgcaccacctgtcactgtgaaagatgacaggacatccagcccacactcagagacacaaggatggaaggatggtgcccagtggccctgtgtcactcctcccaacaaccacggggaagatttggcagtgggagcccctcctaggggggaggtcattggcccacacaggaagttgtctactcaggacagacctgctgctatccacagaagctcctgtttctcactggttcagtcttcccagagggatcgtgtttctgtgggacagagctgtggtttcagtggaaagcaaagcacaagtagccaggaggccagctcagcatctgagcccagacgcgcacctgatggtacagacccaccccctccacacacatctgacactcaggcctgcagcagggagctggtcaatggctctgtgcgcgccccaggccacggcgagccttcccaccctccaggagggtctggcacagaaagccacattctcctagaaagagaggaaaagcccagtgtgttctctacagatggaaatgaaacagacagtatttggccacccagcatttttgggccgaagaaaaaattcaaacctgttgtccagagaccagtcccaaaagacacatccctgcactctgccctgatggaagccatccactctgcgggagggaaggacagactacgcaagacggcagaacacaccggggagggcaggccagcgaaactgtcctacacggaggcagagggcgaacgatctgcactgctggcagctatccgcgggcacagcggcacctgcagcctgaggaaggtggcatcctctgcttctgaggagctccagagcttccgagatgccgcactctctgctcagggctcggaaagtcctctgctagaagaccttggtcttctgtccccaccagccattcccccaccaccccctccaccctcccaggctctctctgcaccaaggacggcctccaggttcagcacgggcaccctcagcaacaccgcagacgcaaggcaagccttgatggacgccatccgctccggcacaggggctgcgagactgagaaaggtgcccttgctcgtgtgaatgaacagaggccagagaattgcagaaacccacctgtaatatgcccacaggcgtcactcaaggagtctgcatagccaggaacatcaagttttggtgttactttcttgtctacaggccaaatgcgcacagttgattttcggtgtgttcctgtataacggcttgaaaggaaaggagaagatgctgtgtcgctgcgcagctcgtgtgccaaggaaatgtgttttgcctctgaatatcttaagttgctaataaacgattcttgttggcaggttaatgggactataaatgctggagcccagcactcacacttaattatatttatgggcaaagtaaaaagaatcatgccttagactgattttggacctttgagacttttaccacatacagatggatgaaactacttactgatttaagatcttttgaattttagaaaaaacatatgaatcagatggaacaatctgaatgtgatatgctccatgatgctgtgtgttttggtagtaagaaaaaaaattgggaggcttttcaaaggtggctttgttaggtagtaaaactgctggattcttcttcctcaaatatttggggctaacacttcacagagggtcacagtccatgatctgaccaactaagcttttaaaaatcaactattaccacccagaaaacagtcctacgtgatcatgtggccagggcatgcccgagtcctgcaagggtggcgggtggctgaggtcacaccaccactggagtggatgggcagtgccccacatggacagccattccccaggctatgaagtgacataggcctcccccacggtgcctgtgtacggagcctgatgacttcactgggagccttctggaatcctgcagagggtcaaggagcagggatgttggatgcccacctgtcaagagttcagatcaaagttgcgctgagagcatcacaattttggttcagccttgacgcgtttgtccaacagctcattggctccctttgtatgatatcgtggtcttctcacatggtgcccagtcaccaatatttataatgaggtctaactacagcagtagtttttcatatatatctctaaaacattttgttatattgaaaaaagtaatagaaatcaagatgtgttgatgaaataaaatgtgtatctgagtgagaaaacaagtatggtgaggtcactttaatgtttcacagcgatctcagatctaggcctcaggtagaatggaagctgttctgcattcactgattaacgttgctaaactcttggtgaggcacgagctaccagccaattgctcttcatcacagctatctgtcttttagtgccacaaataaaagaaaatcaaatctt

SEQ ID NO: 30112 - DNA, 5125 bp, Homo Sapiens; identical to SEQ ID NO: 28410

SEQ ID NO: 30113 - DNA, 5125 bp, Homo Sapiens; identical to SEQ ID NO: 28410

SEQ ID NO: 30114 - DNA, 4965 bp, Homo Sapiens
cgctctcggctagctgcagcggcggcggcgcggaggggaaggcatccaggatgcggtgcggggcggcccggtgcccccccgccccgtcacggcagccgcggcggccgaggggaccgggccagggccgggggcggcggcccgagccgcggtagcggcggcggcgggaggggcggcctgagggcggacgggcgggcgcccgggttgcgggggctcggtgccgctccgcactgcccggccggtctcggccccggcgccatgagtggcggcggcggcggagggggctcggcgcccagtcgcttcgccgactactttgtcatctgcggactggacacggagaccgggctggagccggacgagctgtcggcattatgccagtacatacaggcttctaaagccagggatggtgccagccctttcatttcaagtacgactgaaggagaaaattttgagcagacaccattgagaagaacattcaaatctaaggtccttgcacgatatcctgagaacgtagaatggaatccctttgaccaagatgcagtaggaatgctatgtatgccgaaagggctggcattcaagacccaggctgatcccagggagccccaattccatgcctttattatcacaagggaggatggctctcggacatttgggtttgccctcacattttatgaagaggtgactagcaagcagatctgcagtgcaatgcagaccctctaccacatgcacaatgctgagtatgatgtcctacatgctccccctgctgatgacagagaccagagcagcatggaggatggtgaagacactcctgtgaccaaactgcagcgcttcaactcctatgacattagccgggacactctctacgtctctaagtgcatctgcctcatcacacccatgtctttcatgaaggcatgtcggagcgtgctggagcaactccaccaggcagtcacttcacctcagccccctccactgccccttgagagctacatatacaacgtactctacgaggtgccgctcccacctcctggccggtccttgaagttttctggggtctatgggccaataatctgccagagaccaagtaccaatgagcttcccctatttgactttcctgtcaaagaggtttttgaactgctcggggtggagaatgtgtttcagctttttacttgtgcccttctggagtttcaaatcctgctctactcacagcattaccagagactgatgactgtggcggagacgattacagctctcatgtttcctttccagtggcagcatgtctatgtccctattctcccagcttctctcctgcatttcttagatgctcctgttccatacctgatgggtttgcattccaatggcctggatgaccggtcaaagctggagctgcctcaagaggctaacctctgctttgtggacattgacaaccacttcattgagttgccagaggacttgccacagttccccaacaaattggagtttgtccaggaagtctctgagattctcatggcatttggaattccccctgaagggaatcttcattgcagtgagagtgcctccaagctgaagaggctgcgggcctctgagcttgtctcggacaagaggaatgggaacattgctggctcccctttgcattcctacgagcttcttaaggagaatgaaactattgcccggctgcaagccttggtcaagagaactggggtgagcctggaaaagttggaagtgcgtgaagaccccagcagcaataaggatctcaaagttcagtgtgatgaagaagaactcaggatttaccagctaaacattcagatccgggaagtttttgcaaatcgtttcactcagatgtttgcagattatgaggtgtttgtcatccaacccagccaggataaggaatcctggtttaccaacagggagcaaatgcaaaactttgataaagcatcttttctgtcagatcagcctgagccctacctgcccttcctctcaagattcctggagacccagatgtttgcatctttcattgacaacaaaataatgtgtcatgatgatgatgataaagaccctgtactccgggtatttgattcccgagttgacaagatcaggctgttgaatgttcggacacctactctccgtacatccatgtaccagaagtgtaccactgtggatgaagcagagaaagcaattgagctgcgtctggcaaaaattgaccatactgcaattcacccacatttacttgacatgaagattggacaagggaaatatgagccgggcttcttccctaagctgcagtctgatgtactttccactgggccagccagcaacaagtggacgaaaaggaatgcccctgcccagtggaggcggaaagatcggcagaagcagcacacagaacacctgcgtttagataatgaccagagggagaagtacatccaggaagccaggactatgggcagcactatccgccagcccaaactgtccaacctctctccatcagtgattgcccagaccaattggaagtttgtagagggcctgctgaaggaatgccgcaataagaccaagaggatgctggtggaaaagatgggccgagaagctgtggagctagggcatggggaggtgaacatcacaggggtggaagagaacaccctgattgccagcctttgtgatctcctggaaaggatctggagtcatggactacaagtgaaacaggggaaatcagccttatggtcccacctgttacattatcaggacaaccggcagagaaaactcacatcaggaagcctcagtacctcaggaatacttcttgattcagaacgtaggaagtctgatgccagctcactcatgcctcccctgaggatctccctgattcaggatatgaggcacatccagaacatcggggaaatcaagactgatgtgggaaaggccagagcatgggtgcgactgtccatggaaaaaaagttactttccagacacctgaagcagctcctctcagaccatgagctcaccaaaaagttatataagcgctatgccttcctgcgctgtgatgacgagaaggagcagttcctctatcacctcctgtctttcaatgccgtcgattacttttgcttcaccaatgtcttcacaactatcctgatcccgtaccacattctgatcgtaccaagcaagaagctggggggctccatgttcactgccaacccatggatctgtatatcaggagaattgggtgagacacagatcatgcagattcccaggaatgtgctagagatgaccttcgagtgccagaacttggggaagcttactactgtccagattggccatgataactctgggctgtatgccaaatggctggtggagtatgtgatggtcaggaatgagatcacaggacatacctacaagttcccgtgtggccggtggttagggaagggcatggatgatggaagcctggagcggatcctagttggggagctgctcacatcccagcctgaggtggatgagaggccatgccggaccccgccgctgcagcagtcccccagtgtcatccggaggcttgttaccatctcacccaacaacaagcccaagctgaacactgggcagatccaggagtccatcggggaggcagtcaatggcattgtgaagcacttccataagcctgagaaagagcgaggcagtctgacgctgttgctctgtggagagtgtggccttgtctcggccttggaacaggctttccagcatggatttaaatcgccccggctcttcaaaaatgtcttcatttgggatttcctggaaaaagcacaaacctattatgagacattagagaagaatgaagtagtccctgaggaaaactggcatacaagagcccggaacttctgccgatttgtcactgcaatcaacaatactccccggaacatcggcaaggatggcaagtttcagatgctggtgtgcttgggagccagagatcacctcctacaccactggattgccctgctggctgactgccccatcactgcacacatgtatgaggatgtggcactgatcaaagaccatacacttgtcaattccttgattcgtgtgctgcagacattgcaggagttcaacatcacgctggagacgtcccttgtcaagggcatcgacatctgacctcccagcaccagccagcagcaggactgagaaagactcaccctgcagctctgaccttttttcccaaagggacttaagcgattgtgcaggagtaggagacaaaatgtacactcactgtaaaaagaaaactagaggatttttggaataaataatctattttagagtttatttgctgatttgctttttacacactttcatgtgaaagagtgatagggagagggagcgaggctggtgccgcttattttgaagctggtgccctccctcgccgtggccacatgctggaagcctgaggcctccctggactgagcctgtggcactgcgtgcgggacagttatgtttccttgccccgtcgcattaatgaggcccttccacatcatttttaaactaatgtttttctatattaacattattatggatatttggctttcataggccacacacaggtgtgctgcgcgggaagccccatgctccaatcaaagggatttttagtagtgcctctaagcaagcaccgatgagtcagtcccacgtattttcttttttgtcagtattgtttgggaaggagacatgccgggatgtgtcatcgtgccaaataccacatttcctgttggcacagtttcacagaagtaaacataagcatgttttaacaggtttttcttttcttttttcttttttaaaatgttttatttatttaacccgccattgtgtgtttttaagtattttctttttttaaggaaaggaaaagcttgtcacaatctaactggctatgttattattattaaatttatgttttgcaacttagaaaccagctacagtatggcccacttaataaaacacctgaaacaaaaa

SEQ ID NO: 30115 - DNA, 5293 bp, Homo Sapiens; identical to SEQ ID NO: 26473

SEQ ID NO: 30116 - DNA, 4596 bp, Homo Sapiens
gcgatgattcccccacaggaggcatccgctcgacggcgggagattgaggacaagctgaagcaggaggaggagactctgtccttcatccgagacagcctggagaagagcgaccagctcactaagaacatggtgtctatcttatcatcctttgagagccgccttatgaagctggagaactccatcatccctgtgcacaagcagacggagaatctgcagcggctgcaggagaatgttgagaagacgctgtcctgcctggaccatgtcatcagctactaccatgtggccagtgacactgagaagatcatcagagagggccccacaggtaggctggaagagtacctgggaagcatggccaagattcagaaggcagtggagtatttccaggacaacagcccagacagcccggaactcaacaaagtgaaactgctctttgagcgcgggaaggaggccctggagtccgaatttcgcagcctgatgacgcggcacagtaaggtcgtctcgcccgtgctcatcttggatctgatcagtggtgacgatgatctggaggcccaggaggacgtgaccctggagcacctgcccgagagcgtgctccaggatgtcattcgcatctcccgctggctggtggaatatggccgcaaccaagatttcatgaacgtctactaccagatacgctccagccagctggaccgctccatcaaaggacagaaggagcatttccataagagcagttcttcctctggggttccctactcccctgctatccccaacaagaggaaagacacacctaccaagaagccagtcaagcggccagggagagatgacatgctggacgtggagaccaatgcctacatccactgcgtcagtgccttcgtcaagctggcgcagagcgagtaccagctgctggccgacatcatccccgagcaccaccagaagaagaccttcgactccctgatacaggatgccctggatgggctgatgcttgaaggggagaacatcgtgtctgctgcccggaaggccattgtgcgacacgacttctccacggtgctcaccgtcttccccatcctgcgacacctcaagcagaccaagcctgagtttgaccaggtgctccagggcacggctgccagcacaaagaacaagctgcctggcctcatcacatccatggagaccatcggtgccaaagcgctggaggacttcgcagacaacatcaagaatgacccggacaaggagtacaacatgccgaaggacggcaccgtacacgagctcaccagcaatgccatcctcttcctgcagcagcttttggacttccaggagacggcaggcgccatgctggcctcccaagagaccagctcttcggccaccagctacagctctgagttcagcaagcggctgctaagcacctatatctgtaaagtgctgggcaacctgcagttgaacttgctgagcaagtccaaggtgtacgaggacccagctctgagcgccatcttcctgcacaacaactacaattacatcctcaagtccctggagaagtctgaactgatccagctggtggcagtgacacagaagactgctgagcgctcctaccgggagcacattgagcagcagatccagacctaccagcgcagctggttaaaggtgactgattacatcgcagagaagaatctacctgtgttccagccgggagtcaagctccggggcaaggagcggcagattatcaaggagcgttttaagggcttcaatgatggcctcgaagaactgtgcaaaatccagaaggcctgggctattccagacacagagcagagggacaggattcgccaggcccagaagaccattgtcaaggagacctacggggcctttctacagaagtttggcagcgtgcccttcaccaagaacccggagaagtacatcaagtacggggtggagcaggtgggcgacatgatcgatcgccttttcgacacctctgcctgagcctgctgctagccctgcctggttccaccagactggcgtgtcattggacagataaaccagtgttagcttgcctctgggctgggtgagcttgaagtcctctgggacagagacctgtctccacgcctccgggagctgtgtccctgagccccctagtcctggctcctgctttttccccacagcccgtgttcccagccgaaccagcactctcccggaagcctggggtccctccacaccttggcttttatgaccctgatggcttctgaaacaggaaaagagagaaggaagacagaggcctgtgcccactgctgctccatgtgtaccaagagcagcagggcagaagggccctccctccagcctaggtcagaggtggggacagagaactcccctacagcccagagatgtggcagggctcagagaagcagccagagctcctggaggaaaggcagtcgggactgaccccctctcttaaaacacattcccgcccgcccacaggcctgaggtctgggacctttccctcccaggagccccctaggtggctgggggaggcaggctcactggccattttccctagagtccagcacactgcaggaggcgttcggaggaggagttccgccccaccctctacagccttcctcaggcccctgtctctggtccccagcctcagtgcctcttggcccagggccaggcagtcgtggttgcagaaggagcaattaggctgcctgcctgtgggctgggagacagggacaatggggaaaagttaaggagcaaaatgggggttggaagcaaaaaatagggccccacctatttaggacgagattgaagactgacccttgaggcacacttgcactggagatgggtttatttcacgctctgtgcttgtgtgctagcggagggagagctcagggtggcttaattcagaggccctgtcatggcccgcccccagccatgggaaagcaaacttcatcctaaggtgtgcagcccaggccctgcccctttacagtctaggccgcctgccatggggtgcagcctctccaggggctgcgtcagacttgcacgctgcccacatccagattcctgcaaagacgaattgggtgcacagcaccccaaccacatacacgaggaagaagatgcggtcagcagtctcaggccagcttctctgtgacccctttactcctctggagggctctgtggggagaggtacagggaaaggagctgttcttcaaggtcccctcaacatgagcggaagagcgaaccccaggggtcatcagcctgtatcgcttcctttcttagattctcagctgatgaaaatttgggtctggcccatttcaggccatcttcagttgaagaaacaccctcttaggctgtgcaaggcatgggttatcaggggattgaggtcacctgggacttcagggaggctcagcttgctccctgccccagacctgtttcttctaagggaggaggacatggtggagaccagggacaggagagccagcagggtggatgcaaggggcctctacccacacctggacctccgtgccctcaccccagccctaggtgtgcacctaggcctcattccttaccccccagcccctgcccaccttcagcaggatgaggccctgggttgccgtgctctcgctgttcccctctcggggctgggctggggccgctcttggccccaaggttgccccgggccagcagcccagccagcagcacagtctctatggtgctgaggaagagcagcagcagcaggatggtgaagtagtaaactgggggaggcagggcacagggagatgctcaggggccagtccctgtgtctctggtgcccagcgagctgagcaccagtgggtgaccggggagaaacagggcagactgggtaagggagcagggcttactgagcagtgggttgcaggaggaggagctgggcagggcctgcaccagggaggagtggaggacgaggtatctcagcagcaatgtcaccttgtagcctatgcgctcaatggcccggaggggcagcaaccccccgcacacgtcagccaacagcagtgcctctgcaggcaccaagagagcgatgatggacttgagcgccgtgttcttcagcctcagctggaaggggaaaagtcagggccttcccggcgggggggaaggaggtgggcatcgggggcatggggcctggcctctggccgtgcatcctcactcccacccgcctccagcagccctctgtcggcctcctcgcgacttgactcaccgtcacctggaagcagggcaccggctgctggggtgggacttgggtcttcagatcataaactacgtattccctcttgacactcacaatctcgttcaccacgtgggcctggaactctaactccatcgctgaggggtggatatgagaactatgaaccaggaaggagagatcccagctgccaagtctgggggtagcagactggagcccaggggtgatggagacttttgatggcttttggcagggacagacttggacacaaaaccgatccatagaagggcttcccaaaccttgttttgcaacatcccaaattgtctccagttgaaggaaggcctttatcagattcatagatgagctttcattgtaaaaataaatgtactttgcaccacttc

SEQ ID NO: 30117 - DNA, 5514 bp, Homo Sapiens
aatcccagcactttgggaggccgagatgggcggatcacttgaggccaaccaactcaaacttgaagacatgaaatccccaaggagaaccactttgtgcctcatgtttattgtgatttattcttccaaagctgcactgaactggaattacgagtctactattcatcctttgagtcttcatgaacatgaaccagctggtgaagaggcactgaggcaaaaacgagccgttgccacaaaaagtcctacggctgaagaatacactgttaatattgagatcagttttgaaaatgcatccttcctggatcctatcaaagcctacttgaacagcctcagttttccaattcatgggaataacactgaccaaattaccgacattttgagcataaatgtgacaacagtctgcagacctgctggaaatgaaatctggtgctcctgcgagacaggttatgggtggcctcgggaaaggtgtcttcacaatctcatttgtcaagagcgtgacgtcttcctcccagggcaccattgcagttgccttaaagaactgcctcccaatggacctttttgcctgcttcaggaagatgttaccctgaacatgagagtcagactaaatgtaggctttcaagaagacctcatgaacacttcctccgccctctataggtcctacaagaccgacttggaaacagcgttccggaagggttacggaattttaccaggcttcaagggcgtgactgtgacagggttcaagtctggaagtgtggttgtgacatatgaagtcaagactacaccaccatcacttgagttaatacataaagccaatgaacaagttgtacagagcctcaatcagacctacaaaatggactacaactcctttcaagcagttactatcaatgaaagcaatttctttgtcacaccagaaatcatctttgaaggggacacagtcagtctggtgtgtgaaaaggaagttttgtcctccaatgtgtcttggcgctatgaagaacagcagttggaaatccagaacagcagcagattctcgatttacaccgcacttttcaacaacatgacttcggtgtccaagctcaccatccacaacatcactccaggtgatgcaggtgaatatgtttgcaaactgatattagacatttttgaatatgagtgcaagaagaaaatagatgttatgcccatccaaattttggcaaatgaagaaatgaaggtgatgtgcgacaacaatcctgtatctttgaactgctgcagtcagggtaatgttaattggagcaaagtagaatggaagcaggaaggaaaaataaatattccaggaacccctgagacagacatagattctagctgcagcagatacaccctcaaggctgatggaacccagtgcccaagcgggtcgtctggaacaacagtcatctacacttgtgagttcatcagtgcctatggagccagaggcagtgcaaacataaaagtgacattcatctctgtggccaatctaacaataaccccggacccaatttctgtttctgagggacaaaacttttctataaaatgcatcagtgatgtgagtaactatgatgaggtttattggaacacttctgctggaattaaaatataccaaagattttataccacgaggaggtatcttgatggagcagaatcagtactgacagtcaagacctcgaccagggagtggaatggaacctatcactgcatatttagatataagaattcatacagtattgcaaccaaagacgtcattgttcacccgctgcctctaaagctgaacatcatggttgatcctttggaagctactgtttcatgcagtggttcccatcacatcaagtgctgcatagaggaggatggagactacaaagttactttccatatgggttcctcatcccttcctgctgcaaaagaagttaacaaaaaacaagtgtgctacaaacacaatttcaatgcaagctcagtttcctggtgttcaaaaactgttgatgtgtgttgtcactttaccaatgctgctaataattcagtttggagcccatctatgaagctgaatctggttcctggggaaaacatcacatgccaggatcccgtaataggtgtcggagagccggggaaagtcatccagaagctatgccggttctcaaacgttcccagcagccctgagagtcccattggcgggaccatcacttacaaatgtgtaggctcccagtgggaggagaagagaaatgactgcatctctgccccaataaacagtctgctccagatggctaaggctttgatcaagagcccctctcaggatgagatgctccctacatacctgaaggatctttctattagcatagacaaagcggaacatgaaatcagctcttctcctgggagtctgggagccattattaacatccttgatctgctctcaacagttccaacccaagtaaattcagaaatgatgacgcacgtgctctctacggttaatgtcatccttggcaagcccgtcttgaacacctggaaggttttacaacagcaatggaccaatcagagttcacagctactacattcagtggaaagattttcccaagcattacagtcaggagatagccctcctttgtccttctcccaaactaatgtgcagatgagcagcacggtaatcaagtccagccacccagaaacctatcaacagaggtttgttttcccatactttgacctctggggcaatgtggtcattgacaagagctatctagaaaacttgcagtcggattcgtctattgtcaccatggctttcccaactctccaagccatccttgctcaggatatccaggaaaataactttgcagagagcttagtgatgacaaccactgtcagccacaatacgactatgccattcaggatttcaatgacttttaagaacaatagcccttcaggcggcgaaacgaagtgtgtcttctggaacttcaggcttgccaacaacacaggggggtgggacagcagtgggtgctatgttgaagaaggtgatggggacaatgtcacctgtatctgtgaccacctaacatcattctccatcctcatgtcccctgactccccagatcctagttctctcctgggaatactcctggatattatttcttatgttggggtgggcttttccatcttgagcttggcagcctgtctagttgtggaagctgtggtgtggaaatcggtgaccaagaatcggacttcttatatgcgccacacctgcatagtgaatatcgctgcctcccttctggtcgccaacacctggttcattgtggtcgctgccatccaggacaatcgctacatactctgcaagacagcctgtgtggctgccaccttcttcatccacttcttctacctcagcgtcttcttctggatgctgacactgggcctcatgctgttctatcgcctggttttcattctgcatgaaacaagcaggtccactcagaaagccattgccttctgtcttggctatggctgcccacttgccatctcggtcatcacgctgggagccacccagccccgggaagtctatacgaggaagaatgtctgttggctcaactgggaggacaccaaggccctgctggctttcgccatcccagcactgatcattgtggtggtgaacataaccatcactattgtggtcatcaccaagatcctgaggccttccattggagacaagccatgcaagcaggagaagagcagcctgtttcagatcagcaagagcattggggtcctcacaccactcttgggcctcacttggggttttggtctcaccactgtgttcccagggaccaaccttgtgttccatatcatatttgccatcctcaatgtcttccagggattattcattttactctttggatgcctctgggatctgaaggtacaggaagctttgctgaataagttttcattgtcgagatggtcttcacagcactcaaagtcaacatccctgggttcatccacacctgtgttttctatgagttctccaatatcaaggagatttaacaatttgtttggtaaaacaggaacgtataatgtttccaccccagaagcaaccagctcatccctggaaaactcatccagtgcttcttcgttgctcaactaagaacaggataatccaacctacgtgacctcccggggacagtggctgtgcttttaaaaagagatgcttgcaaagcaatggggaacgtgttctcggggcaggtttccgggagcagatgccaaaaagactttttcatagagaagaggctttcttttgtaaagacagaataaaaataattgttatgtttctgtttgttccctccccctcccccttgtgtgataccacatgtgtatagtatttaagtgaaactcaagccctcaaggcccaacttctctgtctatattgtaatatagaatttcgaagagacattttcactttttacacattgggcacaaagataagctttgattaaagtagtaagtaaaaggctacctaggaaatacttcagtgaattctaagaaggaaggaaggaaggaaggaaggaaagaagggagggaaacagggagaaagggaaaaagaagaaaaagagaaagatgaaaataggaacaaataaagacaaacaacattaagagccatattgtaagatttccatgttaatgatctaatataatcactcagtgcaacattgagaatttttttttaatggctcaaaaatggaaactgaaagcaagtcatggggaatgaatactttgggcagtatcttcctgatgtcttcttagctaagaggaggaaaaaaaggctgaaaaaatagggaggaaattccttcatcagaacgacttcaagtggataacaatatttataagaaatgaatggaaggaaatatgatcctcctgagactaactttgtatgttaaggtttgaactaagtgaatgtatctgcagaggaagtattataaagatatgtcattagatccaagtgctgattaaatttttatagtttatcagaaaagccttatattttagtttgttccacattttgaaagcaaaaaatatatatttgatatacccttcaattgccaaatttgatatgttgcactgaagacagaccctgtcatatatttaatggcttcaagcaggtacttctctgtgcattatagaatagattttaataatcttatagcattgtatattattattgctgttgtcactgttattattattgtggatactggcccttggtgtgttgcatagctccctatgtattctctgtttccatctttaagttcccagaccaatatacattaagagttttgcatggtctaaattgtgtttattccaaccacgtggaaagctcctggaaagaaattttacattcggttgttctgtgctcctaatgacacttgaccttgttgaacaaatggcagagcctttcccaaggatttgattgtttgtgaattatctgcatgtgtgcttttttttggtgtgtatttcattaaaaaatataaatatttatgaaaaaaaaaaaaaaaa

SEQ ID NO: 30118 - DNA, 6364 bp, Homo Sapiens
ctcgtggggaaaaggcagggagggggtggtgtccccagccggtttggggggtgcgttgcccggagacggaaagtttgggagcccgagcaggctcggctgcagcctcggggagggggtccagcgggtggcggccctggggatggggaaggagcaggagctgctggaggcggcccgcaccgggcacctcccggcggtggagaagctgctgtccgggaagcggctctcctcaggctttgggggcggcggcggcggtggctctgggggcggcggcggcggcagcggcggcggcggcggcggcctcggctcttccagccaccccctctccagtctgctcagcatgtggagagggccaaatgtgaactgtgttgacagcactggctacacacccctgcaccatgctgctttgaatggccataaggatgtggtcgaggttcttctgaggaacgatgcgctgaccaacgtggctgactcaaaaggctgctaccctctgcatttggcagcctggaaaggagatgcccagatagtgcggttgctcatccatcaagggccttcacacaccagagtcaatgaacagaacaatgacaacgagacagccctgcattgtgcagcgcagtatggccacacagaggtggtgaaggtgctcttagaggagctgacggaccccaccatgcgcaacaacaaattcgagacccctttggacctggcagcactgtacgggcgactggaggtggtgaaaatgctccttaatgcacaccccaacctcctgagctgcaacactaagaagcacacccctctgcacttggcagcaaggaatggccacaaagccgtggtccaggtcctcctcgatgctggcatggacagcaactaccagacggagatgggcagtgctttgcatgaggctgctttgtttggcaagaccgatgtggtgcaaatcctgctggctgcaggaactgacgtcaacataaaagataaccatggactgactgccctagacactgttcgggaactgccttctcaaaagagccagcaaatagcagcattaattgaagatcacatgactggaaaaagaagtacaaaagaagtagataaaacccccccaccccagccacctctcatctccagtatggactccatatcacagaagtctcagggtgacgtggagaaagcagtgactgaactgattatagattttgatgcaaatgctgaagaagagggtccctacgaagctctgtataatgccatctcctgccattcgttggacagcatggccagcgggcgatcatctgaccaagactccacgaacaaggaggctgaggcagcaggagtgaaacctgctggagtgaggcctagggaacgtccaccacctccagcaaagccaccgcccgatgaagaggaagaagaccacatagataagaagtattttcccttgacagcttctgaggttctgtccatgagacctaggattcatgggagtgcagcccgggaagaagacgaacacccttatgaactgttgttaacagcagagacaaagaaagtggtgttggtggatggaaaaacaaaagaccacaggcggagcagcagcagccggagccaggactctgcggaggggcaggacgggcaggtcccagagcagttctcaggcctcctccacggctcctccccggtgtgcgaggtggggcaggaccctttccagctgctctgtaccgctggccagagccatccagacgggtccccccagcagggcgcctgccacaaggccagcatgcagctggaggagacgggtgtgcatgctcctggagcctcccagcccagtgccctggaccagagcaagagagtgggctacctcacaggcctgcccaccaccaacagccgctcgcaccctgaaactttgactcacacagcatctccgcaccctggtggtgctgaggaaggagaccggagtggggccaggagccgagcgcctcccactagcaaacccaaagctgaactcaaactcagccgcagcttgtccaagtctgactctgatctcctgacctgctcacccacagaggacgctaccatggggagtcggagtgagtccttatccaactgcagcattgggaagaaaaggctagagaagtcaccctccttcgcctcggagtgggatgagattgagaaaatcatgagttctattggagaagggattgacttttctcaggaacggcagaagatctcaggttcacggacgctggagcagagtgtcggggagtggctggagtcgattgggctgcagcagtatgagagcaagttgcttctgaatggctttgacgatgtccacttcctggggtctaatgtgatggaagagcaggacctgcgggacatcggcatcagcgacccacagcaccggcggaagctgctccaggcggcacgctccctacccaaggtgaaggctctgggttatgacgggaacagcccccctagcgtgccctcctggctggactccctggggctgcaggactacgtccattccttcttgtcaagtggttacagctccattgacaccgtgaagaacctctgggagctagagctcgtcaatgtcctgaaggtccagctgctcggccatcgcaagcgcatcatcgcctccctcgcagacagaccgtacgaggagccgccccagaagccccccagattctcccagctgaggtgccaagatttgctctcccagacgtcatccccactgagtcagaatgattcctgcactgggcggtcggcagatctgctgctgcctccaggggacacaggcaggaggcgccatgacagtctccatgaccctgcggcaccctcccgagcggagcgcttcaggatccaggaggagcaccgtgaggccaagctgaccctgcggcccccgagcctggcagccccctacgccccagtgcagagttggcaacaccagccagagaaactcatcttcgagtcctgtggttatgaagccaattatctgggctccatgctgatcaaagatctgcgagggacagaatccacgcaagacgcctgtgccaagatgcggaaatctacggagcacatgaagaagatccccaccatcatcctgtccatcacatacaaaggtgtcaagttcatcgatgcctccaacaagaacgtcattgcagagcacgagatccggaacatttcctgtgcggcccaggacccggaggacctctgtacctttgcctacatcaccaaggacctgcagaccagccaccactattgccatgtgttcagcaccgtggatgtgaacctgacctacgagatcatcctgacgctggggcaggccttcgaagtggcctatcagttggccctgcaggcccagaagtccagggcgacgggcgcctctgcagctgagatgattgaaacaaaatcttccaaaccggtgcctaagcctcgggtcggcgtgaggaaatccgcactggaaccacctgatatggaccaagatgcccaatcccatgccagtgtctcctgggttgtggaccccaaaccagactctaagcggagcctcagcaccaactgagccactgaggaaccacactgtgctgcggaaacatagacgtgggggcataggctcccactgccaccaccgccatcgcctcacctgcagctctgaagacccaggcctcacctccgcctgcaggacctcctcttggccacttggcctgggcctgccaccaccacgtcctgcagaacgagccctgccttggctgtggagaagcactccaggccgctagcagatgggactggcattccagagggtcaagaagtgacttgttcagaacacattgtttttaacagaaaaaaaatctttttataaaatgaacttttaacacttggctcaaacctctaggtcatactgccaatctttagacaaatggccatggggcagaggacaggggagctgaggttggttcagaggccagcctgcatagcctctgtcctcaggacggaacttgggtgcagctcagtgggtcggaagagaaggcggtggcctgtgggtgaggggaacggagcaggctcaggcagaattgagtacggtgcgtctgcttttcaaacccaaccatatcagctgctgctctttatgaactgcccaacttcctgtccctttcaggggctagacacaggcttctcgtaagaacacagccttagaggcacctgagcaactcaaaggtttccggtccatttctggggttcccgatgggaaggttcagtggccaaatgaagataagtgtgcagtttctagtgctgggaagtcttagccagcaccagagcgccaggcctctccctggcctcttacctgtcagtgatcggagcactgccctgggctggccggcgccgtactgcctgcgttgtgtcagagaataggaaaagcagctttgtttggggcattaatgcttggagtggggtcagctaaggttgctacttgccaatttgtgatttgtctaatcagcctgtgtgattggggctcattttgattctctgaattatcggtttgacggttacacttggctgctgggcccatccctggcccccggtgtggaaaaggctaaataaggtgacagtgcatcgatgctcccccgcgtggcctttggggcaggctggcatcccggtgcgcctctgcttcttaagctttcctgctgctcgctttgtttttaaaagtaacttgggttgcattcttccctctggactagagtagaaatgcaggggaaactgctgtggatttgagaggcaaagttggctcagctgtgtgcccagttcctcctgtgggcactttagcaggctccgagctttcctggcataggtcaatcaggtcccaggatgaataatccaggcttcagcaacactcctctttcccagccagcaaaggctgtgaatttgaattctttgttggtatgtatgtgcagggagtactgttaggcacattcttaacccatgtggttggccagaaatcagaagtggggctgtgtctctgactggctagaggccaggccttgtgggtttctatctgctaagcacccagcaggttggggcctgggactcagctctctctgcggtagaggcaggccctcctccacttcttggtactaaacgaagatctcgacaccttgcagttttacttcatttcctgcccctttcagggcctgtgaggatgcccatgagctaccgctgtacagttctcggccccggctttcttccaagagttgaccaggaaccctaaagcatccagagtagactgcgctgccactgcgcacatgctggtgcccgtcttcctcctaaggggccaggccacatccaagtgggcctctgtcgggggcggggcggtaggtccgaaagaaaccgcagacactacgatgcactcctcaagctgtcttttgtgcttagatcatccataggtgtttcttctgcttgaagctgctatatcatctttatttattcagggtattttcatattggaagccttggctagtctgctctagctctgggttctgtttagagattggtttatttctgaatattcaagaaaggaaaatgactgggcctttctttcttttcttctcctctgggatgggtagtctccctttcctagaaaggttattataactttaaggacaggcttcaagtgggaaggcccctacttttgcacttctccaagtgcaggtcacaccaggggcagaccctgtcgctgcgtttctgaactgtgaaggagcccattcgggtgggagacttcagatgggctcagtacctgtcccagccacaggcttcttgtccacctcttctcccctgcccaccagctgctcagcgcataagaccttcccgacaggctctgcgtgtgcagctctctgcgtccctcctgggccctccagcgtcagacactaatgggagttcccgagatgctcgggtttgagcagggagcaggcagagctgcagtcagagacattagaaaaccagtctgaattgggtctgtctttgagatgcccaggccagcagaaagcagctcagaagtattgttgctcatggtgtggcaatggactgaactgtaatgaaaatgttatttaatctttgtctctgtattttgatacttgaatgactttcccttttgttttactgtatataaaattgttaatctgtctgattttgtctgaattataaacactttgaggtaccaaacataaccaatctgtgcaacaacatagactgacctcagtacccaagagagtgtaaatatttctgggcttccagctttggttttgttattttcataactgtacacaacttagaacagactgaattaataaatgagaagcgacatgaacgcagccttaaaaaaaaaaaaaaaaaa

SEQ ID NO: 30119 - DNA, 6364 bp, Homo Sapiens; identical to SEQ ID NO: 30118

SEQ ID NO: 30120 - DNA, 3941 bp, Homo Sapiens
tggacgagcgtccgtgcggcctggtccgggccatgtccgcgtgaggaccccgccgctgtcgccgctcccgttccggccctggcccctctgcccggcagcgcggcgcaccatgggctccattctcagccgccgcatcgcgggggtggaggacatcgacatccaggcgaactcggcctatcgctaccctccgaagtccggaaactactttgcttcgcactttttcatgggaggagagaaattcgacaccccccaccctgaaggttacctctttggagagaacatggatctgaacttcctgggcagccgcccggtccagtttccctacgtcactcctgccccccacgagcccgtgaagacgctgcggagcctggtgaacatccgcaaagactccctgcggctggtgaggtacaaagacgatgccgacagccccaccgaggacggcgacaagccccgggtgctctacagcctggagttcaccttcgacgccgatgcccgcgtggccatcaccatctactgccaggcatcggaggagttcctgaacggcagggcagtatacagccccaagagcccctcgctacagtccgagaccgtccactacaagagaggggtgagccagcagttctccctgccctccttcaagattgacttctcggaatggaaggatgacgagctgaactttgacctggaccggggcgtgtttccagtagtcatccaggctgtggtggacgaaggagatgtggtggaagtgactggccacgcccacgtgctcttggctgcctttgaaaagcacatggacggcagcttctctgtgaagcctttaaagcagaagcaaattgtggaccgggtcagctacctcctgcaggagatctatggcattgagaacaagaacaaccaggagaccaagccctcggacgacgagaacagcgacaacagcaacgagtgtgtggtgtgcctgtccgacctgcgggacacgctgatcctgccctgccgccacctgtgcctctgtacctcctgcgccgacacgctgcgctaccaggccaacaactgccccatctgccggctgcctttccgggccctcctgcagatccgggcggtgcggaagaagccaggagccctgtcccccgtgtccttcagccccgtcctggcccagagcctggagcatgatgagcactcttgtccctttaaaaaatcaaagccgcaccccgcctccctggccagcaagaaacctaaaagggaaacaaactctgacagcgtcccacctggctacgagcccatctcgctgctcgaggcgctcaacggcctccgggctgtctccccggccatcccctcggcccctctttatgaagaaatcacctattcaggcatctcggacggcctgtcccaggccagctgtcccctcgcggctatcgaccacatcctggacagcagccgccagaagggcaggccgcagagcaaggcccccgacagcaccctacggtccccgtcttcccccatccacgaagaggatgaggagaagctctccgaggacgtggacgcccctcccccactgggtggcgcagagctggccctgcgggaaagcagctcccctgagagtttcataacagaagaggttgatgagtcgtcgtcaccacagcaagggacccgagcagcttccattgagaatgtcctgcaggacagcagccccgagcactgtggccgaggcccacctgctgacatctacctgccaggacggcccacctccatggagacggcccacggcctcgccaccaccagccccacctggcctccacttggtggccccagccccgatcccagcgccgccgagctgaccccactctgagagcctggccgagctggcagcatggagccctcggctccccagactttgccgaggggctgctccggaccccgttgtgagccggcctcctgtctgcatgccccctgtggccaccaggctccgaggggccgtggtgactcttgatcaaagagcacagtgaactgtcccttctgagtctcccttttctacagttgatatatttgtaactggtacaagatgaaggacagcagctttccatccctagttcagagcccccgttccccagggtcctgtgggctgagcggctggggctggggctgcccacgtgtggcctccgctggctctgcctgctcctgcaacagtgcggtccctgcccggagaactcaggaggcctgcagaagagaactgattggtggtcgaagcaccatcttcacagatgttcaggggcagtggggggctccaggcacggtcaatgaaggaaacagtgcctgtccacccaccctgcgtgtcactgtggcggcctggctgtcgctgctttttgtcctctgacgtgtttgcgcggcctcagtgccctccctggtgcgtctgcgctggggccctcagtgctcggggccttggggtgcatgggcgccgccctgggcagctagagtgtctcagcccggtgctgggcctggccgaggggcggaggcacagctgcttccagcagccagcattcagtggccttgtcaccaagctccacacctcctcctggtgctggctttggtgacatcacaaggcccctccaggtgcaggggcttctgtttggcaggcccctgccagggaggacctggtggcctcctcattctcttttgccattggaatgtccccttgcagttctcttctctttttttttttttgagatggagtttcactcttgctgcccaggctggagtgcagtggctcaatctcgggtcactgcaacctccgcctcccgggttcaagtgatcgtcctgccttaggctcctgagtagctggggattacaggtgcctaccagcatgctcggctaatttttttgtatttttagtagagaagggatttcaccatgttggccgggctggtctcaaactcctaaggtcatccacctgcctcggcctcccagagtgctgagattacaggcgtgagcctccgcgcccggcccccttgcagttctctctgatttggtttgttctgtctcaggcttctgtggcaggactggcccagggaggaggaagccagcagcacacctggggaatggggtcccggccgggaggcttggcctctgggcgacctcgtcctgttttgtttgtttgtttgtttgtttttttaaaggtaaacctcctgggccgcagatggcaaagggagtgcctgggcctggtgacccagggctggatccacccctgcggagccctgggccaggcaggtgtctgctgctcacctggctctggagggctgccctgcagctgggcctggggacaggtcggctgtggggcagctcagtaccctccctgaggctcacggtggctccgagcatgagctctgcctcctgggcgagacccagcagtggacagcacggtcctcacacccagctccctgcacacccaggccagccacccctcccgctcgtgcacaggcacgcagatgcgctcacacgtacacacacacaaatgcacgcccacttgcacatgctcacgcacacgttcacacatgcacactcacgctcacacatgctgtcacgcatacacacacgcacatactcctgcacatgttcccatgcatgtgtgtgcactcggaccgagcatctcccacgcacctctaccccaccccaagcacctctctccccccatgcacctctccccaacaacacacacagccccctgcaccgcccgccccccgcccccaccaaggccccagcctctggccatcagtcctggtgccagagctttgcgtgaagttcgggccgcagagtggcccgctgggactcccatgtgctgccgtctgatgtgctcagatgggctcatcgttggttcgtttttactgtatatttatagtaataaaatcatgcagcaaaaaaaaaaaaaaaaaaaaaaaaaaaaaaaaaaaaaaaaa

SEQ ID NO: 30121 - DNA, 6255 bp, Homo Sapiens
ccgaaagccccgagagagactaagaagcaatcctcccacgcgctttctcccaccctcgggccactgagacggagggacagagggccgccctcgcgcggccgaggccccgcctcccgctcgcccgcccgcgcctccagcggaagccggaagcaaaagcgggttctgctagccccgcggctccgaactcggtggtcctggaagctccgcaggatgggggagaagatggcggaagaggagaggttccccaatacaactcatgagggtttcaatgtcaccctccacaccaccctggttgtcacgacgaaactggtgctcccgacccctggcaagcccatcctccccgtgcagacaggggagcaggcccagcaagaggagcagtccagcggcatgaccattttcttcagcctccttgtcctagctatctgcatcatattggtgcatttactgatccgatacagattacatttcttgccagagagtgttgctgttgtttctttaggtattctcatgggagcagttataaaaattatagagtttaaaaaactggcgaattggaaggaagaagaaatgtttcgtccaaacatgtttttcctcctcctgcttccccctattatctttgagtctggatattcattacacaagggtaacttctttcaaaatattggttccatcaccctgtttgctgtttttgggacggcaatctccgcttttgtagtaggtggaggaatttattttctgggtcaggctgatgtaatctctaaactcaacatgacagacagttttgcgtttggctccctaatatctgctgtcgatccagtggccactattgccattttcaatgcacttcatgtggaccccgtgctcaacatgctggtctttggagaaagtattctcaacgatgcagtctccattgttctgaccaacacagctgaaggtttaacaagaaaaaatatgtcagatgtcagtgggtggcaaacatttttacaagcccttgactacttcctcaaaatgttctttggctctgcagcgctcggcactctcactggcttaatttctgcattagtgctgaagcatattgacttgaggaaaacgccttccttggagtttggcatgatgatcatttttgcttatctgccttatgggcttgcagaaggaatctcactctcaggcatcatggccatccttttctcaggcatcgtgatgtcccactacacgcaccataacctctccccagtcacccagatcctcatgcagcagaccctccgcaccgtggccttcttatgtgaaacatgtgtgtttgcatttcttggcctgtccatttttagttttcctcacaagtttgaaatttcctttgtcatctggtgcatagtgcttgtactatttggcagagcggtaaacattttccctctttcctacctcctgaatttcttccgggatcataaaatcacaccgaagatgatgttcatcatgtggtttagtggcctgcggggagccatcccctatgccctgagcctacacctggacctggagcccatggagaagcggcagctcatcggcaccaccaccatcgtcatcgtgctcttcaccatcctgctgctgggcggcagcaccatgcccctcattcgcctcatggacatcgaggacgccaaggcacaccgcaggaacaagaaggacgtcaacctcagcaagactgagaagatgggcaacactgtggagtcggagcacctgtcggagctcacggaggaggagtacgaggcccactacatcaggcggcaggaccttaagggcttcgtgtggctggacgccaagtacctgaaccccttcttcactcggaggctgacgcaggaggacctgcaccacgggcgcatccagatgaaaactctcaccaacaagtggtacgaggaggtacgccagggcccctccggctccgaggacgacgagcaggagctgctctgacgccaggtgccaaggcttcaggcaggcaggcccaggatgggcgtttgctgcgcacagacactcagcaggggcctcgcagagatgcgtgcatccagcagccccttcaagacataagagggcggggcgaggtactggctgcagagtcgccttagtccagaacctgacaggcctctggagccaggcgacttcttgggaaactgtcatctcccgactcctccctgagccagcctccgctcagtgtggctcctcagcccacagaggggagggagcatggggccaggtgccagtcatctgtgaagctagggcgcctacccccccacccggaggacccctgcggccccctgcctagaggagcaccatctacagttgtgccattccccagccactgccttcatgctgcccccgccggactggcagagccaggggtcagccacctgcctttgagtcatcaagatgcctctgcagccacaattctgacctaagtggcagggcccagaaatcctgaaaacctcccgctgccttttgtgatacttcctgtgctccctcagagagaaacggagtgaccttttgtcctttacctgattggcacttcgcagtctatctccctgggtagcagacggctgctgcccttctctgggcatgttctgaatgtttacactggtaccttctggtatcttctttagagccccctgcaagctgcaactctaggcttttatcttgcggggtcagagcgccctctagagggaaaagctagaggcacagggtttctgccggcccacaactgctgtcttgatttgcattttacagcaaagtgctgagagcctctagtcgcctcctgccatctgatctccctccccaccattcccgtactcagttgttcttttgtctaatcggaggccactgtgctgaggccctgcagtgtctgctcactgctgccatcttcgctgctagtcagggttccatcctctttcccctctcccagttccctaccacgttggatcccattcgtcacccatgctagggtccccaaagcactggggcaggggccagagcagcagcacccagtgctccctcctctactctgacctggggccccagcatcctggagcacacgctccacgcacacacaccccagccctgtcccaggggcctggccccctcagccatctcagggtgaggagctgccagtcatgtccagatggaatgactcccatcctctcctcatctcccctttgacgagcctcaaactgctcagctcatcaaagagccattgccaacttccgtatgtggttctgggtcccagggagccttggaacctggcaccctggggtggtttaattcatcattaagaagcattcctgcttctcaagggacacagtggcctgcatgggccagcatggaccctgggctgatcatgtgcattcctgcttctctggggacacagtgggcccacatgggccagcatggaccctgggctagagcaagcacatctccatctcttccacctcaggcagtgtggctccagatgtcaggagggactgacctcaggaccttccaggttcctctgtgccaggaatgagaggccaggcccgatcctaccacctcgccttgaccctgaagtcagagcaggccagccaagcaggaagcacactgtttactttttgcatgaaaagtaaatgtgtacttgatagagctaaaatatgatcttttttaatttctcaaccccataatttgagccattgccttgcttaattttggtttccaccatttccttttagtggagaagagaggaagtcagagggtagggacctttgcctgcccctgggcgagtgcgggcagggatctgagaccagattgttctcgcacccctgccagaactcactctcccctgaagtttagggtcccatctcccagatgtaagttgttttgcaaactcagtttgccaggatttctttctttcctaatcttaaattcacagataaagcaatgaaaagagtcagatcccatttccgtctgccccctcgtcaccaggtgtgatagccccagccaggtcacacctggcctcacactttgagctgagacttgaaaacgatgctgtggcggaagagcatgtggggcttggtggaggggccccaggatttgttgggggcaaagggggtggcgggaccgttcccaggaggtaccagcacctgcctcgatctcctctgagcctcttctgccccctgtcggccaggtgaggtcagcagcctgggagagtgcccccaagagatgagggcaccccgtgttccttggcaatcttggctcaccttggtaacaaaaggccatagaagtctgtttttctgggtcagttttttttgcctgagaataacaaattgctgctgtctacctttagcacacccaataattctatttggggcagtgaatgcatagaagatataaaaatacgcagcttaactatatcttcctgcgtgtgtatttattttcttctgggtctaggccatggtacaggagaactgtggcgtgtaggaggaatacttcaggatgagtgaaggctggagccagggagcgctggaggaaaccagccctttagccagcagcccctccaccacaggcactgctgtgtggaacgagttcttggaatgaatcccatgctttctgcagcctgtagttgttatgacccctcggaacaaccaccccgtggcttgtgtggggtctcgcagggaaaagggctggcttctaggtccccgagataagtgtgcagggggatgggccagggccaggctaagggtggctcagttccatcatctggaggtcagacacactgtccagaggcagaactgaagccctctcggcccctaccctaagccagccacccctcttcacagtgggtgagctgggctgggctggctggcatgaggccaaggggtaggcctgagcgccagagtcgcccaggttagcccacaggattcctttgtgtgccatggaatgctgaaagatgggtgactggggacccttcttaaaacctttggcaaaggtgccatcggcagggcttggcctcatgaagtctcaggtccgtgttcccgcagggcgcacatgcttggagagtcctcagcagggtagccgaggccaggccacttctgctgaggatggggcaggctggggtgtgggtgtggcctggggtggctcagggctggaactgctgcctgattcctgtgtggggagaagctcagtggccgtttgctgccactgacaaggatttcacatgcagaagagaaaaggcccccctccaccccccgcattccctgccgagtgagagccagtgtttgctgcccttgctgggggcgggtaggaaaccctgagcttcctgatgcggagtcatgaagcagagtcctcgggaaggcatctccacagccccgggtcctctgtctaacgccctccatttcacgccctccatctcacagtcaagataaaggcctcgagaataaagagccagcccccttccatttagtctcctgccgtttcccaaacagttgtccaacagttagacattgaggggcttcactgttaccaggcatgtaacagaaggaggaagactaacacacaccccctgccccatcccatccccctctcccgagctattttcttgctgtggcctctggtgcccttgagttggtctccccggctgctctgcgggggcttcactggcttcggagtgagcgcgaagtgctggtgagcagtgggcctgtgattggatgggaagatgtgcatccgtggtcaaaagtcagctgccagccctgcggaaccagagcctcaggctgggatggggaggcctccctgcttccacctgcatggtgggcatggcctggcttacaccaaaggctttgacggtttctccaagtaaggatctgcaaatcttgaatcgtcctcaaaatgacgaagcttgaattgtcctcaagatggatgtgaatcttacattccttttcatcatttcctttgtaaaaatgacgagtgctgggtttttgttttaagaagcattatgaaggccagacttactcatttttctcccccaagtgagctgcaagaggcccctgttaggcccctgtttcctgagcagtgatgtgctgctcttcttggtggggctttgggctgggaggggaaggcgggtcagagatgggggacctgtggctgccatgcaggagcccctgcgtcatctcgttggactctttaagggagtcaggaatagatgtatgaacagtcgtgtcactggatgcctatttagaaataaagtgtatgctgctg

SEQ ID NO: 30122 - DNA, 6255 bp, Homo Sapiens; identical to SEQ ID NO: 30121

SEQ ID NO: 30123 - DNA, 6594 bp, Homo Sapiens
ccggtctataggtgcataccaccacaccaggctaattttttttttttgagacggagtctcactctgtcacccaggctggagtgcaatggcgcgatctttgctcactgcaacctctgccacccgggttcaagcaattctcctgcctcagctcctgagtagctgggattacaggcgcccgccaccacgcccggctaatttttgtatttttagtagagacgaggtttcaccatcttggccaggctggtcttgaactcctgaccttgtgatctacctgccagggccttccaaagtgctgggattacggacgtgagccaccacgcctggcccaggctaattttttgaaattttaatagaggcagggtcttgctgtattgcccaggctgctctcacattcctagccttaagccatcctcctatctcggcctcacaaagtgctgggattacaggtgtaagccactgtgcctggttttgggcaagtttcttgtcctgactgtgtcttgggttctcacctgttgattggggatacccttgttgcctacctccaagtaattttatgaggatgaaactcatagcttgtcagtgggaagtgcttaggtaatgagctactagtggtggcagtggctgtgatggtggtattaataccactcctactggatggtctctaatactatctccttccttccctaccagcaacatgtcatggtttagtggcctcctggtccctaaagtggatgaacggaaaacagcctggggcgaacgcaatgggcagaagcgttcgcggcgccgtggcactcgggcaggtggcttctgcacgccccgctatatgagctgcctccgggatgcagagccacccagccccacccctgccggcccccctcggtgcccctggcaggatgacgccttcatccggaggggcggcccaggcaagggcaaggagctggggctgcgggcagtggccctgggcttcgaggataccgaggtgacaacgacagcgggcgggacggctgaggtggcgcccgacgcggtgcccaggagtgggcgatcctgctggcgccgtctggtgcaggtgttccagtcgaagcagttccgttcggccaagctggagcgcctgtaccagcggtacttcttccagatgaaccagagcagcctgacgctgctgatggcggtgctggtgctgctcacagcggtgctgctggctttccacgccgcacccgcccgccctcagcctgcctatgtggcactgttggcctgtgccgccgccctgttcgtggggctcatggtggtgtgtaaccggcatagcttccgccaggactccatgtgggtggtgagctacgtggtgctgggcatcctggcggcagtgcaggtcgggggcgctctcgcagcagacccgcgcagcccctctgcgggcctctggtgccctgtgttctttgtctacatcgcctacacgctcctccccatccgcatgcgggctgccgtcctcagcggcctgggcctctccaccttgcatttgatcttggcctggcaacttaaccgtggtgatgccttcctctggaagcagctcggtgccaatgtgctgctgttcctctgcaccaacgtcattggcatctgcacacactatccagcagaggtgtctcagcgccaggcctttcaggagacccgcggttacatccaggcccggctccacctgcagcatgagaatcggcagcaggagcggctgctgctgtcggtattgccccagcacgttgccatggagatgaaagaagacatcaacacaaaaaaagaagacatgatgttccacaagatctacatacagaagcatgacaatgtcagcatcctgtttgcagacattgagggcttcaccagcctggcatcccagtgcactgcgcaggagctggtcatgaccctgaatgagctctttgcccggtttgacaagctggctgcggagaatcactgcctgaggatcaagatcttgggggactgttactactgtgtgtcagggctgccggaggcccgggccgaccatgcccactgctgtgtggagatgggggtagacatgattgaggccatctcgctggtacgtgaggtgacaggtgtgaatgtgaacatgcgcgtgggcatccacagcgggcgcgtgcactgcggcgtccttggcttgcggaaatggcagttcgatgtgtggtccaatgatgtgaccctggccaaccacatggaggcaggaggccgggctggccgcatccacatcactcgggcaacactgcagtacctgaacggggactacgaggtggagccaggccgtggtggcgagcgcaacgcgtacctcaaggagcagcacattgagactttcctcatcctgggcgccagccagaaacggaaagaggagaaggccatgctggccaagctgcagcggactcgggccaactccatggaagggctgatgccgcgctgggttcctgatcgtgccttctcccggaccaaggactccaaggccttccgccagatgggcattgatgattccagcaaagacaaccggggcacccaagatgccctgaaccctgaggatgaggtggatgagttcctgagccgtgccatcgatgcccgcagcattgatcagctgcggaaggaccatgtgcgccggtttctgctcaccttccagagagaggatcttgagaagaagtactcccggaaggtggatccccgcttcggagcctacgttgcctgtgccctgttggtcttctgcttcatctgcttcatccagcttctcatcttcccacactccaccctgatgcttgggatctatgccagcatcttcctgctgctgctaatcaccgtgctgatctgtgctgtgtactcctgtggttctctgttccctaaggccctgcaacgtctgtcccgcagcattgtccgctcacgggcacatagcaccgcagttggcatcttttccgtcctgcttgtgtttacttctgccattgccaacatgttcacctgtaaccacacccccatacggagctgtgcagcccggatgctgaatttaacacctgctgacatcactgcctgccacctgcagcagctcaattactctctgggcctggatgctcccctgtgtgagggcaccatgcccacctgcagctttcctgagtacttcatcgggaacatgctgctgagtctcttggccagctctgtcttcctgcacatcagcagcatcgggaagttggccatgatctttgtcttggggctcatctatttggtgctgcttctgctgggtcccccagccaccatctttgacaactatgacctactgcttggcgtccatggcttggcttcttccaatgagacctttgatgggctggactgtccagctgcagggagggtggccctcaaatatatgacccctgtgattctgctggtgtttgcgctggcgctgtatctgcatgctcagcaggtggagtcgactgcccgcctagacttcctctggaaactacaggcaacaggggagaaggaggagatggaggagctacaggcatacaaccggaggctgctgcataacattctgcccaaggacgtggcggcccacttcctggcccgggagcgccgcaatgatgaactctactatcagtcgtgtgagtgtgtggctgttatgtttgcctccattgccaacttctctgagttctatgtggagctggaggcaaacaatgagggtgtcgagtgcctgcggctgctcaacgagatcatcgctgactttgatgagattatcagcgaggagcggttccggcagctggaaaagatcaagacgattggtagcacctacatggctgcctcagggctgaacgccagcacctacgatcaggtgggccgctcccacatcactgccctggctgactacgccatgcggctcatggagcagatgaagcacatcaatgagcactccttcaacaatttccagatgaagattgggctgaacatgggcccagtcgtggcaggtgtcatcggggctcggaagccacagtatgacatctgggggaacacagtgaatgtctctagtcgtatggacagcacgggggtccccgaccgaatccaggtgaccacggacctgtaccaggttctagctgccaagggctaccagctggagtgtcgaggggtggtcaaggtgaagggcaagggggagatgaccacctacttcctcaatgggggccccagcagttaacagggcccagccacaaattcagctgaagggaccaaggtgggcattgagtggactctgtgctcactgggtggagctgtggcagggggcactgagcctccagaccctgctaaccacaaaagggaacatcccagcaggctgtgcttggatcatgctcgtctgccctcaagctggaaaacaaggggctacctaccgagaggattatgcaagtgactttctttcttacttggggtagggctgttccctctccaatcttccagcctttgggagcaggggaggggtcagtagcagaagcagagggaggcctcttgcctgagggattaaaatggcagcttgccatgcctacccttccctgtctgtctgggcagcaggttcagggctgagcccttcttttccctcttttttcctgggaatattttgtacaatattttgtacaaagacaggcatgaggagtgcctattccatgcttgcctttgcaatacctgcatccccagcactggtcctgggcacttccccaccccagccaggtgtccctcctatgcacagagcagaggagggagaagctctggggagccagctttggccatatttcaggagaatgtttccatgtgccaaatcttagtcccatgatctgtccccaaaggggaacaaagggacctctgacagcttagatttagccccagttcctgcacgctccagggaacggggtgtctggcctcactggtactgtgaaaaatgctcagagagcaagcctgtgtgtggggatgtcaggtcaggagctggaagttcacctgcaggtgccaaagagcaggccggccagggctggggcagtgccagactctgatctgaggaccccgtcggggtccagatcaggtcactctgccccagtgctctcttgctgtctgctgacaagggggcatggagcatctcttcctcttctgttgccaaatagaaaagggtcagggcatggagaaaggtgaccctgatcccaaacctgccctcccaagtctctggtgttggggagggcccgtgtgtttgtgtaactgtgtgtgcatgttggtctttgtgtgcatatctgttttccaggtctatgtgagtccttgtgctcctgctcctcagctctccaccccaggttgcctctctcctgtgggcctctgtcttctgggaataaagcagggtttcctacttcaggggatgtagagagatgcccaggttgcacaggagtgggatggggtgtggtagcaaaaggagggagaggagtcctttttgtgccaaatccctaagtgccgttcgggggccatgtgtgcagcatgactctccctgtctgtggcagggacccaagcgcttgcttaagccccagtgctccatgccagcacttgaactgtctggggtttgatggacagaggctgaggaatttcctggcttccccagatagtgtcctgggacatggtatgctttggggctggggtagcatggaatccctctgaggacctggatactggtactacggggtggggaagaggaaccttaaacttggctttccccagccttcagcctgagtctagcatgtttctagctccccagtcccttgtgaagccttgagggctggcagaagggttaggaggttgaactctagattcccttcctgtctttgccttccttttacccctttccctgcaacctccttgactctggcctgaatttgttggtgcctcagtttctctgtctgtacctatttaagccaaaggcactagcctgaattttgcttgaagatcactttgtcttggaaatgactagagaggcagaggagaagggtttccagagttgctaggtttgggagtggaaggggcaggcagtgcacttgcccctcctcatgccccttctgacaccagctccctgtggaggcctggtttctgggtaatgcctcccttgggcatcttcatgcatcaaccaaatgggccatcaggtacttcattagtcatggcagaaggaggggaaaagacttgttttccagacagaaaatctactcccctgtccccagccatatccctggataggaagggataggaagagactacttggtgccatggggtaggggtgagggtataagtagatcagagtgggaagacctcagccttgggtggcttgtctctgcttcttgccaggtgggagggcctgtccacaccctggatccccgtaccacagtgccagccatgcccttcccctgggctaccattgtccctttcctcacccagttggtagaggagtcaggaggtgggaggccgtgggctttggttttataatgtaaccactgtgggggtgggggaggatggtgaaccatgtatttcagtgaaatatttaatatatttaaatatcaataaaatcaaactctttgt

SEQ ID NO: 30124 - DNA, 6216 bp, Homo Sapiens
gatgtctgccagctcagaggagaggcccatggtgcccttcatagcgtcatccaggagaagttcctagagatcagtcgtctccacttccgcacagtgccttccaatccccactacttcttctattgccctccatccagcaggcgagaagatgaggggcctcgggacacagtagacagaaaaatcagtgacctggagttttcagaggctgagcttatgggagaagaaggagacacatctgcctgctgtgtggtcactgagagtgacccagagctagaggtagaataccgggagagccgtgaatcagacctggggcctgctgggctagactctgcctcgctgtcagacgtagacactgtgaatcctgatgaagactccttcagtatcttggggggcgactcacccactgggcctgagagcttccttcatgacctgccaccgctcttcctgcacctcacgtgctccgtgcggctacgtgggcagcacagctcagtacctgtgtgcagcctgcctacctgcctgggccaggtgctttccagtctggagggccccccagttggaggccgagttcccttgagggacctcagtgtgactctggatgtcttcatgctgactttgcccctggaagtggagctccccacggcctcggaccctcagcaccaccggtcaacatctgaaagcagtgcttcatttccacgatccccagggcagccatcatctttaaggtcagatgatggcctcgggcccccactgccacccccagaagaggagaggcacccaggactatccaatttggccacgccccacagactggctattgagaccaccatgaatgagatccgctggttgttggaagatgagatggtgggggcactccgaagagggggcatcccacagagtcctgccctgcaccgcgcagctgcccatatccatagttctcctggacgctccacctgccttcgccaaactctgccactgagttttgtatttgggccagagcgttccctcacacaattcaaggaggagttccgccgcctccatctccctggccatgttcttcttgaagaccctgacagtggcttcttctttgtggcagctggccaacagccaggtgggtcccatggggagccttcttcagcggcctgggcttggcacagtcatgaggacagggctgaaggcatcgaaggggagaccctgacagccagcccccaagcacctgggtccccagaggattctgagggtgtccccctcatcagcctgccccgcgtgccacagggagggagtcagcctgggcccagccggggattaagtctcatgtccagtcagggcagtgtggactcagaccacctaggttatgatggtggcagcagtggctcagacagtgagggtcccaatgacacccttggtgagaaggcccccttcacattgcggactccacctgggccagcacctccacagccttcactctcaggcctccctgggccctgcctgcctgacttctggctcattgtccgggtcctgcaggaccgtgtggaagtgtatgcacatgcacggagcctgattcgggaggatggggggccgggcactgagtgtcgccacctgcagcagctcctggtgaggcgagttggggagatctgcagggaggtcaaccagcgactgcttcttcaagaccttcatgacagccacgtgtgtaactctcttctggtggccgagagtgaagaagatctgtggcgcagtgagactcccttccactcccgtcagcgggcaccactgcccagtgatgattatgctgctgatgagagctgtgcgccccgtgggtacctggcagccacaatgcagtttgtccctggccatttctcctgtgacgttgtgtggggaactgtgatccgagtccattcacgcctcaaaatggggcccagcatgggggtctctcgggccatccaggccctgcgctctgtgctcaatgccttctctgtggtgaaccggaaaaacatgtttgtttaccaggagcgagcaacaaaggctgtgtactatcttcggctcctagagacatcctgcagtgaccggccatggaaaggggatgcgctgcccccttccctcgctctgtcccgaagccaagagcccatctactctgaggaagcctcgggtcctcgttctcccttagacatggtctctagccgcagttcagatgctgctcgtcctgtgggccaagtggacagacatatccagctgctggtccatggtgttgggcaggcaggtcctgagatcacggatgagctcgtgcgagttctatgtcggcgcctggatgaggccacgctggacgtcatcacagttatgcttgttcggaactgcaagctgacaccagctgatgtggagttcatccagccccctggaagtctcccctcagaggtgctgcatctggccctacccacctcctgcaggccctggcttccagccctggcatggtacctacggcagaacttgctcatcttcctgcactctcccaagtacacagatagcaacagccggaaccacttccaacatccactcccaccacagggtggcctccctgacttggacatctacttgtataacaagcctggtggacagggcactgggggcaaaggggttgcctgcatcactctagcctttgtggatgaaggaggggcccccttgtcactggcgttgtggcccccctcctctccggggcccccagacccactgcgagaggaggaatttgagcaactgacccaggtcatccgctgcccggttgttgtggacagttcttcagctcagaatggggccccacggcttcgattggatgtgtgggaaaaggggaacattagtattgtgcagctggaggagaaactccgaggagcagctcgccaggccctggccgatgccatcatcgagcttcagctgctgccagcttcactatgtacagaggacacacccacaggaagtctcaggaacggatcgttggaaactaagagctctgcaggccgagctagcacctttccccctgcccctgtccctggggagcctgtgactccacccagcaaagcgggccggcgtagcttctgggatatgctgagtaaaacagaatgtggggatttgggttcccccaaaacaactgatgacattgtcctggatcggccagaagacactcggggccggaggcgtcacaaaaccgagagtgttcggactcctggtggagctgagcgggcgccaggctcagattctggagcccagagacaaaagcgccggacaacacagctagaagagggtgaggtggggacccttcatcctgtgtttgcccgtgttgctcagcgctggatggagtttatggttcagattggttgtgcctcagtgtccagaagctctgcccacatggtgtcccggttcctccttccatccatcctgtctgagttcaccgcactggtcacctcaatggctggagacaccagtgtccgcatctttgagcagcatttgggttcagagccagagatcttcggcccttgttcccctgggcaactgggcccctctccccgccctgcagctgagcggcatctgctgcttctgggaaggaacttcttgcagtggaggagaccaacacagcaggctgccaaagccatgcagcgcttcgagccaggaggtgatgggagctcagggcgaaatgctccccggcagaggctcttgctactagaggttgtggacaagaagctacagctgctgacctacaactgggctccagacctgggggcagcattgggccgagcgctggttcgcctggtgcagtggcagaatgcacgagcccatctcatcttctgcctactcagccagaagcttggcctcttccatcattatggccagttggacttccccgtgcgagatgaaaaggagccaaacccattcctgctgccgaccatggaagtggagaccctcatccggagtgcaagtcccccgctgagccgtgagcagggccgactgagtgggtcctctcgtggtgggggtcctcttcccctggacacattcccctttgacgaggccctaagggatatcacggctgcccgccccagctccgtacttggtcctgtgcccagacctcctgatcctgtcacctaccatggacaacagttcctagagatcaagatggcagagcgcagagagctggagcgccagatgaagatggaaaacctgtttgtaacctggcagcagcgttctaccccagccaccatgcccatcagtgctggagagctggagaccctgaagcagtcatcccgcctggtgcattactgtgcaacagccatgctcttcgacccagctgcctggctgcatgggcccccagagacctctggaccccctgacgggcagcggcgccatcgccctgagtcagggtctgggagccgagaggcccccacaagctgtgaatccttggatgtgtcgcccccgggagcccgtgaggagccttggctgaaggagctgagcttggctttcctgcagcaatatgtgcagtatctgcagagcataggttttgtgctggtaccactgcggcccccctcacccgcccgcagcaccagccggccacgggccatggctatccttggaacagagggtcgaggctccttctcctgccctaaaaccaagactgatgggagccccaagagcactagctctccggtaaccacctaccacctgcagcgggcactgcctgggggcatcatcctcatggaactggcattccagggctgttacttctgtgtcaaacagtttgccctggaatgttcccgaatcccaatggggcaggctgtcaactcacagctgtccatgctgttcacagaggagtgtgacaaggtgcgggacctgatgcacgtgcactcgttcagctatgacttccatctgcgcctcgtgcatcagcacgtgctaggtgcccatctggtgctgcggcacggctaccacctcaccacctttctgcgacacttcctggcccaccaccctgacggaccccactttggccgcaatcacatttaccaagggacattggagctccccacaccactcattgctgcccaccagctatacaactacgtggctgatcacgccagctcttaccacatgaagccattgcgaatggcccggccagggggcccagaacacaacgagtatgccctggtgtcggcatggcacagttctggctcctacctggactctgagggacttcgacaccaggatgactttgatgtgtctctgcttgtctgtcactgtgctgcaccctttgaggagcaaggagaggctgagcggcacgttctgcggctacagttcttcgtggtgctcaccagccagcgagagctcttccccaggctcactgctgacatgcgccgcttccggaagccacccagactgccccctgagccagaggctcctgggagttcagctggcagccctggggaggcctcagggcttattctagcgcctggaccggctcctctgttcccaccactggctgcagaggtgggcatggcacgagcacggctggctcagctggtgcggctggctggagggcactgccgtcgggacaccctttggaagcgcctcttcttgctggagccaccggggcctgatcgactgcggctaggggggcgcctggccctggcagagctggaggaactcctagaagcagtccatgccaaatccattggggacatcgacccccagctggactgcttcctatccatgacggtctcctggtaccagagcctgatcaaagttctcctaagccgcttcccccagagctgtcgccatttccaaagcccagacttgggaactcagtacctggttgtgctgaatcagaagttcactgactgctttgtgctagtgtttctggactcccacttaggaaagacgcctttgaccactgtcagccacctgtgtcccttgagccttcgggtcttcacttcccacttggacatcactgctggacattcccatcgagatgacacctgggttccaatcccagctctgcctttgaagcacttgcggccaccgtcaagtccctttgctctcggaccctgggtttctcatcctttaatgaggtgggttcagaagctctcccatcttcacagcaaccctggcactggcttctcaatgggagggaagcagcagagaaactgaagtgttagacactatgtgtcccaccaccccattacagagacatatgac

SEQ ID NO: 30125 - DNA, 6463 bp, Homo Sapiens
ctctcttgctcgctcgctccctctctctcctgctggctgcctgttctaggaagccagcgcggagaggggggggatgcacagcacaggggagagagattgcgcatgttggtcagtcgtgttttaaagagtacagtgcggggaggctgagaggggcgcatgcaacaacaacttttggaaggatggaagagaagaggcgaaaatactccatcagcagtgacaactctgacaccactgacagtcatgcgacatctacatccgcatcaagatgctccaaactgcccagcagcaccaagtcgggctggccccgacagaacgaaaagaagccctccgaggttttccggacagacttgatcacagccatgaagatcccggactcataccagctcagcccggatgactactacatcctggcagacccatggcgacaggaatgggagaaaggtgtgcaggtgcctgccggggcagaggccatcccagagcccgtggtgaggatcctcccaccactggaaggcccccctgcccaggcatccccgagcagcaccatgcttggtgagggctcccagcctgattggccagggggcagccgctatgacttggacgagattgatgcctactggctggagctcatcaactcggagcttaaggagatggagaggccggagctggacgagctgacattagagcgtgtgctggaggagctggagaccctgtgccaccagaatatggccagggccattgagacgcaggaggggctgggcatcgagtacgacgaggatgttgtctgcgacgtgtgtcgctctcctgagggcgaggatggcaacgagatggtcttctgtgacaagtgcaacgtctgtgtgcatcaggcatgctacgggatcctcaaggtgcccacgggcagctggctgtgccggacgtgtgccctgggtgtccagccaaagtgcctgctctgccccaagcgaggaggagccttgaagcccactagaagtgggaccaagtgggtgcatgtcagctgtgccctatggattcctgaggtcagcatcggctgcccagagaagatggagcccatcaccaagatctcgcatatcccagccagccgctgggctctgtcctgcagcctctgcaaggaatgcacaggcacctgcatccagtgttccatgccttcctgcgtcacagcgttccatgtcacatgcgcctttgaccacggcctggaaatgcggactatattagcagacaacgatgaggtcaagttcaagtcattctgccaggagcacagtgacgggggcccacgtaatgagcccacatctgagcccacggaacccagccaggctggcgaggacctggaaaaggtgaccctgcgcaagcagcggctgcagcagctagaggaggacttctacgagctggtggagccggctgaggtggctgagcggctggacctggctgaggcactggtcgacttcatctaccagtactggaagctgaagaggaaagccaatgccaaccagccgctgctgacccccaagaccgacgaggtggacaacctggcccagcaggagcaggacgtcctctaccgccgcctgaagctcttcacccatctgcggcaggacctagagagggttagaaatctgtgctacatggtgacaaggcgcgagagaacgaaacacgccatctgcaaactccaggagcagatattccacctgcagatgaaacttattgaacaggatctgtgtcgaggcctgtccacctcattccccatcgatggcaccttcttcaacagctggctggcacagtcggtgcagatcacagcagagaacatggccatgagcgagtggccactgaacaatgggcaccgcgaggaccctgctccagggctgctgtcagaggaactgctgcaggacgaggagacactgctcagcttcatgcgggacccctcgctgcgacctggtgaccctgctaggaaggcccgaggccgcacccgcctgcctgccaagaagaaaccaccaccaccaccaccgcaggacgggcctggttcacggacgactccagacaaagcccccaagaagacctggggccaggatgcaggcagtggcaaggggggtcaagggccacctaccaggaagccaccacgtcggacatcttctcacttgccgtccagccctgcagccggggactgtcccatcctagccacccctgaaagccccccgccactggcccctgagaccccggacgaggcagcctcagtagctgctgactcagatgtccaagtgcctggccctgcagcaagccctaagcctttgggccggctccggccaccccgcgagagcaaggtaacccggagattgccgggtgccaggcctgatgctgggatgggaccaccttcagctgtggctgagaggcccaaggtcagcctgcattttgacactgagactgatggctacttctctgatggggagatgagcgactcagatgtagaggccgaggacggtggggtgcagcggggtccccgggaggcaggggcagaggaggtggtccgcatgggcgtactggcctcctaactcacccccttccctgtcccaggccctgccctggtccccccacaaggcctcagcccagtcacaactgccatttccagtctctgctgagtgtcccagaccctcgaggctgccactccgtcgtggttttatttttaatatagagagagttttgaattctacactgttgtctttcctctgtgctggcctaggacattaggattccttccacggctccggccgctaggaccctgccaggtcccgcgcaccatccctgccctgcccacgtggtattgctgggctcctggctagatgcaagcaaggtggacaagagctcaggactccagcccactgccactgggtgacacagactgtcgtttgggcattatttcatggcagatgggccagtccagggcctaccccgccttgcccccagatcccactggggtccatttggggggtcctgctacactccaccgatccccaaggaagtataataaacgatacccagccagagtctactcactgtcacaagcacaacgagtttatatgagaaagcactgagggggtgcagagggcccgctagttccaggggaactgaaagctgttcctgatcagcccgtatcatctgaggcctgcctgcccaccctgccaccctcccctcccttgctgctctgcccctgccagtgcccagcccagcggctctgggaaggggttcccagaatccctcctgagctgtgccatttactcaggggactcccaaacagccagctgccagtgcaggtggagggctgtaggggagggccagtgcccagacagggtcatggggctcagaccagcccactgtagagaatcactctgaggctccaacttccttccttccttcggggccagtctcggccgaagtctggtcacgctcagacagagctgaccagaccagaccgtttgccttttcaagtttcctagtcctgctacaagatgagcttcttccgtggtttccttttggaaactcctccttccaacaagcagtgggatcccggggcccagggcgggccggtgttggccgctggggctgttgtaagtcttgctggatgttcccctgttcctgagccttaacccctcgcacagccatccccccccccgtcctgccatccccccccgccgtcctgccttccccaccccacccttaggtcccaggtagttgctctgaagagtttcagtagagtggccccagggtgatagctcagggaacaacaaaaaaggaattccgtgaaaacatttttttttctttgatgaattactcctgggtcacttccaccactggtaaagccagaacttctccaaaaagaaccttgcaaaaagtccagtgaatcagtcgaatcattctgtggatgccaaagaatattttgaccataatacagcacagcctggacctgacaacttgtcatttggacttttttttaaatggagttctttagcaacaaagtatagaaacatgttcattgcacacacccaaggagaagagctcaagcgcttggaagaggatgctttgctgctgctgaagtgtacctgggtgttagatttcagatcctgggctgagcccactgtgagctttcctaaactgtgagactcacagaggggaaagatactgacggtgaaaccagcatggaaaacgtctttaccatgtggttccctcctccccaaatacataaagcaaataagcaggatggggaacagcttgaccttcatccacccctaactccaaaactatcaaggtacgacagtggcattgtcatcgacactcaatttcatgtgaattttagcaaaacaggaaacaaagataatgactcagttcagaggatcggacaaatgtgtctagtccgggtggactcggagggagtggggtgggcttcaaggattctgggcgttgggatggcatgagctaccctgtagagtttagtctgcctgcccgccttggtagtagtgaccagtcagtgtcagcatcagtgtcccaaccccagtctctgtttactgcctttgaacagaacttcttccttccccatgctttgggtcacctcgggctgcaaccctgtctgtgccagattgcccggtctgaccctgcaggaagcaaagaggtgagcttaaagaacaaccaaactctgccaggggtcccagaaagcccagggtccagcagtctcagcacttggccccttgccccttcacaccatcctggggcaggggctgggcctccctggtggcaggggtgggtggagaattagggagagggtgcaacgagtctggccccttgcctcgggctggctggtgttcttccaagagcctctgctcacattgttggcctctggattctggcccttcttcattggctgttgctttggactggactgttgctgagcctgtgtcctgcagaacccagatgtctgttaggctggctggctgctgcgaggggaggggggtggcctttcatttggggtgccctttcactcccaggccaagccctggagcaatcttcttcaggcagctgtctccacctccaggatgtccagcaggctgcaaggagaaggatgccagccacccatcctcccccagttcccagcctttcccctgttggtcacagccgcttctgtctttttccggtctactgtccccagtgtagagggctttgctgtccctgagactgaggcaggttccttttccaggtcagaggtggaggtagatctttctctcaaccacatctgcctccacacacagctcctccgcagggaaggagaagctgctctgtaactcattctggctatcgtcccccttctcactgacctgaccgcccaccacctccttccccctcatcacatgacaaaggataatgtgcaagaaaagtatttttatgtatcataaatgtattttgaaacaaatgagaagaagaaaggtagaagggtttattttattaaatgagcctgacttagtgacagtgtgtgagcatttgcaatgtaagggcctcagcttccttggagaagccaccccaggtttccagacatagatgttgaattgtttgtggggggtgtgccaggccacgtctcgtgtgtccgtatgcaggcatgcctgtgtatactgtgtatgggcacactgggactagctgggacaattcctagagattcaactgcccaattctaaccaacattggcagcggctgaacttggcatttccttgctaactgccagatgtggccaacctttgtccatatgcaaaccactgaaaaatgatctggatttctatagcaaggcccttggggagggcactctcccatgcccttggcctcgctggccacattggccaatgagccagggctggagtctgagacctttggttgttctttaaggcacctcctgccactttctccctcagaggcacaaacactttgtgttccacgtcagtttgaggggacggtggggggatgatatgaatgtcacaggaggagacaccttctgtctttgtttcaaagaaagtgatgtgccatttgttaatatacaagagaaatattgaaaatatattgaaaagagcaattttaaattatttttggcttatgttgcaatatttattttcttgtattagaaaagattcctttgtagagaaaaaatgtatttttcattaacgcaaagacctatttctcctttttgtacattgtccatgtgcgcaacccttaacgagcaatagaatgtatggtcacctgggtgtggccagtgcccgctgtgccctgcatgattctgtgttgccgctgctgcatagttcccagccccatcctgtcctgctcactcatgggggcttccagaccccggccccaccagggcttgtgtcatagggagccctttgcactcctcgtgtgttggcaaacgcagttaataaagcagtgttttctgtgc

SEQ ID NO: 30126 - DNA, 4072 bp, Homo Sapiens
gagttgagggaggacctgctggctgcagtgaggagcggaggcgggcgcgggcggccggccatgatcgcgtcgtgcttgtgttacctgctgctgccggccacgcgcctcttccgcgccctctcagatgctttcttcacatgtcgaaaaaatgtccttctggcgaacagctcatccccccaggtagagggcgactttgccatggcccctcggggccctgagcaggaggaatgtgagggcctgctgcagcagtggcgagaagaagggttgagccaggtgctctcaactgcaagtgaggggccccttatagataaaggactagcccagagcagcctggcacttctgatggataatcctggagaagagaatgctgcttcagaggacaggtggtccagcaggcagctgagtgaccttcgggctgcagagaacctggatgagcctttccctgagatgctaggagaggagccactgctggaggtggagggggtggagggctccatgtgggcagctatccccatgcagtcggagccccagtatgcagactgtgctgccctcccagtgggtgccctggccacagagcagtgggaagaggacccagcggtgttggcctggagcatagcacctgagcctgtgccccaggaagaggcttccatctggccctttgagggcctggggcagttgcagcctcccgcagtggaaataccatatcatgaaattttgtggcgagaatgggaggatttctccacccagccagatgctcagggcctgaaggcaggagatggccctcagttccagttcactctgatgtcttataacatcctggctcaggacctgatgcagcagagctcagagctctatctacattgccatccagacatcctcaattggaactatcgcttcgtgaacctcatgcaggaattccagcactgggaccctgatatcctgtgtctccaggaagtccaggaagatcattactgggagcagctggaaccctctctgcgaatgatgggctttacctgtttctacaagaggaggactgggtgtaaaaccgatggctgtgctgtctgctacaagcctaccagattccgcctgctctgtgctagccctgtggagtacttccggcctggcttggagctacttaatcgggataatgtgggcttagtgttgctactgcaaccactcgtcccagaaggcctgggacaagtctcggtggccccgctgtgtgtggcaaatacccatatcctttacaacccacgccggggcgatgtcaagctggcccagatggccattctcctggcggaagtgggcaaggtggccagactgtcagatggcagccactgccccatcatcttgtgcggggacctaaattctgtccctgattcacctctctacaacttcatcagggatggagagctccagtaccatgggatgccagcctggaaggtatctggacaggaagacttctcccatcagctttaccagaggaagctgcaggccccactgtggcccagctccctgggcatcactgattgctgtcagtatgtcacctcctgtcaccccaagagatcagagagacgcaagtatggccgagacttcctgctacgtttccgcttctgcagcatcgcttgtcagcgaccagtaggactggtccttatggaaggagtgacagatactaagccagagcgacctgcgggttgggctgagtctgtccttgaggaagatgcatcggagcttgagcctgccttctccaggactgtaggtaccatccagcactgcctccacctgacgtcagtatatacccacttcctgccccagcgtggccgcccagaggtcactacaatgccattgggtcttggaatgacagtagattacatcttcttctcagctgagtcctgtgagaatgggaacagaactgatcacaggctgtatcgagatggaactctcaagctcctgggtcgtctctcccttctctctgaagagatactctgggctgccaatggcttacccaaccccttctgctcttcagaccacctctgcctgctagccagcttcgggatggaagtcaccgccccatgacagggctcccaggggaagagagcttctcttccagaagagctcactggatcagagactgtggaaaaatcccatgcatctagaaacttagatccaagaaacttacatcccctcccttccccctcctcgttccctttttcccacggttagactttctccaggcctggctgcgttctctgcctgtggtccttgccccaccccagcctcttcctaatcctgtgccacacactcagtggccctgggagaggcagaaggggggctcccccttccttccatgtatccagcgctcccccttgatttttaattaccagggttatgggagttcttgatttcattggttatttgctttcaggccgtttcttgatgtaccttctgacctgaccttttccctgccttcaggacttctgggcccagccctcttgccaggcatgcatatgtgagatatgcatatcatgtatgtgtcctcttggggtgagacttctgcacagccatgcctgcctctgaccagtccacttttcatgttggggctgtaggcctggggcaggttcagagtctacccaagtacctatgtatgagcaggcagcagcagggcatggccccatctctccttttagcctctgtgtttcattaggcattcatcctgccaaccagggcaggcccggcgtctgggctctgggaacaaatggggcccacatcctggagtggcaaattttgggggatgcgctacctgtcccagctggccctgtgcctccaacccagagctccccacagacctggtgtaatttcacaagggccatccctttccccaggcttccctgagggaggcggaagtttgaacccttatgtggggttcattgggctagggtagtggtatgaggtttaaaactatttaaggattaggaggagaaagagtcttcaggaaactcttgtttcactggactctgcagcctgcagaactggggcaagggtaggagttccagtaggggaaggagcaggtagactcttcagctgcctcagctgggactgaagacctaagctgattctctttcctctccactcctaagaagcaattttctgttcctctccttccaccactttttactttctgctatctcccatctcccgcttcccttccatttcctttctagaaaaccctggtatttagctcaggccaaactgcctcagcagaaaggtggccttggacaaaactggtccaagaatttgaagtggcagtacttgcggattggctctgtccagcaaggcctcagctgcttgttgcgtctgctttccctcccctaacagaagggtaccctggcttattcaggggactccttagtccacactgtgtcacctgcatgccttaatctttcattgctggggtgtggccttgggagatcctgggccagcccctccacacatctccctaagtcagagtggctgctggccctggtagatttgacttgctcttgcctcactcgacctccaaagtgggactgaagacagtggtcaagagacttgagttcgggacagtaagccaggggttaaggttctttcctttttttgaaagccaaagacccagtttgcattgtgctgctgcattcatggttagaagctttccatgcctaggttctagggaatttatttttctatgtgtatatattttcaaactttgtttcctgggtactgggcatgtgcctgtctgagccccaggtctgtctacaccccaccattcattctgtctgtctgttccctggacactgcctaaaagggtctcaagacagtgccctgtgggttcctaggactagggcccatcactgttctcttctgctgggaaatgcagctttaaaatggctaaccacagcagagggcagatgcttgatagattatcttttccttgctttcttgtttctgttttgaaagtgaaatggggttttaaattgttatttaaactctttttccaaataaaggtttaccttttttccccccaaaaaaaaaaaaaaaa

SEQ ID NO: 30127 - DNA, 8436 bp, Homo Sapiens
aacaaagagcacgcggcgctggccgccggcactcgcgccctgaggctgcggccccggagcgcccggcggcggtttcggcgcgcggccgggctggcgatggaagatggaaggaaggagcgcagcggcagagacatttgtttgggtgaacaatgcatctgcacattcccagagtgttgccaaggccaaatatgaatttttatttggcagatctgaagggaaagctccagatactagtgatcatggaggaagcactttactcccaccaaatgtcacaaatgaatttccagaatatgggaccatggaggaaggtggagaaggcctaagggcttctctggaatttgatggtgaggctctgccatgccacccacaagagcagcagggtgtccagcctcttactggctgccactctgggctcgacagtgttacagaaggaccaaaagatgtcagagaggccccctctcaaagtcatctcaaggaacaaagtttacagcccattgactctttgatttcagctctgaaagccacagaagccagaatcatttccggaacattacaggctacaaaggtactggaccaagatgctgtttctagtttttcagttcagcaggtggaaaaagagctggacactgccagtcgtaaaacacagagagtcaacaaactgctccctgctggccaaaaaaatttaccagaaatacctctttcagctgaagtaacaacggaggaaagtttttatttgagcatccagaaagatctcaccgcgctgttaactggagacactcaggcagagatttcccagataatgaataatgggaggaaaggggctgtctgtgtgcaggagccatcttgtcctttggcctccctcgggagctcagcagtgacctgccactctgcaggcagtgttggtttcttgaaagagcagaggtctgctcttgggagagagcacccagggggatgtgatcgaagcagctccatgggacgcccaggccgggtcaaacatgtggaatttcaaggagtggaaatactgtggacaggaggagacaagagagagacccagcatcctatagattttgagacatcactgcaaagaacagcctctcctgacagcaaagagtcttccaaagtgccacgccatctcatctcatcagctggtttgtgtaattcaagtagtttaactgagaatgtttgggatgaatcctggaaagctccttcagagaggcctggcactagctcggggacattttcccctgtgcgtcttgatgagagtggagaggatgaagtcttcctacaggaaaacaaacagcatcttgagaagacacctaaaccagagagagacagggaaaggatcagcgaacaagaggagcacgttaagggggaagatgaagacatccttgggcctggatatacggaggactccaccgacgtgtacagctcccagtttgaaaccattttggacaacacttctttatactacagtgcagagtccctggagacattatactcagagcctgatagctattttagctttgaaatgcccctcactccaatgatacaacagcgcattaaagaaggtggtcagttcttggagaggacatcagggggaggacatcaggatatcctgagtgtgtctgcagatggtggcatcgtgatgggctattctagtggcgtcaccaatgggctgaatgatgccagcgactccatctacacgaaaggcaccccggagattgctttctggggaagcaatgctggggtgaaaacaacacggctagaagctcattctgaaatggggagcactgaaattttggaaaaggagaccccagaaaatctcagtaatggtaccagcagcaatgtggaagcagccaaaaggttggccaaacgcctttatcagctggacagattcaaaagatcagatgttgcaaaacaccttggcaagaacaacgaatttagcaaactagttgcagaagaatatctgaagttttttgattttacaggaatgacgctggatcagtcactcaggtatttctttaaagcattctctcttgtgggagaaactcaagaacgagagagagttttaatacacttctccaatagatatttttattgtaacccagataccattgcttcacaagatggagtccattgccttacctgtgcaataatgcttcttaataccgatctacatggccaaatattggaaagaagatgacctgtcaggagttcattgcaaatctgcaaggggtaaatgagggtgttgatttctccaaggatctgctgaaagctctgtacaactcaatcaagaatgagaagcttgaatgggcagtagatgatgaagagaaaaaaaagtctccctcagaaagtactgaggagaaagctaacggaacacatccaaagaccatcagtcgtattggaagtactactaacccatttttggacattcctcatgatccaaatgctgctgtgtacaaaagtggattcttggctcggaaaattcatgcagatatggatggaaagaagactccaagaggaaaacgaggatggaaaaccttttatgctgtactgaagggaacagttctttacttgcaaaaggatgaatacaagccagaaaaggccttgtctgaagaggacttgaaaaacgctgtgagtgtgcaccacgcattggcatccaaggccacggactatgagaagaaaccaaacgtgtttaaacttaaaactgccgactggagggtcttgctttttcaaactcagagcccagaggaaatgcaagggtggataaacaaaatcaattgtgtggcagctgtattttctgcaccaccatttccagcagcaatcggctctcagaagaagtttagccgcccacttctgcctgccactacaacaaaactgtctcaggaggagcaactgaagtcacatgaaagtaagctgaagcagatcaccaccgagctggccgagcaccgctcatatccccccgacaagaaggtcaaagccaaggacgtcgatgagtacaaactgaaagaccactatctggagtttgagaaaacccgctatgaaatgtatgtcagcattctcaaggaaggaggcaaagagctactgagtaacgatgaaagcgaggctgcaggactgaagaagtcgcactcgagtccttcgctgaacccggatacttctccaatcactgccaaagtcaagcgtaacgtgtcagagaggaaggatcaccgacctgaaacaccaagcattaagcaaaaagttacttagagtccatctgcggccaggaagtgctggtcatggagcaaaatagggtttttcaagatctttctggtaatccgtgaatatatttaaaaaaaaaaagtctgtgacaaaacggtgcattagtaattttttctattgtatatttttgttagtttctgtacagattgtctttgctcttgatttcttttgctttgatgatttttgcaacttgatagctaatgcaccttttctgtgaggaggaggggatcgtgatttcagaatgaattatgtatcccttctcttttggttttctcttgtttgcagtctgctcagttgttttatgtattctcatatcaactgttaaacttttttttaaggttaaagaatttaatccattgtgaaacacttaactggacaaactgtagttttagtaaattctagctggagttaatatacgcctttatatgtgaaatcttgcccagtcacagaggtagaattgagcactcacagatgctccagtaagaatcacagtgctgggaatctagttgctccaatatgaggcagcttcatgtgcagcttagcacttgttgttgagatcggaccctgctggaagcagggaaaagaagcgtgaagatcgtaggattgagaacttagggaagcacattagcttgcttgaagtgctgattccatttcagccaagcaagggaaagaggaagtggagtcattttgcctttgaaggctgaggaaagattgatacccagttaattttgtttgctaaaggatgggggcaataatcggcccttgaggagctgcagcagtaggcatgtgctcagtctgcaggaattgttacctcactcccacagggtctagactagaaatccatcatctctatcgttgatatccttccatccaggaatagatttttcttactctacatatgtgtgtgtgcgtgcgtgtgtgtgcgtgtgtgggcatggggttgtgtcctggttgtgatattgaggtcttccttcctaacaaattaatactaaaatgaaacagcttttcttgtgtccttaagacaaaataaggaaggaaaacgtagctgcagttgtccacgatggatattggttctttaaaatatatctgaaagtagtagtcagaatgaattatggttggaaaactgaggaatcttctggttgcaggtgcaaagtgactttgtttattcttgtctcagtctccttgatagccacttcactctgctactactcaactttctcctaaaaatacttcatctattttcagtcctttctttctgtctactcaaaatggttctattaactttgcagtcatgagcttgttccagttacagtccctttgaagttcagggtgataaacagaatattcttctgtagaggaagagaaaggagtgaaagtttagcccactgagacctagagctttgtgatttcctaaccttgaaactctgtaatccctaaagttaaaatctccgcaagtggcacaacttcagaactaatagtatcactttgatttttctttttcctcccttagaaagtttctctagttctatagtttatttgttgaaggtactatgaccaaagaatcagctgctctacaggaatagcatggttccagtgaattagagaaaacctgctgtaaagccatggtagtgtctaagtggtatgttattatgatgtactagcatttatttacagaattatttattaacgtttacttccttcccctctgtaaatgtccatgactattgcccagagaaggcttacccctctctagggttgcagttgctttctttgtaataagtattttgccacacctgtaaaaaaaaaaacctcacttttaactctctgccttgtttgggtaaaggcagtaactaagtttatgtttcagaactgcaaaacaaacaggatagttaccaatatggcccatgtgtcagattgatttttgtagcctctcactgaatccaacatatccacaagcaagttatctgtctttctacctgataatctaaattatcaggatatttgttttctgcctaaatgtttatactaagccgaggggagagaggtacctagaccatgtcatctacgagcttcagtaactaaagaaaaaggaacttccctgagtggcttgaatgtgtttgcccacagtctatatctatgtatatagaatgtctgtatgtattttacttatttaatatacattgaatggtaccttgctacagtatttctgacatttagagtagtgttgaaatactcggctagcatcagcaccactatagcactgtccgtgtcatatgagtcactaatattaactccagggacttctggataggctaatagatcattggatacgaagggctcttttgaagcttcagtataccatgtttgcatagtttatctttaaaaacaactttaaaggttcttttgtgagccaggatctcagactgccgtagcatgatgctgtccatctttagcgcatgggctgagaacacctcttccctgaggcttctgaaggttgctgtctgtcatgagtgcatgaaggaggccaagagtttatgctatgggaggaaccagtcactgatttgcctagattctgagagtctggcccatagccaaccacattttcctttgggataatttatttcctgtggcatctagccagaagaaattgaggatgtttcctttcacagctgctccaagcctgttgcccaattcacggtacaagggagcaccccttccctttcctctgaaggtacgccacccacctccgtcgcccacctcagcgcccaggagccttgggacttccttccatatgataaatcattcttcttcacgtcaatacacttcatattaatttctagtacagaaaatcttgacagctatcagaatgccttggtcatagtgttgttgcaaaattgaccatacaggtggcccatgtataaaatctgaattttaggggtttgtccccacctcgcatgctggcttttacagggaggtgtctgggattcctcattagcaatcaaaacttaattactgggatgcagagtccttactttatcgccagcccgtaggcatttctgaagtgcacttttttgaaacatcattttgctaactctcagcagtgtctaattaaactgagcaatacttttgtgaattttaattaatctcagcaaaaccatgatgggagagagtcctctgatggaaatgtagtccctggattatgtgtaacctttttattgctcttagatgcagaggatagaaagcattttttggtgcagtggtcttgtggcaaacacaagaccctctatgcgtctccaactgttatcctaatctagaaaatgaggactggcccctgggcaaaagtgacatgaggaatttactctggaagaggaaaatctgggtggctttccaaggctaagataggtttgtatttcaccctgtggccaagctacagaacttctgagattgtggaagaatttttgcaaccagcagggaaagaggcctcttactgcctaaacacaaagttacactgagcttttctactgtcctttgcctattgctccctctatcatgtaaagatctgggaaggatgagaggcagggcctgcttgtcatgagctgcactcttttctttttaactaatcattgacaattggaagaaaattgacgttaaagaagtttctccattgtcttactaacaaaaccttttgggtttcattaattgtccttgaaattgagttcctttggcatttttccttgcagtcatcagttaagcatgttgcatcctgaattcacagaagtttagctttgcaggtttgaatctctgtaatttaactcccgtggacttggtcgagttttcagcaggttgggagccacctctcttcatttcagcagtgagtcatcccttgacttttcaaatgacagaattttttccaattgtaaaattagcactgtaaaacaaagaaccaaagtggcatcctaagagttgttaaacctgaagtctagtttatgaggaattgtccaagttggagtttaaatagtatctgcttttgtctcaaagcatctaagttattctgacagaaaatggtaagtcagctttgcaggcagatgcgcctctgggcctcctaccttgctccacagctttctggccatcttgtctcccaggccatgccactgctctgccacatgtcagcaaatttctttccaccagtcttatagcatcttacatgatcaaatcatcacagaataaccccgtgatagattattgatagcaatagagaggggctttgtcactgatttttctctcagattccttttccatctctcatccataaaggaaggactgaaatccaaaggcattctccttttgtacctacagtatccagaacccacgtgggcagccttctgcttatgacaataattggcccattgcatgcagagagaatgtcttcatagagagaatgtcattaaatacttgaatctgcatgacagtttgacttgaatgcaacagcaggaaaattttgcaagttacataattgtatatacagtaggttttcttaagtctcttcggttcatcctttgtaatttgtgtgtgtatctgtagtattgcaggcttttggagactattcttacaggcagtatgtcagtcatcaaagaaaatgctgtcacctgccattgttgtatttgtgggtatttatagttgtatgtatgtaaatgcatcagtgtgtagattgcatatcagtgtatggtacatgtacatcaaaattatttttgtccttaatcagtgtgatatgaaaagcaagtacaacctcataggactgattatataatgaagttgttgagagtatatatagtggtattgttttattaaacttaaactcaaataatattttgattaaaatttttaataagactttatgctagaaaattctttgagctttgaatcaccagggcaaaaatgactttcaactaaccttgtgaatcttttgcagtgtactgtgtgcaataccaagggcatagctccctgtaatttgggaaatacagaaagaaaagaaaaaaaaaaaaaaaggcagcctgtgcagtcttagtaactttagtattaagagcacttaaagtcaaactgacaattttgggcttattacaaaatgtgatgctttaaagcacacgttctttattgttgttgtaattagtccataaaaaa

SEQ ID NO: 30128 - DNA, 4834 bp, Homo Sapiens; identical to SEQ ID NO: 23983

SEQ ID NO: 30129 - DNA, 5052 bp, Homo Sapiens
gccgaccaagagcaggagctggagtctgagccggtggttgcagcggaggcggtgatgtcggtgcaggttgtgtcagccgcggctgccgccaaggtgcctgaggtggagctgaaggacctgagcccctccgaggcggagtcgcaactaggactgagcacggccgccgtgggcgccatggcccccccggcgggcggtggagaccctgaggctccagctcccgccgcggagcggcccccggtccccggcccgggctcggggcccgccgccgctctcagccccgccgccgggaaggtgcctcaggcgtcggccatgaagcggagcgacccacatcaccagcaccagcggcaccgcgacggcggcgaggccctggtcagccccgacggcaccgtcaccgaggcgccgcgcacagtcaagaagcagatccagtttgctgaccagaagcaagaattcaacaaacgtcccaccaaaattggacgtcgctctttgtctcgttccatttctcagtcatctactgacagctacagctcagcggcttcatatacagatagctctgatgatgagacatcgcccagggacaagcagcaaaagaactctaagggaagcagtgacttctgtgttaagaacatcaaacaggcagagtttggacgaagagaaattgaaattgctgaacaagaaatgcctgcattgatggctttgaggaagagagctcaaggagaaaagcctttggctggagccaaaatcgtgggttgcacacacatcactgctcagactgctgtgcttatggaaactctgggtgctctgggggcccagtgccgatgggctgcctgcaacatctattccactctcaatgaagtggctgctgctctagcagaaagtggatttcctgtttttgcctggaagggagagtcagaagatgacttttggtggtgtatcgatagatgtgtgaatgtggagggctggcagccaaacatgatcttggatgatggaggggatcttacccactggatttataaaaagtatcccaacatgtttaagaaaatcaagggcatagtagaggagagtgttactggagttcacaggctgtaccaactgtccaaagctgggaagctgtgtgttccagccatgaatgtcaatgactcagtcaccaaacagaaatttgacaacctctactgttgccgtgaatcaattcttgatggacttaaaaggacaacagacatgatgtttggtggaaagcaagtggtagtctgtggctatggagaggtggggaaagggtgctgtgctgccctgaaagccatgggctccattgtgtatgtaactgaaattgaccccatctgtgccctgcaagcctgtatggatggatttcgactggtgaaattaaatgaggtcatccgacaagtggacattgttattacctgtacaggtaacaagaatgtggtaaccagagagcacttggaccgtatgaagaatagctgcatcgtttgtaacatgggacattccaacacagagattgacgtggcgagtctgcggacaccagaactgacctgggagcgagtgagatctcaagttgaccatgtgatatggcctgatggcaagaggatagtactgctggcagagggccgcctgctgaaccttagctgctccacagtgcctacatttgtgctctcaatcactgctactactcaggctcttgccttgatagagctttacaatgctcctgagggtcgctataagcaggatgtctacctgttgcccaagaagatggatgagtatgtggccagcctacacctgcctacctttgatgcccacttgacagagctgacagatgaacaggccaagtatctgggactcaacaagaatgggcccttcaagcctaattactacaggtattaagttcctgtaactcaaaccagaatttttaaggaatagaactccaagccttttctccactactatacaagaaagaattcagcaagctgcttctccaatcaaagctgcctgccgtgctcaccctgtgtgttaggttatttatttattaaaatcaagaatcctgtgcctgtagtgttggcccagagtgtggttactgccctgagggccatgaaagccacagaggatgggctgaggaaggaaagaaatggggttactgctcccagtgcatcatttgcatcattccccattgactgaatcctcagcagtggccgtttttcctcttgtccaggctcacgagttagtccagggattccatactccctattccctggagttttctggaataaattttcagcacctgcttttctcagcttggcccttccccgggtgaggccgtttggaattaacatggccagtgtttcacacaagattgggttcccaatcttgaccatcactatcactgccttctttatataaaggctaataaggaaggagtgttatttatggctttgccaagctacatcaagaactcagctgtgctgtgcctaccaggggtctcctttcttacccaggactcctttcttccattttaacacttcctggttgcaagagggatgtgcctccattatttcctccacagttttggtatttgtcagacatttgttctgctgtctttctaatccagccaacgtctgctcaggaagtggggccagctccactgggacccatagttttacttccttgtcatttgattggatagtttccaaggaagcccctccagattggcactatctcagaaaaggagagcttgttgtgaaacactgcttcctgaaacttcctgctattgcctaaagctacgtctgaaactgagtagggaaaggcatacttttccagggacttagggggataggctttggaaatgggacaggtctttcagactcacagcttgataccctaacaaagcagagtatatttatttgtttcccaggaaggccattgcagtttgactggctgagggatacagagatgaaattgtaaactgtatccagattatcaaagctaatttgactagtttgaacctcgtcagacattcattcctttggccattgccatggatgaaaccgagatctgcagtctgatctgtggacttctctgctggcatatcttttatgatttaacctcttccatttgatgattctgtatttcagagtcagtttcttgagtaactccagtgctacaaaaagaattagtaatgtggtgtgggcagcgtgacattttatgtcccacccaaaaattggattccttttggagactgatctgttggtctcaggcatttcattaggaccagattggttctaagagttagtctggactggccctaggaaacttgaattaaataagcctcttccccttaccgatcctttttaacactctcaggtttgtttgtttcccacttttttcctatgctggtctgcctcaaagtctcaagaccaaggtgactcaagataacaccagaccacgcatgatcaccaaaaccttcccatcctgattctcttcttctacctctaccctctccaacttctcctggtcttcacatatactctcaaagctagtctgaaagtgaccttactttcggaagtagggaagtggaactttggtaaatgactgtttgcctcatttaatagtatacaggctcagcccatagactacagttcttcagaggccatatgtctcagcaagtactggttatattctttttttgtaaggaagatcataaatgctaaaaattccactaagccattcagttcttccttttgcctacctagtcctgatttttgtattaattggttccctttagcaagggattcagatctttgtaccttatcttatatccagagcagattccatttggcagatagatggtctctagcctattgtattcttagaccaaaaatcataacctgctgtttctcagcaaagccttgctctctggagcttactatgtgctggtacttaaagagtacattctgccttgctgtagtgaagagacccactccaaataaaaaaggggccacacggggcttctaagttaggttgccagtgttgctgcccatgatgagttatttgcctctgagtttcagatgacctctctgtagggacactgtgttatcaaccattaagaagaaagaaccacaagcctcccaagtatttgggttctatcttagggttgaaatctggtcattattccctctacccttggaatcagagcaatgtgtcttctttcctccaacctcttaccttagatgcatcctggttatctggaagcatgggaaagaaggctacttatctctttgtatgtggctccagtctgtgaggatacataacattttctctacaatgaatctgtgctaatattttgccttctttctttcttttcttttcacccttagagacagggtttcactatgttgcccaggctggtctcaaactcctgggctcaagcaatcctcctgcctcagcttcctgagtagctggaaccacaggtgtgtgctaccgtgcctggcacttttttgccttcttaatggagatattcagttttctttttttcatttaaacaaagaaaaaaaatgtatctactctaccttccctctgctctcctccctccctatcctacttgcccatatgagcacggctccccatggccacatactcctgcaaagcttttatgctgcttcgcttttctctaaacagatctgatattgctgctcctgtggttttctcaaaattaactttgccgtggtttttaaaaaggaatcaaaatgcattgttgcattaagctttttcaataaaggaaaattacggaaggaaaataggcaacaccagcaaattatatgtggacaggttctaaactctatatatacatatatatatatatatctatatatctatatacgtaatcatctagttctgtcatcttactgaaaggaataacacttctaaagatcaccatttctgagaagttcttggaaatctttatgtctaagtgattgtattagatcagcaataatgactatgtaatctcaaaaaacaaataaaatattcttaacatggaaaaaaaaaaaaaaa

SEQ ID NO: 30130 - DNA, 2110 bp, Homo Sapiens; identical to SEQ ID NO: 26050

SEQ ID NO: 30131 - DNA, 6215 bp, Homo Sapiens
caggaaaggggtccccggactctggggctctcagcacctgcggtcgcaaaccaacctcatgccctgactttaccaggcgtcgggactctgacttaaccggggaatgagggacttggtctggcggcagatcacaatgaggacctagggcatctgtctgctgacgccccctggcctgcagtgaccatggccccccgcaagaggagccaccatggcctgggcttcctgtgctgcttcgggggcagtgacatccccgaaatcaacctccgggacaaccaccctctgcagttcatggagttctccagccccatcccgaacgcagaggagctcaacatccgctttgcagagctggtggatgaattggatctcactgacaaaaaccgagaggctatgtttgcactgccccctgagaagaaatggcagatctactgcagcaagaagaaggagcaggaggaccccaacaagctggcaaccagctggcctgactattacatcgaccgcatcaattccatggctgcgatgcagagtctgtacgcgtttgatgaggaggagacggagatgaggaaccaagtcgtggaagacctgaagacagccctccggacacagcctatgaggtttgtgacccgcttcattgagctggagggcttgacctgtctgctaaatttcctccggagcatggaccacgccacctgtgagagccgcatccacacctcactcattggctgcatcaaagcattgatgaacaactcccaggggcgggcacatgtgctggcacagcctgaggccattagtaccatagcccagagcctacgcacagagaacagcaagaccaaggtggctgtgctggagatcctgggtgctgtgtgcctcgtgcctggtggccacaagaaggtgctgcaggccatgctgcactaccaggtgtatgcagcagagcgaacccgcttccagaccctgctgaacgagctagaccgaagtctgggccggtaccgggatgaagtgaatctgaaaacagccatcatgtccttcatcaatgctgtcctcaatgctggagctggagaggataatctggagttccgcctacatctacggtatgaattcctgatgctgggtatacagcctgtgattgacaagctccggcaacatgaaaatgccatcctggacaaacatttagacttcttcgagatggtgcggaatgaggatgacctggagctagccaggaggtttgacatggtccacatcgacaccaagagtgcttcccagatgtttgagttgatccacaagaagctgaagtacacggaggcctacccctgcctgctctctgtgctgcaccactgcctgcagatgccctacaaacggaacggtggctacttccagcagtggcagctcctggaccgcatcctccagcagattgtcctccaggatgagcggggtgtggaccctgacctggctcccttggagaacttcaatgtcaagaacatcgtcaacatgctcatcaacgagaatgaagtgaaacagtggcgagaccaggcagagaagttccggaaagaacacatggagcttgtgagccgtctggagaggaaggagcgggaatgcgagacaaagacattggagaaggaagagatgatgcggacgctgaacaaaatgaaggacaagctggcccgggagtcccaggagctgcgccaggctcggggacaagtggcagagctggtagcccagctcagtgaactctcaacaggccctgtatcttccccaccaccccctgggggcccactcaccttgtcttcctcaatgacaaccaatgacctgcctccaccccctcctcctctgccctttgcctgttgtccccctcccccaccaccaccccttcctcccgggggacccccgactcccccaggtgccccaccttgcctcggcatgggcctgcccctccctcaggacccctaccccagcagtgacgtcccactcaggaaaaagcgtgtcccccagccttctcacccactgaagtccttcaactgggtgaagctgaatgaggagcgtgtccctggcaccgtatggaatgagattgatgacatgcaggtatttcggatcctggacctagaggattttgaaaagatgttttcagcctaccagaggcaccagaaagagctgggctccactgaagacatctacctggcttcccgcaaggtcaaagagctgtcggtcattgatggccggagggcccaaaactgcatcatccttctttccaagttgaagctttctaacgaggagatccggcaggccatcttgaagatggatgagcaggaggaccttgctaaggacatgctggagcagctcctcaagttcatcccagagaagagtgacattgacctcctggaggagcacaagcatgaaattgagcggatggcccgtgctgaccgcttcctctatgaaatgagcaggattgaccactaccagcagcgactgcaagccctcttcttcaagaagaaattccaggagcggctggctgaggcaaagcccaaagtggaagccatcctgttggcctcccgggagctggtccgcagcaagcgtcttagacagatgctagaggtcatcctagccataggcaacttcatgaacaaagggcagcgtgggggcgcctacgggttccgggtggccagcctcaacaagatcgctgacaccaagtccagcatcgacagaaacatctctctgctccattacctgatcatgatcctggagaagcattttcctgatattctaaacatgccttcagagctgcaacatcttccagaagctgccaaagtcaacctagcagaactggagaaggaggtgggcaacctcaggaggggcctgagagcggtggaggtgctggagtatcagaggcgccaggtacgggagcccagtgacaagtttgtccctgtcatgagcgacttcatcacggtgtccagcttcagcttctccgagctggaggaccagctaaatgaggccagggacaagttcgccaaggccttgatgcacttcggggagcatgacagcaagatgcagccagacgaattctttggcatctttgataccttcttgcaggccttctcagaggcccggcaggatctagaggccatgaggaggaggaaggaggaggaggagcggcgggcgcgcatggaagccatgctgaaggagcagagggaacgtgagcggtggcagcggcagcggaaggtcctggctgcaggcagctcgctggaggagggaggagagttcgatgacctggtgtcggccctgcgctctggggaggtcttcgacaaggacttatgcaagctcaagcgcagccgcaagcgatcagggagccaggccctggaagttacccgggagcgggcaataaaccggctaaattattgacctggggaactagccacacaggaggccgggagacagggactggtgagaatggggctgagtggaggaggtggtgatatttaaaccatttggtgcttggtttagagccttgggctgggtcctgggatggggggctgtgtgtggctggaccaggtgtctccccacgcttaccttaaggggctcctcttatctccccttcacatgattccttctgtgccctggccccaggtattattctgaggctgccttggatggcctcaggccaggtaaccccaggctgaaggggccctgctccccatcccctaccatgggcacccatgtgctggcacagaacagttccagatctagactggagaggtccacagccttgtccagagttcctgtgtagcacggggagcaatgatggagggagcccctgagagggaatctggtgagggaatccagactcccttctctcaaggggaggctcaacagaacattgacctgggggcaaactttcctcttgaatgggaacagaggaggcattatatattctagttagatcagctctggtaggttccagagaacagtcaatgttggaaggatgatgcagggaccaaagccatcaggacagagtagcagtgtctgtttcccatgtcacaagtcctctggcctctccctgcatgtcttaagtatctttcccttccttctctaccctcacctccatcctgtctactaatccacagtcctagaagactcaccttgggtttccacagctatggctcactaccaggtgcttgatgaatctggcgaggggctcaagacagacctcatgcatcaccacacctcatgccttttgggcatctcccatgtccccatctcctggacacctggccattgttgtgaagccagacagtgacctcaaatgttgccttggagtcccctacagcccctcagcagagggcagcacttgaatgcttagctccatcccatagttctctacttcatataaattgctcaggccctcccaccccttctctaacactagcttcaaggcagaagccacagcagcctctgtccagcctgcaggtggccacttggaaccatgtgtccactggcgttggggagttggttcctgagaggtctgagggccagagctgccctctacattaacatgctgtctctaagggtggcccctcctctcaggcgttcagatggtgcgaacagcagagcaggcaagggaaactggggagatggggatggaggaggaaggctgatatcctctggggagcacatcacctgaaggtgccaaggaggaaggctgagaggggggccaccccatttctggtacccaatttggttcttcagcccaacttgcaaggggttccttctggtcctcccatccactgccaccttccattttgtccatctcatgctggccttggtggatgggatggctgtatctagacaaaatttttctaaaactccatcaaggctcttattcaataccacgttccgagttggcctttcatcttctttgagactggccctgcctaacctctaccatcaatgagctcttggcccttctgcccttccctgtgtttctcactttccaacctaatccctggctcagggttattgccagtggagactggtgagctgggcctactctcagctgcctatcttctgcctttcacttgcatccaactcctggggctgggaccgtagtagctgcgggggggaagaaacacagggtcggtgagcccagcatgtgcgttggtttgagggggcgggcggtgtgtgtgtgttctggtgggagggatctgagcaagtgcaagcctggctgacacaggtgtgaagaggccatcctggaacccaggtgagggcaagatgaaggcttccaggcagaacagctgcagagagtttggctatatgcatctgcagccccaagagctcccactgcaagacaagtgttggggaagatgggaggttgtgggtgaggcctctaaaggtcctctcccaaactgaccaggctgatgtcaacctaaccccctcaggggcagggaacaggggagggctccacaagcgtgtctggcattcccacccaccatggaagactggatacgcacctggaaacaaaaggactatggaagctgttcaagatacatttgatcttcagaaaagcagaatttggttcaactgttgacagaggacacaaatacgttgttccagagctcagccttctcactctaaaagaaagatatttttctatttattttctacatctggccagtggctctggtgctagatgccactgtagccagatctccaacagtgccttggaccatggactcatactcaactgagtaagaaggggctggtgcccagtcggggtggctgagctggtccttaataggttgtttcttggtcttgctttcttcatgccctccccactgctcctgccacctttagataagtttctctagctaattttgtggccaatgtaaaattcgtcatcaacctaacaaacacaaccttctcagcagcatttctcccctgtgatggaaataaagtgtttagggcagtgggaggagaaaattctccaggtgaatggggaagggtctgttccagcctctccctactcccatcccatttccaccaactggggaactgtgactatctatctcccccgacttctaccagggatgccttcacgccaaggctgttctcaccagctgcctcagatgacaaatgaggctaatggacataatctacagtgtcctttttcacttgcaccttttttataagaatatattgtaatactaaaaaatattaaattcataccatcccta

SEQ ID NO: 30132 - DNA, 4244 bp, Homo Sapiens
gccacctcccagtcgggttgcggcggaggccgttcctggctttgtagctcgctcaagatggcggcgcagccaccccgcgggatacgcctcagcgcgctttgcccgaagtttttacatacaaattctactagtcacacctggccattcagtgcagttgctgaattaatagataatgcttatgatcctgatgtgaacgctaaacaaatatggattgacaaaacagtgataaatgaccatatatgcttgacattcaccgacaatgggaatggtatgacttctgataaattacataaaatgctaagctttggcttcagtgacaaagtcaccatgaatggtcatgtcccagttggattatatgggaatggcttcaagtcgggttctatgcgtctgggtaaagacgcaatcgtttttaccaaaaatggagaaagcatgagcgtgggccttttgtctcagacctacttggaagtcataaaagcggagcatgttgttgttccaatagtggcattcaacaagcaccgacagatgattaatttagcagaatcaaaagccagccttgctgcaattctggaacattctctgttttccacggaacagaagttactggcagaacttgatgctattataggcaagaaggggacgaggatcatcatttggaatcttagaagctacaaaaatgcaacagagttcgattttgaaaaggataaatatgatatcagaattcccgaggatttagatgagataacagggaagaaggggtacaagaagcaggaaaggatggaccagattgcccctgagagtgactattccctgagggcttattgcagtatattatatctaaagccaagaatgcagatcatcctacgtggacagaaagtgaagacacagctggtttcgaagagtcttgcctacatcgaacgtgatgtttatcgaccaaaatttttatctaaaacagtgagaattacctttggattcaactgcagaaataaagatcattatgggataatgatgtatcacagaaatagactcatcaaagcttatgaaaaagttggatgtcagttaagggcaaacaacatgggtgttggagtggttggaattatagagtgtaatttccttaagccaactcataataaacaagatttcgactatactaatgagtacagacttacaataacagcactaggagaaaagctgaatgattactggaatgaaatgaaagtgaagaaaaatacagaatatcctctaaatttgccagttgaagatatacagaagcgtcctgatcagacatgggttcagtgtgatgcctgtctaaagtggcggaaattacctgatgggatggatcaacttcctgaaaaatggtattgctccaataaccctgacccacagttcagaaattgtgaggttccagaagaacctgaagatgaggatttggtacatcccacttatgaaaaaacctacaaaaagaccaacaaggaaaaattcaggatcagacaaccggaaatgatccctcggattaatgctgaactgttgtttcggccaactgctctttcaactccaagcttttcttctcctaaggaaagtgttccaagaagacatctttcagaaggaacaaattcttatgcgacaagacttctaaataatcatcaagttccacctcagtctgaacctgagagcaacagcttgaaacggagactttctactcgttcctcaattttgaatgcaaagaatcggagattgagtagtcagtttgaaaattcagtttataaaggtgatgatgatgatgaagatgtcatcatcttagaagaaaacagtacccccaaacctgcagtagatcatgatattgacatgaaatcagaacagagtcacgttgagcaaggtggtgttcaggttgagtttgtgggtgacagtgaaccttgtggccagactggttcaacaagcacctcatcatcccgatgcgaccagggaaatactgcagctacccagactgaagtaccaagtttagttgttaaaaaagaagaaactgttgaagacgagatagacgtaagaaatgatgcagtgattctgccctcctgtgtagaagctgaagcaaagatacatgaaacccaggaaaccaccgataaatctgcagatgatgcaggctgccaattacaagaactgagaaaccagctactccttgtcactgaggaaaaagagaattataaaagacagtgtcatatgtttactgatcaaatcaaagtgttacaacagaggatactagaaatgaatgacaagtatgttaagaaagaaacttgccatcagtccactgaaaccgatgctgtatttttacttgaaagtattaatggcaaatctgaaagtccagaccatatggtatctcagtatcagcaagctttggaagaaatagaaaggctgaaaaaacaatgtagtgctttgcaacatgtaaaggctgaatgcagccagtgttccaataatgagagtaaaagtgaaatggatgagatggctgtgcagcttgacgatgtgtttagacaactggacaaatgcagtattgagagggaccagtataaaagtgaggttgaattgctggaaatggaaaagtcacaaatccgttcacagtgtgaagaactcaaaactgaagtagaacagttaaaatctacaaatcaacagacggcaacagatgtttcaacatcaagtaacattgaggagtctgtaaatcatatggatggagaaagcctcaaactccgatctcttcgagttaacgtaggacaactgctggctatgattgtgcctgatcttgatcttcagcaagtgaattacgatgttgatgtagttgatgagattttaggacaagttgttgaacaaatgagtgaaatcagtagtacttaaagtatatgttatgtaagataaaatatttgctcaattcttttggttgtacagctttcaaaatataattaattttgttttatagatatgataggcaacagactgaaaaccataatctttactgtattctatgcattcaaatgtggtcacaaatattgtggacacattatcttatgttttgaaatacctgtgaattgttggcattgagcagctgaagctaactcatgactctgttttgaatgtaaatatttgtaattaagcctgcacatatttttttattgccctagagtactcaagtgtttttcaccaagagcttttcaggttgcccctaagctttgtgcaattttttctggttccccaaagtgtatttttctctaagtcgagggctatgccataatacaaatggaaatgttacctttgattttcttataaaggagtttaaataggatttttaaataatgtagtaacactcctgatacaactctggttataagtgaattgagcattaatgtttcttttgtataaattcctgtcctgaaatattttattcatgaaaataaggtaagcaaaaaccaactccattttgccaggattttgttgtgctgagattgccaatcacggttaaacacaaagtgtttttatagaatgaagaaacagtctttaacagaaaaaaggtattgaaatattaaatggccaccaagtttactttgaagcccatttttggctgtttagtcagcatgaagtgggcatgataattttttaatatttctttttgtgaaatttcctgtacagccttttgtaggattactacaggttaatgtgagttgaggaagacagtctttctcaaacaatactacataccttttattatattacaaacctaagtgttttatatcctagagtcaaggaacaaatttccttaggattatagtattacatgccataaaatactatgctttattggtcccatgttttgtgcaattttaaagagatggctttctattaagtataaactatgtatatataagaaccatattttccacaactaaaatgtgcattattttttccaaagttttatcattgctatttatttttacctttgtttttgaacattcaatccgttcattttgtatgtatgcttaatacgtgtcggtcatatacagtattgaatttttactgtatagtaattctggaaagagcaaataaatgaagattgtttttatttgcctgataaagtaattgaaagtgtatttttggtatgaagctggttttctgtcacaattgtaatttcccaaattttaaaatatcttataataaaataaaaatatatgatggctaactgttcaaatgctaaaaaaaaaaaaaaaaaa

SEQ ID NO: 30133 - DNA, 2782 bp, Homo Sapiens
gggcggcgcggaggggcagggccagagggaagcgctttgttccgcgcgtggttcccgcgcctgggggtgcgcgggagaggcgcgaatccgagtgccgcgcgcggcccggggacttgcacgggcgtgcggggtggaaccgcaggaagcggagctctcgggttcccgccccgccccgccccgccggcggcggaggcagcgagcgcgagagcccagcggagtcgctgggagcctgaggcaccgagacacaaaggcaggcgggatgcgggagcaggcaaagggaaagcgaaagccgcgcgcccggccggtgactgggtgaaggcgccgcgcagctttcccgacgccggctgtacccggacctcctggtcgagcctggcgcgccgcagccatggccatcgctcaactggccacggagtacgtgttctcggatttcttgctgaaggagcccacggagcccaagttcaaggggctgcgactggagctggctgtggacaagatggtcacgtgcattgcggtggggctgcccctgctgctcatctcgctggccttcgcgcaggagatctcgattggtacacagataagctgtttctctccaagttctttctcctggcgtcaggctgcctttgtggattcatattgctgggcggctgttcagcagaagaactcactgcagagcgagtctggaaacctcccactgtggctgcataagtttttcccctacatcctgctgctctttgcgatcctcctgtacctgcccccgctgttctggcgtttcgcagctgctcctcatatttgctcagacttgaagtttatcatggaagaacttgacaaagtttacaaccgtgcaattaaggctgcaaagagtgcgcgtgaccttgacatgagagatggagcctgctcagttccaggtgttaccgagaacttagggcaaagtttgtgggaggtatctgaaagccacttcaagtacccaattgtggagcagtacttgaagacaaagaaaaattctaataatttaatcatcaagtacattagctgccgcctgctgacactcatcattatactgttagcgtgtatctacctgggctattacttcagcctctcctcactctcagacgagtttgtgtgcagcatcaaatcagggatcctgagaaacgacagcaccgtgcccgatcagtttcagtgcaaactcattgccgtgggcatcttccagttgctcagtgtcattaaccttgtggtttatgtcctgctggctcccgtggttgtctacacgctgtttgttccattccgacagaagacagatgttctcaaagtgtacgaaatcctccccacttttgatgttctgcatttcaaatctgaagggtacaacgatttgagcctctacaatctcttcttggaggaaaatataagtgaggtcaagtcatacaagtgtcttaaggtactggagaatattaagagcagtggtcaggggatcgacccaatgctactcctgacaaaccttggcatgatcaagatggatgttgttgatggcaaaactcccatgtctgcagagatgagagaggagcaggggaaccagacggcagagctccaaggtatgaacatagacagtgaaactaaagcaaataatggagagaagaatgcccgacagagacttctggattcttcttgctgatgatttttttccttgagctgtaaatctgtgacttctgcgacatgggatttaatttggctaaagcacccctgttggtttcacagctggtttgcaataaatggttcttggtggagatactgagcatgtcttattgagtccctaatggaaatggtgatcaacaaaaggttatggaagaatggtttatgaacttcccataggaagcacctgagagatagtaaactgcagcaagtaactatgtgtaagtcctcatcaaatgaaaagcagaaagacaagaacaattagtcaagagcagtagccctgtcagagcctcggagcaatacctttctgtacccgtggtgagacaagacccagagctactggaaaacaagcactttggaagatttgttttgttttcatggaataataatatgtcagggtataatttaacgtgagtttcttatgtgcccttaaagactgttagacaagaaaagcattcactggctaataatccataggtcgacctatgtcctaagttaggtgtaaggtccgatgccttggcccacactcgagctctctttacattgttagttgtcaaccttggctgatggaaatcccgtaaccactatttgttgcactgtgccttgaagggcagcaggcccaagtgctgctctgactgaaaactgagttaacaagatgaaatctaaaggatattcacagtgacttcaattcaggaagaatgcttccaaaagagcccagtggggaaatctgacatcacagaagacattaattcagtcactttcaaagagtttgtctacaggcggtttctctgttatcaaaggcatttgaaataggattttacttaaacaataatggaacacaggagtatttaaagtgaagaacactttgcctgaatgtgatcagggcacataagtgacattggcatgcttcatatggcgtgcttggagccagaaaaacttagcggtttattttgtttatatttaagcacagctttaaaaaattcattatcgtttattcagtgtccgaattgaggccatttgggaagaaaattctagcactggtggagaattatagaataaagattataaatggttggataagacaaaaaaaaaaaaaaaa

SEQ ID NO: 30134 - DNA, 14634 bp, Homo Sapiens; identical to SEQ ID NO: 24039

SEQ ID NO: 30135 - DNA, 8974 bp, Homo Sapiens; identical to SEQ ID NO: 24962

SEQ ID NO: 30136 - DNA, 5943 bp, Homo Sapiens; identical to SEQ ID NO: 24264

SEQ ID NO: 30137 - DNA, 2709 bp, Homo Sapiens
acatccgggtaccgactccagccgcctagacgctggcactatggtcatggcggaggggacggcagtgctgaggcggaacaggccgggcaccaaggcgcaggatttctataattggcctgatgaatcctttgatgaaatggacagtacactagctgttcaacagtatattcaacagaacataagagcagattgctccaatattgacaaaattcttgaaccacctgaaggccaagatgaaggtgtgtggaagtatgaacatttaaggcagttctgccttgagctaaatggacttgctgtcaaacttcagagtgaatgccatccagatacttgcactcaaatgacagcaactgaacaatggatttttctttgtgcagctcataaaactccaaaagagtgtcctgctatagactatactagacacacacttgatggtgctgcatgtcttctgaatagcaataaatattttcccagcagggttagcataaaggaatcatctgtagcgaaactaggatcagtatgccgtaggatttacagaatattttcacatgcttattttcatcatcggcagatatttgatgaatatgaaaatgaaacatttttgtgtcatcggtttactaagtttgtgatgaaatacaatttgatgtccaaggataacctgattgtaccaattttagaagaggaagtacagaattcagtttctggggaaagtgaagcatgaagggaatcataggaaaaatgtactgatcatataattaacattatgtactgtatatatcattttagacacatcaatcatgtatccatattatagcttctttgtttagtataggtttttgtatgctgggtttgccttttaaaatgggaaatactttttaagttattcataagctgtatattcaccagtgtggcactcatggtttttaaataagattagtattatctgtttataatgcctgttaataaaagaatttacagtttggtaaaattgctgctaaacaatcattggatcacaatcctcatcagacaaacccatctgtaaaaaaaatgagggagagcttgaggtttcacacaagccatttactaaagaggtagaaatgttttctattggttttaccttgagtttagatatcctaaaaaattctgtagtacgtagttttgtcttacctgttaactttccccaattgagataaaagtgttttaaaattctgtttatagtttttgatatgcatatataattatgtgtatatctaaatacaaatgcaaatgaagcattagtaatacttaaataattttactgtgctacataaagtataacatacttggaaaggatttaccgttctgcaacaacggactggtacatacaggatgatcacaatggtaaggcacataaattattttcccactggaaacctgccctgtccaccccttctcatttcccttaaccttatcttcaaactactttagctgagaagcttttcaccagactgagttagtggtggcttatacctatttatatttgtattaattgcttacagattatacctcatattagcaattacattacactacaagaaaatgtatttgcataggctcttgcttatctttgttttgcaaaattgttctacttagaaaacagtccttaaaatagtttgactcttcctgttagtaatatattaatctttcatttaaccagctaggcagcattaaatagaattgaagaaataccatagtatttattttacaccccctctcccacgaagtttatgtttggattacatgcacgtgtgagattatttgcaataattcataggttccaagggtgttgatgaatagtcatacatttttttggactttgttataattcattgtggtaagaatgattgaaatgcagatttaacaatcttataatctattgaatgccatttttgataaagcactggaggtcttattgccaaactgattgtaatgaggcagtaagggtgaaaacattgtacatgttgtgaagaaagtatttaaatccaacttttgaacagatttaacaaacatgaggaacttttttatttagaaggataattttgaagatgaaaatgtattcatcttaattgttttttcaaatttaagggaataatttataccatcttttcagacaagaatgtacagcaaaaataaggggaacagtagtatactgagagtgtgtgtatgtatagtgtatgcctttccaagcttgccagtctttttggctttgaacactgcccatcagctacagtcattactgttccccaacccacaactatcttttaagaagtcttagttcacagtgaaaggaatgatgactttgaaattatggatttatattaatggcactataaaccaatggtaatggtaatttttaaacttgctaaatattgagaaactaaactactaagttaataaattatatatagcagtgtagctgttctctctagatggtgtctcacaatggatttctgttgcttgactattttcttagtgaatatttatactaaggtagtgactgagatttggtgatctggctgagtattttgaaacacattttgaataatatggcttagtgttaacggggacttaaatatgatttttttttcttactcatttcaccttccctgtactgtatgtttggaattgatcataaaacatctccaaaagaaaataaaaaaaaaaaaaaaaaaa

SEQ ID NO: 30138 - DNA, 3832 bp, Homo Sapiens
cacctctaacccaggctcagagtagctgctgtttctgagagaacgattcgtaggacagcccctgacgccattcccttttgcccttctttctgcgggcctttccggtacttgagcggtgtccagagcgtggccagttctcgtctatctggctgcctttagggagcggtgcctagcgttggccaatagttggctgtcgaaagtgccggcccccgcgccggcgcctgcagcagccgggtgggaaggctcaagatggcgtgcttgttggagaccccaatccgcatgagcgtcctttcggaccaggaatgaaagttactgggagataacttcgaaggattttgcaacaaattcgagctgtccgactctgagaatggaagtaacagctagcagtcgccactatgttgacaggctatttgaccctgatccccagaaagttctacaaggtgtcatagacatgaaaaatgctgtaattggaaacaacaagcagaaagccaatctcattgttttaggagctgttccaagattgttgtacttgcttcagcaagaaacctcaagcacagagctgaaaactgaatgtgcagtggtgttgggaagtcttgctatgggtactgaaaacaatgtcaagtctctactggactgccatattatccctgccttattgcaaggactactgtccccagacctgaagtttattgaagcttgcctccgatgcctgcgtaccatcttcaccagtcctgtcactccagaggagctactgtatacagatgccacagtgataccacacctcatggcactgcttagcaggtcccgctatacccaggagtacatctgtcagatcttctcacactgctgtaaagggccagatcatcaaacaattttatttaaccacggtgcagttcagaatattgctcacctactaacctcactgtcctacaaagttcgaatgcaagcactgaaatgtttctcagttttagcttttgaaaacccccaggtatcgatgaccctggtaaatgttttggttgatggagaattgttaccacagatttttgtgaagatgttacagagggataagcctattgagatgcagctcacatcagcaaaatgtttaacttacatgtgtagagctggagcaattcggacagatgataactgtattgtattaaagacattaccttgtttggttcgaatgtgcagtaaggagagattactagaggagagagttgaaggagctgagacacttgcctatctgattgaaccagatgttgagctacagagaatcgctagcataactgatcacctcattgccatgcttgctgattatttcaagtatcccagctcagtgagtgccatcactgatattaaaaggcttgatcatgatttaaaacatgctcacgaactccgccaggctgcattcaagctctatgcctctcttggagcaaatgatgaagacatccggaagaagatcattgagactgaaaatatgatggaccgaattgtgactggcttgtctgagtctagtgtcaaggtgcggttagctgccgtcagatgtttgcacagtttatccagatctgtgcagcagcttcgaaccagtttccaggatcatgctgtttggaaacctttaatgaaggttttacaaaatgcaccagatgaaatcctagtggtagcatcttccatgctgtgtaatcttcttcttgaattttctccaagcaaagagccaattttggaatcaggagccgtagagctactttgtggattaactcagagtgaaaatcctgctttacgagtgaatggaatttgggctttaatgaatatggcatttcaggctgaacaaaaaataaaagcagatattttacgaagcttgagtactgaacagctattccggttattatcagattcagatttgaatgtgctgatgaagacattgggacttcttagaaatctcctctccactcgtcctcatatagataaaataatgagtactcatggaaagcaaattatgcaagccgtcactcttattctagaaggggaacataacattgaggtcaaagagcagacactgtgcatcttagccaacatagcggatgggacaacagcaaaagatcttattatgaccaatgatgatatcctacagaaaatcaagtattacatgggccattcacatgttaaactgcagcttgcagccatgttttgtatatcaaacctcatatggaatgaagaggaaggttcacaagaacgccaggataaattacgagacatgggcatcgtagatattctacacaaactgagtcagtcaccagattcaaacctttgtgacaaggcaaagatggcactgcagcagtacctggcatgatgggagtgcccctgggcacctgcgagcatcccacctccttgtttaaggaagtacaggaaccagcctcatttgattccttctatttgcacaagtcaccttggactgcagggagctgttttgcaaaagcagtttagtaggcttagatctcaaattcatcttgagaacatttttttgaggtagtaatttcctcagaagactcttgtgttttgttttggtttttttttctgagctactcggactctttattagaacaatcaatcattttcctttggacctacaatttttgcctatgctgcagccactttgtgagtgagaatgaatatgtctgtgtgaacacacaggcatgcgtgtgtatgtgcacgtacatgggccagaatgaatggatgtgtgtgtgtgagggatacctcagatttttcttttcttattttgtgtgaaaatctcttttctacagattttccagggtttaagcattgcttgctgtataaaaaactttactgaattatatacagtttgaatgaaatgttattttaaaaacaaaacaattgttaagtgttccataaaggttatgttgaattttggtcagatgaatatttgtaagtaaaaaatatatgcatttctgaacctcaacttacatagattttctttatataaaaaaaaagaaaaaaaaagaaaaagttggctatagttggcctgattaacaggcactatacatggtgctgtgcaaaatagtaagctagcatcttactgccgtcaatattagcaggtacagagccttttttcatcctaattcagtaagttctcaggcttccaagtcaaatggagaagtaaagtgaggcaacagattcaccataggctttttgaagcatcaaagggaaatataactactgatagtgaaagcccagccatgacccagatgggcttacccttgacaggaactggggaccaagagcctcccaattgccctaactcctgtcattggtattagcaatatctggccagatttagaaccagtcatggaaacttgtgctcaaactaaaagtaggtcatcacttcccagaaacagaataccttgtgcttcctgaaacagcatatatcactgtgaaactaaagaatattctacagacacccctgtagaaagaaacaaagaacaggatagtttagaaagctttctgttagctgtattcagcaaatttcatactagttgctcaggactgctagttggtatgcttttgtaaaacgagattgaaatttaataaaagatgcaactaaaatctttcctgcatgaagctaaaagcactcaagttgagagaggggcaagggaatctccccaggatgactgaagatgacttctttttacagcaagtactgttagcctttctgcaccccttagcttggcccctgctccaacttctgggtcagcagcaaggtgaactcaacagaagttgctcttgactgtttgaaggtagaagcagcctaccttttctc

SEQ ID NO: 30139 - DNA, 10017 bp, Homo Sapiens; identical to SEQ ID NO: 24817
  misc_feature (630)..(630): n is a, c, g, or t
  misc_feature (8886)..(8886): n is a, c, g, or t

SEQ ID NO: 30140 - DNA, 10017 bp, Homo Sapiens; identical to SEQ ID NO: 24817
  misc_feature (630)..(630): n is a, c, g, or t
  misc_feature (8886)..(8886): n is a, c, g, or t

SEQ ID NO: 30141 - DNA, 5392 bp, Homo Sapiens
ggaattaagaatagtcaggtggtgagtggaacgtctcttggggtgtcggaattcaaaacggacctggaggatgttgatctccaagaacatgccctggcggcggctgcagggcatttccttcgggatgtattcggctgaagagctcaagaaattaagtgttaaatccattacgaaccctcgatacctggacagcctggggaacccatcggcaaacggcctgtacgatttagctttgggccctgcagattccaaagaggtgtgctccacctgcgtgcaggacttcagcaactgttctgggcacctgggccacattgagctcccactcacagtgtataaccctctcctcttcgataagctgtacctgctgcttcggggctcttgtttaaactgccacatgctgacttgtccccgggccgtgattcacctcttactctgccagctgagggttctggaagtcggggccctacaagcagtctacgagcttgagagaattctgagcaggtttctggaagaaaatgccgatccctctgcctctgaaattcgggaggaattagaacaatacacaactgaaattgtgcagaacaacctcctggggtcccagggcgcacatgtaaagaacgtgtgtgagagcaagagcaagctcattgctctcttctggaaggcacatatgaatgctaagcgctgtccccactgcaagaccgggcgatccgttgtccgaaaggaacacaacagcaagttgactatcacatttccagccatggtgcacaggacagctggccagaaggactctgagcccctgggaattgaggaagctcagataggaaaacgaggatacttaacacccaccagtgcccgcgaacacctttctgccctgtggaagaatgaaggattctttctgaactaccttttttcgggaatggatgatgatggtatggaatccagattcaatcccagtgtgttctttctagatttcttggtggtgccgccctcaaggtctcgcccagtcagtcgcctaggagaccagatgtttactaatggccagacggtgaacttgcaggctgtcatgaaggatgtagttctgattcgaaaacttctggcattgatggcccaagaacagaagttgccagaggaagtggccacacccactacagatgaggaaaaagactctttgattgctattgaccgatcctttttgagtacacttccaggccagtccctcatagacaaactttacaacatttggattcgccttcagagccacgtcaatattgtgtttgatagcgagatggacaaactaatgagggacaagtacccaggcattaggcagatcctggagaagaaagaaggcctgttccgaaaacacatgatgggaaagcgagtggactcgactgcgcgctcagtcatctgcccagacatgtacatcaacaccaacgaaattggaattcccatggtgtttgccacaaaactgacctacccacagccagttaccccatggaatgttcaggaacttaggcaagcggtcatcaacggccctaatgtgcacccaggagcctccatggtcatcaatgaggacggcagccgcacagccctgagcgctgtggacatgacccagcgagaggccgtggccaagcagcttctgaccccagccacgggggcacctaagccccaggggacaaaaattgtgtgccggcatgtgaagaatggggacattctgctactgaaccgacagcccacactgcacagaccctccatccaggcccaccgtgcccgcatcctgcctgaagagaaagtgctgcggctccactatgccaactgcaaggcctataatgccgactttgatggagacgagatgaatgcccatttcccccagagtgagctgggccgggccgaggcctacgtcctggcctgcactgatcagcagtaccttgttcccaaggatggccaaccattggcgggactgatccaggatcacatggtttcaggggcaagcatgactactcggggttgctttttcacccgggagcactatatggagctggtgtaccgaggactcacggacaaagtggggcgcgtgaagctcctttctccttccatcctgaagccctttccgctgtggacaggaaaacaggttgtgtcaacgctgctcataaatataatcccagaggaccacatcccactgaacttatctggaaaggcgaaaatcactgggaaagcctgggtgaaggaaactcctcgatccgttcctggctttaaccctgactcgatgtgcgagtcccaggtgatcatcagggaaggggagctgctctgcggagtgctggacaaggcgcactatgggagctccgcctacggcctggtccactgctgctatgagatctatggaggcgagaccagcggcaaggttctaacctgcctggcccgcctcttcaccgcctacctgcagctctacagaggcttcaccttgggcgtggaagacattttggtgaagccaaagcgagatgtcaagaggcaacgtatcattgaagaatccacccactgcgggccccaggctgtcagggctgcattaaacctgccagaagccgcatcatatgatgaggtccgaggaaaatggcaggatgcccatctgggcaaggaccagagggattttaacatgattgatctgaagttcaaggaggaagtgaaccattacagcaatgagattaacaaggcatgcatgccttttggcctacacagacagttcccagagaacacgctgcagctgatggtgcagtcgggagccaaaggttcaactgtgaacacgatgcagatctcgtgcctgctgggccagattgaactggaaggtcggagcaccccgctgatggcgtctggcaagtcactgccctgctttgagccttatgagttcacccccagggctggtggctttgtcactggcaggttcctcaccggcatcaaacctcctgagttcttcttccactgcatggcaggacgagagggcctggtggacactgctgtgaaaaccagccgctcaggctatctccaaaggtgcatcatcaagcacctagaggggctggtcgtgcagtatgatctcacggtccgtgacagtgacggcagtgtggtgcagttcctgtatggggaggatggcctggacatccccaagacacagttcctgcagcccaagcagttccccttcctggccagcaactacgaggtgataatgaaatcacagcatctccatgaagttttatccagagcagatcccaaaaaagctctccaccacttcagagctatcaaaaaatggcaaagcaagcaccccaacaccctgctgagaagaggcgccttcttgagttattcccagaaaattcaggaagctgtgaaagccctgaaacttgagagtgaaaaccgcaatggccgcagaccctgggactcagggaggatgctgaggatgtggtatgagttggatgaggaaagccgaaggaaataccagaagaaggcggccgcttgtcctgaccccagtctgtctgtctggcgtcctgacatctactttgcatcagtgtcagaaacatttgaaacaaaggttgatgactacagtcaagagtgggcagctcaaacagagaagagttatgagaaatcagagctttctctcgacaggttgaggaccttgctgcagctgaagtggcagcgctcactgtgtgagccgggcgaggctgtgggcctgctggctgcccagagcatcggagagccctccacccagatgaccctcaacaccttccactttgcaggcagaggcgagatgaacgtcaccctgggcattccaaggttgcgggagattctcatggtggccagcgccaacatcaagacacccatgatgagcgtgcccgtgctcaacaccaagaaagccctgaagagagtgaaaagcctgaagaagcaactcaccagggtgtgcttgggggaggtgttgcagaaaattgacgtccaggagtccttctgtatggaagaaaaacagaacaaattccaggtgtaccagctgcggtttcagttcctgccacatgcatattaccagcaggagaagtgcctgagacccgaggacatcctgcgcttcatggaaacaagattctttaaacttctgatggaatccatcaaaaagaagaataataaagcatcagctttcaggaacgtaaacactcgaagagctacacagcgggatctggacaacgctggggagttggggaggagtcggggagagcaggagggtgatgaggaagaggaggggcacattgtggatgctgaagctgaggagggagacgccgatgcctctgatgccaaacgcaaggagaagcaggaggaggaggttgattatgagagtgaggaagaggaggagagggagggcgaggagaacgacgatgaagacatgcaggaggaacgaaatccccacagggaaggtgctcgaaagacccaagagcaagatgaagaggtgggcttaggaggacccgtcccttcccaccctcctgacgcagccccggaaacccacccacagccaggagccccaggggccgaggccatggagcgccgggtccaggctgtgcgtgagatccacccgttcatagatgactaccagtacgacaccgaggagagcctgtggtgccaggtgacagtgaagctccctctgatgaagatcaactttgacatgagctccctggtagtatctttggcccatggtgccgtcatctatgcgaccaagggcatcactcggtgcctcctgaatgaaacaaccaacaataagaacgagaaggagcttgtgctaaacacagaaggaatcaacctcccagagctattcaagtatgcagaggtcctggatctgcgccgcctctactccaacgacatccacgccatagccaacacgtatggcattgaggcgctgcgggtgatcgagaaggagatcaaggatgtgtttgccgtgtatggcatcgcggtcgaccctcgccatctctccctggttgctgattatatgtgcttcgagggtgtttacaagccactgaatcgctttgggatccggtcaaactcttccccgctacagcagatgacatttgaaaccagcttccagtttctgaagcaagccaccatgctgggatcccacgatgagctgaggtctccttctgcctgccttgtggtcgggaaagtcgtcaggggcgggacaggcctgttcgagctcaagcagcctctgagatagcagctaccccggcaccatctgcccagctccaaggacccttggtgagggtggttggccagccctgccttctgcatgagaggaccaggagactggaatccagggcagttccaagtgacagtacagagcacagcagcgaccttgggcctgaaagcagtgggcctctgagct

SEQ ID NO: 30142 - DNA, 1890 bp, Homo Sapiens
tccgcagctgccttcggcgccgccagccccgccatggctgcgccctgcgcggaggacccctcgctggaaaggcattttaagggccaccgagatgcagttacctgtgtggacttcagtatcaacacaaagcagctggccagtggctccatggactcatgcctcatggtctggcacatgaagccgcagtcacgcgcctaccgcttcactggccacaaggatgccgtcacctgtgtgaacttctctccttcgggacacctgcttgcttccggctcccgagacaagactgtccgcatctgggtacccaatgtcaaaggtgagtccactgtgtttcgtgcacacacagccacagtgaggagtgtccacttctgcagtgatggccagtccttcgtgacagcctctgacgacaagacagtcaaagtgtgggcaactcatcgccagaaattcctgttctccctgagccagcatatcaactgggtccgctgtgccaagttctcccccgacgggcggctcatcgtgtctgccagtgatgacaagactgttaagctgtgggacaagagcagccgggaatgtgtccactcgtattgtgagcatggcggctttgtcacctatgtggacttccaccccagtgggacgtgcattgccgctgccggcatggacaacacagtgaaggtgtgggacgtgcggacttaccggctgctgcagcattatcagttgcacagtgcagcagtgaacgggctctctttccacccgtcgggaaactacctgatcacagcctccagtgactcaaccctgaagatcctggacctgatggagggccggctgctctacacactccacgggcatcagggaccagccaccactgttgccttttcaagaacgggggagtattttgcttctggaggctctgatgaacaagtgatggtttggaagagtaactttgatattgttgatcatggagaagtcacgaaagtgccgaggcccccagccacactggccagctccatggggaatctgccagaagtggacttccctgtccccccaggcagaggcaggagtgtggagtctgtgcagagccagccccaggagcccgtgagtgtgccccagacactgactagcacgctggagcacattgtgggccagctggatgtcctcactcagacagtctccattctggagcagcggttgacactgacagaagacaagctgaagcagtgtctggagaaccagcagctaatcatgcagagagcaacaccatgatcaggggagcaggaatcaggagctcggtggatttgcaggtggcaggccagggatttgtaccatgggacttgggtaaataaaggggactgaactctgtgggaatcacatccatactggagccctggatttttgcagttctgccctccaccttgctatctgcaccaggaggctctccacctggcagccagaggtccccagtgggccgggctcacacacaaatgatgcttcagacccgaatgagaggaccacattttgcttaatgtaaaggagccacttgaaaatgtctgctccttcggggtcctgagattgtggctccccctctggaggaggtggctccacgatgccttgattttcactcatcatttggacatgtgactggcttttcctacctctgccatggtgtagaaattgattgcacattgattggatgagccgggggttttctctaaatctgactaaaggcccaaagtgggcccgtctgagtcaggtttgttgagaacaagccctctcaagtgggtggtggcttttcagtggccctgatttctgttccacacgtgttcactggagccaggtgacttcctccttgcgtgagtgagggcacaggaatctcaaaattaaacctgacttcattgc

SEQ ID NO: 30143 - DNA, 3240 bp, Homo Sapiens
gcccgcgccgccaccgcctcttccctccccgtgtccggtccccgtgcgtcccgaggctccccgccgcccgtcccggcgcgcaccgcgggcgtctgtccgaacgccttccagccacctgagccctcctgcgggcgactcgctcagctagcccgtgcccgcctccaccttctccgtcatcccctcttccttgcgtccggctctccactggggctgcacagtcgagggctgctcgcgtcgggaaggagatgcccagagtctctggggcgcaccctcccgtcccgctcagccgcacccagctttagaaggtgctctcagcagccactttcgggctctagcgaggacaccctctcgcagaagtccttgccgagaccccccgccccagccattctctgaaggggctgaggacactcttatcgcgcccctcatggccaagcctcggctgctagttctctacttcgctctgattgtggttccggcctgggtgtccagcattgtcctcacagggacaagcgagcccccagatgcgcagacagtggcgcctgcggaggacgagactctgcaaaacgaggcggacaaccaggagaacgttttatctcagttgctgggggactatgacaaggtcaaggctatgtctgagggctcggactgtcagtgcaagtgtgtggtgagacccctgggccgggatgcctgccagaggatcaatgcgggggcctccaggaaggaagacttctataccgtggaaaccatcacctcaggctcgtcgtgcaagtgtgcctgtgtagcacccccatcggccctcaatccctgcgagggagacttcaggctccagaagctgcgggaggcagacagccaggacttgaagctctccacaatcatagacatgttggaaggagcgttctatggcctggatctcctgaagctacattcagtcaccaccaaactggtggggcgagtggataaactggaggaggaagtgtctaaaaacctcaccaaggaaaacgaacaaatcaaagaggacatggaagaaattcgaaccgagatgaataagcgaggcaaagaaaattgctctgaaaacatcctagatagcatgccagacatccgctcagccctgcagagggatgcagcagcagcctacgcccacccagagtatgaagagcggtttctgcaggaagaaaccgtgtcccagcagatcaactccatcgaacttctgcagacgcgacccctggctctgcctgaggtggtgaagtcacagcggcccctgcagaggcaggtccacctgagaggccggccggcctcccagcccactgtcatccggggcatcacctactataaagccaaggtctctgaagaagagaatgacattgaagagcagcaagatgagtttttcagcggtgacaatggagtggatttgctgattgaagatcagctcctgagacacaacggcctgatgaccagtgtcacccggaggcctgcagccacccgtcagggacacagcactgctgtgacaagcgacctgaacgctcggaccgcaccctggtcctcagcactgccacagccctcgacctcagatcccagcatcgccaaccatgcctcagtgggaccaacactccaaacaacctcggtgtctccagatcccacaagggagtcagtcctgcagccttctcctcaggtaccagccaccactgtggcccacacagccacccagcaaccagcagccccagctcctccggcagtgtctcccagggaggcattgatggaagctatgcacacagtcccagtgcctcccaccacagtcagaacagactcgctggggaaagatgctcctgctgggtggggaacaacccctgccagccccacgctgagccccgaagaagaagatgacatccggaatgtcataggaaggtgcaaggacactctctccacaatcacggggccgaccacccagaacacatatgggcggaatgaaggggcctggatgaaggaccccctggccaaggatgagcggatttacgtaaccaactattactacggcaacaccctggtagagttccggaacctggagaacttcaaacaaggtcgctggagcaattcctacaagctcccgtacagctggatcggcacaggccacgtggtatacaatggcgccttctactacaatcgcgccttcacccgcaacatcatcaagtacgacctgaagcagcgctacgtggctgcctgggccatgctgcatgacgtggcctacgaggaggccaccccctggcgatggcagggccactcagacgtggactttgctgtggacgagaatggcctatggctcatctacccggccctggacgatgagggcttcagccaggaggtcattgtcctgagcaagctcaatgccgcggacctgagcacacagaaggagaccacatggcgcacggggctccggaggaatttctacggcaactgcttcgtcatctgtggggtgctgtatgccgtggatagctacaaccagcggaatgccaacatctcctacgctttcgacacccacaccaacacacagatcgtccccaggctgctgttcgagaatgagtattcctatacgacccagatagactacaaccccaaggaccgcctgctctatgcctgggacaatggccaccaggtcacttaccatgtcatctttgcctactgacacccttgtccccacaagcagaagcacagaggggtcactagcaccttgtgtgtatgtgtgtgcgcgcacgtgtgtgtaggtgggtatgtgttgtttaaaaatatatattattttgtataatattgcaaatgtaaaatgacaatttgggtctatttttttatatggattgtagatcaatccatacgtgtatgtgctggtctcatcctccccagtttatatttttgtgcaaatgaacttctccttttgaccagtaaccaccttccttcaagccttcagcccctccagctccaagtctcagatctcgaccattgaaaaggtttcttcatctgggtcttgcaggaggcaggcaacaccaggagcagaaatgaaagaggcaagaaagaagtgctatgtggcgagaaaaaaagttttaatgtattggagaagttttaaaaaacccagaaaaacgctttttttttttaataaagaagaaatttaaaatcaaaaaaaaaaaaaaaaaaaaaaaaaaaaaaaaaaaaaaaaaaaaaaaaaaaaaaaaaaaaaaaaaaaaaaaaaaaaaaaaa

SEQ ID NO: 30144 - DNA, 4987 bp, Homo Sapiens
ttctctggggaggcagtaaggggccgtggagctggcctcggcctcggcatcgggagaggctggacttcctgtctctctgtgctgaatggctgcgatggcgcccgctctcactgacgcagcagctgaagcacaccatatccggttcaaactggctcccccatcctctaccttgtcccctggcagtgccgaaaataacggcaacgccaacatccttattgctgccaacggaaccaaaagaaaagccattgctgcagaggatcccagcctagatttccgaaataatcctaccaaggaagacttgggaaagctgcaaccactggtggcatcttatctctgctctgatgtaacatctgttccctcaaaggagtctttgaagttgcaaggggtcttcagcaagcagacagtccttaaatctcatcctctcttatctcagtcctatgaactccgagctgagctgttggggagacagccagttttggagttttccttagaaaatcttagaaccatgaatacgagtggtcagacagctctgccacaagcacctgtaaatgggttggctaagaaattgactaaaagttcaacacattctgatcatgacaattccacttccctcaatgggggaaaacgggctctcacttcatctgctcttcatgggggtgaaatgggaggatctgaatctggggacttgaaggggggtatgaccaattgcactcttccacatagaagccttgatgtagaacacacaactttgtatagcaataatagcactgcaaacaaatcctctgtcaattccatggaacagccggcacttcaaggaagcagtagattatcacctggtacagactccagctctaacttggggggtgtcaaattggagggtaaaaagtctcccctgtcttccattcttttcagtgctttagattctgacacaaggataacagctttactgcggcgacaggctgacattgagagccgtgcccgcagattacaaaagcgcttacaggttgtgcaagccaagcaggttgagaggcatatacaacatcagctgggtggatttttggagaagactttgagcaaactgccaaacttggaatccttgagaccacggagccagttgatgctgactcgaaaggctgaagctgccttgagaaaagctgccagtgagaccaccacttcagagggacttagcaactttctgaaaagcaattcaatttcagaagaattggagagatttacagctagtggcatagccaacttgaggtgcagtgaacaggcatttgattcagatgtcactgacagtagttcaggaggggagtctgatattgaagaggaagaactgaccagagctgatcccgagcagcgtcatgtacccctgagacgcaggtcagaatggaaatgggctgcagaccgggcagctattgtcagccgctggaactggcttcaggctcatgtttctgacttggaatatcgaattcgtcagcaaacagacatttacaaacagatacgtgctaataaggggttgatagttcttggggaggtacctcccccagagcatacaacagacttatttcttccacttagttctgaggtgaagacagatcatgggactgataaattgattgagtctgtttctcagccattggaaaaccatggtgcccctattattggtcatatttcagagtcactgtctaccaaatcatgtggagcactcagacctgtcaatggagttattaacactcttcagcctgtcttggcagaccacattccaggtgacagctctgatgctgaggaacaattacataagaagcaacgactgaatctcgtctcttcatcatctgatggcacctgtgtggcagcccggacacgtcctgtactgagctgtaagaagcggaggcttgttcgacccaacagcatcgttcctctttccaagaaggttcaccggaacagcacaatccgccctggctgtgatgtgaatccctcctgcgcactgtgtggttcaggcagcatcaacaccatgcctcccgaaattcactatgaagcccctctgttggaacgtctttcccagttggactcttgtgttcatcctgttctagcatttccagatgatgttcccacaagcctgcatttccagagcatgctgaaatctcagtggcagaacaagccttttgacaaaatcaaacctcccaaaaagttatcgcttaagcacagagcacccatgccgggcagtctgccagattcagctcgtaaggacaggcacaaattggtcagctccttcctaacaacagccaagctgtcccatcaccaaacccggcctgacaggacccacaggcagcacttagacgatgtgggggccgtgcccatggtggagcgagtgacagcgccaaaagcagagcgcttgctcaacccaccaccacccgtgcatgacccaaaccacagcaaaatgagattgcgagaccattcatctgagagaagtgaagtgttgaagcatcacacagacatgagcagttcgagctacttggcagccacccaccatcctccacacagtcccttggtgcgacagctctccacctcctcagattcccctgcacccgccagctctagctcacaggttacagccagcacatcgcagcagccagtaaggaggagaaggggagagagctcatttgatattaacaacattgtcatcccaatgtctgttgctgcaacaactcgcgtagagaaactgcaatacaaggaaatccttacgcccagctggcgggaggttgatcttcagtctctgaaggggagtcctgatgaggagaatgaagagattgaggacctatccgacgcagccttcgccgccctgcatgccaaatgtgaggagatggagagggcacggtggctgtggaccacgagtgtgccaccccagcggcggggcagcaggtcctacaggtcatcagacggccggacaaccccccagctgggcagtgccaacccctccaccccccagcctgcctcccctgatgtcagcagtagccactctttgtcagaatactcccatggtcagtcccctaggagccccattagcccggaactgcactcagcacccctcacccctgtggctcgggacactccgcgacacttagccagtgaggatacccgttgttccacaccagagctggggctggatgaacagtctgtccagccctgggagcggcggaccttccccctggcgcacagtccccaggcggagtgtgaggaccagctggatgcacaggagcgagcagcccgctgcactcgacgcacctcaggcagcaagactggccgggagacagaggcagcgcccacctcgcctcccattgtccccctcaagagtcggcatctggtggcagcagccacagctcagcgcccgactcacagatgagcgggagacagccatctaaacagactcactaactattggcattaaagcttcagaaatctctgcgtttgatattcaaacatcatatgccggaaattttcacagtttttagtgaacttaaggaatttagatcctactttggtatttttttttcttgttttaatttttgttttgtttttgtttccatgttttcttgtcacacacctgagcacttcctcccgttggcaaacagaagttcaggatgagaccctgctggcctggtcctggcacatcctctgcactgttgaatcactggacttactgatcttagatgaccaccccctccctcacacctgtgggcagggcagaacagcctggcgggctacagtttagcatggccttcttgagctagggtggaatggggcagggtgctctggactcttaccccctcccctcccatctgtggcttggctctgctgtggccctcctggctgggtccccttggtttttcgtgctggaacatccccaccagagcctctctgccataactgccagctgctctccccgagtgctcagctggcagaacacctttcctttctcacccagaacttaagagactgattttttgtttcatctgcatttggtcttctctgttttgactctttcactgcagtaacctggctgtggctgctcaggttcccctcctcatgccccttggtacccttccctgtctgctctcccatgccatgtacacacccacaacccgtccttccacttggaatatttttaccacctatcctgatctttgaaggtagggttaggactacttaacctctattcccactcccctgcaaactgggggttgtgggaagtgagcagccatctccctgtgtgattttttttttttttccctctgattcactttgccatgtttccttcacatccagatccctgtcggtgttagttccactcttggtctttcacgctccccttgcctgtggaacattgtctggtcctagctgtggttcccattgttcccccttcacccttctctgttaaccttgtgcctgtctcctgtatgatcacatcaccaaaaagggggaggggggagaagactctttttttttggccattttgtaatcgtataaaaatagtagacaactgcttaatggttggggttttttcacaattttcaacattagtgatttttttttctgtttgcaagttaaagggtttgtcattgtttctttaaaaaaaaatacaataatgcaccatatccctatgcataaagtgcttcttctatttataaggttgaaaattctgaataacccttttagcattgaaaaaaaaaacaaaaacaaaaaatggaaaaaaaaaaccttgtattttgtaaatattttcttttcctgctttggagctgtgtaatggcagcgaaacatgtagctgtctttgttctatagaaatgcttttcttcagagaagctgatctttgttaatgtcttgattctgttcgcaaagcacagactagtgcttaaaaaaaaaaaagaaggaaaaattgaaaaaaataaaaaaaaaagttacagaaagaaaaaaaaaaaaaaaaaaaaaa

SEQ ID NO: 30145 - DNA, 858 bp, Homo Sapiens
gaaagatggcggtgacgggctggttggagagtctgcggacagcccagaagactgcgctgctgcaggacgggagaaggaaggttcactatttattcccagacggcaaggaaatggctgaagaatatgacgagaagacgagtgaactacttgtgagaaagtggcgtgtgaaaagtgccctgggagccatgggccagtggcagcttgaagtaggagacccagcgcccctaggagcagggaacctggggcctgaactcatcaaggaaagcaatgccaatcctatcttcatgcgcaaggacaccaagatgagtttccagtggcggattcgaaacctcccctatcctaaggatgtctatagtgtctctgtggaccagaaggagcgctgcatcattgtcagaacaaccaacaagaagtactacaagaagttctccattcctgatctagatagacaccagctacctctggatgacgccttgctgagctttgcccacgccaactgcaccctgatcatctcttaccagaagccaaaggaggttgtggtggccgagtctgagctacagaaggaactaaagaaggtgaagacagcccacagcaacgatggggactgcaagacccagtagttggcccctgagccttatacctccaccacagggggtgccgtgagacttcaaggcttggcccttcttgaccacggcagcctcctgtcttctaggagctatcaagggtctctaagaactgggcatggggcactcctagccagtgagtcatggtcatatttcctgagtaaagtcattctgagttaaaaaaaaaaaaaaaaaaaaaaaaaaaaaaaaaaaaaaaaaaaaaaaaaaaaaaaaaaaa

SEQ ID NO: 30146 - DNA, 4582 bp, Homo Sapiens
gagacccggcactgagggcaacggccgcgcgccggctccgagacgagcgacgcctggcgggagcgcgcggcagcggggcgggcgtggagcgtgcgggggccgcgcgctgcttctctgaggcaggacggcactgccgggaggcggcggtgacaacgacggcggtggtgacgggcaccgggctcgcgggtgagacacagtaacctggttgaactctgcatctggaaagctgaagactgaagaaagataagagacattgactagtctggaaacagggacatctttggaacttcgttttcatccacagtaaacttttgaagtgtcatcaattggaattgatttcttcatcttattctgcctattgggaagaacatggcttcaaggattttaagtttccctttagttttacatgaactttgtaggaaacagagcccttaaagggcttgggaataacaagaagagattgaagacagagaagcttgccctgttttccttgccccttcaaagaaaaggatttacagctcaaacttagaacagctgttgtccagctttagccatcaagagagaaataaattaaaccaccattgccagactacaagccctggtgaagtcagggtgtgggagtggtggcattgagaagactacctaaaagagacaaagactgcagtaaacaaagctcctctttaaagttggaaggggcctcaggttccttcttggattgaaatagaaatagaaacacagggcacacctcttttaggtgcagctcacattttatggaactgtagtcgtggaggtactatagtatctcagaagaatttttctttgcccaaagtttttttgccataccctgatattctctccttcttttgaagacctgcctccatccatgagctgtatcttgatctgtctgactgtccatgttttccacctgcaaccatttgcatgtgtacagcctactgtttgtctccagtttttaaactgtacaagttgtgtttcttaatcttcccttctgccttgttctggggaggtggttattcatcatttggaatcacctttccccctcccatgtgctttccttcatttgagatcttttgacctttggctttatttgggagggggaagggtgataaagttttctgtttccctggttttcttttgtactcctctctgttgcttccctcctcccattttcttgtctgttctgccgctgtgtgggcctgggctatgcggcagggcagatttcccatcagagctccaacatgcccgcagagtctggaaagagattcaaacccagcaagtatgtcccggtctctgcagccgccatcttcctagtgggagctacgacactcttctttgcctttacgtgtccaggactaagcctgtatgtgtcacctgcagtgcccatctacaatgcaattatgtttctctttgtgttggccaacttcagcatggccaccttcatggacccagggattttccctcgagctgaggaggatgaggacaaggaagatgatttccgagctcccctttacaaaacagtggagataaagggcatccaggtgcgcatgaaatggtgtgccacctgccgcttttaccgtccccctcgatgttcccactgcagtgtctgtgacaactgtgtggaggaatttgatcatcactgcccctgggtgaataactgtattggtcgccggaactaccgttattttttccttttcctcctttccctgacagcccacattatgggtgtgtttggctttggcctcctttatgtcctctaccacatagaggaactctcaggggtccgcacggctgtcacaatggcagtaatgtgtgtggctggcttattcttcatccctgtagctggcctcacgggatttcacgtggttctggtggccaggggacgcacaaccaatgaacaggttacgggtaaattccggggaggtgtgaaccccttcaccaatggctgctgtaacaatgtcagccgtgttctctgcagttctccagcacccaggtatttggggagaccaaagaaagagaagacaattgtaatcagacctcccttccttcgaccagaagtttcagatgggcagataactgtgaagatcatggataatggcatccagggagagctgaggagaacaaagtctaagggaagcctggagataacagagagccagtctgcagatgctgaacctccacctcctcctaagccagacctgagccgttacacagggttgcgaacacacctcggcttggctactaatgaggatagtagcttattggccaaggacagccccccgacacctaccatgtacaagtatcggccgggttacagtagcagcagtacgtcagctgccatgccgcattcctccagcgccaagttgagtcgtggggacagcttgaaggagccaacctcaattgcagagagcagccgtcaccccagctaccgctcagagcccagcttggaaccagagagcttccgttctcctacctttggcaaaagttttcacttcgatccactatccagtggctcacgctcctccagcctcaagtcagcccagggcacaggctttgagctgggccagttgcaatccattcgttcagagggcaccacctccacctcctataagagcctggccaaccagacacgcaatggaagcctatcttatgacagcttgctcacaccttcagacagccctgattttgagtcagtgcaggcagggcctgagccagacccacctttaggctatacctctcccttcctgtcagccaggctggcccagcaacgggaagctgagaggcacccacgtttggtgccaactggcccaacacaccgagagccctcaccagtccgttacgacaatctgtcgcgccacattgtggcctctctccaggaacgagagaagttgctgcgccagtcacccccactcccgggccgtgaggaagaaccaggcttgggggactcaggcattcagtcaacaccaggctcgggccatgcccctcgtactagttcctcctcagatgattcaaagagatcacctttgggcaagactccactgggacgcccagctgtcccccgttttggcaagccagatgggctaaggggccggggagtagggtcccctgaaccaggcccaacagccccatacctgggccgatcgatgtcttacagcagccaaaaagcccaacctggtgtctctgagacagaagaagtggccttgcagccattactgacacccaaagatgaagtacagctgaagaccacctacagcaaatccaacgggcagcccaagagcttaggctcagcctcccctggcccaggccagccacctctcagtagccccacgaggggaggagtcaagaaggtgtcaggggttggtggtaccacctatgagatttcggtgtgagccttcggcacctcccctccccaacgcctctgcgcctacaccaaagggccccaggtggccaccttccttccctcaaggggctcccctcccgtgcatggacattttttaaaccaccgattccaagaggatgaggagtgttttctaaaatgcagtaggcttggggagtcggagagttggggccctgagactggggtagcaacccccccttttatcttttaagaccttcccttccttgatccctggaccagactcagtggacatttgtgcaattgctcgccctggagggaaccagatcatttttaaaccagaaataattttttttattattgttacggattctatttttttcctcttctgcgttaccaggtgtgtgtgtacatataatatatatatatatatattataaatatcaaagaaattatatatctatcctgggatgggaaaatgagggagggatacatatacggagggggatcttactcttcccattcctcagaccagcaggaaaagaggggagacgtcagtctttttcctgtggttccctctcatttgtcccagttactaactacggaaatagcatcctctgctggtgctaagtgtgattaggaagaagcctggggagaggtgagtctggaattttggtcacaagagggaaggacttggagaggagaattagttttctaggctcattggcatttagtttccctaggaaaggggtcaaaacttcaagacactggtggtggtgggagatcaggaaaataacttggcctagctcaaacaatattggataatcccctccttgggggagagggattagagtgtgctcctactggccccttggagcctcccctagcttacacagttaacttgattttaaaatccaaggccaggagagaagaatccaaaaagcaatatttttcatcacatgccaaaaacgggggatagagagaaggagtggcaggcctaggcccctccgattgtcccttgggggttacccctcagcccacctcactatggtgctgggtagaggggatacctgggttctaacctctaaataggggagatcccagcctccacaaagaggcccttttattttttattctgattagccattttaaaccaacgaggaataaaaagaaatcctgatctaaccagcaaaaaaaaaaaaaaaaaaaaaa

SEQ ID NO: 30147 - DNA, 2456 bp, Homo Sapiens
aaaaaatggcagcgctggaggaagaattcacgttgtcttcggtagtcctgagcgccgggcctgaaggactcctaggcgtggagcagagcgacaaaacagaccagtttctagtgacagacagcggcaggacagtcatcctctataaggtttctgatcagaaacccttggggagctggtcagtgaaacaaggtcaaattataacatgtccagctgtgtgcaactttcaaactggagagtatgttgttgtacacgataataaggttttaagaatatggaataatgaagatgtaaacctggataaagtatttaaagctacattgtcagcagaagtatataggatactttcagtgcaagggacagaacccttggtgctcttcaaggaaggtgctgttcgtggtttagaggccttgcttgcagacccccagcagaaaattgaaactgttatctctgatgaagaagtgattaaatggacaaagtttttcgtagtattcagacatcctgttttaatttttattactgaaaaacatggaaattactttgcttacgtgcaaatgtttaactcacgtatcttaaccaaatatacactcttacttggacaagacgaaaactctgttataaagagttttactgcatctgtagatcggaaattcatctctttgatgtcattaagctctgatggttgtatatatgaaaccttgataccaatacgtccagctgacccagaaaaaaatcagagcttagttaaatcactgctgctcaaggctgttgtatctggtaacgctcgaaatggagttgcactcactgccctggatcaggatcacgtcgcagtcctaggaagtccactagcagcttctaaggaatgcctctctgtatggaacataaaatttcaaacactacagacttcaaaagagttaccacaagggaccagtggtcaactctggtattatggagaacatttgtttatgctacatggaaaatctctaactgtgattccatacaagtgtgaagtgtcatcattagcaggtgctcttggaaaactcaagcatagtcaagatccaggaactcatgtcgtgtcccattttgtaaactgggagacacctcaaggatgtggacttgggttccagaactcagagcagtcaagaagaattttaaggagacgaaaaattgaagtgagtttacagccagaggttccaccatccaaacaacttttgtcaaccataatgaaagattcagaaaaacacattgaagtagaagtacggaaatttttggctctgaagcagacacctgactttcatactgtcattggggacacagtaacaggacttctggaaaggtgtaaagcagaaccatcattttatccccggaactgtctgatgcagcttatccaaacgcatgtgctttcttacagtttgtgccccgacttaatggagattgccttaaaaaagaaagatgtacagttgttacaactctgtctacagcagttccctgacattcctgaatcagtcacctgtgcttgcttaaaaattttcttgagcattggtgatgacagtcttcaagaaacagatgttaatatggagtcagtttttgactatagtataaattctgtacatgatgagaaaatggaagagcaaactgaaattcttcaaaatggcttcaatcctgaagaagataaatgcaataactgtgatcaagagttaaataaaaagccccaggacgaaacaaaggagagcacttcatgccctgtggtacaaaaaagagcagctctacttaatgcaattcttcattcagcatatagcgagacatttcttctgcctcatttgaaagacatcccagcacagcatatcacgctgtttcttaagtatttgtatttcctgtacctgaagtgtagcgaaaatgctactatgactcttcctggaatacacccacctaccttgaaccagattatggattggatatgtctacttctggatgcgaattttactgttgttgtaatgatgccagaagcaaagaggctactgataaatctttacaagcttgtaaaatctcagatatctgtttattctgagctcaacaagattgaagtaagttttcgggagctacagaaattaaatcaagaaaagaataatagaggattatattcaattgaagtgctggagctcttctgatattatcaattctccttcatagacattttataaagctcttttatgtgaactcttgcttcatccaggcaagaacggtgttttgtttgcgaccatctcagtgtcaagagaaacgtgtcagtgagtacctggaccatcacttaactgatgctccggggtaggactgcaggtttcacatgaacctgttctaggctgtggacattggtgtggagaggttctgcaattttttaaaaatatgtaactgggttgattttaagtaaaattatttgtgtattgataaaagtctaatttctt

SEQ ID NO: 30148 - DNA, 2015 bp, Homo Sapiens
gcttctcctgcgcctccttttcgcccagcactagcgccttaggccagctcgggggatgtgagagccgaagcccttagactgccaggcacagagtcgggtcgggatttgtcagccaagcctcggctccagctccgcaatctcgggactcacccgagcgacccaggcccgacggcaagttcgggcgggacggcggccgccgcgcgctcaggctcagcttcgctgcccgcccagaagatgaatccggcctcggcgccccctccgctcccgccgcctgggcagcaagtgatccacgtcacgcaggacctagacacagacctcgaagccctcttcaactctgtcatgaatccgaagcctagctcgtggcggaagaagatcctgccggagtctttctttaaggagcctgattcgggctcgcactcgcgccagtccagcaccgactcgtcgggcggccacccggggcctcgactggctgggggtgcccagcatgtccgctcgcactcgtcgcccgcgtccctgcagctgggcaccggcgcgggtgctgcgggtagccccgcgcagcagcacgcgcacctccgccagcagtcctacgacgtgaccgacgagctgccactgcccccgggctgggagatgaccttcacggccactggccagaggtacttcctcaatcacatagaaaaaatcaccacatggcaagaccctaggaaggcgatgaatcagcctctgaatcatatgaacctccaccctgccgtcagttccacaccagtgcctcagaggtccatggcagtatcccagccaaatctcgtgatgaatcaccaacaccagcagcagatggcccccagtaccctgagccagcagaaccaccccactcagaacccacccgcagggctcatgagtatgcccaatgcgctgaccactcagcagcagcagcagcagaaactgcggcttcagagaatccagatggagagagaaaggattcgaatgcgccaagaggagctcatgaggcaggaagctgccctctgtcgacagctccccatggaagctgagactcttgccccagttcaggctgctgtcaacccacccacgatgaccccagacatgagatccatcactaataatagctcagatcctttcctcaatggagggccatatcattcgagggagcagagcactgacagtggcctggggttagggtgctacagtgtccccacaactccggaggacttcctcagcaatgtggatgagatggatacaggagaaaacgcaggacaaacacccatgaacatcaatccccaacagacccgtttccctgatttccttgactgtcttccaggaacaaacgttgacttaggaactttggaatctgaagacctgatccccctcttcaatgatgtagagtctgctctgaacaaaagtgagccctttctaacctggctgtaatcactaccattgtaacttggatgtagccatgaccttacatttcctgggcctcttggaaaaagtgatggagcagagcaagtctgcaggtgcaccacttcccgcctccatgactcgtgctccctcctttttatgttgccagtttaatcattgcctggttttgattgagagtaacttaagttaaacataaataaatattctattttcattttctgcaagcctgcgttcttgtgacagattatacagaattgtgtctgcaggattgattatgcagaatacttttctctttcttctctgctgccccatggctaagctttatgggtgttaattgaaatttatacaccaattgattttaaaccataaaaagctgaccacaggcagttacttctgagggcatcttggtccaggaaatgtgcacaaaattcgacctgatttacagtttcaaaaactgtattgatgacagtagtaccaaatgctttaaaaactatttaacttgagctttaaaaatcattgtatggatagtaaaattctactgtatggaatacaatgtaattttgaatccaaaaaaaaaaaaaaaaaaa

SEQ ID NO: 30149 - DNA, 2701 bp, Homo Sapiens
gagcctgcgcaggaggccaataggctgccaatactccttggactccccgccagggccctgctgtcagtgcgcctgcgcgcgggtccggcgccgaggttcttgactgctgtgccggacgccaggtgtagccatgcagcgagccgattccgagcagccctccaagcgtccccgttgcgatgacagcccgagaaccccctcaaacaccccttccgcagaggcagactggtccccgggcctggaactccatcccgactacaagacatggggtccggagcaggtgtgctccttcctcaggcgcggtggctttgaagagccggtgctgctgaagaacatccgagaaaatgaaatcacaggcgcattactgccttgtcttgatgagtctcgttttgaaaatcttggagtaagttccttgggggagaggaagaagctgcttagttatatccagcgattggttcaaatccacgttgatacaatgaaggtaattaatgatcctatccatggccacattgagctccaccctctcctcgtccgaatcattgatacacctcaatttcaacgtcttcgatacatcaaacagctgggaggtggttactatgtttttccaggagcttcacacaatcgatttgagcatagtctaggggtggggtatctagcaggatgtctagttcacgcactgggtgaaaaacaaccagagctgcagataagtgaacgagatgttctctgtgttcagattgctggactttgtcatgatctcggtcatgggccattttctcacatgtttgatggacgatttattccacttgctcgcccggaggtgaaatggacgcatgaacaaggctcagttatgatgtttgagcaccttattaattctaatggaattaagcctgtcatggaacaatatggtctcatccctgaagaagatatttgctttataaaggaacaaattgtaggaccacttgaatcacctgtcgaagattcattgtggccatataaagggcgtcctgaaaacaaaagcttcctttatgagatagtatctaataaaagaaatggcattgatgtggacaaatgggattattttgccagggactgccatcatcttggaatccaaaataattttgattacaagcgctttattaagtttgcccgtgtctgtgaagtagacaatgagttgcgtatttgtgctagagataaggaagttggaaatctgtatgacatgttccacactcgcaactctttacaccgtagagcttatcaacacaaagttggcaacattattgatacaatgattacagatgctttcctcaaagcagatgactacatagagattacaggtgctggaggaaaaaagtatcgcatttctacagcaattgacgacatggaagcctatactaagctgacagataacatttttctggagattttatactctactgatcccaaattgaaagacgcacgagagattttaaaacaaattgaataccgtaatctattcaagtatgtgggtgagacgcagccaacaggacaaataaagattaaaagggaggactatgaatctcttccaaaagaggttgccagtgctaaacccaaagtattgctagacgtgaaactgaaggctgaagattttatagtggatgttatcaacatggattatggaatgcaagaaaagaatccaattgatcatgttagcttctattgtaagactgcccccaacagagcaatcaggattactaaaaaccaggtttcacaacttctgccagagaaatttgcagagcagctgattcgagtatattgtaagaaggtggacagaaagagtttgtatgccgcaagacaatattttgttcagtggtgtgcagacagaaatttcaccaagccgcaggatggcgatgttatagccccactcataacacctcaaaaaaaggaatggaacgacagtacttcagtccaaaatccaactcgcctccgagaagcatccaaaagcagagtccagctttttaaagatgacccaatgtgaatgtctgtagtcagttgtttacaaactccctctcctgcacaattcatttagaggcttcaatcatagaattctgcaaattaatgacaactcatgctttaattttgtattttgaatgtacacgcatgctgaagctaagtaacttttaatcaaagaaataagatggtattaggcaaatcttactatactatgaaaagcattaccttgcctatttttaatattattaaagcctttctccttcagtagtctattttcttagaataacaactcttttatctattctgaactctattttttttcttttttaagagacaaggttttgctctgttgcccagcttggactcgaactttcctgggctcaagcgaccctcctgcctcagccccccaagtagctgggactaaagtcatgtgccaccacacccagcttactctgaacttttatgacagatgattgttttttgtttttaatgtagaaatgagacaagggtacaaattggaactagaaattgacattgtcattgacaaacatggctaaaaacaaaacatcaaatcctgcccccgtgaagagttccctgtcacctcaagtttgaggatagtcctctaagagtgacctaagcataagtgaaagacacctcccctcacccttctagccccctacaaggtgccaggttggggtaaagagttggagatgat

SEQ ID NO: 30150 - DNA, 5136 bp, Homo Sapiens
ccagtctgggcaccggagcctgtgaccgcttcgttagtggagaggtagctggcagtccgcttcggcgggcctgtgccccgcgccgttctcggggcctccctgctgagctcgcggctcacgctgagagggacacgcagtgacgagcggccgaagcagctttgcggtgagagcacgctgggccgggggccgggcgggagcctggtggcgggtaacgccggactcgagggttttgtagtgcatccctgagcatgagcacagaatgaagcggcgtttggatgaccaggagtcaccggtgtatgcagcccagcagcgtcggatccctggcagcacagaggcttttcctcaccagcaccgggtgcttgcccctgcccctcctgtgtatgaagcagtgtctgagaccatgcagtcagctacgggaattcagtactctgtaacacccagctaccaggtttcagccatgccacagagctccggcagtcatgggcccgctatagcagcagttcatagcagccatcatcacccaacagcggtgcagccccacggaggccaggtggtccagagtcatgctcatccagccccaccagttgcaccagtgcagggacagcagcaatttcagaggctgaaggtggaggatgcgctatcttatcttgaccaggtgaagctgcagtttggtagtcagcctcaggtctacaatgatttccttgacatcatgaaggaatttaaatctcagagcatcgacaccccaggagtgattagtcgtgtgtcccagctattcaaaggccaccccgatctgataatgggattcaacaccttcttgccccctggctacaaaattgaggtgcaaaccaatgacatggtgaatgtgacaactcctggccaggttcatcagattcccacccatggcatccagccacagcctcaaccaccaccccaacatccttcccagccttcagcccagtcagccccagctcctgcccagccagctcctcagcccccacctgccaaagtcagcaagccctcccaactgcaagcacatactccggccagtcagcagactcccccacttccaccgtatgcatccccacgttctccgccggtccagcctcacacaccagtgacaatctcgttgggaacggccccatccttgcagaacaatcaacctgtggagtttaatcatgccatcaactatgttaataagatcaagaacagatttcagggccaaccagacatctacaaagcattcctggagattttgcacacatatcagaaagagcagagaaatgccaaggaagctggaggaaactacactccagcattgacagagcaggaggtgtatgcccaggttgctcgtctctttaaaaaccaggaagatttgttgtcagagtttggacaattcctaccagatgccaacagctccgtgcttttaagcaaaacaactgctgagaaggttgattctgtgagaaatgatcatggaggcactgtcaagaagccccaactgaacaacaagccgcagaggcccagccagaatggctgccagatccgcagacatcctacaggaaccacccctccagttaagaagaaacccaaactgctcaatctgaaggattcttctatggcagatgccagcaaacatggtggtggaacagaatcgttattttttgataaggtccgaaaggctcttcggagtgcagaagcctacgaaaatttcctacgctgtcttgttatttttaaccaggaggtgatctctcgtgctgagcttgtgcaactagtctctcctttcctggggaaattccctgagttgtttaattggtttaaaaactttctgggctataaggagtctgtacatctggaaacttatccaaaggagcgagccacagagggcattgctatggagatagattatgcttcttgtaaacgattgggctccagctatcgagccttaccaaagagttaccagcagcccaagtgtacaggacggactcctctctgtaaagaggttttaaatgatacctgggtttccttcccttcgtggtctgaggactctacctttgtgagttccaagaagactcaatatgaagaacatatttatcgttgtgaagatgaacgctttgagcttgatgtagttttagagaccaatctggcaacaatccgggttctggaagcaatacagaagaagctttcccgcttgtctgctgaagaacaagccaaatttcgcttggacaacacccttgggggcacatcagaagtcatccatagaaaagcactccagaggatatatgctgataaagcagctgacatcattgatggtctgagaaagaatccctccattgctgttccaattgtccttaaaaggttgaagatgaaagaggaagaatggcgagaagctcagagaggctttaacaaagtatggcgagaacaaaatgagaaatactacttgaagtctctggaccaccaggggatcaactttaaacagaatgacaccaaggtcctgaggtctaagagcttactcaatgagattgagagtatctatgatgagaggcaagagcaggctacggaggagaatgctggtgtacctgttggcccacacctctcacttgcgtatgaagacaaacaaatactggaagatgctgctgctctgattatccaccatgtgaagaggcagacaggcattcagaaggaggacaaatataagataaaacaaatcatgcatcattttattccagatttgctctttgcccaaagaggtgatctctcagatgtggaggaagaggaagaagaagagatggatgtagatgaagccacaggggcagttaagaagcacaatggtgttgggggcagtccccctaagtccaagttactgtttagtaacacagcagctcaaaaattaagaggaatggatgaagtatacaacctcttctatgtcaacaacaactggtatatttttatgcgactgcaccagattctctgcctgaggctgctacggatttgttcccaagccgaacggcaaattgaagaagaaaaccgagagagagaatgggaacgggaagtgctgggcataaagcgagacaagagtgacagccctgccattcagctacgtctcaaagaacctatggatgttgatgtagaagattattacccagctttcctggacatggtgcggagcctgctggatggcaacatagactcatcacagtatgaagattcactgagagagatgttcaccattcatgcctacattgcctttaccatggacaaactgatccagagcattgtcagacagctgcagcatatcgtgagtgatgagatctgtgtgcaggtgactgacctttacctggcagaaaataataatggggccaccggaggccagctgaacacacagaactcaaggagcctcctggagtcaacgtatcagcggaaagctgagcagctaatgtcagatgagaattgctttaagcttatgtttattcagagccaaggccaggtccagctgactattgagcttctggacacagaagaggagaattcggatgaccctgtggaagcagagcgctggtcagactacgtggagcgatacatgaattcagatactacctcgcctgagcttcgtgaacatctagcacagaaaccagtatttctccccaggaatctacggcggatccggaagtgtcaacgtggtcgagagcagcaggaaaaggaagggaaggaaggaaacagcaagaagaccatggagaatgtggatagtctggataagctggagtgtagattcaagctgaattcctacaagatggtgtatgtgatcaaatcagaggactatatgtatcggaggaccgccctgctccgggctcatcagtcccatgagcgtgtaagcaagcgtctacatcagagattccaggcctgggtagataaatggaccaaggagcatgtgccccgtgaaatggcagcagagaccagcaagtggctcatgggtgaggggctggagggcctggtgccctgtaccaccacctgtgatacagagaccctgcattttgtgagcattaacaagtatcgtgtcaaatacggcacagtattcaaagccccttaactgcaaagccagagcagataacttggggtgtgtgtggggatgtgtgtgtgggcctatgcactcacacactgaagaaacaaggaagatgcctttcaagcctcactgggcctctctgggacatggccacctgacctgtgtgtggctggtgcagcctggcaccaagtgggctacctgttaggaacatgaataccttacaaagctgaagctggaacttttcccaaagggttttgggtatagcctgccctggaggggaaggaagtccatgcaagcaaagacatgcagtttgcttgcacacaccagcagagctaagactggagtctcctgtggcctaactttcaatgagggaaccggatgctgttcacactttgactggatggagatgcatttacaaaacagactggagaaggacttaatactcagatggattggaactatcatggtcactgctcctctcccctccccacaaaaggaaaaaaaagctggatttgattttttttttctggtcactcgagcacatctaagatcacccattaggttttatctgggacctgcagtttggctttgggattgatcatcttgtggattttattcctgacgattcccttgctgcctacccttttctctcctctggttctcaacctcaacgagttcaaatcagttgtcctttttagctcccgtggaactgttttgtatctgcctctttactagtctaccttagtgccatccaccagctttactctctgacacacacacgcacacacacacacaattttaacttgtttttttgtacataatgtacatactgtcaattttttattaaaagaaatatgctttgatgtgctagcataactgctctagcttcttgtgtaccatagtactgtggcttcagatttagtacctatgaacagatgtacaagacatttattacactttttaccaaagggagttaccattgtagtacttttgtgtaaaacttgtcttcccctttgcccccaacttttttttttttttttggtaaaaaaaaaaaaagcttgggttcttacttaaaaaaaaaa

SEQ ID NO: 30151 - DNA, 4631 bp, Homo Sapiens
gccagaggagcggctccggccgccgcgcctgacccttgtccggggtcttccgcacagtgggctgagggccatgtcagttttctgccacctacaggatagaccatgaagctgaaggaacttgagcggccagctgtccaggcatggagcccagccagccaataccctttgtatctggccacaggaacatctgcccaacagctagattcctccttcagcacaaatggcacattggaaatatttgaggttgatttcagggacccttctctggacttgaaacacagaggagtcctttctgccttgagcaggtttcacaagctggtctgggggagctttggcagtgggcttctggaaagctccggggttattgttggcggcggggacaatggcatgcttattctatacaatgtgacccacatcctgtcttcggggaaggagcctgtgattgctcagaaacagaagcacacgggggctgtcagagccctcgacttgaatcctttccagggcaacctcctggcttcaggggccagcgattctgaaatcttcatttgggatctgaataacttgaatgtgccaatgaccctgggatccaagtcacagcagcctccagaggacatcaaggcactgtcttggaaccggcaagcccaacacattctgtcttctgctcaccccagtggcaaggcagttgtgtgggatctcaggaagaatgaacctatcatcaaagtcagtgatcacagcaacaggatgcactgctcaggcctggcctggcatcctgacatagccacccagttagtgctgtgctcagaggatgatcgacttcccgtgattcagctgtgggacttgcgctttgcctcctcgcccttgaaggtgctggagagccacagcagggggatcttgtcagtgtcatggagccaggctgatgctgagctgctgctcactagtgctaaggacagccagatcttgtgccggaacctggggagcagtgaggtggtatataagctaccaacacagagcagctggtgctttgatgtgcagtggtgccctcgggacccttcagtgttctctgctgcctccttcaacggctggatcagtttgtactctgtgatgggtaggagctgggaagtccagcatatgagacaggctgacaagatctcctcttccttcagcaaaggccagcctctcccaccactgcaggtgccagagcaagtggcacaagcaccactgatacctcccctgaaaaaaccccccaaatggattagaagaccaacaggtgtttcatttgcttttggagggaagctggttacttttggcctccccagcacccctgcccatctggtgccacagccttgcccccgcctagtcttcatcagtcaagtcaccacagaatctgaattcctgatgcgatcagctgagctgcaggaggccttgggatcaggaaatctactgaattactgtcagaacaagagccagcaagctttactgcaaagtgaaaagatgctgtggcagttcctgaaggtgaccttagagcaagactccagaatgaaattcctaaagcttttaggatacagtaaagatgagcttcagaagaaggtggccacatggttgaagagtgacgtggggctaggtgagagtcctcagcccaagggaaatgacctcaacagtgacagacaacaggccttctgcagccaggcctccaaacacaccacaaaggaagcctctgcttcctcagccttctttgatgagctggtccctcagaacatgactccttgggagatccccatcacaaaagatattgatggactcctaagccaggctctcctgcttggggaactgggtccggccgtggagctgtgtctgaaggaggagcgctttgctgatgccattatcctggcccaggctgggggtacagatctgctgaagcaaacacaggagcgctacttggccaagaagaaaaccaaaatctcctcgcttctagcctgtgttgtgcaaaagaattggaaggatgtggtgtgtacctgtagcctgaagaactggagagaggcactggctttgctactgacatactcaggcacagagaaatttcccgagctctgtgacatgctgggaactcgcatggaacaggagggcagcagggcactaacctccgaagccagactctgttatgtgtgctcagggagtgtggagcggctggtggagtgctgggcaaaatgccaccaggctttgtcccccatggctctgcaggacctgatggagaaggtgatggttcttaacaggagcttggagcaactgcggggtcctcatggggtgagcccaggccctgccacaacctacagggtcactcagtatgccaacctcctggcagcccagggcagcctggccactgccatgagctttctacccagggactgtgctcagccaccagttcagcagctaagagatcggctttttcatgctcaaggttctgctgtcttgggccaacagtctccccctttccccttcccccggattgttgtgggagctaccctccactctaaagagacatcatcttacagattgggatcccagccttctcaccaggtcccaactccatctccaaggccaagggttttcacccctcagtcatcaccagcgatgcccttggcaccttcccatcctagcccttatcagggtcccaggacacagaatataagtgactacagggcacctgggccccaggccatccagcctttgcctttgagccctggggtaaggcctgcttcatctcagccacagctattaggagggcaaagggtgcaagttcctaacccggtgggattccctgggacatggcctcttcctggttcccctctacccatggcatgcccaggcatcatgcgacctggctctacctccctgcctgagactcctagactgttccctctgcttcctctgagaccactaggtcccggccgcatggtctcccacaccccagcccctcctgcaagcttccctgtgccataccttccaggggacccaggtgccccatgctctagtgtcctcccaaccactggcatcttgactcctcacccaggacctcaagattcctggaaagaagccccagcccccaggggaaacctccagaggaacaagctgccagagacatttatgcccccagcaccaattactgctccagttatgagcctcacccctgagctacaagggattcttccctcacagccccctgtctccagtgtgagtcatgctcccccaggagttccaggagaactcagcctgcagcttcagcacctgccacctgagaagatggaaaggaaggagctgcccccagagcatcagtccttgaagagcagctttgaggcgcttctccaacgctgctccctgtctgcaactgacttaaagacaaaaaggaagctggaagaggcagcccagcgtctggagtatctatatgagaagctctgtgaggggacactctcacctcatgtcgtggctgggctccatgaggttgcccgatgtgtggatgcaggaagctttgagcagggccttgcagtgcatgcccaggtggcgggctgtagcagcttcagcgaggtgtccagcttcatgcctatcctgaaggctgtcctcatcatcgctcataagctgctggtctaaaccaggcagcctctcttgctaggaggccacttctgctgttacataactcctccctgcagaagaggggacttctgcaacagattctgtttctttttcccgactcttttccttgctgccaggtatgtgatgctgtaggcttggctccaaaccagctgagtgcctgctttttactcctttatgtctggccttctaggatctgtccaagacactctcaggcctggaggcagggcatagaatcagttcttcactctccctaatactacactctgtaaggacctggggcaggatatcttctcccccagggatcttctatttaagtggcttctgagagggtgaacaggattgttacttttaagcctacctctgctgtgacccatcatgtgggtcttttgtttctcccttctgtggtttatgagcctgcccttaccttttccctgcctctgacttggtatttccaggtccgtatttctctgtagcccagggtctggggtagagctgactgctgttcaccctttgaacaactcatggacgtgagggatgggtgctgagcagaaccaagagaggaaactttggcgctgttaaaatggaatttctcatctgccggcattattaagggtgggctaggttggatggaaggtgaaagggatgaactgccttttgctggaagctgtcttaggctgtgagacaggagcaggggaaccacagcctatggggaactgcccttgactccacctatgttggagccttagcccaaggccattccttctgtgatgataaagcccagttctggaattggagccatattaaggaatgattctcttccagcgctgctcctcaagggttgggggtccttctccctcgcagccaccacatgtctcagggctaccttctccgattggatttgcatttgtggcactgtctttgatgcagtgatgtacttaatggtgcaataaagctgcttcgatttggtaaaaaaaaaaaaaaaaaaa

SEQ ID NO: 30152 - DNA, 4107 bp, Homo Sapiens
cttccgggaaaatggcgactcccgctcgtgccccggagtcaccgccgtccgcggatccggcgctagtagcggggcctgccgaggaagccgagtgcccgccgccgcgccagcctcagcccgcgcagaatgtgctcgctgccccgcggcttcgagccccaagctcccgaggacttggcgcagcggagtttggtggagctgcgggaaatgttgaagcgccaggagagacttttgcgcaacgaaaaattcatttgcaaattgcccgacaaaggtaaaaagatctttgactcttttgccaaactgaaagctgctattgcagaatgtgaagaagttagaagaaaaagtgaactgtttaaccctgttagtttagactgtaagctaaggcaaaaagcaattgcagaagttgatgtgggtacagataaggcccagaattctgacccgatacttgatacttcatcactagttcctggatgttcctctgtagataacatcaagtcatctcaaacctcacaaaaccagggacttggacgtcctactcttgaaggtgatgaagagacttcagaggttgagtacacagtgaataagggcccagcttccagcaatagagacagggtaccaccttcatctgaagctagtgagcatcacccgcggcatcgtgtttcaagtcaagcggaagatacttccagcagctttgacaacctgtttattgacaggttacagaggatcaccattgcggaccaaggtgaacaacagtcagaagaaaacgcaagtactaagaacttgacaggcctttccagtgggactgagaagaaacctcattacatggaagtgctagaaatgcgagccaaaaacccagtgccccagctgcgtaaatttaaaaccaatgtgttaccttttcgacaaaatgattcatctagtcattgccagaagagtgggtctcctatttcctcagaagagcggcggcgcagggataagcagcatcttgatgacatcacagcagctcggcttctaccacttcaccatatgcccacgcagctgctctccatagaagaatccttggcacttcagaaacagcagaaacagaattatgaggagatgcaagcaaagctcgcagcgcaaaaattagctgaaagactgaatattaaaatgcggagttataatccagaaggggagtcttcagggagataccgagaagtaagggatgaagatgacgattggtcctctgatgaattctgaagataatctcctaaatcactgacgttgagatgtcatcatcttacatcagactttctaactagtatcaagatcagtgtcagatattgttgagggaagtaattttataaagttacacaaaggtagttaaaaaaagcccagtttgtctttcagaaggtgactttcatgtgcttgaaaagtttaatatttgaatattgtgtttaaccacatggtattaaaattttgcaatatattgtgtattggtctgatattttagtatatagtagaacatactttttttttctttaagccaaatgaaaagaggtaactttgcttttttcctttttcttacctatcaaatagcatttattacatgtctttcagtgaaatacttagttgttccaggcacctaaaatcaattaggaagacatagttcccttcttttttgggtaatgaagggagcagtctaaagaattgtatgcatgtttgcatggggttattgagacattggatgtgaaatacctaggaagacatgtatggagaatgcttaacaaatgctcttctcctttttctgtcttcccttaggaagaacgttatctctcttctgattaggaaggacttcccttttgagtagatgctggaaagtggaggtttttttttgttggtttgtttgtttggttttgtgtttttttttgagatggggtcttgctctgtcgcccaggctggagtgcagtggcaggatctcggctcactgcaatctaggtggaggtctttttaaataacctcatgttacttcaggcaaatctggtacaggagaagcccaagctaactgagctgggtgaaggcttgtgcatcacctggcttgagttccttgctgtcacagatgataggttcatgtacacaacattaatgtttgataaggaaagcattttttttttgttaaaattgaattgtcagtactttacttttttccccccaaataggtatatatagactgcagaagcttcagtcccatatataaacgttcatgtcattttagaggattatatggttgtctccagagaaattaacttacattatcaaaaaattctttgtctaatatattggagtctttaaaagtgttgaagaataaaatattaattagaacaacttcaaatgctaaggtgatgttttaccgggacttaattaaatacaactttttcctttcgaaaaagactgttcacatttgcttccaggtgtaattattgctttcattccttacccccctcaagcaaatgtgaaaagtatactgacctaagattctcattagttttagtgcttaaaacgaatagtaaatgatttcacagcgtaaaatttgatgttatttctggaagctggatgatatggaagagttcatgtgcctggacacacagttccctgtaatcctgccatctagggagataaactctgttaacattttgatgttgtgtttttgcttatttttctatgcatagttatgcatttatattctcaaaaatgaaatcataatgtacattgctttgtagtctgctctatatattgtcaatatgttcccatattaaatattttgctttttagacagctgtaggatattttatttcatgggtataccataactttaagatttatttcctattcagcaatttgattatgtattataatgtaatctgtaaatagtgatatgattaacatcttaatcacatccatagaaaatgacttatttccagaagataccgctctaaaaatgaaattgttaggtgaaagtgtttttgagaatttttatatatattactcactgcagagatcatgttcatttacattcccattagcaatatatccaatgctcagaattgaaaattactacttaaaatctttgcaaattgaataattacagaaaagggctacatttaaaatttgtatttgtttttcttacttagtgaaggttgtgttttttttcatattcattggccatgctatattcattcttttgagaattgctcattcatattttttctgttgcttgcttggagaatttgctctttttttggcatataagttcttaagaatgtccgtcctttgtcatatattgtaactttttttagccttatttgtcatttaacatagtttgtggtatttcagtatagaagttgttttctttaggagtctacctttgtgtatgtgcttgaaagtatttttgtaatccaagaatggataaatgtccttattttcttctagtattttcttatttcacttttacacctatctttaaaaggaatttaaattttgtttatatacattaactaaatcagtacaagtttggggtgaaaaggaaatttttaatccatctcaaatgtatttggttatattatataaggtagggatttgattttatttcgaagaatttaccaattggttcagtatgtgaaaccaccatttcccctctgattagtaatgctatttttatagaatattaaattcttatgtgtcttttgtgtcttaggccaatttctgggccttctgggttttttctacactgtcaataattatcgctttaattggtgttaatatttggtagtacacaggttctcccttgttcttttaaattttgtgaaatataacttacaaataagtacttaaaacagagcttaatgggtaaagcaacagctgtgtaatcacaaactagatgcagaggaggtcttgccagcactccaaaatctctgtgtgtcccctcttgacactcactgtttcccccagagctaactatcctgacgtatggtaattctccctctgtccttttaagaattattttaccagttatgtgtataacaatatggtttacattttgctcacttttgacttatataaaaatagaataatact

SEQ ID NO: 30153 - DNA, 1921 bp, Homo Sapiens
atttggagtcaggcctggctgttgctcaggtgaccagcttgtgtctctgggagggcgctgctttccccggccacccggcgcgatgatccagaatgtcggaaatcacctgcgacggggcttggcctctgtgttctccaaccgcacatcccggaagtcagccttacgtgcggggaacgacagtgccatggcagacggcgagggataccggaaccccacggaggtgcagatgagccagctggtgctgccctgccacaccaaccaacgtggtgagctgagcgtcgggcagctgctcaagtggattgacaccacggcttgcctgtccgcggagaggcacgctggctgcccctgtgtcacagcttccatggatgacatctattttgagcacaccattagtgttggacaagtggtgaatatcaaggccaaggtgaaccgggccttcaactccagcatggaggtgggcatccaggtggcctcggaggacctgtgctctgagaagcagtggaatgtgtgcaaggccttggccaccttcgtggcccgccgagagatcaccaaggtgaagctgaagcagatcacgccgcggacagaagaggagaagatggagcacagtgtggcggctgagcgccggcgcatgcgccttgtctatgcagacaccatcaaggacctcctggccaactgcgccattcagggcgatctggagagcagagactgtagccgcatggtgccggctgagaagacccgtgtggagagtgtggagctggtcctgcctccccacgccaatcaccagggcaacacctttgggggccagatcatggcctggatggagaatgtggccaccattgcagccagccggctctgccgtgcccaccctacgctgaaggccattgaaatgttccacttccgaggcccgtcccaggtcggcgaccgtctggtgctcaaagccatcgtgaacaatgccttcaaacatagcatggaggtgggcgtgtgcgtggaggcctatcgccaggaggctgagacccaccggcgccacatcaacagtgcctttatgacctttgtggtcctggacgcagatgaccagccccagttgctgccctggattcggccccagcccggcgatggtgagcggcggtaccgagaggccagtgccagaaagaagatccgcctggacaggaagtacatcgtgtcctgtaagcagacagaggtgcccctctccgtcccctgggaccctagcaaccaggtgtacctgagctacaataacgtctcctccttgaagatgcttgtggccaaggacaactgggtgctgtcctcggagatcagtcaggtccgcctgtacactctggaggatgacaagttcctctccttccacatggagatggtggtgcatgtggatgcagcccaggccttcctgctgctctcggacctgcgtcagaggccagagtgggacaagcactaccggagcgtggagctagtgcagcaggtagacgaggacgacgccatctaccacgtcaccagccctgccctcggaggtcacacaaagccccaggacttcgtgatcctggcctcgaggcggaagccttgtgacaatggggacccctatgtcatcgcgctgaggtcggtcacgctgcccacacaccgagagacgccagagtacagacgcggagagaccctctgctcaggcttctgcctctggcgcgagggggaccagctgaccaagtgctgctgggttagggtctccctgactgagctggtctcggcaagtggcttctattcctgggggctcgaatccaggtcaaagggtcgcaggagcgacggttggaatggaaaactagctggaggacacctgagtactcttaaagcaatccccgtggccaaaatcaacagccgatttggataccttcaagacacctgaaaccttatcatgagc

SEQ ID NO: 30154 - DNA, 6687 bp, Homo Sapiens
gtttaagtagaatcctcaagcttggcctcagagtactatgaggcttctgaatccaggaataagactgctcttggatttactctctttgtattgcatgtcaaaggcaacagaactggaccaagaaaattcataactttttgtttgtttctactaagatgacatcatacatggctattgatggcagtgctcttgttcccttgcgtcagaagcccaggaggaaaactcaaggttttctcacgatgagtcggaggaggatatcgtgtaaagatctgggccatgctgactgccaagggtggctgtataagaaaaaggaaaagggaagtttcctaagcaacaaatggaaaaagttctgggtgatactgaaggggtcgtcactgtactggtatagcaatcaaatggcagagaaagctgatggatttgtcaacctgcctgatttcactgtggaaagagcatctgaatgcaagaaaaagcatgcttttaagatcagccatccacagatcaagaccttttattttgcagctgagaatgtgcaggaaatgaacgtgtggttaaataaacttggatcggctgtaatccatcaggaatccactacaaaggatgaagaatgttacagtgaaagtgaacaggaagatccagaaatagctgcggagacaccaccccctcctcacgcttcccagactcagtctttgactgcacagcaggcatcttcatcctcacccagcctgagtggaacgtcgtattctttctcttccctggaaaatacagtgaagacacccagcagttttccttcctccttatctaaagagagacaatccttgcctgacacagttaacagtttgtctgctgctgaagatgagggacaaccaataacgtttgctgtgcaagttcattcacctgtaccctcagaggcaggcatccacaaggccctggaaaacagttttgtcacatcagaaagtggatttttgaactctttatctagtgatgatacttcttcattgagtagcaatcatgaccatcttactgtcccagataagcctgctggatcaaagatcatggacaaagaagagacaaaagtgtctgaagatgatgaaatggagaagctgtacaaatcattagagcaagctagtctatctcctcttggggaccgacgaccttcgactaaaaaggagttgagaaaatcctttgttaagcggtgtaaaaatccatctataaacgagaaactccacaaaatccgaacattgaatagcacattaaagtgtaaagaacatgatctggccatgattaaccagttgctggatgacccgaagctgacagccaggaaatacagagagtggaaagtcatgaacaccctgctgatccaggacatctatcagcagcagcgggcttcgcctgcccctgatgacactgatgacaccccccaggaactcaagaaatcaccttcttctccctctgttgaaaattccatttgagacaaagtcagggttttctcctcttatattttatcacaagcaactcttcaagatgttgcaaaagcttacatttttccttaaaaggaaaactgaaacccagtccttcaagcatcagcttcccatctaaagatgcacgttagatgaagataatcaccgaatacaccagggctcctcatttcagtcgtaacgcatccattgagattggaatgattgagttcagttgaaaggcgttttttgtgttcctactgggagctcacggtgatgtggggctctaggggggatgtgagaaatgtctcttctgttcattgctctccagagaatgctatggacaagaatcaaattttaccaggagtaattgcccatggaaacattctgtttttcaaaagaagaatgtacatattccacttgactgggaagctgtgtggcccaaatcactgtttgagtggaggaatgttttctagagcagtgactggaaggacaaacgtggtgttgcagaacaaaaattccttgcctttggtatggaatggtggtgccttttccatgtgatgagaaatgcttcatagacagtggcatgtgggagagctgaaggaggaggcgtgttccatattccactcattcaaaggacagcttggtgttttcacactttatgcaggttaggggatctgattaatgtttcctttccttacaacagctagagaaaacatctcatcacaattggagacctctacttcctttgagctttcctactcaatggtaggagataggaatatgttccgcaaagaatgtctactgctcttgtccttggctgtgatccctatacatagtgtgaatttatatccaggtttcccaggatcaatattgacaagacgactttggcatctgaattgttttaatatctttactcaaaaaaacaaaaaaacaaaaacccatggaagcaacaaaagagttaaacatgagggatttatttttgtatgtttatatgtcacttgtgtgctatgtgaatagctatgtttgttatttaaatatatttatagaagttcaaattactagtgtttaaaagatgatatactattatatattgtgcttagtatatatttgatgagtctatactttttgcttgagaaaaatagaaatactattgattcactggtgttatgatgttgcactgtgtctgaggaatgctcaggaaatcttgtgggaaaaaaatggggcatgcattcataatttttcattttcttccccaccccaacccccatgagctcttaaatttagatttctatctcttgtaagtcactcttttaaccagcaaaggactttcatcttagattatcctttctattaaataaactttaagctttgtgccatttatgcctgcaaaccttagaccaaaggcaacacaactaatgtcatcttttcattaaagactaatagaaatttagaaatcattgtgttaaagagagctatagagaaacaatatgaaagtcttcccttactaatcaccatgaatatttctcaccataggaataaccacaacccaccaagtacccatgttggccctgcctacccgtaacaaattgttcacacaacctattttgttttatagcttcaaagtgtggcttgacattcaaaatggaaggaaccacctgaattatatctgcaaacaaaatggaaatagttgttgaatagttccccaagctttactaagaagccttaatactctgtaaacaaacaaacaaacaaaaaacaaccttagcattaagaaataaaaacaaaaaacaagaagcaagttgtactgctagaaacttctctaagataagaggccaggccagtcagtttggcccagcaaacatgtgggtacttctccacctagggaagccactgaagatgagtttgacctgtggtgacctgacagagagaacattcagatcctcagattgcaccctgatgccctggtttaggaaagcagtgctttaaccttttgcccctggaaattactgattctttctgtgattagcagataccagaagggaaattatttaggattggcaatgtaaagagtattgaaggaacaacaaataacaatagcagaaataacagtgtgacataaagtgcccttccacctatttttctttggtttgcaacaccagcctgtagacttccagtttttcttaaattgaagagctccagacacttttgagcagggtttgtgaatagctttgaatgctttcctttggcttttcgtgaagacatatttccccagcctttcaactgtaaactcctttagtaccattgaaacttaaggcaaaaaagatccctgggattacttagccaaggcttaaatttatttttcaaagtcaagaacattagcctagaagtttttgctttgctagttaaagcttactttgcagagcttcccaaagtgaaagggaaactgaacttcacaattttgcacctggctttctggagccccattgcctgctcattcgtgtttttccccctgtaaattattttgcttttgaccaggttgtgctagaaagtagggctgcttctgtgagttctcagcctaggctgtggccactaagacgtgggtggggggatagacaggagtgagagggagagtgggtgacactttccgtgacacttaatgtaggaagacatgggcttctctctcttggcctcaagccacttttctggtccaaagaatattgggaaaactggattactttcagtatatttcttgagaccgggtcatctctgaaatgcatttggggtagtttcctggggtccaagggccaattcctatacccagtcctgcagtgtctgtgagctgtggaatgagagagaaaaccatggctgctcaggaaggaagtggagaatctctcagcacacgtagatccaaatctgtggcacctgctaaagattaggatttggagaggactcctctttggggttgtgaagaggaccttttccctctgttgttagcctgtagatccagaacggagcctgatgtgatgccttcactggttgatatattgcaaatagacactctgagccctgcattgcaagggcgtcttttgctttaaagaattcttagttttgccacaacagctcaaatctcagaataggatcaaaggcctagaaagactcctaaagtataggattacaaagactccaggaagcgtaagaaagagattgtgtttggagtcagatttcaatgtgaaacccatgccttacatttacacagcactttgtagtttgcaaattggtgtgttttcagccccctcccgctgccccatgctctgagatgattgtggattattacagtgaagtgcctggcccggagcccccagtgatgaagcaggaacttgagtctcaggactcccagcggctctctgcccatttcctcctctccgccccccacctcgcttcacctgttaccttgtgaagttgctgttggcacatagcccactaggaaaccaagaagtttgactgggagcgtgtgtttcattgcactgggcttagcatacggctggccctggtggctgtttggctaaattctccatttgaaacctaaagggccctctctgtgcttgagcacagtctcctcctagtggtcctgcctcaacctgctggcgggctgtctatggattggggtttcacctaatcatgctgtgtttcctttcttttctttctgtacattagactacttgggaggtgctgtgtgatccttggatgaaaaacatatatttaaagaaatggagagtgtttattttgtttgctttttgaggcatgtgctgtcaaatgttagagaccaaacttagtgattagaggttggtcctttgaccttcttctcttaattgcttttcatgtaatcatgataatttactcaggtagcactccagtcacaaacaatgtcacagagatgaaacagattcaaagaaaaaatatttttaagtcttttgaaaagaagtgctattcaaatttaagacatgtttaaattcataggtacattatctcttagtaagaaatacttttttttttctttttttagacagagtcttgctctgttgcccaggctggagtgcagtggcacgattttagctcactgcaacctctgcctccctggttgaagtgattctcctgcctcagcctcccgagtagctgggactacgcccggctaatttttatatttttagtagagaccggggtttaccatgttgcccaggctggtttcaaactcctgacctcaggtgatctgcctgcctctgcctcccagagtgctgggattacaggtgtgagccaccacacctggccgaaagacagtattttgatatagccacatacatgatttaatgagtaatgttaagtacagaaaagctgccatatccacatagttttagggggcatttcttcttcagtctaacaagaatatgatatccaattgtggttttccaatttatttctcttccaatttcttttgtatacctcacaggagaaattgaatcctagaactgggagatgactgccctgcccagggttttgtaatacataattgaaaataaaagtccctgaaactaaatgtttgcagcctgtatgaaatggactgtggaagggggataatttctctcctcacagaaagccactcgtctccttgaatgaggcattgagcagacacacgtttctctgtgtcgtggggcaggaagcaattcccttgcctcttcagcacatctcagttctttcccacatgaccccagaaccacatagaaaacattgaaaataatggattcttcattgtatttgaattttttttttttaacctttagcccaaaagggaagtgtgcctcgtggaaagagcaaatgccgtaaaatagaaaccaggagttttaatcgccatatattttaatgtgcttgcatgatgggaatgtgacttttagcactgcatggtgtttgggggcaagatattaatgtggaaatcttagcttaagttttactgtgctctcatcctgtgtcagctacccctctaaactgaaaaagaggcatggctcatttctctcctgctttatgtttttgaggttgacttgtaagataaaaataaaaataagaaaaaaatatatctaggcaaatgacatgaaaaaaaagttgaaatatactactggtgttcatttttgtcctgcagtgttgctttctcaaagaaataaacatgtggctggaagtgttt

SEQ ID NO: 30155 - DNA, 3208 bp, Homo Sapiens
tttcagagtcatcaactgggctcatgagaaccacaagaaacctacgaaggcactgggacagagcctggctgctggtcaaaggcaacagaactggaccaagaaaattcataactttttgcttttgtttctactaagatgacatcatacatggctattgatggcagtgctcttcaggttcccttgcgtcagaagcccaggaggaaaactcaaggttttctcacgatgagtcggaggaggatatcgtgtaaagatctgggccatgctgactgccaagggtggctgtataagaaaaaggaaaagggaagtttcctaagcaacaaatggaaaaagttctgggtgatactgaaggggtcgtcactgtactggtatagcaatcaaatggcagagaaagctgatggatttgtcaacctgcctgatttcactgtggaaagagcatctgaatgcaagaaaaagcatgcttttaagatcagccatccacagatcaagaccttttattttgcagctgagaatgtgcaggaaatgaacgtgtggttaaataaacttggatcggctgtaatccatcaggaatccactacaaaggatgaagaatgttacagtgaaagtgaacaggaagatccagaaatagctgcggagacaccaccccctcctcacgcttcccagactcagtctttgactgcacagcaggcatcttcatcctcacccagcctgagtggaacgtcgtattctttctcttccctggaaaatacagtgaagacacccagcagttttccttcctccttatctaaagagagacaatccttgcctgacacagttaacagtttgtctgctgctgaagatgagggacaaccaataacgtttgctgtgcaagttcattcacctgtaccctcagaggcaggcatccacaaggccctggaaaacagttttgtcacatcagaaagtggatttttgaactctttatctagtgatgatacttcttcattgagtagcaatcatgaccatcttactgtcccagataagcctgctggatcaaagatcatggacaaagaagagacaaaagtgtctgaagatgatgaaatggagaagctgtacaaatcattagagcaagctagtctatctcctcttggggaccgacgaccttcgactaaaaaggagttgagaaaatcctttgttaagcggtgtaaaaatccatctataaacgagaaactccacaaaatccgaacattgaatagcacattaaagtgtaaagaacatgatctggccatgattaaccagttgctggatgacccgaagctgacagccaggaaatacagagagtggaaagtcatgaacaccctgctgatccaggacatctatcagcagcagcgggcttcgcctgcccctgatgacactgatgacaccccccaggaactcaagaaatcaccttcttctccctctgttgaaaattccatttgagacaaagtcagggttttctcctcttatattttatcacaagcaactcttcaagatgttgcaaaagcttacatttttccttaaaaggaaaactgaaacccagtccttcaagcatcagcttcccatctaaagatgcacgttagatgaagataatcaccgaatacaccagggctcctcatttcagtcgtaacgcatccattgagattggaatgattgagttcagttgaaaggcgttttttgtgttcctactgggagctcacggtgatgtggggctctaggggggatgtgagaaatgtctcttctgttcattgctctccagagaatgctatggacaagaatcaaattttaccaggagtaattgcccatggaaacattctgtttttcaaaagaagaatgtacatattccacttgactgggaagctgtgtggcccaaatcactgtttgagtggaggaatgttttctagagcagtgactggaaggacaaacgtggtgttgcagaacaaaaattccttgcctttggtatggaatggtggtgccttttccatgtgatgagaaatgcttcatagacagtggcatgtgggagagctgaaggaggaggcgtgttccatattccactcattcaaaggacagcttggtgttttcacactttatgcaggttaggggatctgattaatgtttcctttccttacaacagctagagaaaacatctcatcacaattggagacctctacttcctttgagctttcctactcaatggtaggagataggaatatgttccgcaaagaatgtctactgctcttgtccttggctgtgatccctatacatagtgtgaatttatatccaggtttcccaggatcaatattgacaagacgactttggcatctgaattgttttaatatctttactcaaaaaaacaaaaaaacaaaaacccatggaagcaacaaaagagttaaacatgagggatttatttttgtatgtttatatgtcacttgtgtgctatgtgaatagctatgtttgttatttaaatatatttatagaagttcaaattactagtgtttaaaagatgatatactattatatattgtgcttagtatatatttgatgagtctatactttttgcttgagaaaaatagaaatactattgattcactggtgttatgatgttgcactgtgtctgaggaatgctcaggaaatcttgtgggaaaaaaatggggcatgcattcataatttttcattttcttccccaccccaacccccatgagctcttaaatttagatttctatctcttgtaagtcactcttttaaccagcaaaggactttcatcttagattatcctttctattaaataaactttaagctttgtgccatttatgcctgcaaaccttagaccaaaggcaacacaactaatgtcatcttttcattaaagactaatagaaatttagaaatcattgtgttaaagagagctatagagaaacaatatgaaagtcttcccttactaatcaccatgaatatttctcaccataggaataaccacaacccaccaagtacccatgttggccctgcctacccgtaacaaattgttcacacaacctattttgttttatagcttcaaagtgtggcttgacattcaaatggaaggaaccacctgaattatatctgcaaacaaaatggaaatagttgttgaatagttccccaagctttactaagaagccttaatactctgtaaacaaacaaacaaacaaaaaacaaccttagcatt

SEQ ID NO: 30156 - DNA, 9646 bp, Homo Sapiens
tcgcccgccgcgcgcgccggtccggcagcgcacgggttaaggctggcaccgcgcccggcgggagggggggcgcccacctcccctcctccccgcgccgggcatgcggggcccagtgggcaccgaggaggagctgccgcggctgttcgccgaggagatggagaatgaggacgagatgtcagaagaagaagatggtggtcttgaagccttcgatgactttttccctgtggagcccgtgagccttcctaagaagaagaaacccaagaagctcaaggaaaacaagtgtaaagggaagcggaagaagaaagaggggagcaatgatgagctatcagagaatgaagaggatctggaagagaagtcggagagtgaaggcagtgactactccccgaataaaaagaagaagaagaaactcaaggacaagaaggagaaaaaagccaagcgaaaaaagaaggatgaggatgaggatgataatgatgatggatgcttaaaggagcccaagtcctcggggcagctcatggccgagtggggcctggacgacgtggactacctgttctcggaggaggattaccacacgctgaccaactacaaggccttcagccagttcctcaggccactcattgccaagaagaacccgaagatccccatgtccaaaatgatgaccgtcctgggtgccaagtggcgggagttcagcgccaacaaccccttcaagggcagctccgcggcagcagcggcggcggcggtggctgcggctgtagagacggtcaccatctcccctccgctagccgtcagccccccgcaggtgccccagcctgtgcctatccgcaaggccaagaccaaggagggcaaagggcctggagtgaggaagaagatcaaaggctccaaagatgggaagaaaaagggcaaagggaaaaagacggccgggctcaagttccgcttcggggggatcagcaacaagaggaagaaaggctcctcgagtgaagaagatgagagggaggagtcggacttcgacagcgccagcatccacagtgcctccgtgcgctccgaatgctctgcagccctgggcaagaagagcaagaggaggcgcaagaagaagaggattgatgatggtgacggctatgagacagaccaccaggattactgtgaggtgtgccagcagggtggggagatcatcctgtgcgacacctgcccgagggcctaccatctcgtatgcctggacccagagctggagaaggctcccgagggcaagtggagctgcccccactgtgagaaggaggggatccagtgggagccgaaggacgacgacgatgaagaggaggagggcggctgcgaggaggaggaggacgaccacatggagttctgccgcgtgtgcaaggacgggggcgagctgctctgctgcgacgcctgcccctcctcctaccacctgcattgcctcaacccgccgctgcccgagatcccaaacggtgaatggctctgcccgcgctgtacttgccccccactgaagggcaaagtccagcggattctacactggaggtggacggagccccctgcccccttcatggtggggctgccggggcctgacgtggagcccagcctccctccacctaagcccctggagggcatccctgagagagagttctttgtcaagtgggcagggctgtcctactggcattgctcctgggtgaaggagctacagctggagctgtaccacacggtgatgtatcgcaactaccaaagaaagaacgacatggatgagccgcccccctttgactacggctctggggatgaagacggcaagagcgagaagaggaagaacaaggaccccctctatgccaagatggaggagcgcttctaccgctatggcatcaagccagagtggatgatgattcaccgaatcctgaaccatagctttgacaagaagggggatgtgcactacctgatcaagtggaaagacctgccctacgaccagtgcacctgggagatcgatgacatcgacatcccctactacgacaacctcaagcaggcctactggggccacagggagctgatgctgggagaagacaccaggctgcccaagaggctgctcaagaagggcaagaagctgagggacgacaagcaggagaagccgccggacacgcccattgtggaccccacggtcaagttcgacaagcagccatggtacatcgactccacaggcggcacactgcacccgtaccagctggagggcctcaactggctgcgcttctcttgggcccagggcactgacaccatcctggccgatgagatgggtctgggcaagacggtgcagaccatcgtgttcctttactccctctacaaggagggccactccaaagggccctacctggttagcgcgcccctctccaccatcatcaactgggaacgcgagtttgagatgtgggcgcccgacttctacgtggtcacctacacgggggacaaggagagccgctcggtgattcgggagaacgagttttcctttgaggacaacgccattcggagtgggaagaaggtattccgtatgaagaaagaagtgcagatcaaattccacgtgctgctcacctcctatgagctcatcaccattgaccaggccatcctgggctccatcgagtgggcctgcctggtggtagatgaggcccaccgcctcaagaacaaccagtccaagttttttagggtcttaaacagctacaagattgattacaagctgctgctgacagggaccccccttcagaacaacctggaggagctgttccatctcctcaacttcctgactccagagaggttcaacaacctggagggcttcctggaggagtttgctgacatctccaaggaagaccagatcaagaagctgcatgacctgctggggccgcacatgctcaggcggctcaaggctgacgtgttcaagaacatgccggccaagaccgagctcattgtccgggtggagctgagccagatgcagaagaagtactacaagttcatcctcacacggaactttgaggcactgaactccaaggggggcgggaaccaagtatcgctgctcaacatcatgatggacctgaaaaagtgctgcaaccacccctacctcttccctgtggctgccgtggaggcccctgtcttgcccaatggctcctacgatggaagctccctggtcaagtcttcagggaagctcatgctgctacagaagatgctgaagaaactgcgggatgaggggcaccgtgtgctcatcttctcccagatgaccaagatgctggacctcctggaggacttcctggagtacgaaggctacaagtatgagcggattgatggtggcatcaccgggggcctccggcaggaggcaatcgacagattcaatgcccccggggcccagcagttctgcttcctcctctcaacccgggcaggtggtctgggcatcaacctggccacggcggacactgtcatcatctacgactcggactggaacccgcacaatgacatccaggccttcagccgcgcccaccgcatcggccagaacaagaaggtgatgatctaccgcttcgtgactcgggcctcggtggaggagcgcatcacgcaggtggccaagcgcaagatgatgctcacccacctggtggtgcggcccggcctcggctccaagtcggggtccatgaccaagcaggagctggacgacatcctcaagttcggcacggaggaactcttcaaggacgacgtggagggcatgatgtctcagggccagaggccggtcacacccatccctgatgtccagtcctccaaaggggggaacttggccgccagtgcaaagaagaagcacggtagcaccccgccaggtgacaacaaggacgtggaggacagcagtgtgatccactatgacgatgcggccatctccaagctgctggaccggaaccaggacgctacagatgacacggagctacagaacatgaacgagtacctgagctccttcaaggtggcgcagtacgtggtgcgcgaggaggacggcgtggaggaggtggagcgggaaatcatcaagcaggaggagaacgtggaccccgactactgggagaagctgctgcggcaccactatgagcagcagcaggaggacctggcccgcaacctgggcaagggcaagcgcatccgcaagcaggtcaactacaacgatgcctcccaggaggaccaggagtggcaggatgagctctctgataaccagtcagaatattccattggctctgaggatgaggatgaggactttgaagagaggccggaagggcagagtggacgacgacaatcccggaggcagctgaagagtgacagggacaagcccctgcccccgcttctcgcccgagttggtggcaacatcgaggtgctgggcttcaatgcccgacagcggaaggcctttctgaacgccatcatgcgctggggcatgcccccgcaggacgccttcaactcccactggctggtgcgggaccttcgagggaagagcgagaaggagtttagagcctatgtgtccctcttcatgcggcacctgtgtgagccgggggcggatggtgcagagaccttcgcagacggcgtgccccgggagggcctctccaggcagcacgtgctgacccgcatcggggtcatgtcactagttaggaagaaggttcaggagtttgagcatgtcaacgggaagtacagcaccccagacttgatccctgaggggcccgaggggaagaagtcgggcgaggtgatctcctcggaccccaacacaccagtgcccgccagccctgcccacctcctgccagccccgctgggcctgccagacaaaatggaagcccagctgggctacatggatgagaaagaccccggggcacagaagccaaggcagcccctggaagtccaggcccttccagccgccttggatagagtggagagtgaggacaagcacgagagcccagccagcaaggagagagcccgagaggagcggccagaggagacggagaaggccccgccctccccggagcagctgccgagagaggaggtgcttcctgagaaggagaagatcctggacaagctggagctgagcttgatccacagcagaggggacagttccgaactcaggccagatgacaccaaggctgaggagaaggagcccattgaaacacagcaaaatggtgacaaagaggaagatgacgaggggaagaaggaggacaagaaggggaaattcaagttcatgttcaacatcgcggacgggggcttcacggagttgcacacgctgtggcagaacgaggagcgggctgctgtatcctctgggaaaatctacgacatctggcaccggcgccatgactactggctgctggcgggcatcgtgacgcacggctacgcccgctggcaggacatccagaatgacccacggtacatgatcctcaacgagcccttcaagtctgaggtccacaagggcaactacctggagatgaagaacaagttcctggcccgcaggtttaagctgctggagcaggcgttggtcattgaggagcagctccggagggccgcgtacctgaacatgacgcaggaccccaaccaccccgccatggccctcaacgcccgcctggctgaagtggagtgcctcgccgagagccaccagcacctgtccaaggagtcccttgctgggaacaagcctgccaatgccgtcctgcacaaggtcctgaaccagctggaggagctgctgagcgacatgaaggccgacgtgacccggctgccatccatgctgtcccgcatccccccggtggccgcccggctgcagatgtcggagcgcagcatcctgagccgcctgaccaaccgcgccggggaccccaccatccagcagggcgctttcggctcctcccagatgtacagcaacaactttgggcccaacttccggggccctggaccgggagggattgtcaactacaaccagatgcccctggggccctatgtgaccgatatctagccgtcctcgagacttccctgtgttgcagcgctcatttccagctgagccacgcctgccgggccacctgcccgacccacatgggagagaaaagctgccacctttttaggagccagcgccaccttgggacaaaaagggaaacctagtaatgccatcacatggaggacgaggcccagctcagctgggccagagcccagaagtgccacctcatcataattcaagtgttcttccacacagcgttgcccccacaaccacgccggacgtgccccctcgccaccttttccagacgacttcttagaagagatttcatttatttgtacatcttttgcactttcctattgaagacttgaacacgtttgtcttgataaaagttggatgacgtatggaagattcgaacctgcagcactgatgtctctttaccgatgggttccagacccaaggtagtcctggcactgccctgtggactcagcccagctggggaggacatggcgcccggtgccctaggagccctcagtgtcccctacctgacctgtctgcacctgtgtgacagccccttctgatttggccccctgcccgcttggagcctcccagcaccagacagggcaggtttggggagccgctgtcgagccctatggtgagaccctggctgacatttcccctccttcctgccaaggctggaggccgccaggtgtttgctctctccttgtggggaggtggatcctctgccagcaggtgtctgtccccggcccagcgcatcttgaaggccctggactctgttaccagtggggggcctgtggccccggctcttcacagcaggcagaagcgtatgatcccagggagggtgggctgggggggggccagcacttgcctcggagccactgctgcgttgggtttgccttctgccagaggtgtggttaagggcagtgatagctgcgccccagcaaggagggtcatgggccctgagctggcccaggagaccctggccctgccctgtgccctgggatgcctaccctgcccacctccggaggtggaaccgggctgcccctgggggcctggacttgtcccattcccctgtccctggaaaggccttcccgggggctttttgcctgaggctgcactcttggaaggtgtggggagagttctgcctggagggggactggacccagtgccctctgcagacccctcccagccgcagcaccaagggcttgctgccttgtttcctgccaggagcgccctgacatcccaaaaccatcttcccacatgtgggttgttggaatcccacccactcccccggaccctgcccctccaagttggggacggagatggggagcaggtcaggccctccctaggcctgtttgtgtgtgatccttctcctggccccaggtcgacctggaaggcgtttctgagtcttgtactgggaccttcccagggaaggtgccttggggtgcagaatcctgggaatgttaggaaagggctgcgtgaaaaacccagctgggcctggggtggaggtgcacacgggctggggctcagctccttggagagggcctgcctgggactgagggggccagggctgggtcaggattcaccagcttgtgttgcagacactggagcaattgcctggccctccctaagccctatatgcctcactcataatgaggctgtctctgaaccccggagggcgggacctacaagtccttcctcttggcgcattcccacactccagtctggatccaggtctgcaaggccagcccgaccctgacactgcacgtgggcgtagtggggagcaccctggagtggagatgattgtcagcgggctcacatgttatggttcatccacatgcgtgttgtgtgctctgcggtgcctcctggcaaagggtcctggctcgggtcagaagctcactcccgtgccctcgtccccaaacaagcagtggcaagcactggggttggccctcgttgggagcagtgcccaccttccttggcccacagcagataggtcccgagcagcaggactggaggcctgtggcggtcagggcaggggtctgtgtctccaccccaagggctgatggtccctcccctgtgcgccttcctctcaggcaggcttgctctgtcccttcctctctgcttccctcccaggcctcgccagggctcccttctcctctgcctggttagactcgggcacccaggaaagcctggccagggctcctttgggcctgggccccctgcactgcctggtccagaaggggtggtgctgtccgtggccagcaccccggggcccgggaggggtgggctactagagtcagagcgggtttggggctgaccagtttgggagaggagaaaagatctgagaatgtccttcttggtttgtcagtcatctctgccaaaagtggtgatggtggtgtccgtatgtttggcgtctttgggctgggtttggtttttgctgctggtagaatcagggtcctcgggcatgaacgcgagcccaaagtgccagtctgcgattggaaatttccagccactttaagccagtgctgagtagggcttctgcagagccatgtttgagccaaggtcttggaaggcattgccccatgggctcaggtgactcggggtggagtgagcacgtctgcagggccctctcatacacgcctgaggcagaagcagcgtcccccgtgaaagccaccttccgaagctcctgcgttttttgcaaacttggcttcccccaggggcaggctggactttccctgccccctatgattgaagtcctcctgcttttgggggctgccttcccagagtcccccgggtgctcccctgccgaggtcaggagctgaccaagccttggcccggtgacacctgcagccctcactcctgtcatcccaggacacttgaggcccaaggaggtggagtggagagtgggctcgggtacatgggagccagaagccagatggacttggtcaagtgttggtcacttggagcctccagtgtgcgtcagggtctgtgggcaggggacagggcgtgggtgggggccgaggctggcacgcccctctgccctcaccgtcttggtgacctggcctcggcccctcccccaagtctcttctgtgcaaggcccgcctcggcctcggcagctggttcctgtcccgttttctgtgtctgaaagtttacaggttgtggtgcatcagcccaaactcactggcgttgtgttttttttttctttaattttcagattttttttttaaacaaagtatttttttaggtgcgataacccagaaagggcccgttgggtgtgtgtgtgtgtcctgaactcctcaagcagcgattggagcccaagcacccctggagaggaagggagggtccccactggcccgtggggtctgagttcaggggtgtggagggagcagactccaccggcccaggcccagctaagagggggccgacccctttccccaggcacagccccaggctggcaaagggagggccctgggctgggtgcagggcgcgccaggagtcccagccagggtggccccggcgggggcgggtccagctttggaagccaggctcccctgtgagccgtggcttgtctggtcttcgcccacgggaggctggacagaggctgtagccaacacaatcacctttactttgtactctgtgtgtatgttttggttttctgtgttttaataaatcctttgggaaagg

SEQ ID NO: 30157 - DNA, 7703 bp, Homo Sapiens
attacagggtgtcctcttccgccgccagaagccggaagttgtgtcccggacgtgtcaaccggggtctgagtgctcagagtacagctgcaaccgcgaccatgggcgggaagaacaagcagcgaactaaagggaacctgaggccttcaaacagtggccgagctgcagaactccttgccaaagaacagggaacagtgcctggatttattggttttggaacatctcagagtgacctaggctatgttcctgctattcaaggagctgaagaaattgacagtcttgtagattctgatttccgaatggtgctgcggaaactttcaaagaaagatgtcaccacaaaattaaaagctatgcaggaatttggaaccatgtgtacagagagagacacagaaactgtgaaaggagttcttccatattggccaagaattttttgcaaaatttcacttgatcatgaccgtcgcgtccgagaagccacacaacaagcttttgaaaaacttatccttaaagtaaagaaacagttggctccctacttaaaaagtttaatgggatattggctaatggctcagtgtgatacttacacaccagctgcgtttgcagcaaaagatgcatttgaagcggcttttcctccaagcaagcaacctgaagccatagcattttgtaaggatgaaattacaagtgtgctgcaggatcatcttataaaagaaacacctgatacactcagtgacccgcaaactgttccagaggaagaaagagaagctaaattctaccgggttgtaacttgttccttattggcattaaagagattactttgccttttacctgataatgagcttgattctctggaggagaaatttaagtctcttttatcacagaataagttttggaagtatggaaaacacagtgtacctcagattcgctcagcttattttgagttagtctctgcattgtgccagcgcattccacagttgatgaaagaggaagcatccaaagtgagcccatcagttctacttagcattgatgacagtgacccaattgtctgcccagctctctgggaagctgtactctatacacttacaactattgaggactgttggcttcatgtaaatgcaaaaaagagtgtgtttcccaagctatcaactgtgattcgtgaaggtggtcggggtctagctactgtcatatatccttaccttctgccattcatcagcaagctccctcagtccatcacaaatccaaagttggatttcttcaaaaatttcctcacgtctctagttgctgggctgtcaacagagagaactaaaaccagctctttagagtcctcggcagtaatatctgctttttttgaatgcttacgttttataatgcagcaaaacttaggtgaggaagagattgaacagatgctcgtcaatgatcagttgatcccttttattgatgcagttctcaaagacccaggattgcaacatgggcagctatttaaccatttagcagaaactctaagttcctgggaagccaaagcagacacggaaaaagatgaaaaaacagctcacaacttggagaacgtactgatacatttctgggaaagactgtcagagatctgtgttgcgaaaatcagtgagccagaagctgatgttgagtccgttttgggtgtatctaacctattacaggtgcttcagaagccgaagagctcattgaagtcaagtaaaaaaaaaaatggtaaggttagatttgctgatgagatacttgaaagcaataaagagaatgaaaaatgtgtatcttcagaaggagagaagattgaaggctgggaattaacaactgaaccttctctcactcataattcttcaggccttttgtctcctctaaggaaaaaacctttggaagacttagtctgtaaactcgcagatataagtattaattatgtcaatgaacgaaagtcagagcaacatctaaggtttctttctactctgcttgactccttttcttcaagccgagtatttaaaatgctacttggtgatgaaaaacagagtattgtccaagccaaacctcttgaaatagccaagcttgtacaaaaaaatcctgcggtgcagtttttataccagaaactgataggttggctaaatgaagatcaaaggaaggattttggtttcctggtggacattttgtacagtgctctccggtgctgtgacaatgatatggaaagaaaaaaagtcttggatgatctaaccaaggtggacttgaaatggaattctcttcttaagattattgaaaaggcatgtcctagttcagataaacatgctttagtaactccttggctcaaaggcgatatccttggtgagaaattggtcaacttggcagattgtctttgtaatgaggacttggaatccagggtatcttcagaatctcacttctcagaaagatggactcttctaagcttggtattatcccaacatgttaaaaatgattacttgattggagacgtatatgttgaaagaatcattgttagacttcatgaaactttattcaaaacaaagaaattatcagaagctgaaagcagtgactcatcagtgtcttttatctgtgatgtggcctataactatttcagctcagcgaaaggatgcttgctaatgccatcatctgaagatttattattaactctctttcagttatgtgctcagagcaaagaaaaaacacatttgccagattttcttatctgtaaactgaaaaatacttggctctctggtgtaaatttattggttcatcaaactgacagttcatataaagagagtaccttcctacatttgtctgctctgtggctgaagaaccaagttcaggcttcatctttggatatcaacagtctccaagtcctcttgtctgctgttgatgatttgctaaatacacttctagagagtgaagattcttatcttatgggagtttatattggaagtgtaatgccgaacgacagtgaatgggaaaagatgaggcagtctcttcctatgcagtggttacatagacctcttttagagggaagattgagtttgaattatgaatgtttcaaaacagattttaaggaacaggacataaagacacttcccagccatttgtgtacttcagcattattgagcaaaatggtcttaattgcactgagaaaggaaacagtcttagaaaataatgagcttgagaaaataattgcagaactgctttattcactgcagtggtgtgaagaattagataacccacctatttttctaattggattttgtgaaatacttcaaaaaatgaatattacgtatgataacttacgtgtacttggtaatacgtcgggccttttgcagctgttatttaacaggtccagagaacatggcacactgtggtctcttattattgctaagttgatcctttcccgaagcatttcatctgatgaagtaaaaccacattataagagaaaagaaagtttttttccactaactgaaggcaatttgcataccattcaaagtctatgtccatttttgtcaaaagaagaaaagaaagaatttagtgctcaatgtatacctgctcttttgggctggactaagaaagatctttgcagcactaatggaggttttggacatcttgccattttcaattcttgtctgcaaaccaaaagtatagatgatggagagctattacatggaatattaaaaatcataatatcctggaagaaagagcatgaagatatttttcttttcagttgtaatctatcagaagcaagtccagaggtactgggtgtaaatatagaaataatccggtttctttccctatttctgaaatactgctcatcccctttggcagagagtgagtgggacttcatcatgtgctccatgttggcttggttggagacaacaagtgagaatcaggcattgtattctattccacttgtgcaactgtttgcctgtgtcagctgtgatttggcctgtgacctcagtgctttctttgattccacaactctggataccattggcaatcttcctgtaaatctaatcagtgaatggaaagaatttttttcccaaggcatccacagtttgcttttacctattttggtgactgttacaggagaaaacaaagatgtgtctgaaacatcctttcagaatgcaatgctgaaacccatgtgtgaaacattaacgtatatctcaaaggaacagctattgagtcacaaacttcctgcaagattagttgctgaccaaaaaacaaacttaccagaatatctccagactttgttaaatacattggccccattactcctcttcagagctaggcctgtgcaaattgctgtttatcatatgctatacaaattgatgcctgaattaccacagtatgatcaggataatctaaagtcatacggagatgaagaagaagagccagccttgtcaccaccagcagcactgatgtctcttcttagcattcaagaggacttactagaaaatgttttggggtgtattcctgttggacagatagttactattaaaccactgagtgaagacttctgttatgttctgggataccttctcacttggaaattaatactaactttcttcaaagctgcatcatcacagcttcgggctttgtattccatgtatcttcggaaaacaaagagtttgaataaattgctctatcacctgttcaggcttatgccagaaaatccaacctatgcagagacagcagttgaggtcccaaataaggaccctaaaacattctttactgaggagctccagctgagtattagagaaacaacaatgcttccataccacattccacacttggcttgttcagtctatcatatgacattaaaagacttgcctgccatggttaggttgtggtggaatagcagtgagaagcgtgttttcaatattgtggatagatttacaagcaagtatgtcagcagtgttctttcttttcaagaaatatcttctgtacaaacaagtacacaactatttaatggcatgacggttaaagctcgagctactactcgagaggtaatggctacttatactattgaggacatagttattgaacttataatacaactgccttcaaattatccactgggttcaataatagtagaaagtgggaaaagagtaggagtagctgttcagcagtggcggaactggatgctgcagttaagcacttacctcacccatcagaatggaagtattatggaaggcttagctttatggaaaaataacgtagacaaacgttttgagggtgttgaagattgcatgatctgtttctcagtcattcacggtttcaactattcccttcccaaaaaagcctgtagaacatgcaagaaaaaattccattcagcctgcttgtacaaatggtttacatctagcaacaaatccacttgtccactgtgtcgtgagacgtttttctgagatttttttcactggaagggatccctgaagtacatcaaacaaaggcattggatttggatccgtctgaaagtgtggatgtggggaagccagtgagcattacttttaaataggaccttctctggaaaattattttggttaatgtaataatcctaaaatcaggtttacttaactttagattgctttgtaaatgtttggaaactttcttttacaaaagaatattacatatttgagagaaaatatttctattaatggtttaatttctttgtatatttaaaaataaatatgaaaaacccctaaattacagaattggaatttgtgaaaagattgcacaactatattattgataaacccattccgtttgttgatctgtgttttagaatagtccaagtgaagcaaaacgaactgagagagctgatttacatctatagatattttaagccttatttattagttatgacaataaattagtattctgatatttgtagattattttaatgataaaaatgacactaagctattaatacggcttgtcttaagatatctggaggcatgctctgaaatcctatataaaagagtttaaactgaactttaaggtgcctccatttatcaagggttatgaaactcagaaaattaaattcttgatgctgacctttttgcttgtgggagaattatttctatatattagtgaaatttgaattgtaaacttgtcagtgaatttatcactctgagcgagtctctagagggtgagaatttgagagaaatagtaatttgattatttcattcatgaagcggagtggtagttatccttctattgagagggaagaaataaatgagtattactgaaacttaaagatcagtggaaaaaaaaaacatttaaaaatgttgtaggagactttcaattttggaagcaaactgagctattcttaccagccaaagttatactaaataagagacttgggggagcaaatgtttttcagccttcagaaatgaaagttaaggattttagcactaggtaaaattcagtataataggctgaagtggagtaagtgaaaacctgccttttgccactcttaaaaattgtgcccaaaatataaaagtgtggaactttagaacttggaataattttattgcagtcttccattacatggaaatagcatatctaatatctaggttacttgagagaccagctaatcatctctgttgcacatgtttaattggcaaaaagcaattcatgataaataaaattactgctttccatctactgggtaaaatgactattgaaatagtatgaatgtggtcagaggattatagttgagagtgaagtactatgtgtgagttatagatctctcgaattatatttatagatgcagtgtcctgcccagttttgtttgcctcctacattttactgtaaaatatttattgtcttctagccttgagcctctgagggtcagtaagtgaagtacagatagcaaaattttactacctcgttaacccttttcttaaaatattctctatctttctatgtctctttctgacatagtaatcccaaaggattgtgttactccccgtgaaagttattacttttcctttaaaaatggttttataataagactgtttaaaacctttccagtattggtacatcttggcttctggcccaaaccccaagcagaaaagaaaatggaataatggagcattgtttttccacattagtattagggcatcagattcttggtgaaacactataattaagtagttataattaaataactgttcttcatacttaggactcttaatacatttctttaagacttgtaagtataattgtaaagcttgttaactgtttatatactaaagaaaaagctttacaagataagactgaaattcagaataccacatctgtacagcgttgacaactctaactaaaaggattacagcccttaaaattttagcttaaggacattttaaaattgcatgagattagcaaaattattaatttaaaaccccaaagtaaattgcaaattttaaaatttatttttgactcttttatcacatgctccaatgtatgtacataagtgtctgtggcttaaataatatgttgttatttgatacatttttgtggtgcaagtaattaatgttattatttgattgttataccatatgtgcccattaaaattctttttaattaaaaatatttcaaatatgcagaaaaataataatataaatgcccttgtacccttcacatactattttgccatatttgcttctgatttttaaataaataaaatgttactcttttgtacttct

SEQ ID NO: 30158 - DNA, 2563 bp, Homo Sapiens
tgagaaggaaagaacggccgctatagccctatcggctgctacaacaccaaaacgcatccacctaactggctgacgctacaccttggtctttccgggtccttgcacgcttcgctccaactcctgcagagctgagccggaggggaatccggaagggacacgctgaacaggaacagaaatgaataaaagtcgctggcagagtagaagacgacatgggagaagaagccaccagcagaacccttggttcagactccgtgattctgaagacaggtctgactcccgggcagcacagcccgctcacgattccggccacggtgatgacgagtctccgtcaacctcgtctggcacagctgggacctcctctgtgccagagctacctgggttttactttgaccctgaaaagaaacgctacttccgcttgctccctggacataacaactgcaaccccctgacgaaagagagcatccggcagaaggagatggagagcaagagactgcggctgctccaggaagaagacagacggaaaaagattgccaggatgggatttaatgcatcttccatgctacgaaaaagccagctgggttttctcaacgtcaccaattactgccatttagcccacgagctgcgtctcagctgcatggagaggaaaaaggtccagattcgaagcatggatccctccgccttggcaagcgaccgatttaacctcatactggcagataccaacagtgaccggctcttcacagtgaacgatgttaaagttggaggctccaagtatggtatcatcaacctgcaaagtctgaagacccctacgctcaaggtgttcatgcacgaaaacctctacttcaccaaccggaaggtgaattcggtgtgctgggcctcgctgaatcacttggattcccacattctgctatgcctcatgggactcgcagagactccaggctgtgccaccctgctcccagcatcactgttcgtcaatagtcacccaggaatagaccggcctggcatgctctgcagtttccggatccctggtgcctggtcctgtgcctggtccctgaatatccaagcaaataactgcttcagtacaggcttgtctcggcgggtcctgttgaccaacgtggtgacgggacaccggcagtcctttgggaccaacagtgatgtcttggcccagcagtttgctctcatggctcctctgctgtttaatggctgccgctctggggaaatctttgccattgatctgcgttgtggaaatcaaggcaagggatggaaggccacccgcctgtttcatgattcagcagtgacctctgtgcggatcctccaagatgagcaatacctgatggcttcagacatggctggaaagatcaagctgtgggacctgaggaccacgaagtgcgtaaggcagtacgaaggccacgtgaatgagtacgcctacctgcccctgcatgtgcacgaggaagaaggaatcctggtggcagtgggccaggactgctacacgagaatctggagcctccacgatgcccgcctactgagaaccataccctccccgtaccctgcctccaaggccgacattcccagtgtggccttctcgtcgcggctggggggctcccggggcgcgccggggctgctcatggctgtcgggcaggacctttactgttactcctacagctaattctgcagggcacagcccagagccatgtggatttgacttacgggagtaaagcgtaactttttactgcatctaatgagggtgttttaagtgacactcagtgtacacagatcccatcctctggctgctaggagagaagtgctgaatgttccgtgtggagatgctcaggaaagttatttgagttaaattgctggctgagagagcttggaagtccttttcataaaaggtacctctttccttttcttattgaattcttagaacttagttaaccctccctgccttttcttaacaaaaaggacttttctaaggactgaagattggcaaaaacgaaaagcttcttcctccaagagcccattgaagaagcccagtgatgagacggtgagatggtttgagtcctcggtgcctgggtagcaggaagaaagacctgcatcctgcatctgtacttggggaagccagcggagaggacggggaggttacttctctaagtttctgcagaaatattgaaggctggagtttggaatccttaaacttggccttctcaaactcagcagcagatctccgggattctgctgttattatccaaaggcgttggaaggaaagatggatcttcttacatgctagaagttttaaacggtccttaacatgcctttgttcaagcaccttccagaatgtaaggttcagcagctctggtttctattacggtgacttgaatgtcagattcaagggcccggcgtcaaaggaaattggttttgactttttgtaatctaggagcgacagttcgtgagatgtttattcagtgttaaagagcctgtttttctaccaaacaataaaaccaagagaagaatcaaaaaaaaaaaaaaaaaaaaaaaaaaaaaaaaaaaaaaaaaaaaaaaaaaaaaaaaa

SEQ ID NO: 30159 - DNA, 4596 bp, Homo Sapiens
gcggagcctaggagtcagataccgcgagaagtagtctcccgaagaggttcggacaagcgcaggcgcactacaattcccgccctggccgcgaaggtggcacccgcagcgggaggcggggccgggccttcgggacaaagatcgcgagatttaatggcgagtcacagctacttcttcctggcagagaccggaagtgcggtccgcggagcgtctctggcgcttaccctgctttgggcctgcgttgctgctgctgctcctccgctcccccgtcgtatcgcctgccctggatcgaagtgatgggggatgccaaggaggccggagccgagggtccgccggccggggccgccgctcgaggagggctcagcctcctgtcccagggagaatccgaggaatcttctgcacagggatcagctttatttcttggaggcaatgaagtgaagagccgagctgtggtgaaatactcttctgcccctcctcgaacagcatttgcacgccttgaagagaaaacagacttgaaactcccacctgccaactggttacgagagagtgccaaactagggccagcaggaactaccattcttggcaacagcaagaaaagcaagccattttcaagctttggcatggcatatgactttattgattcagtgggaaatgatgtggatgttgtctctgactctgaaaacataaaaaaactcctgaaaattccctacagcaagtcgcacgtgagcatggcagtacaccgcataggaaggactctcttactagatgagctagatattcaagaactctttatgagatcgtctcagactggtgactggacatggttgaaagagttttatcaaagactcattgatcagaagtggcagaggaagaaaaagagcaaagagcactggtatcaaaaggcaattctttccaagtttttatattacagtatcaatggtgatggagccgctcagcctgtctcatccaccgcagaacagcaggaatcgtccagttcagatcagacaaatgattcggaaggggcttcatggcctgctcccttcgaaatgccttcttcagtttctgaagatcccagtgcttccagtcagggtcttaaaaatgattttgttcggaatattctatggacatttgaagatatccatatgttggtcggctccaacatgcccatatttggaggaggcagatacccagcagtcagcttacgtctcagggataacaacaaaccaattaatgtgctaactggaattgactattggttggacaacttgatatgcaatgtgccagagcttgtgatgtgttttcatgtaaatggaattgtacagaaatatgaaatgataaagacagaagaaattcccaatttggaaaattctaatttttctactaaagtcataaaagacattgcacagaatattttatcatttttgaaatctaattgtaccaaagaaggacatacctattggctctttaaagcaagtggcagcgatatagtgaagctctatgacctcactactctttgtgaagaaactgaagacaaataccaaaatccattcacaatgccggtagccattctcttgtacaaggttgcttgcaacatgatgatgaagaagaatcaaaataagaaacactatggaactattagaacattgcttcttaattgtctgaaattactggacaaaagtaggcatcctcaaattattgcttccgccaattacatgctttcagaactttttcaattggatgaacctaaaaaggaagaaaattcagaatctcctttaaatgagaattctgatgaaagttatagtgaagaggaggaagagatgcccgacagtgatgaaaatggatcctatagcaccagctctgatccatcagatgatagcaaagcagtagctataatcaagtctgttggagaactatcagtaccagaaaaatacaaatctattcatcaaatcagacccagttgtgcatttccagtttgccatgacacagaagagcgctgtagacttgtgcttagctatgttctagagggtttaaaatctgtcgatagcagcatcaaaaaagaaagcgaccttccagcagctgaccccagcactccaatcccgttaaaatatgaagatgaatcctcaagagggggtcccgaggggctagagaagcagatggccttgtttttggacaaaatgggctcccttcagaagggcaattattccagtcaatctggaatgatccctggctcttggcaacataaaatgaaacttcagctgattctcaagtcatcaaaggcctattatgttttgtccgatgctgccatgagtcttcagaaatacggaagagcattacgatacattaaattagctttgcaaagccatgatacttattgctgcctctgcaccaatatgctttccgaagtgctgttgtttctctctcaatatttgacactttgtggtgatatccaactaatgctggcccagaatgcaaataatagagcagcacaccttgaagagtttcattaccaaacaaaagaagaccaggagatcctgcatagccttcacagagagtccagttgccaaggatttgcatgggcaactgatttgtctacagacttagaaagtcaactctctgttagttgtaaatgttatgaggctgctaatgaaatcttgcagtttagtgacttgaaaagccaaaatccagaacactatgtacaagtattaaagagaatgggtaacattagaaatgaaattggtgtgttttacatgaatcaggctgctgcattacagagtgagagactagtgagcaaatctgtgtctgctgccgagcaacagttgtggaaaaaaagcttttcttgttttgaaaagggaattcacaactttgaatcaattgaggatgccaccaatgccgcccttttattatgtaacacgggaaggctcatgcggatttgtgcgcaggcccactgtggtgcaggggatgaactgaaacgtgaattttcaccagaagaaggcttgtattataataaggctattgattactatttgaaagcgctaaggtcattgggaacacgagacatacacccagctgtttgggattcagtgaactgggaattgtccactacttactttactatggcaactctacagcaagattatgctccgttatctagaaaagctcaggagcagattgagaaagaagtcagtgaggccatgatgaagtccctaaaatactgcgatgtggattcagtgtctgctcgacagcccctttgtcagtatcgagctgcaaccatccatcacaggctggcctccatgtaccacagctgtctgaggaatcaggttggtgatgaacaccttaggaaacaacaccgggtgctggcagatcttcattacagcaaggccgcaaagctgtttcagctgctgaaagatgctccctgcgaactgcttagagtacagctagagagagtagcatttgctgaatttcagatgaccagtcagaatagcaatgttggaaagttgaaaacactatctggggctcttgatataatggtgagaactgagcacgcattccagcttatccagaaggagcttatagaagaatttggccagcctaagagtggtgacgccgctgcagctgctgatgcttctcctagtctcaatcgagaagaagtgatgaaactcctcagtatatttgagtctcggttgtcatttcttctccttcagtccattaaactgctatcttcaactaaaaagaaaacaagcaataacatcgaagatgacacaattctcaaaaccaacaagcacatttactcccagcttttgagagcaactgcaaataaaaccgcgactcttctggaaagaatcaacgttatcgtccacctgctgggccagcttgccgccggcagtgcagcgagcagcaatgccgttcagtgactgcacagagccgtgtcccagacacgctgtcagtgccttcaacacggagccggtttgttcattcggtgctttgtttcattaaataatagggaaatatccatttaaaacaggtatatcagtggaaacacagagttattttaagtgacagacaaattacggttgagttctgtggcttcttcacttgaagtgctaacatcagaatcaaacttaaagcttccactatttatgtctttgagaagtatgtagtacctcggtattaacagacctgctgtgatgcagttacactttcacgtatttttgaagtatgtcaagctacacgggtctaagatatgattattttggataaaatgttactttggtcaagagaacttttatccagatgacattacaggttcaagtgggttaaggagacctcctgtacatctacagtgtttccttttaaattgtccagaaaaaaggtgtgttcttcataagcttcagtgcaggatttttcaaagacgagctgttgtgcaatttgctgtatttaatgcatgttctgaaaggattcacttttgactttatatgacagttgatcaagaacaggtactacccctttttttcatttcaaacttgaaactgtgaataaggtaagaaaactattttgaataaataaactatttatttaaaatgtcaaaaaaaaaaaaaaaaa

SEQ ID NO: 30160 - DNA, 2306 bp, Homo Sapiens
agggccccgccctgccttctggggcaaagcggagagtggtcggttctgccccacagtaacgcgaggaaagaaatctcgcgaggctggagttctccgggagcgccggtcggaggcggtcggcggaggtgtctaccccgccggtgatggcgttgaacgccactggcttcccggccttccgtccgctgcctccgtccgattctgcgtctgcttgctgaggaggcggattaggggggcgcggagtctcttcccttgagtgcataggtcccggttggtagagggtttgagtccgcatcgccacagctgaaggctgcgagggactaagagcagaatatatctttagaaatgagttgcacaattgagaaggcacttgccgacgctaaagctcttgttgaaagattaagagatcatgacgatgcagcagaatctctgattgagcaaaccacagctctcaacaagcgagtagaagccatgaaacagtatcaggaagaaattcaagaacttaatgaagtcgcgagacatcggccacggtccacgttagttatgggaatccagcaagaaaacagacaaatcagagagttgcaacaagaaaacaaagaattacgtacatctctggaagaacatcagtcggccttggaacttataatgagcaagtaccgagaacaaatgtttagattgctaatggctagcaaaaaagatgatccgggtataataatgaagttaaaagagcagcactccaagattgacatggtacatcgtaacaagtccgaaggattcttccttgatgcatctcgacacatccttgaagcacctcaacatggactggagagaaggcacttggaagcaaatcagaatgaactgcaagcacatgttgaccagataactgaaatggcagcagtaatgaggaaagccattgaaattgacgagcaacagggttgcaaggaacaagaacgaatatttcaacttgaacaagaaaacaaaggcttgagagagatccttcaaataactcgagaatcatttttgaacctaaggaaagatgatgcgtcggaaagtacttctttgtcagcattagtgaccaacagtgatttgagtctgaggaagagctgaagagtttctgagtctgtgagcttcttacatggctccaaatggtcaaataagtgaatgaatgaatggacagaaaattcaatcctttatttttttctctgtaaatatgtacagtgcacgggctatgagatagcaacaaaaaatgcatagttaatggtcatagactttattccaaaacataattggaaaatagaaactgagccattgccaaatggtaaagaaatgaaaagttttcacagtgactactgaatataccaagagcttttggcagtactgctggctttctgggtgattaattaggtaaacttgaatattcccagtaaatgtttgagaatgcataaaattataccaatttaaaaatataaatttttgccactgttttgtgaacggaggatttgtacgctaaatttcatccttatttggcgtcaaagttgatgcaaagtttatgtaccatgagacttctagtgattgcctactttcacatttatttaaatttttgtgaaagaaaatacagttttaaaggctataggaatgtgttatatgtaccttaaacagataatttaattttagcaatttatcataactgatacttagctaacaattgtccataacttgtttaagtgtaagaaataccatttcaggaatgaaaaagaaggaatactactttctaagaaagaagatcttataatagacatatttagtaggttaaactactcctttgaaagaataagttttggttcaaagtcaataatgaagacgagatttgtttttctcttctctggctgatttttaaggatattatgtagttcatttagttaacagaattgaaatgtttgatatggcaagataggtatggtaatttcaaagtgaattgggaattcctctggctcatagaacccttttttttttcctttaagtattcttgagatacaaaaaaaaaaagtaaataaaatttcaaaaaaaaagttccggatctgtttttaagctccatctggtcctcataacctgcaagatttttcttaaaacctttcagctgaaagtgggggtaaaggtggagtaatctgtggatttgtttctgttgtcttttaaaatgtcaaatatataatatgtaatttttttaaaaaccaccagatacagaaatgtgctttaacatcagttgaaacctaaattttcttatgttgtggtgattgtattaaaaaaaaaat

SEQ ID NO: 30161 - DNA, 7882 bp, Homo Sapiens; identical to SEQ ID NO: 25144

SEQ ID NO: 30162 - DNA, 4184 bp, Homo Sapiens
ttttttttttttttttttttttttttttttttttttttttttttttttttttttttttttttttttttttttaatgtttctaaggtaaccttttagcagatttattacagtacaatagattatgagggggaattctatacatacaaataatatacaaacacaattacctaatttattaatttacaaaacccaaaaagttaagccaactaaaaatttatcagtatcaccatcagaacatcttttcttttttttcttttttttttgagacagagtctcactctgttgcccaggctggagtgcagtggcgcggtcttggctcactgcgggctccgcctcccgggttcccgccgttctcctgcctcggcctcccgagtggctgggactgcaggcgcccgccatcacgcctggctgattttttgtatttttagtagagacggggtttcactgtgttggccgggatggtctcgatctcctgacctcgtgatccatccgcctcggcctcccaaagtgctgggattgcaggcgtcagccaccgtgaccagcctgaaacaggagcaagttctaaactcaggctctagagtcagaaaaggtagagtcaggttctggatccaaaatggggcaagtcatgatcaggttctggaaccagaacaggcctcaagcctaggggctgagcagggtatcccctggcctgggagcagaggacttctggctgactgctgcccgcaacgttctcaagctggtggtgaagtctgagtggaagtcataccctattcaggcagtagaggaagaggcctcaggtaagtactgtggttaccgccactctcccacccatttatcctccacccatccgcccttccacctatctgcccttctacctatctattcatccacgcacctactggttcatccacacatctgtgtatgattcacatctacccatctatccatccatccaccagccatccacccactcatccacccacgtattcacccactctctgatctaccgattcacccacccacccttccactcatccttccatcctcccacctgtcacccattgttaatctcttcattcatctacctgatgtcagctccatactccccatccatctatccactccctgcctacctatccttccacagatccacctacccatctatctacctgctattccattctcccatctactacctatctgttcttcaggccatccactcatccattcttctgtcccaggtacctagacacttgtcttcccatccgtttgttagttgatccactcctcattcagccctcccatgggcctggcacgtagccgagcaccctggagagggcagactaagaagacatggtccgtccctgcctgtgaggagttcaggtctctgaggaggaggaagcagtgaaactgggctttacacatggcctgagaacagcttaggcctgaacataaggaacagcttggagtggagggacacagaggaccctcactatcatgcatgccaacccaaccaactgcctgccctttcccttctggatttagctcgtgtctccaggctcctagtcctgtaatccagggacccatcagcgagggattcagggaagcagaggcagctctccaggaaggaggaaaatccctgcctcttccagagagactcccccattgctgtctcttgtgtgtgtcatgcacaaggaaggcttggttgtgtgccaggataaggggcacaagggcctcgggtgtggccagagaccccatgcttaagcttttatggtataggtcaggctgcaggggtttgagggcctcagttgtatatcagaatcttcagagcactgcgatgttcaggggtgagtcaggtctgtagatgtgcacggggtcttctgaagggtcagtttctgtaatcactttcaggtgtgtcagggccttgtgcagtaacagtgcacacagaagttagtgtttctgtgggctaagggttgtagctctgtatcaggattctgggagtgggtctggatttctggtgtgtggacttaagaagctgtgtcagacttgggggaggggcgttcatgtataactgggttcacataggccaagactcccaggtgcattttaggcagagcctcaggtgtgttagaggtcccaggggcagagaggctataggtgctgtcagaggccttggggacatttagggcagagcctcgagtgacaggtcctgggacagtgggagccaagggcaagtgctagagttgcagtgaatttagagcaaagcctcagctaagtgacacatcccagggcagtaggggatctatctaggttcgtgctgggcctcaggtaagtgacaggccttaggacaatgggggctgtggcatgcgtcaggttacctgccttgatatgggatcgtgacaggcccctccctatgtgcaggagacaagcagcccaagaaacaggagaaaaacccagtgttggtgtccccagagtttgtggatgaagctctgtgtgcgtgcgaggagtaccttagcaacttggcccacatggacatcgacaaggacctggaggccccgctgtacctcacccccgagggctggtccctcttcctccagcgctactaccaagtggtccacgaaggggcagaactcaggcacctcgacactcaggtccagcgctgtgaggacatcctgcagcagctgcaggccgtggtaccccagatagacatggaaggggatcgcaacatctggatcgtgaagccaggagccaagtcccgcggacgaggcatcatgtgcatggaccacctggaggagatgctgaagctggtgaacggcaaccccgtggtgatgaaggacggcaagtgggtggtgcagaagtatattgagcggcccctcctcatctttggcaccaagtttgacctcagacagtggttcctggtaactgactggaacccacttaccgtgtggttctaccgcgacagctatatccgcttttccacgcagcccttctccctgaagaacctggacaactcagtgcacctgtgcaacaactccatccagaagcacctggagaactcatgccatcggcatccactgcttccgccagacaacatgtggtctagccagaggttccaggcccacctgcaggagatgggtgccccaaatgcttggtccaccatcatcgtgcctggcatgaaggatgctgtgatccacgcacttcagacctcccaggacaccgtgcagtgtcggaaggccagctttgagctctatggcgctgacttcgtgttcggggaggacttccagccctggctgattgagatcaacgccagccccacgatggcaccctccacagcagtcactgcccggctctgtgctggcgtgcaagctgacaccctgcgcgtggtcattgaccggatgctggaccgcaactgtgacacaggagcctttgagctcatctataagcagcccgtcaccacttccccagcctccacaccagggcccagctgccttctccccatgtactccgacaccagggccaggtcctcagacgacagcacagcaagctggtgggcactaaggccctgtcgaccacaggcaaggccttgaggactctacccacggctaaggtcttcatttccctcccaccgaaccttgatttcaaggtggcacccagcatcctgaagccaagaaaggtgggcctcgacctgtgactcacacccagtggacagtgctgagcacggggtcagggctggagggcacaggcagagggcagctcccaggctggctggcaccccaagggaagagctggtctccctcagaagccccttcctccacagacttctgatcatctccctcttctcccctcctttcacaccgaggctcctgctctcctgtgcctccgaggcccccagctggaagtgccttgttgcctctgccctttgaagtcggaacaattcctagcacctgtcggaaggtcaaggccaaaggcaaattcaaggccagactgtgacaaacccagggctgaggcctgccccatgaagaggctgagccccctgaaacccctgccccttgttggtacattccagaggcgcaggggcctgggggatatgaagctagggaagcccctgcttcgattccccactgcccttgtcctggatccaacaccaaataaaaagaaacaagtgaaaaaaaaaaaaaaaaaaa

SEQ ID NO: 30163 - DNA, 2568 bp, Homo Sapiens
gtccgttgctaaggccgcgcagccctagtgaccgaacgccctgcggcgagaccgcaggcgctgtggtgggctccggtgcactgtgggatggaaaccggagcggcgcgtcctggcaggaccgggcggcggcggcgcgggccggcggcggccagggacccgggcttaggctggcaggccggctgaggggcgcgggcggccagcgggcggcggacgccgtcatgaacgcggcggtggtgaggcggacgcaggaggcgctggggaaagtgattcggaggccgccgctgacagagaagctgctgagcaagcccccgttccgctacctgcacgacatcatcacggaggtgattagaatgactggtttcatgaagggcctctacacagacgccgagatgaagtctgataatgtgaaggataaagatgcaaaaattagcttcctacaaaaggccatagacgtggttgtaatggtgtcgggagagccactgttggccaaaccagcccgaatcgtggcggggcatgagcctgaaagaacaaacgagctgctccagataattggaaaatgctgtctcaacaagctctctagtgacgatgcggtgcggagggttttagctggagagaagggagaagtgaaaggccgggcctcactgacctcaagatctcaggaattggataataagaatgtgcgagaagaagagtccagagttcacaaaaatacagaggatagaggagacgctgaaataaaagagagaagtacaagcagagatcgaaaacagaaggaagaattgaaagaagaccgcaagccaagagaaaaggacaaggacaaggagaaggccaaggagaatggcggaaacagacacagagaaggggagagagagagagccaaagcccgggccaggccagacaacgagcgacagaaagacagaggcaacagggagcgggacagagactccgagcgcaagaaggagacagagagaaagagtgagggggggaaagagaaggagagactgagagacagggaccgagagcgcgaccgggacaaagggaaggacagggacagacggagagtgaaaaacggggagcactcctgggacctggacagggagaagaacagagagcatgacaaacctgagaaaaagtcagcaagctcaggggagatgtctaaaaagttatcagatggaacttttaaagactccaaggctgaaacagagactgagatttccactagagcttccaagtcattgacaacaaaaacatcaaaacggcgatccaaaaattcagtggaaggaaggaaggaggataatatttcagctaaaagtttagactccatagtgtctggaataaataatgagccaaatcaggaaacgacaacatcagaaataggaacaaaagaagctaatattaactcaactagtatttcggatgataattcagctagtctgcggtgtgagaatattcagcccaaccccacagagaagcagaaaggtgactccaccagtgatgcagaaggagatgctggacctgctggccaagataagtctgaggtgccagagactccagaaattcctaatgagctttcatccaacatcagaagaattcctcggcctgggagtgcaagaccagcccctccccgggtcaaacggcaagacagcatggaggcgctacaaatggataggtcagggagtggtaaaaccgtttcaaatgtgattacagagtcacacaattctgacaatgaagaggatgatcaatttgtggtggaagctgcccctcagctctctgaaatgtcagaaattgaaatggtaacagcagtggaactagaagaagaggagaagcatggtggacttgtgaaaaaaattttggagacgaagaaagattatgagaaattgcagcagtcacccaaacctggggagaaggagcgatctctctttgagtcggcatggaagaaggagaaggacatcgtttccaaggagatagagaagctccgcacgtccatccagaccctgtgcaagagcgcacttcccctggggaagatcatggactacatccaggaagacgtggatgccatgcagaatgagctgcagatgtggcacagcgagaacaggcagcacgccgaggccctgcagcaggagcagaggatcacagactgtgccgtggagcccttaaaggctgagctcgcggagctggagcagctgatcaaagaccagcaagacaagatctgtgctgtgaaggccaacatcctcaagaatgaagaaaaaatccagaaaatggtatatagtatcaatttgacttcgagaaggtgaacactcaaaagtttcagagatgaaaagtcacctcagtttaaaagcaaaaaggaagatagaaaatcattactcttttaagttccagtttgctaagaaaatgaacagtttacaatgttattatccagctaattttcagagctttaaaactgtaagcatgttaagtgtattaaaaaaaccatgttttcttacctccttccagatggaatactggctagttataaatagcgcttccaaacaaaaaaaaaaaaaaaaaaaaaaaaaaaaaaaaaaaaaa

SEQ ID NO: 30164 - DNA, 4565 bp, Homo Sapiens; identical to SEQ ID NO: 26472

SEQ ID NO: 30165 - DNA, 1406 bp, Homo Sapiens
cctctgcggcgtcactgggagcccgacggaaaactgcgctaaaggcttgtctttcccctgcccgaccgaaggagccgaccttgcctgcgctacagcttccttattttcgtcgcctgttctcctgatcctgcgtgttctaaaaaccccttaggctttccatgggttcccagaccatggcggtggcgctgcccagggacttgcggcaggacgccaacctggcaaagaggaggcacgcggagctgtgcaggcagaagcgggtcttcaacgccagaaacaggataattgggggagacactgaagcctgggatgttcaagttcatgaccagaagataaaagaagctactgaaaaagctagacatgaaacctttgctgctgaaatgaggcaaaatgacaaaatcatgtgcatattggaaaaccggaaaaagagggataggaaaaatctctgtagggctatcaatgacttccaacagagctttcagaagccagaaactcgccgtgaatttgatctgtccgaccccctagcccttaagaaagatcttccagcccggcagtcagataatgatgttcggaatacgatatcaggaatgcagaaattcatgggagaggatttaaacttccatgagaggaagaaattccaagaggaacaaaacagagaatggtctttgcagcagcaaagggaatggaagaacgcccgtgctgaacaaaaatgcgcagaggccctctacacagagacaaggctgcagtttgacgagacagccaagcacctccagaagctggaaagcaccaccagaaaggcagtttgtgcatctgtgaaagacttcaacaagagccaggccatcgagtcagtggaaaggaaaaagcaagagaaaaagcaagaacaagaggacaacttggccgagatcaccaacctcctgcgtggggacctgctctccgagaacccgcagcaggcagccagctccttcgggccccaccgcgtggtccctgaccgctggaagggcatgacccaggagcagctggagcagatccgcctagtccagaagcagcaaatccaggagaagctgaggctccaggaagaaaagcgccagcgagacctggactgggaccggcggaggattcagggggctcgcgccaccctgctgtttgagcggcagcagtggcggcggcagcgcgacctgcgcagagctctggacagcagcaacctcagcctggccaaggagcagcatttgcagaaaaaatatatgaatgaagtctatacaaatcaacccacgggagactatttcacacaatttaatacaggaagtcgataatgaggaacacacccttgttcccgtcattcacgtataaagagtggctaccttaaaaaaaaaaaaaaaaaaaaaaaaaaaaaaaaaaaaaaaaaaaaaaaa

SEQ ID NO: 30166 - DNA, 1943 bp, Homo Sapiens
gggaacgtggctggttggaggaggtagatcaccctttctgcgggggacgatttcgtcggtggtaggctgctaccatgaggttgaatcagaacaccttgctgctggggaagaaggtggtccttgtaccctacacctcggagcatgtgcccagcaggtaccacgagtggatgaaatcagaggagctgcagcgtttgacagcctcggagccgctgaccctggagcaggagtatgccatgcagtgcagctggcaggaagatgcagacaagtgtaccttcattgtgctggatgccgagaagtggcaggcccagccaggcgccaccgaagagagctgcatggtgggagatgtgaacctcttcctcacagatctagaagacctcaccttgggggagatcgaggtcatgattgcagagcccagctgcaggggtaagggccttggcactgaggccgttctcgcgatgctgtcttacggagtgaccacgctaggtctgaccaagtttgaggctaaaattgggcaaggaaatgaaccaagcatccggatgttccagaaacttcactttgagcaggtggctacgagcagtgtttttcaggaggtgaccctcagactgacagtgagtgagtccgagcatcagtggcttctggagcagaccagccacgtggaagagaagccttacagagatgggtcggcagagccctgctgatggctgggccttgtgggcagccactctgtgtgagcagggtgttgggcccatacacttcaaagaccagagccctgcactgggagagtgctcctggcccaggctgggaatcacctttcgaggcccttcagactctggcggggcttgctgtggcctccctccagctagtggtgtggctgagcagactccagggccagggccagttcccttctcccctcccggccaaacccagacccagactctaggaagctggaatggagggcagggatccatgggagatgtcgggatgaaggtgggagctggaggtgcagggggacctggaacatggatgggagtggacaggcctttctccttagaggccagaggtgctgccctggctgggagtgaagctccaggcactaccagctttcctgattttcccgtttggtccatgtgaagagctaccacgagccccagcctcacagtgtccactcaagggcagcttggtcctcttgtcctgcagaggcaggctggtgtgaccctgggaacttgacccgggaacaacaggtggtccagagtgagtgtggcctggcccctcaacctagtgtccgtcctcctctctcctggagccagtcttgagtttaaaggcattagtgttagatacagctccttgtggctggaaaacacccctctgctgataaagctcagggggcactgaggaagcagaggccccttgggggtgccctcctgaagagagcgtcaggccatcagctctgtccctctggtgctcccacgtctgttcctcaccctccatctctgggagcagctgcacctgactggccacgcgggggcagtggaggcacaggctcagggtggccgggctacctggcaccctatggcttacaaagtagagttggcccagtttccttccacctgaggggagcactctgactcctaacagtcttccttgccctgccatcatctggggtggctggctgtcaagaaaggccgggcatgctttctaaacacagccacaggaggcttgtagggcatcttccaggtggggaaacagtcttagataagtaaggtgacttgcctaaggcctcccagcacccttgatcttggagtctcacagcagactgcatgtgaacaactggaaccgaaaacatgcctcagtataaaacaaacattataaaacgaaaaaaaaaaaaaaaaaaaaaaaaaaaaaaaaaaaaaaaaaaaaaaaaaaaaaaaaaaaaaaaaaaaaaa

SEQ ID NO: 30167 - DNA, 3264 bp, Homo Sapiens; identical to SEQ ID NO: 26358

SEQ ID NO: 30168 - DNA, 5430 bp, Homo Sapiens
aaccacgggagttgtcgctgtctaggagcatctgaaagacaggtgtgcgtcatgcacttgaagcacctgaggaccctgctgagccctcaggatggagctgcaaaggtgacctgcatggcttggtcccagaacaatgccaaatttgctgtctgcacagtggaccgagtggtcttgctgtatgatgaacatggagaacggagagataaattctccaccaaaccagctgacatgaagtatggcaggaagagctatatggtgaagggcatggctttttctcctgattccactaaaattgccataggacagactgacaacatcatctatgtctacaagattggagaagattggggtgacaagaaagtcatctgcaacaagttcatccagacgagtgctgtcacttgtctgcaatggccggcagaatacatcattgtctttggactggctgaagggaaggttcgtttagcaaacaccaaaactaataaatcatctaccatctatgggacagagtcttacgtggtgtccctgacaacaaattgctctgggaaaggaattctctctggtcatgcagatggtaccatcgttaggtatttctttgatgatgaaggctctggagagtcacaggggaagttggttaaccacccgtgtccaccctatgccttggcatgggcaaccaatagcatcgtggctgcaggctgtgatcggaaaattgtagcctatggaaaagaaggtcacatgctacaaacttttgattatagccgtgaccctcaggagcgggagttcaccacagctgtatcaagtcctgggggccagtctgttgtgctaggaagttatgacaggcttcgggtgttcaactggatccctcgaagaagcatctgggaagaggcaaagcccaaggagattaccaatttatacaccatcactgccttggcctggaagcgggatggctcacggctctgtgtgggcacactatgtggtggggtggaacagtttgactgctgcctccgaaggagtatttacaagaacaagtttgagttgacgtatgtgggacctagccaggtgattgtgaagaacctgtcatcaggaacccgagtggtgctcaagtcacactatggctatgaggtggaagaggtgaaaatcctaggaaaggaacgttacttggtggctcacacatcagaaacactgctgctgggggacctgaacactaatcggcttagtgagatagcctggcaaggatctggtggcaatgagaagtatttctttgaaaatgagaatgtatgcatgatcttcaatgccggagagctaaccctggtggaatatgggaataatgacaccctgggttctgtacgcactgaattcatgaacccccacctcatcagtgttcgtattaatgagaggtgtcagcgaggaacagaagataataagaaattggcttatcttattgatattaagactattgctatagtggatctgattggtggctacaacattggcaccgtcagccatgagagccgtgtggattggctggaacttaatgagactggacacaagctcctcttcagggaccggaaacttcgtttgcatctgtatgatattgaaagctgctctaagacaatgatcctcaacttctgctcctatatgcagtgggtcccaggaagtgacgtgctggtagctcagaaccgaaacagtctgtgtgtatggtacaacattgaggcacctgagagagtcaccatgttcactattaggggtgatgttataggtctggagcggggcgggggaaagaccgaggtgatggtgatggaaggtgtgactactgttgcctacacattggatgagggcctcatcgagtttggaacagccattgatgatggcaactacatccgggcaacagccttcttagagactctggaaatgaccccagaaacagaggcaatgtggaaaaccttgagtaaactggcactagaggcaaggcaactacacattgcggagaggtgcttttctgctttgggccaagtagcaaaagctcgattcctgcatgagaccaatgagattgcagatcaagtatcccgggaatatggcggagaaggaacagacttttatcaggtccgagcacgtctagccatgctggaaaagaactacaaactggctgaaatgatctttttggaacagaatgctgtggaggaggccatgggcatgtaccaggagctacaccgttgggatgagtgtatcgctgtggctgaagccaaggggcacccagccctggagaagctacgtcgtagttactaccagtggctgatggacacacagcaagaggagcgagcaggtgaactacaggagagccaaggggatgggctagcagccatcagcctctacctcaaagctgggctccctgccaaagctgctcggctggtgctgacccgagaggaactgctagccaacacagagctggtagaacacatcactgcagcccttatcaagggggaactctacgaaagggcaggtgatctctttgagaagattcacaatccacagaaggccctggagtgctaccgtaaaggcaacgcattcatgaaagcggtagagctggctcgattggccttcccagtggaggtggtgaaactagaggaggcatggggggaccacctggtgcagcagaagcagcttgatgcagccattaatcactacatcgaagccaggtgctccattaaggcaattgaggccgccctgggtgcccgccagtggaagaaggcaatttatatattagatctacaggaccggaacactgcatccaaatactatcctctcgtggcccaacactatgcatccctgcaggagtatgagattgctgaggagctctatactaagggagatcggacaaaagatgccatagacatgtacacccaggctggtcgttgggaacaagcccacaagctggcgatgaaatgcatgagaccagaagatgtgtcagtgctatacatcactcaggcccaggaaatggagaagcagggcaagtaccgtgaggctgaaaggctatatgtgacagtacaagagcctgatcttgccatcaccatgtacaaaaagcacaagttgtatgatgacatgatccgcctggtagggaagcaccatccagatctcctcagtgatacacacctacatctgggcaaggagctggaggctgaaggccgactacaggaggctgagtaccactacctcgaggcccaggaatggaaggcaacagtgaacatgtaccgggccagtgggctttgggaagaggcctacagggtggccagaactcaaggaggggctaatgcccacaaacacgtggcctatctgtgggcaaagagcctgggaggagaggctgcagttagactgcttaataagctgggactcctggaagctgctgttgaccacgctgcagacaattgctcctttgaatttgcgtttgaactctctcggctggccctcaagcacaaaacccccgaggttcatctcaaatatgctatgttcctggaggatgagggtaaattcgaagaggctgaagctgaattcatcagagctggtaaacccaaggaggcagtcctcatgtttgtccataaccaggattgggaggcagctcagcgtgtggctgaggctcacgaccctgacagtgtcgccgaggtgcttgtgggacaggcccggggggccttggaggagaaggactttcagaaagcagaagggctgctgctccgggcccagagaccaggcctggccctcaattattataaggaggctggattatggagtgacgctctgcgcatctgcaaggactatgtgcccagccagctggaggctctgcaggaagaatatgagcgggaagctactaagaagggggccaggggtgtggagggatttgtggaacaagctcgacactgggagcaggctggagagtacagccgtgccgtggactgctacctcaaagtgcgagactctggaaacagcggcctggcggagaagtgctggatgaaggcagctgaactctccatcaagtttctgcctccccaacgtaatatggaagtcgttctggctgtaggaccccagctgattggaattggaaagcacagtgcagctgcagagctctatctgaatctggaccttgtcaaggaagcaatcgatgctttcatcgagggtgaggagtggaacaaggcgaagcgtgtagctaaggagttagatcccaggtatgaagactatgtggaccagcattataaagagttcctcaagaatcagggcaaagtggactcgctggtgggtgtggatgtgatagctgctttggacctgtatgtggagcagggccagtgggacaagtgcattgaaacagctaccaagcagaactacaagattctgcacaagtatgtggctttgtatgcaactcacttgatccgggagggtagctctgcccaggcattggccctgtatgtacagcacggagcccctgctaacccacagaacttcaatatctacaaaaggatcttcactgacatggtgagctctcctggaaccaactgtgccgaggcctatcatagctgggctgatcttcgagatgtcctcttcaacctgtgtgaaaacctggtgaagtccagtgaggcaaactctccagcccatgaggagttcaagacgatgctgctgatcgctcattactatgccacgcgctctgcagcccagagtgtcaaacagctggaaaccgtggctgccaggctttctgtttcactcttgcgtcacacccagctactacctgtagacaaagccttctatgaagcaggcattgctgccaaggcagttggctgggataacatggcattcatcttcctcaatcgctttttggacctgaccgatgcaatcgaggaagggactctagatggccttgaccactctgattttcaggatacagacattccctttgaggtgccactcccagctaagcagcatgtaccggaggctgagagagaagaggttcgagactgggtgcttacagtctccatggaccagcggctggagcaggttctgcctcgggatgagcgtggcgcctacgaggcctccctagtggcagcgagcactggtgttcgagccctgccctgccttattacaggataccccattctgaggaacaaaattgaatttaagcggccagggaaggctgctaacaaggacaactggaataaattccttatggccatcaagacctcccacagcccagtgtgccaggacgtgctgaaattcatcagtcagtggtgtggagggctccccagcaccagcttttcctttcagtagttggtagagctgaggaagagttagggcctctccctcattaaagttttataaataattgaaaaaaaaaaaaaaaaaaaaaaaaaaaaaaaaaaaaaaaaaaaaaaaaaaaaaaaaaaaaaaaaaaaaaaa

SEQ ID NO: 30169 - DNA, 3085 bp, Homo Sapiens
gaaatcctgctcccaagtcacagataggctgacgggtcagagggcaagacgtgacccagggccgagagggtgagtgaccaggaaaatcggattcatcagttcacttgtttgtttcagaaacgtgcacaaagacctgctgcatgaggccctcgtcttcagtttctgtttcatgcccagcattaaaccaagtatctcattttgccaatttgacttctgtaggggccatggcacctgcaaggtgtttctcagcaagattgaggaccgtgtttcagggcgtggggcattgggctttgtccacatgggctggcctgaagcccagccggctactgccacagcgggcttctcccaggctgctctcggtcggccgtgcggacctcgccaagcatcaggaactcccggggaagaagctgctctctgagaaaaagctgaaaaggtactttgtggactatcggagagtgcttgtctgtggaggaaacggaggcgctggggcaagctgcttccacagtgagccccgcaaggagtttggaggccctgatggaggggacggaggcaacggtggacacgtcattctgagagttgaccagcaagtcaagtccctgtcgtcggtcctgtcgcggtaccagggtttcagtggagaagatggagggagtaaaaactgcttcgggcgcagtggcgccgtcctctacatccgggtccccgtgggcacgctggtgaaggagggaggcagagttgtggccgacctgtcttgcgtgggagatgagtacattgccgcgctgggcggggcaggagggaaaggcaaccgcttcttcctggccaacaacaaccgtgcccctgtgacctgtacccctggacagccaggacagcagcgagttctccacctggagctcaagacggtggcccacgccggaatggtgggattccccaacgccgggaagtcctcactgctccgggccatttcaaacgccagacccgccgtggcttcctacccgttcaccaccctgaagccccacgtcgggatcgtccactacgaaggccacctacaaatagcagtggccgacatccccggcatcatacgaggcgcccaccagaacaggggtctggggtccgccttcctcaggcacatcgagcgctgccgctttctcttgttcgtggtggatctttctcagcctgagccgtggactcaagttgacgatttaaaatatgaactggagatgtatgaaaagggcctgtctgcgaggccccacgcaatcgtcgcaaacaagattgacctccctgaagcccaagccaatctgtcccagctccgggatcacttgggacaggaggtcatcgtgctgtcggcgttgaccggcgagaacctggagcagctgctgttgcacctgaaggtgctgtatgacgcctacgcggaggccgagctgggccagggccgccagccgctcaggtggtagccacgccagagcggggtcgcctctgggcctctgtctgagcaaacctgggtgtgaattcggtggttttgaatgcataaagtgccttgtggacacgggggagttgtggtgcttctgggtctctgggccccgcctgctggcctgagatgccctcatgttgggaagcattccgtgccccctaccccgcctgccctccgtatttcctgcacctgtcagcctgcaccgactgatgagccagttgctcatttgtgctgattaacacccctaataaggggttggggtgcccataacggggtggccctgccgctgactcaggtctccgccatgcacgcgtggactctcggatgagctcagcagaaccgcacagccagagccccaggtcagaagtgcagaccagggttctcagcacagtgcccgtcgtgcttccatggcttgctacggagagagacctctggatccacactggggctgcgtctggcccgttgtccagcagccctgcggtaccgcaagcccaggcaccagtgtctcggggggcctcactgctgcgcaaggggtggggccgaggatgcaagtccaggcagagcggcgcaggcagctgtgagcttttctccatcagccgtctgagaagagcagtgaggccagctgcttcctgtccttcagaacacttctctgtgctcagtgggagccaggaagcctcaggcttcacgactgaatgcacccaatatccgacctggctgcgtgtttctggctgggctgccgtgtgcacagcaagttaactagaggggctgtgggccatggaactgtcagcgttattctcagaaggcggccgtggcatgggcagggtatagtgaggagtggaaggagacgtgtgcctggtaatatggggcggaatttccactcagctccatttgctggggatttaaagagaacccttgtgctacgccaggcagttaccgagccgaagggagatgatgggccttcgcccctcagtgggatggcagctgagggggccctgcatttgaccgtcgagactgcagcagcgcctttcctgtctgtggtttaagtctttgcagtcaagtactgatgcatccaagccaggcccatgcctggtgtctccctgactgcagaggagccccagggcaaggacagctcagctgctggcagcctgcctggcccatagacatcccccaagtagtctcaggcctctgacatgtccctgaggggcccctaagaaagaaagtggaggggacactccagaggctgtcgtgggaggatcatgtgagcctgggaggtcaaggctgcagtgagccgtgattgcaccactgcactccagcctgagtgacagagcgagaccctgtctcaaaaaacaaacaaacaaacaaacaaaaacagaacattctgggcacggtggctcatgcctgtagtcccagcactttgggaggccgaggctggtggatcacaaggtcaggagattgagaccatcctggctaacacagtgaaaccccgtctctactaaaaatacaaaaaaattagccaggcgtggtggcggtcacctgtagtcccagctactcgggaggctgaagcaggagaatggcgtgaacctgggaggcggagcttgcagtgagccgagatcacaccactgc

SEQ ID NO: 30170 - DNA, 2258 bp, Homo Sapiens
gaagcttgaggccggagacgcccgccttcgggcccgtccgcccggcttccccgctcccgggtactggaagatgaaagagactatacaagggaccgggtcctgggggcctgagcctcctggacccggcatacccccagcttactcaagtcccaggcgggagcgtcttcgttggcccccacctcccaaaccccgactcaagtcaggtggagggtttgggccagatcctgggtcagggaccacagtgccagccagacgcctccctgtcccccgaccctcttttgatgcctcagcaagtgaagaggaggaagaagaggaggaggaggaggatgaagatgaagaggaggaagtggcagcttggaggctgcccccaagatggagtcagctgggaacctcccagcggccccgcccttcccgccccactcatcgaaaaacctgctcacagcgccgccgccgagccatgagagccttccggatgctgctctactcaaaaagcacctcgctgacattccactggaagctttgggggcgccaccggggccggcggcggggcctcgcacaccccaagaaccatctttcaccccagcaagggggtgcgacgccacaggtgccatccccctgttgtcgttttgactccccccgggggccacctccaccccggctgggtctgctaggtgctctcatggctgaggatggggtgagagggtctccaccagtgccctctgggccccccatggaggaagatggactcaggtggactccaaagtctcctctggaccctgactcgggcctcctttcatgtactctgcccaacggttttgggggacaatctgggccagaaggggagcgcagcttggcaccccctgatgccagcatcctcatcagcaatgtgtgcagcatcggggaccatgtggcccaggagctttttcagggctcagatttgggcatggcagaagaggcagagaggcctggggagaaagccggccagcacagccccctgcgagaggagcatgtgacctgcgtacagagcatcttggacgaattccttcaaacgtatggcagcctcatacccctcagcactgatgaggtagtagagaagctggaggacattttccagcaggagttttccaccccttccaggaagggcctggtgttgcagctgatccagtcttaccagcggatgccaggcaatgccatggtgaggggcttccgagtggcttataagcggcacgtgctgaccatggatgacttggggaccttgtatggacagaactggctcaatgaccaggtgatgaacatgtatggagacctggtcatggacacagtccctgaaaaggtgcatttcttcaatagtttcttctatgataaactccgtaccaagggttatgatggggtgaaaaggtggaccaaaaacgtggacatcttcaataaggagctactgctaatccccatccacctggaggtgcattggtccctcatctctgttgatgtgaggcgacgcaccatcacctattttgactcgcagcgtaccctaaaccgccgctgccctaagcatattgccaagtatctacaggcagaggcggtaaagaaagaccgactggatttccaccagggctggaaaggttacttcaaaatgaatgtggccaggcagaataatgacagtgactgtggtgcttttgtgttgcagtactgcaagcatctggccctgtctcagccattcagcttcacccagcaggacatgcccaaacttcgtcggcagatctacaaggagctgtgtcactgcaaactcactgtgtgagcctcgtaccccagaccccaagcccataaatgggaagggagacatgggagtcccttcccaagaaactccagttcctttcctctcttgcctcttcccactcacttccctttggtttttcatatttaaatgtttcaatttctgtatttttttttctttgagagaatacttgttgatttctgatgtgcagggggtggctacagaaaagcccctttcttcctctgtttgcaggggagtgtggccctgtggcctgggtggagcagtcatcctcccccttccccgtgcagggagcaggaaatcagtgctgggggtggtgggcggacaataggatcactgcctgccagatcttcaaacttttatatatatatatatatatatatatatatatataaaaatatataaatgccacggtcctgctctggtcaataaaggatcctttgttgatacgtaaaaaaaaaaaaaaaaa

SEQ ID NO: 30171 - DNA, 10812 bp, Homo Sapiens; identical to SEQ ID NO: 23791

SEQ ID NO: 30172 - DNA, 4629 bp, Homo Sapiens
agtgttgtgaagggagcagaagaggagaaacctaatctccgaacccaacaacacctagcaacagtagaaaaaacttttaaacaaaagtctgggtgggagatatacaacaacttccaatttctgctgatcgggatttcagggagaagaagctgctttccctcctctctactctgtttcctgcatgacttcagctattggctggtcctgggaaagaaagtgggaaaagctttttcctctgtattcttttgggctggatagtttttgagaactcgaatctgtcttgggctgtgagacaagccactgggttcttcaaaggataaactacctacatagaggacatacctttggttaaaggagctgccgtcaggtgggaatgagatctcgaaaccaaggtggtgaaagtgcatctgatgggcatatctcctgtcccaagccctccatcatcggcaatgctggtgaaaaaagtctctcagaagatgcaaaaaagaagaagaaatcaaataggaaggaggatgatgtcatggcctcaggaactgtcaaacgacacctaaaaacatctggagaatgtgaacgaaaaactaagaaatccctggagttatccaaagaagacctcatccaactactcagtataatggaaggggagttgcaggccagagaagatgtgatccacatgctgaagacagagaaaaccaagcctgaggttctggaggctcattacgggtctgcggagccagagaaagtgctgcgggtcctgcaccgagatgccattcttgcccaggagaaatccataggagaagatgtctatgagaaaccgatttcagagctggacagacttgaggaaaaacagaaagaaacctaccggcgcatgctagagcagctgttgctggccgagaagtgtcataggcgcaccgtatacgagttagagaacgagaagcataaacacactgactacatgaacaagagcgacgacttcaccaacctgctggagcaggagcgggagaggttaaaaaagctccttgaacaagaaaaggcttatcaagcccgcaaagaaaaggaaaatgctaaacgactcaataaactaagagatgagcttgttaaactcaaatcctttgcactcatgctggtggatgaaagacaaatgcacattgaacaacttggcctgcaaagccagaaagtacaggatcttactcagaagctgagggaagaagaagagaagctcaaagccattacttccaaatccaaagaagacagacagaaattgctcaagttagaagtggactttgaacacaaggcttcgaggttttctcaagagcatgaagagatgaacgctaaactggctaatcaagagtctcacaataggcaacttagactcaagctggttggcttaacccaaagaatcgaggagctagaagagaccaacaaaaatctgcagaaggcagaggaagaacttcaagaattaagagataaaattgccaaaggagaatgtggaaactctagcctcatggcagaagtggaaaatcttcgaaagcgtgtgcttgaaatggaaggtaaagatgaggagatcactaaaactgaatcccagtgtagggaattgaggaagaagctgcaagaggaagaacaccatagtaaggagctcagacttgaagttgagaagctacagaagagaatgtctgaactagagaaattggaagaagcatttagcaagagtaaatctgagtgcacccagctacatttaaatctggagaaagaaaagaacttaaccaaagacctgctaaatgaattggaggtggtcaagagtcgagttaaagaattggaatgttctgaaagtagattggaaaaggctgaattaagcctaaaagatgatcttaccaagttgaagtcatttaccgtgatgctggttgatgaaaggaaaaatatgatggaaaaaataaaacaagaagagagaaaagtggatggactcaataaaaattttaaggtggaacaaggaaaagttatggatgtaactgaaaaactaattgaagaaagtaagaaacttttaaaactaaaatctgaaatggaggaaaaagtatacaacttgacaagagaaagagatgagttgataggcaaattgaaaagtgaagaagaaaaatcctctgaattaagctgcagtgttgacttactaaagaagagacttgatggtatagaggaagtggaaagagaaataacaagaggaaggtcacgaaaagggtctgagctcacctgcccggaagataataagattaaggaactaacacttgaaattgagagactgaagaaacgtctccaacaattggaagtggtcgaaggggatttgatgaagacagaagatgagtatgatcagctggaacagaaatttagaactgagcaggataaggctaacttcctctctcaacaactagaggagatcaagcaccaaattgccaagaataaagcaatagagaagggtgaggttgtgagccaggaagctgaactgagacacagatttcggttggaagaagctaaaagtcgagacttaaaagccgaagtacaagctcttaaagagaagattcacgaattaatgaacaaagaagatcagctttctcagctccaggtagattattctgtacttcaacaaagatttatggaagaagaaaataagaacaaaaacatggggcaggaggttctcaatctgaccaaagagttggagctttccaagcgctacagcagagctcttaggcccagtgtgaatggaagaagaatggtggatgttcctgtgacgtcaactggagtccaaactgatgcagtcagcggtgaagcagcagaggaagaaacgccagctgtattcatacggaaatccttccaggaagaaaatcatattatgagtaatcttcggcaggtgggattgaagaaacccgtggaaagatcttctgttctagacaggtatcctccagcagcaaatgagctcactatgagaaagtcttggattccatggatgagaaagagggaaaacggcccctccatcactcaggagaaagggccccgaacaaattccagtccagggcacccaggagaggtagtcctttcaccaaagcagggccagcccctgcatattcgagtgacaccagaccacgagaacagcactgcgactttggagataacaagcccgacatctgaagaatttttttctagtaccactgtcattcctaccttagggaatcagaaaccaagaataaccattattccatcaccaaacgttatgcctcaaaaacaaaaaagtggagatactactcttggcccagaacgagccatgtccccagtcacaattactacattttccagagagaagactccagaaagtggaagaggcgcatttgcagacaggcccacatcccctattcagataatgacggtgtctacatcagcagcaccagctgagattgcagtttctcccgaatcccaggaaatgcccatgggacggacaatcctcaaagtcaccccagaaaaacagactgttccaactccagtacggaaatacaactccaatgccaatatcataaccacagaggacaataaaattcacattcacttagggtctcagtttaaacggtcccctgggacttcaggtgaaggagtcagtccagttattactgtccgaccagtaaacgtgacagccgaaaaggaggtttccaccggcactgtccttcgctctcccaggaatcacctctcctcacggcctggtgcaagcaaagtgacgagcactatcaccataacaccggtcacaacgtcatctgctcgaggaacccagtcagtgtcaggacaagacgggtcatcccagcggcctacacccacccgcattcctatgtcaaaaggtatgaaagcaggaaagccagtagtggcagccccaggagcaggaaatctgaccaaattcgagcctcgagctgagactcagtctatgaaaatagagctgaagaaatctgcagccagcagcaccacctctctcggaggggggaagggctgagggcagtggctaagggggtatgttgtgcagatgctactgctgccgtgaaagtgaaccttcatctgtttgtgccagttctttacatgtactaatttaagttttaaatattgtgtttataaaataaccaactaataaccatttgtctttcccattttgtgcatttgttttgatgctggggaacaaaattagcaaaactattgcttgctgcctagaagccagggcgtggtttctagttccagttttgcttctagcaagtggacccatcaatagacccatctgagcctgtttcctcatcagttagatgtggggactcaatcacacgctcttcaagtccggctcccatatttcctaattgcaagccaaatttaatgtaccttgttccacaataattttttattaaaaaaatcctattacaaaataagacatactttaactattgtcatttgcctctttcacatcatgaatttgctttatgtgctggaaaaaacatcacatagctatcacagggcctggacctctaaaattttgcaaaaacaaaaggttctaagatgatttcaggaaataatgtgaacatgtaataaaatggaaatgaaatatggaatcctaaaaaaaaa

SEQ ID NO: 30173 - DNA, 6632 bp, Homo Sapiens
cgccgtcatgccttggctgagcggcggccggcggcgacggcggggacagccgcgcgaggccccgcgggagccgccgccgtccgcgcagccccagcgggaaccgcgccgccggcgccccccgccgcggtccccacgcccccagctccttccgcgccgccgccgcgggcccgggagagcgccgagctgccgctgcccgccggctgggaggaggcgcgagactacgacggtcgcgtcttttacattgaccacaacacgcgccagacgtcgtggatcgacccccgcgaccggataacaaagccattgacctttgccgattgtgttggggacgaacttcctttaggatgggaaaccgtatatgataaacaaattggagtttattacatggaccacataaataaacttacccagattgaggatccaagagaacagtggaggcgagagcaagagcgcatgttgaaggaatatttaattgtagctcaggaggctctcaatgccaagaaagaaatctaccagattaagcagcagcggttcgagctggcccaggaggaataccagcagctgcacaaaatgtgtgaggatgacagccgctcgtacgccagctcattctctggatattcaacaaatacaaagtatgacccacaccaaattaaagcagaaatagcaagtcgtcgggataggctttccagattaaaacgagagctgacccagatgaagcaggaactgcagtacaaagaaaagggggtggagaccctgcaagagattgatcggaagatgtcaagtactcacaccagctacaaactggatgaggcgcaggctatcatgagtgagctccggaccatcaagaaggccatttgcacaggcgagaaggagaggcgggacctgatgcatagcctggccaagctgaccgatagcttcaagaacagctgctccgttaccgactctctagtggacttccctcaccatgtaggcgtgcctggcgatgctggtgtaccccagcagttctgcgatgccggctcccagactgatatcatcggggagtttgtctttgatgataaaacaagacttgtagaccgagtcagacttaattggcaatatgaagaagccagaaagagagtcgccaacatccagcagcagctggcccggcttgacaatgagtcctggccaagcacggccgaggctgacagggaccggctgcagctcatcaaggagaaggaggccctgctgcaggagcttcagctcatcattgcacagcgccgctctgcgggagatgtggcccggctggaggaggagcgggagcgcctagaggaggagctgcggcgtgcacgggccacctccgcacagggcgccacggagaggattctgcttcaggaaaaaaggaattgtctacttatgcagctggaagaagccacccgcttaacatcctacctccagtcccagttaaaaagcctgtgtgccagcaccctgacggtgtcctcggggagcagccgcgggtccctagcctccagccgtgggtctctggcctccagccggggctccctgagctcggtcagcttcacggacatctacggcctcccgcagtacgagaagcccgacgctgagggcagccagcttctacgcttcgacctcattcccttcgactctctggggcgagatgctcccttttcagagcccccaggcccctcgggcttccacaagcagaggcggtccctggacacgccccagtccctggcatcgctgtcctcccgctcctcgctgtcctcgctgtcgcccccaagctcgcccctggacacgcccttcctccctgcctcacgggactcgccgctggcgcagctggcggacagctgtgaggggccaggcctgggcgccctagacagactgcgggcacacgcctcggctatgggggacgaagacttaccaggcatggcggcccttcagccacacggggtccccggggacggggaagggccgcacgagcgaggacccccaccagccagcgctcccgtgggtggaacagtgactcttcgagaagacagtgccaagaggttggagaggagggcacgccgcatctccgcatgtctgtcggattattcgctagccagcgacagtggggtgtttgaacctctaaccaaaaggaacgaagatgccgaggagcctgcctacggagacacggccagtaacggagatccccagatccacgtgggactcctgcgcgacagtggcagcgagtgtctcctcgtgcacgtgctgcagctgaagaacccggcggggctggcggtgaaggaagactgcaaagtccacatccgagtctatttgcccccactggactcgggcacgcccaacacttactgctccaaggctctggagttccaagtgccgctggtgtttaacgaagtgttcagaatccccgtgcattccagcgcgttgacactgaagtcacttcagttatacgtgtgttcagtgactccgcagctgcaggaagaactgctgggcattgctcagattaacctggctgactatgacagtttgagtgagatgcagctgcgctggcattccgtgcaggtgttcaccagctctgaaccatcaaggacgcgggaggctgggtgtgcaggagagagctccgcccgggaccctgcacacaccatctccatctccggcaagacggatgcggtgacggtgctcctggccagaaccacggcacagctgcaggcggtggagagggaactggccgaggagcgggccaagctggagtacacggaggaggaggtcctggagatggagcgcaaggaggagcaggccgaggccatatccgagcggagttggcaagcggactcggtggatagcggctgtagcaactgcacccagaccagccctccgtacccagagccctgttgcatgggtatcgactccatcctgggccacccatttgctgctcaggcagggccttacagccccgagaaatttcagccctcgcctcttaaggttgataaggaaaccaacacggaagatctctttctggaagaagcagccagcctcgtgaaggagcggcccagccgccgggcccgagggtcgccttttgttcggagtggcacgattgtccgttcccagacattctcgcctggagcacgaagccagtatgtttgcagactttatcgtagtgacagcgacagttcaacgctgccccggaagtccccctttgtccgaaatactttggaaagacgaacccttcgctataagcagtcatgcaggtcttccctggctgagctcatggcccgcacctccctggacttggagctggatctccaggcgtcgagaacacggcagaggcagctgaatgaggagctctgcgccctccgtgagctgcggcagcggttggaggacgcccagctccgtggccagactgacctcccaccctgggtgcttcgggacgagcggctccgtggcctgctgcgggaggccgagcggcagacaagacagaccaaacttgactaccgtcatgagcaggcggctgagaagatgctgaagaaggcctccaaggagatctaccagctgcgtgggcagagccacaaagagcccatccaagtgcagacctttagggagaagatagcattcttcacaaggccaaggatcaacatacctcctctcccagccgacgacgtctgatggagtgcattgtgcacatgaagtatttatccacctgttttattttcatgaagttcttagactagctgaatttgtctttaaaatatttgtgcaaagctattaatatacacattttgtaaaaaaaaaaaaaaaacacgtatatctatacatatatattttataatagtgacggcaacagggcttggtttttccttgttgtgaaatcgacatctctgaagacaggttattttataaaagatcaactatcatgttaagaatgtacagtttttatgctgttttatttgacttaaaggctggaagacagaaacgaagtgagttcaggcaaattcactgtattgtaatttatttatagtacttttttttccttgaaggaaaatactgactttaagatgtattttaagactgaaattttgttctttagtacttttcatgcagtagaacggaacttggggctggtttggtttttgacacctgaaatgcgaacgctatgtgctaaatttgtcaccgtatcatatgtgcatttaccatgtatattgtacacattcactcccttgatgtcatgttaaaatgtcccctgcagtggttcaatcgtgactcggaagcatgtgtgtgttgcagaggtcagtctctggcgtgggccgcacgccaaccgctcatttctgtgttgcctttggaagcatctttctgtgctcagcgtgagtctgaagcaggcgccagggcctctggtgtacggggcttcagcctgcttgcttgtggtggctgtctgtggggcttcagcctgactgtccgtggtggctgtccatgctgcccgcctccccccaccccgccctgtccgactgtaacagaccaggagggtggcggaggaactcctgccacgccactgtgtcatgaaggaaagtgaaagggaacgaggaagtaggaatgcccacgctcgttgactccgtgggtgaatacagcagttaggacatacacaccatcacctttgaaagtgcttgtttgggggagggaaggacatacgggtaactagaactacccagcgagtcgtccagaggagaggatcaggtttgagtcaggaggctccctgtactggagtcgtcccactattcctcaagaaatcttagaaccagcttgtgaggaaaaacattttttaatgtaataaaaatatgccattattctttgaaatgccaaatgatataaatattttgcctaatacatatttattgtagatgaaatgcactcttctcgatgaggcctcgatttgaatcaatggggtgggccacaggaaatgtcagaggaaccagaactcagaactcttcctcctggacctttcttcccttcccttggaggtatccctttgaatcaggcctctctcttctcatcagtctgtagcttccccccttgtataacctgctttcctttttacatttattaaaagtggattttgtaaaagcatttcattgacacgcgacctatcacagacaatggaattcgtcagtggtggtaagactgaaatcctgatgcttttcacacttcttgtctcttgctatgtatttctgcctctagccttgccatgttttgccttttttttttctttttggccaattcctttttatatgtgcccacaacagaggtggggagacacggagcaccctgggtccttcccagcgctgctgggcaggccccgtctccaggccccagctgttgaaactttgaagggcaacaaacaaccatccacactgccggaccctaggctgttcagggaggcagctcatttccaccccggccccaggacacccagcctgtgccccacaaggatctctctaaatgggagggattgaggctacttttctgccaagccctattaagtagtaatgtggggaaacccactgtgtcagtgcaggaagccctagacaaatgttttcaaataaatttcactgcccagcctgcacagatttccatttgaagtacttcccatccaccctgacacccaaaggggtttttttgttttgttttgtttttgagacagggtcttgctttgttgcccaggctggagtgcagtgacgtggtcatagctcactgcagcctcaacctcctgggctcaagtgaccctcctgcctcagcctcccaaagttctgagatgataggcatgagccattgtgcctagcctattttgatttttttcttagagtcaaggtcttgctctgttgcccaggctgatcttggacttgcgagccaccatgcctggctgggttttttaaaaatagaatctcactgatagcctgcaagaaacagatgcagtgcctgcttccgtatcagtccaaggagccctcgtgtttgccacctttacctttgaacctccccctgcctccctgcctgtgtccgcttttgcagctcaatgcagccatgacaaggaaagaaaagacaaaggaaggccagagagccgcgcagttctctgcaggtgcagatgcaggcagtggaggtggcctgagcaggcagaaggacaccaagcgccctatgttgcttgtcattcatgacgtggtcttggagcttctgactagttcagactgccacgccaaccccagaaaataccccacatgccagaaaagtgaagtcctaggtgtttccatctatgtttcaatctgtccatctaccaggcctcgcgataaaaacaaaacaaaaaaacgctgccaggttttagaagcagttctggtctcaaaaccatcaggatcctgccaccagggttcttttgaaatagtaccacatgtaaaagggaatttggctttcacttcatctaatcactgaattgtcaggctttgattgataattgtagaaataagtagccttctgttgtgggaataagttataatcagtattcatctctttgttttttgtcactcttttctctctaattgtgtcatttgtactgtttgaaaaatatttcttctataaaattaaactaacctgccttaaaa

SEQ ID NO: 30174 - DNA, 1566 bp, Homo Sapiens
gccggggaatgacgtcaatccgagctcgtcccggcctcaccagcgccatgctgggctcgcgagccgcggggttcgcgcggggcctgcgggctttggcactggcgtggctgccgggctggcggggccgctccttcgccctggcgcgtgcggcaggcgcgccccacggtggtgacttgcagccccccgcctgtcccgagccgcgcgggcgccagctcagtttgtccgcggcggcggtggtggactctgcgccccgccccctgcagccgtacttgcgcctcatgcggttggacaagcccattggaacctggcttctgtatttaccatgtacctggagcattggtttggcagctgaaccaggttgttttccagattggtacatgctctccctctttggcactggagctattctgatgcgtggagcaggctgtactattaatgacatgtgggaccaggactatgataaaaaggttacaagaacagccaatcgtccaatagccgctggagacatttcaacttttcagtcctttgtttttcttgggggacagctaaccctggcactgggtgttcttctgtgtctaaattactacagtatagctctgggagcaggatccttacttcttgtcatcacctacccactaatgaaaagaatttcatactggcctcaactagccttgggcttgacatttaattggggagcgttacttggatggtctgctatcaagggttcctgtgatccatctgtttgcctgcctctttatttttctggagttatgtggacactaatatatgacactatttatgcccatcaggacaaaagagatgatgttttgattggtcttaagtcaacggctctgcggttcggagaaaataccaagccgtggctcagcggcttcagtgttgcaatgctgggggcactgagcctagtgggtgtgaacagtggacagactgctccctactacgctgccctgggtgctgtaggagcccatctgactcaccagatttacactctagacatccacagacctgaggattgttggaataaatttatctccaaccgaacactgggactaatagtttttttagggattgtccttgggaatttgtggaaagaaaagaagacagacaaaacaaagaagggtatagagaataaaatagaaaattaatgaatgaaatttatctaggaatttttaaaacattttttacaaaatataattagatttgaatacaaaatctgatacaatatgttaaagaattaagaacctgaagatgaagatttagagcatatttacctggattttacttatttgctagcaaaattcccccttgtcacagaaaccagggactcttcaggatttgagatggccttgagtattttagttgatacattcttctgcccattataattctcacctgaagttatggggattgcacgggttttggcactttagaaaaagcctgatgtgggtcttacataaatgaatgtctgtataagaaaatggactcttttttttagggaaaaataaaagcaactatggcaaaaaaaaaaaaaaaaaaaaaaaaaaaaaa

SEQ ID NO: 30175 - DNA, 3472 bp, Homo Sapiens
tggcggccgccggcgtcgccgccatggacctaggacccttgaacatctgtgaagaaatgactattctgcatggaggcttcttgctggccgagcagctgttccaccctaaggcactggcagaattaacaaagtctgactgggaacgtgttggacggcccatcgtggaggccttaagggagatctcctcggctgcagcacactcccagccctttgcctggaagaagaaagccctgatcatcatctgggccaaggttctgcagccgcaccccgtgaccccgtccgacacagagacacggtggcaggaagacctgttcttctcggtgggcaacatgatccccaccatcaaccacaccatcctcttcgagctgctcaaatccctggaagcttctggactctttatccagctcctgatggccctgcccaccaccatctgccatgcagaactagagcgctttctggaacatgtgaccgttgacacttctgccgaagacgtggccttcttcctggacatctggtgggaggtgatgaagcacaagggtcacccgcaggaccccctgctctcccagtttagtgcaatggcccataagtacctgcctgccttagatgagttcccccatcctccaaagaggcttaggtcagacccagacgcgtgccccaccatgcccctgttggccatgctgctccgcgggctgacacagatccagagtcggatcctgggcccggggaggaagtgctgtgcgctggccaacctggctgacatgctgactgtgtttgcgctgacagaggacgacccccaggaggtgtctgcaaccgtgtatctggacaaactggccacggtgatctctgtgtggaactcggacacccagaatccctaccaccagcaggcgctggcagagaaggtgaaggaggcagaacgggatgtcagcctgacctcgctggccaaactccccagtgagaccattttcgtgggctgcgagttcctgcaccacctgctgcgggagtggggggaggagttgcaggccgtgctccgcagcagccaggggacaagttacgacagctaccggctgtgcgacagtctgacttccttcagccagaacgcgacgctctacctgaaccgcaccagcctgtccaaggaggacaggcaggtggtctctgagctggcggagtgtgtcagggacttcctgaggaaaacgagcacggtgctgaagaacagggccttggaggatatcacagcttccattgccatggccgtcatccagcagaagatggaccgccatatggaagtgtgctacatttttgcctctgagaagaagtgggccttctcggacgagtgggtagcctgcctggggagtaacagggccctcttccgagagccagacttggtgttgaggctgctggaaacagtgatagacgtcagcacagctgacagagccatccctgagtctcagatccggcaggtgatccacctgatcctggaatgttacgcagacctctccctgccaggtaaaaataaagtccttgcaggtatcctgcgttcctgggggcgaaagggcctctctgaaaagttgctggcttatgtggagggttttcaggaagacctcaatacaacttttaaccagctcactcagagtgcctccgaacagggcttggcaaaagctgtggcctccgtggcccgcctggtcatagtgcacccggaagtcacggtgaagaaaatgtgcagcctggctgtggtcaatctcggcacccacaagttcctggcccagattctcactgccttccctgcccttaggtttgtggaagtgcagggtcccaattcatctgccactttcatggtgtcatgcctcaaagaaaccgtctggatgaagttctctacacccaaggaagaaaagcaatttttagagctcctgaactgcctgatgagtcccgtgaaaccccaagggattccagtggctgctcttcttgagccagacgaggtgctgaaggaatttgtcctgcctttcttgaggttagatgttgaagaggtagacctcagtctgaggatcttcatccagactctagaggcaaacgcgtgccgagaggaatactggctccagacctgctccccgtttccactcctcttcagcttgtgccagctcttggaccgctttagcaaatactggccgcttcccaaggagaagcggtgcctctctttggataggaaggatctagcgatccatatcctggagctcctgtgtgagattgtatcagccaatgctgagaccttctccccggatgtctggatcaagtccctgtcctggctccaccgcaagttagaacagctagactggactgtgggcctgaggctgaagagcttcttcgaggggcacttcaagtgtgaagtgccagccacactttttgagatctgtaagctttcagaagacgagtggacctcccaggcccacccagggtacggggctggcacggggctcctggcctggatggagtgctgctgcgtctccagcggcatctcggagaggatgctgtctctcttggtggtggacgtgggcaatcctgaggaggtcagactgttcagcaaaggctttctggtggccctggtgcaagtcatgccttggtgcagccctcaggagtggcagcgccttcaccagctgaccaggagactgctggagaagcagctcctccatgtcccttatagcctggaatatattcagtttgttcccctgctcaacctgaagccctttgcccaggagttgcaactctccgtcctcttcctgaggactttccagtttctctgcagccatagctgtcgtaattggcttcctctggaaggctggaaccacgtggtcaaactcctctgtggcagtctgacccgcctcctggactcagtcagggcgatacaggcagctggcccttgggttcaaggaccagagcaggacctgacccaggaagccctgtttgtttacacccaggtgttctgccatgctctgcacatcatggccatgctccacccggaggtctgtgagccactctacgttttagccttggaaaccctcacctgctatgagactttgagcaagaccaacccttctgtcagctccttgctccagagggcacacgagcagcgcttcttaaagtccattgctgagggcattggccctgaagaacggcgccaaaccctgttgcagaagatgagcagcttctgacttggcgtggggagctgggccccaacatggcgggtctgcagaagatcagcagcttcttacctgtgcgggagcgaaaaagctgggcttcaacatggcaggtctgtaggggtcagacccgagcagcctggactttacagttatgtgaaactgtccacaaaaagtcatggcaataatggtgtaaagaaaatagtttcttgggtatttgtaacgtacaaactatcataaaaattctcctctttcgcatctcaaaaaaaaaaaaaaaaaaaaaaaaa

SEQ ID NO: 30176 - DNA, 3564 bp, Homo Sapiens
gcggcggcggcggcggcggcggcagcggcggccaagcggccaggttggcggccggggctccgggccgcgcgaggccacggccacgccgcgccgctgcgcacaaccaacgaggcagagcgccgcccggcgcgagactgcggccgaagcgtggggcgcgcgtgcggaggaccaggcgcggcgcggctgcggctgagagtggagcctttcaggctggcatggagagcttaaggggcaactgaaggagacacactggccaagcgcggagttctgcttacttcagtcctgctgagatactctctcagtccgctcgcaccgaaggaagctgccttgggatcagagcagacataaagctagaaaaatttcaagacagaaacagtctccgccagtcaagaaaccctcaaaagtattttgccatggatatagaagatgaagaaaacatgagttccagcagcactgatgtgaaggaaaaccgcaatctggacaacgtgtcccccaaggatggcagcacacctgggcctggcgagggctctcagctctccaatgggggtggtggtggccccggcagaaagcggcccctggaggagggcagcaatggccactccaagtaccgcctgaagaaaaggaggaaaacaccagggcccgtcctccccaagaacgccctgatgcagctgaatgagatcaagcctggtttgcagtacacactcctgtcccagactgggcccgtgcacgcgcctttgtttgtcatgtctgtggaggtgaatggccaggtttttgagggctctggtcccacaaagaaaaaggcaaaactccatgctgctgagaaggccttgaggtctttcgttcagtttcctaatgcctctgaggcccacctggccatggggaggaccctgtctgtcaacacggacttcacatctgaccaggccgacttccctgacacgctcttcaatggttttgaaactcctgacaaggcggagcctcccttttacgtgggctccaatggggatgactccttcagttccagcggggacctcagcttgtctgcttccccggtgcctgccagcctagcccagcctcctctccctgtcttaccaccattcccacccccgagtgggaagaatcccgtgatgatcttgaacgaactgcgcccaggactcaagtatgacttcctctccgagagcggggagagccatgccaagagcttcgtcatgtctgtggtcgtggatggtcagttctttgaaggctcggggagaaacaagaagcttgccaaggcccgggctgcgcagtctgccctggccgccatttttaacttgcacttggatcagacgccatctcgccagcctattcccagtgagggtcttcagctgcatttaccgcaggttttagctgacgctgtctcacgcctggtcctgggtaagtttggtgacctgaccgacaacttctcctcccctcacgctcgcagaaaagtgctggctggagtcgtcatgacaacaggcacagatgttaaagatgccaaggtgataagtgtttctacaggaacaaaatgtattaatggtgaatacatgagtgatcgtggccttgcattaaatgactgccatgcagaaataatatctcggagatccttgctcagatttctttatacacaacttgagctttacttaaataacaaagatgatcaaaaaagatccatctttcagaaatcagagcgaggggggtttaggctgaaggagaatgtccagtttcatctgtacatcagcacctctccctgtggagatgccagaatcttctcaccacatgagccaatcctggaagggtctcgctcttacacccaggctggagtgcagtggtgcaatcatggctcactgcagcctcgacctcctgggctcttaagcgatccttccacctcaaccttccaaggagctgggactacagaaccagcagatagacacccaaatcgtaaagcaagaggacagctacggaccaaaatagagtctggtgaggggacgattccagtgcgctccaatgcgagcatccaaacgtgggacggggtgctgcaaggggagcggctgctcaccatgtcctgcagtgacaagattgcacgctggaacgtggtgggcatccagggatccctgctcagcattttcgtggagcccatttacttctcgagcatcatcctgggcagcctttaccacggggaccacctttccagggccatgtaccagcggatctccaacatagaggacctgccacctctctacaccctcaacaagcctttgctcagtggcatcagcaatgcagaagcacggcagccagggaaggcccccaacttcagtgtcaactggacggtaggcgactccgctattgaggtcatcaacgccacgactgggaaggatgagctgggccgcgcgtcccgcctgtgtaagcacgcgttgtactgtcgctggatgcgtgtgcacggcaaggttccctcccacttactacgctccaagattaccaagcccaacgtgtaccatgagtccaagctggcggcaaaggagtaccaggccgccaaggtacactgaggaggggacggctccgtcttcacattgtgcacagatctgaggatgggattagcgaagctgtggagactgcacatccggacctgcccatgtctcaaaacaaacacatgtacagtggctctttttccttctcaaacactttaccccagaagcaggtggtctgccccaggcataaagaaggaaaattggccatctttcccacctctaaattctgtaaaattatagacttgctcaaaagattcctttttatcatccccacgctgtgtaagtggaaagggcattgtgttccgtgtgtgtccagtttacagcgtctctgccccctagcgtgttttgtgacaatctcccctgggtgaggagtgggtgcacccagccccgaggccagtggttgctcggggccttccgtgtgagttctagtgttcacttgatgccggggaatagaattagagaaaactctgacctgccgggttccagggactggtggaggtggatggcaggtccgactcgaccatgacttagttgtaagggtgtgtcggctttttcagtctcatgtgaaaatcctcctgtctctggcagcactgtctgcactttcttgtttactgtttgaagggacgagtaccaagccacaaggaacacttcttttggccacagcataagctgatggtatgtaaggaaccgatgggccattaaacatgaactgaacggttaaaagcacagtctatggaacgctaatggagtcagcccctaaagctgtttgctttttcaggctttggattacatgcttttaatttgattttagaatctggacactttctatgaatgtaattcggctgagaaacatgttgctgagatgcaatcctcagtgttctctgtatgtaaatctgtgtatacaccacacgttacaactgcatgagcttcctctcgcacaagaccagctggaactgagcatgagacgctgtcaaatacagacaaaggatttgagatgttctcaataaaaagaaaatgtttcact

SEQ ID NO: 30177 - DNA, 2846 bp, Homo Sapiens
acggctccgcccttctcaagatggcgctgcactcaatgcggaaagcgcgtgagcgctggagcttcatccgggcacttcataagggatccgcagctgctcccgctctccagaaagacagcaagaagcgagtattttccggcattcaacctacaggaatcctccacctgggcaattacctgggagccattgagagctgggtgaggttacaggatgaatatgactctgtattatacagcattgttgacctccactccattactgtcccccaagacccagctgtccttcggcagagcatcctggacatgactgctgttcttcttgcctgtggcataaacccggaaaaaagcatccttttccaacaatctcaggtgtctgaacacacacaattaagttggatcctttcctgcatggtcagactacctcgattacaacatttacatcagtggaaggcaaagactaccaagcagaagcacgatggcacggtgggcctgctcacatacccagtactccaggcagccgacattctgttgtacaagtccacacacgttcctgttggggaggatcaagtccagcacatggaactagttcaggatctagcacaaggtttcaacaagaagtatggggagttctttccagtgcccgagtccattctcacatccatgaagaaggtaaaatccctacgtgatccttctgccaaaatgtcgaaatcagaccctgacaaactggccaccgtccgaataacagacagcccagaggagatagtgcagaaattccgcaaggctgtgacagacttcacctcggaggtcacctatgacccggctggccgcgctggcgtgtccaacatagtggcggtgcatgccgcggtgacggggctctccgtggaggaagtggtgcgccgcagcgcgggcatgaacactgctcgctacaagctggccgtggcagatgctgtgattgagaagtttgccccaattaagcgtgaaattgaaaaactgaagctggacaaggaccatttagagaaggttttacaaattggatcagcaaaagccaaagaattagcatacactgtgtgccaggaggtgaagaaattggtgggttttctataggaagtttcaacgaatcacagcaaggcttttgtgccttgcactccatgcattctgataacggcagctttcctaaaaagaaaaagttatagttttgggacatttaatttggtatagctgattattggctttatttgatgaatattgctttgtagctttgaaatacgacagtgttccaaatcccatcaacaaaatgctgtgaacaacaacaacaaaaaataaatcaagaaggcatagctgtctgaatccccaattattgaggcacactccttggcctgcagaaatgtgattgaagtaaggagtaatttgggaaatggagtatcatttgtgcttctctctggagtacttactgtaacagatgcacacgttatctacttcaacccttttataaagcaatatatagaggtcttagatgtataatccttgagatgccatttgatcagatgccaatttgtattcagagctcataaaaacaagtccattcttatagtttgtttgtcactgagacggtgcctgatttaatatatttaagctgcttaacttgttttccaagagataacaccaactgttccagcaataatttgttttttaattcagagatatgggatatgatcttctaaggaggttgcattattttgacctgatttatttattgtacaagagcccaagtccctgaattatattcttaataagtgctttcttgcattcatttcagtttagtctcaccaaccccctatgaattaggagaattattgtcattttacacatgaggaaagtgaggctgagagaatccaattagcttgtacgatatcactccataagagaagcaaatctgagagtaaaacccttaccccttattcttaagaatagtgcttgtttattcagtacaaaaaaaatgctgaaaggcagcgttttttagactctaaacattctgattttgaaggtgggtgttggaacgactgatgatgttttttatatcatcaattcagccaatggatgcgaacttaaaatctggattcacagaaccgtggtcacatttccccatcaaaatccccaaggcgggtcccaagttctctcctctacgctcattgcagaaatactttgaaataggttctgccagtctacaatagcagtgaagactgacaaatcagatattcccaatgactgacagcttctcatcttgcctctacctcagttaagtaatgtcaccctgaaacctagcttttctgcacttccatttctgacacctgaaaatgaaaatgataatcctaacttatacaccaagacctgttagcaagatcgattttgtaacagaaattgcttataagttttttatcagtaaggaccatgatcaccatttgtacatacataactaggttgttgagcaaagcatttttgctcatgtttcttaaggaagtagagtagtccttgtgtcagaacacatgttaatccacaaaacgccgcatcccagattccaaattaaaacatcgtttttaggattcttggagctagcctggatcatgggtaaaggaaacattttgccttttgtatcttatactggaatgggatgtctgtaagtcctagaacctctttgagcatatttcttacaagcctctgttttttcccctttaaaggaaactttgaaaggattgtgaatactggaaaatgacaaaactaaaggtagatctatcaagccaaaaaaaaaaaaaaaaaaaaaaaaaaaaaaaaaaaaaaaaaaaaaaaaaa

SEQ ID NO: 30178 - DNA, 1736 bp, Homo Sapiens
cggcggcggcggcggcggtggtggctcgcgcagcttgttggctcgctatataaaggagagaagcgggcggaccggacggctggagctgcagccggtggcggcagcggcggcgcagggagcggtgaccggtggtggtttccctccttggcgcggggtggggagcgggcaacgccccccggacccctgaagggtcgtggctttttttttttttttaaggcgattctcgaggttttcagctgcgggaggagtgcccccctcctcctcctctctccgctctcccctactccttcaggattgattttgtttaaaattttttccccaatcttgcggtgatttgggtcaccctccgggtgttatagtttttttttttttggttttgtttttatcttgttttcttggggttgccccctcttgtttgtgttgtgtgtggaaatggcgaactcggcaaatacaaacaccgtgcctaaattatacagatctgtgattgaagatgtcattaatgatgtgagagacatctttctggatgatggagtggatgaacaagtactgatggaactaaaaactttatgggaaaacaaactaatgcagtccagggcagtagatggatttcattcagaagagcagcagcttctactgcaagttcaacagcagcatcaaccccagcagcagcagcatcaccaccatcaccatcatcagcaagctcagcctcagcagacagtacctcagcaagcgcagacccagcaggttcttattcctgcatcacagcaagccacagcaccacaagttattgttccagattctaagttgatacagcatatgaatgcatcaaacatgagtgctgctgctacagctgctaccttagcactccctgcaggtgtgactcctgttcagcagatattaacaaattcaggccagcttcttcaggtggtcagagcagccaatggtgcccaatatatctttcagcctcagcagtcagtggttctacaacaacaggttataccacaaatgcagcctggtggagtacaagctcctgttatacagcaggtgctggctcctcttcctggagggatttcaccacagacaggtgtcatcatccagcctcagcaaatcttatttacaggaaataagactcaagttatacctacgacagtggcagcacctacaccagcccaagcacagataactgcaactggccagcagcaaccgcaggcccagcctgctcaaacacaagctccattggtcttacaagttgatggaactggggatacatcatctgaagaagatgaagatgaagaagaagactatgatgatgatgaggaggaagacaaagagaaagatggagctgaagatgggcaggtggaagaagagcccctcaatagtgaagatgatgtgagtgatgaggaaggacaggaactctttgacacagaaaatgttgttgtatgccaatatgataagatacacagaagtaaaaacaaatggaaatttcatctcaaggatggcattatgaatcttaatggaagagattatatattttccaaagccattggagatgcagaatggtgaagagttgctttttttcttttataaataaaagaaacttaaaaaaaatgtaaagcggacagtttgaaacttggggcatatgccaaccaaaacttcgtttctgcatgtcagaaaagtgcagtagaagcaaagctactggaacaaagatagaccttgacaacatagacactacttac

SEQ ID NO: 30179 - DNA, 5834 bp, Homo Sapiens; identical to SEQ ID NO: 22393

SEQ ID NO: 30180 - DNA, 2480 bp, Homo Sapiens
gcggggctcaggtgcctggcagcgcggccggggcccaggaaggggagggggcgaacgctggagcgaggcgggggcgggtgaggagggggtgacgccggacgcgtcgacagcgcgagggttcgcgcgtgagctgcgcgggtcgggcctggtaccgagctttcctgggggctagcaggtcgtggacgccggctcctggaggagagccggtaggagggaggtgaaggtgtccgcggcgtcgtcgacggcggcgccggccatggaggagacgcagccgccgccgcagcctaagctgcccctgtgcgacagcctcatgatctggctgcagacattcaatactgcctcaccttgtcaagatgtcaaacagctgactagtggagttgccatggcacaagttcttcatcaaattgatgcagcttggtttaacgaatcttggttaagccgaattaaagaggatgttggggacaactggagaataaaggccagtaatgtaaagaaggtccttcaaggaattatgagttattatcatgagtttttggggcagcagatttcagaagcacttatccctgatttaaaccaaataaccgaatgttcagatccagtggagcttgggaggttgctccagcttattttaggttgtgcgatcaactgtgaaaagaagcaagaacatattcaaaatataatgacactggaagagtctgttcaacatgtggtcatgactgctattcaagagttgatgagtaaagaaatattgagctctcctccaaatgatgctgttggagaattggagcaacagcttaaaagagccttggaagaacttcaggaagcactagcagaaaaagaagagctgaggcaaagatgtgaagaattggatatgcaggtgactacacttcaagatgaaaagaattcactggtttctgaaaatgagatgatgaatgaaaaacttgaccagttggatggctcttttgatgatccaaacacagtggttgcaaaaaagtattttcatgcacaattacaactagaacaattacaggaagaaaacttcaggcttgaagctgcaaaagatgattaccgtgttcactgtgaagaacttgaaaagcagctaatcgaattccagcataggaatgatgaattgactagtcttgcagaagaaacaagagccctgaaagatgaaatagatgttcttagggctacctctgataaagcaaataaactggagtcaacagttgagatatatcgtcagaagctacaagatctgaatgaccttcgcaagcaggtgaaaactttacaggaaaccaacatgatgtatatgcataatacagtcagcttagaagaagaattaaaaaaagcaaatgcagcacgtacacaattagaaacatacaaaaggcaggttcaagatcttcatgttaaactttcctccgaatccaagagggcagacacactagcgtttgaaatgaagcggcttgaagaaaaacatgaagctttacttaaggaaaaagagagactaattgagcagcgtgatactttgaaagaaacaaatgaagagcttcgatgttcacaagtacaacaggaccacctaaaccaaacagatgcatctgctacaaaaagttatgagaatcttgctgctgagattatgccagtggaatatagggaggtgtttattcgactgcaacatgaaaataagatgcttcgcttacagcaagaaggctctgagaatgaacgtattgaggaacttcaggagcagctagaacagaaacaccgtaaaatgaatgaactggaaactgagcagaggctgagcaaagagcgtattagagaattgcagcagcagattgaggacctccagaaatctttacaggaacaaggttccaagtctgaaggcgaaagttccagcaaattaaagcagaagttggaagctcatatggaaaaactcacagaggtccatgaagaattacagaagaaacaagaactcattgaagatcttcagccagatataaatcaaaatgtacaaaagatcaatgaacttgaagctgctcttcagaagaaagatgaagatatgaaagcaatggaggaaagatataaaatgtacttggagaaagccagaaatgtaataaaaactttggatcccaagttaaatccagcatcagctgaaataatgctactaagaaagcagttggcagagaaagagagaagaattgagattctggagagtgaatgcaaagtagcaaaattccgtgattatgaagaaaaactcattgtttctgcgtggtataataagagtctagcattccagaaactggggatggaatctagacttgtgagcggcggtggtgcctgcagtgacactggtgcgtgcactcctgcgcggtctttcttagcgcagcaacggcacatcaccaacaccagaagaaatctctctgttaaagtccctgctacaacatctgattaaactgcaaaaaaaaaaaaaaaaaaaaaaaaaaaaaaaa

SEQ ID NO: 30181 - DNA, 4456 bp, Homo Sapiens
cgccgccgcgcgagggagcgaccagggcagcgcgacgcgggcagagcgagcgccgcggaccccggaggcgagcggccgagggagcccagtcccaacttcgggccccggccccgcgcgccccggcccggccccgcgaggtctcggcgcggaagatggccggcggcgtggacggccccatcgggatcccgttccccgaccacagcagcgacatcctgagtgggctgaacgagcagcggacgcagggcctgctgtgcgacgtggtgatcctggtggagggccgcgagttccccacgcaccgctcggtgctggccgcctgcagccagtacttcaagaagctgttcacgtcgggcgccgtggtggaccagcagaacgtgtacgagatcgacttcgtcagcgccgaggcgctcaccgcgctcatggacttcgcctacacggccacgctcaccgtcagcacagccaacgtgggtgacatcctcagcgccgcccgcctgctggagatccccgccgtgagccacgtgtgcgccgacctcctggaccggcagatcctggcggccgacgcgggcgccgacgccgggcagctggaccttgtagatcaaattgatcagcgcaacctcctccgcgccaaggagtacctcgagttcttccagagcaaccccatgaacagcctgccccccgcggccgccgccgccgctgccagcttcccgtggtccgcctttggggcgtccgatgatgacctggatgccaccaaggaggccgtggccgccgctgtggccgccgtggccgcgggcgactgcaacggcttagacttctatgggccgggccccccggccgagcggcccccgacgggggacggggacgagggcgacagcaacccgggtctgtggccagagcgggatgaggacgcccccaccgggggtctctttccgccgccggtggccccgccggccgccacgcagaacggccactacggccgcggcggagaggaggaggccgcctcgctgtcggaggcggcccccgagccgggcgactctccgggcttcctgtcgggagcggccgagggcgaggacggggacgggcccgacgtggacgggctggcggccagcacgctgctgcagcagatgatgtcatcggtgggccgggcgggggccgcggcgggggacagcgacgaggagtcgcgggccgacgacaagggcgtcatggactactacctgaagtacttcagcggcgcccacgacggcgacgtctacccggcctggtcgcagaaggtggagaagaagatccgagccaaggccttccagaagtgccccatctgcgagaaggtcatccagggcgccggcaagctgccgcgacacatccgcacccacacgggcgagaagccctacgagtgcaacatctgcaaggtccgcttcaccaggcaggacaagctgaaggtgcacatgcggaagcacacgggcgagaagccgtacctgtgccagcagtgcggcgccgcctttgcccacaactacgacctgaagaaccacatgcgcgtgcacacgggcctgcgcccctaccagtgcgacagctgctgcaagaccttcgtccgctccgaccacctgcacagacacctcaagaaagacggctgcaacggcgtcccctcgcgccgcggccgcaagccccgcgtccggggcggggcgcccgaccccagcccgggggccaccgcgacccccggcgcccccgcccagcccagctcccccgacgcccggcgcaacggccaggagaagcactttaaggacgaggacgaggacgaggacgtggccagccccgacggcttgggccggttgaatgtagcgggcgccggtggaggaggtgacagcggaggtggccccggggccgccaccgacggtaacttcacagccggactcgcctaaaaaccaaaaagagaaaacagaaacccgagaaagagagagacagagagagagaaaaaaaatcacccaccacccccccaaaaacacaaaaaaagaaaatctatctatatacagatatctatatctatatatatatatacagatatatatatatgacgcgtcacagaatctagggtagcgctttctcagatttccctcctttctgacgtttttctccctccgcaggggccccggccctccctggctccccttccccccaccaccccatcgctgggtttcggggcttggtttggggttttttgtaggacacaaggaatccgagaccccgcacagccccctgggcacccggcatggggcctggggcccgatccgaggccctgggctggggggagggtagacgtgggggcgctggggggggactggggtgggcttttaatttcctcccctcgctggtttctatgagtctttcagacaagaccttaaatgatttctgtctgctctgagcggacgttaaaatgggcccccgtcccccgacccgcaccctccttcctcagggcacttactaagggaggggtctccctctccatctccccagtggcctccccgcctccaaccctgcctgcggcctccccccgtcgcccaccccacgtctcctggccactgagacacaaacctatttatttctaggcctggagaaaggagatcggactggggttcccggtggggcgccaggatggctcctgggggtgctcctgccgccttccttcacggcacttacaaccggcgggacccccagggaccacccctcagggcgcccccccacccccgcccggtccacctagacccccacgtttggagattcaaaacttctgtcttcgtcctctcccccgagccccctctcccaaatttttaaagcactttttagatttttttttctctttcctccttaaaaacaaaatttatatatagatatatatatatatataaataatatacttttcctcagaggagcaggcaacagtgtgggataaacagagtcacgatcagaggaaccccagggtctggtgatggcagggatggggggagagagagaaaatccacaaattccaatgtcacaaaagcaataaaacaaactagaaaaaaaaaaggttttacaaaatgaaaggaaggaaaaaaaaaaaggcaaccaaccacattagaagtcttggcactttgtaacggaacgggtactacactttatcttaattcttaatttaaaaacatgtttacaagttacaaccaacttctatgaaaagttgaaaagacaaaaaaaaaaaaaaaaagcgagcgagagagagagcgagagagagagcgagagcagaagaaattcctaaaagtcgatttatttttgtacaaaataataaaaaaaaaaacccaccacaaacgtagaatccacttctgttccccaaaaagcgagaaggggggttcaggaggaagccatcgcaggggacctgggagacgccccgaggtgtttgtgcttcacccccagacgtcagcctcgaaggcaggactgtggggtgttcgtgctgtgttccccccgctccccctttctgtccccttttttggttctgacgtgaagaggtcttagcgcccgcttctgtccacggggtctctccttcctcctccctagctcagggatgggccttccagccggagcaccccgatccccatccggcaccccccaatcccccaacacgcctgtccctcccgcatggccaccaaggagctggaccttggatgcgcctaccctgctgaggtgggtgacaggggccccccacctccagggccttagaaccaccgcccctctccccaccccaggcacccctctttttactcaaaggcactgactgtaatccagggggactgggacctgcctccccccaacctctggctcccacaaggcccggtgttgaccgagccacaggccacggacaggggccggggttggggagactatgtcgccagatgccaggacgccctcaccccgtttgcatatgcaatgctagcatgggaccccgaaaatagacgctctgctgcactgagacttcttgtcaatgcccaaccggcgggggggtgtctccctgcccccgacccccccatacccccttctctgtgacacacacatcttctcgtctctttttctttcattgttaaagggaagctttttaagaaggcaattttcatattgtttctacgggatggttttggttcccttcccttcccacccccccttaagcctgtcagccccctccaaatgtctcaggatcccccctctcccctggggctgggtgacagcaccccggctgcgttcacaccccagtgtcacagggcgagctgttctggagagaaaaccatctgtcgtggctgagcggggagcttgaacacccaggccagggacacccctccccagctcccagagaggccccctgaggggtgagccctctttccaccttcccctatccatgcaccccctcgcaataaaaccaactctaaaatcaaaaaaaaaaaaaaaa

SEQ ID NO: 30182 - DNA, 4007 bp, Homo Sapiens
gacagataccctccttccggccgcgccactcgggaggcggatcccgtgggcctgaggaggcttcccccgcccggtttgctttccctccctcgctggcgctgccgcgagtccaccgagcggcctctgaggagcagccgcaggaggaggaggaggtcgtcgggggcggcgggcggagaccgcgctctcgcttccccggcggcggcaagggcaggacaatggaggtggcggtggagaaggcggtggcggcggcggcagcggcctcggctgcggcctccggggggccctcggcggcgccgagcggggagaacgaggccgagagtcggcagggcccggactcggagcgcggcggcgaggcggcccggctcaacctgttggacacttgcgccgtgtgccaccagaacatccagagccgggcgcccaagctgctgccctgcctgcactctttctgccagcgctgcctgcccgcgccccagcgctacctcatgctgcccgcgcccatgctgggctcggccgagaccccgccacccgtccctgcccccggctcgccggtcagcggctcgtcgccgttcgccacccaagttggagtcattcgttgcccagtttgcagccaagaatgtgcagagagacacatcatagataacttttttgtgaaggacactactgaggttcccagcagtacagtagaaaagtcaaatcaggtatgtacaagctgtgaggacaacgcagaagccaatgggttttgtgtagagtgtgttgaatggctctgcaagacgtgtatcagagctcatcagagggtaaagttcacaaaagaccacactgtcagacagaaagaggaagtatctccagaggcagttggtgtcaccagccagcgaccagtgttttgtccttttcataaaaaggagcagctgaagctgtactgtgagacatgtgacaaactgacatgtcgagactgtcagttgttagaacataaagagcatagataccaatttatagaagaagcttttcagaatcagaaagtgatcatagatacactaatcaccaaactgatggaaaaaacaaaatacataaaattcacaggaaatcagatccaaaacagaattattgaagtaaatcaaaatcaaaagcaggtggaacaggatattaaagttgctatatttacactgatggtagaaataaataaaaaaggaaaagctctactgcatcagttagagagccttgcaaaggaccatcgcatgaaacttatgcaacaacaacaggaagtggctggactctctaaacaattggagcatgtcatgcatttttctaaatgggcagtttccagtggcagcagtacagcattactttatagcaaacgactgattacataccggttacggcacctccttcgtgcaaggtgtgatgcatccccagtgaccaacaacaccatccaatttcactgtgatcctagtttctgggctcaaaatatcatcaacttaggttctttagtaatcgaggataaagagagccagccacaaatgcctaagcagaatcctgtcgtggaacagaattcacagccaccaagtggtttatcatcaaaccagttatccaagttcccaacacagatcagcctagctcaattacggctccagcatatgcagcaacaggtaatggctcagaggcaacaggtgcaacggaggccagcacctgtgggtttaccaaaccctagaatgcaggggcccatccagcaaccttccatctctcatcagcaaccgcctccacgtttgataaactttcagaatcacagccccaaacccaatggaccagttcttcctcctcatcctcaacaactgagatatccaccaaaccagaacataccacgacaagcaataaagccaaaccccctacagatggctttcttggctcaacaagccataaaacagtggcagatcagcagtggacagggaaccccatcaactaccaacagcacatcctctactccttccagccccacgattactagtgcagcaggatatgatggaaaggcttttggttcacctatgatcgatttgagctcaccagtgggagggtcttataatcttccctctcttccggatattgactgttcaagtactattatgctggacaatattgtgaggaaagatactaatatagatcatggccagccaagaccaccctcaaacagaacggtccagtcaccaaattcatcagtgccatctccaggccttgcaggacctgttactatgactagtgtacaccccccaatacgttcacctagtgcctccagcgttggaagccgaggaagctctggctcttccagcaaaccagcaggagctgactctacacacaaagtcccagtggtcatgctggagccaattcgaataaaacaagaaaacagtggaccaccggaaaattatgatttccctgttgttatagtgaagcaagaatcagatgaagaatctaggcctcaaaatgccaattatccaagaagcatactcacctccctgctcttaaatagcagtcagagctctacttctgaggagactgtgctaagatcagatgcccctgatagtacaggagatcaacctggacttcaccaggacaattcctcaaatggaaagtctgaatggttggatccttcccagaagtcacctcttcatgttggagagacaaggaaagaggatgaccccaatgaggactggtgtgcagtttgtcaaaacggaggggaactcctctgctgtgaaaagtgccccaaagtattccatctttcttgtcatgtgcccacattgacaaattttccaagtggagagtggatttgcactttctgccgagacttatctaaaccagaagttgaatatgattgtgatgctcccagtcacaactcagaaaaaaagaaaactgaaggccttgttaagttaacacctatagataaaaggaagtgtgagcgcctacttttatttctttactgccatgaaatgagcctggcttttcaagaccctgttcctctaactgtgcctgattattacaaaataattaaaaatccaatggatttgtcaaccatcaagaaaagactacaagaagattattccatgtactcaaaacctgaagattttgtagctgattttagattgatctttcaaaactgtgctgaattcaatgagcctgattcagaagtagccaatgctggtataaaacttgaaaattattttgaagaacttctaaagaacctctatccagaaaaaaggtttcccaaaccagaattcaggaatgaatcagaagataataaatttagtgatgattcagatgatgactttgtacagccccggaagaaacgcctcaaaagcattgaagaacgccagttgcttaaataatatgcagcaccactagcttgtgctggtttttagatttttttgttttcaaaaaaacatttgtcagtaatttaacatcactacaaaaagaagagtttgtgactattctcatctctgttttggacgtttactagactttgatttccttaatagcccatttctgttaacctcttatcactaagaaagaaaggaaagaaggagatgaatagaagaaagaaaatggaaagaaggaaaaaaggaggatagaaaaaggatggaagaaagaagcattgaaaacaaagacattcttcccacttcttggatttttaaaccacagtctggagtgatagctactgtagaaaggaaatagactttgtatgaactctttaagttgaaaagtaaaaaatatatgtggtttggatgtgtgctttaattcagctttagaaattaataccactacccgtgaattatatggcctgacaatatgaattaggtgtactgtactgaagaacagtactccacaaacatgggtggtaacaagagttccatcccaggaggccaaacggtgcaacagaagggtaggttagatgctattaagaaggcacttaatagtacatcatgtaagatggcaactgtattaaagaaaaatccggaaaacaaaaa

SEQ ID NO: 30183 - DNA, 2228 bp, Homo Sapiens
tcagcccacttccggggagggaggcagaggaacccctccccgccgctcacccctaagcccagccctcggctcccacccttgtgtacctgggccgaaccattcaccggagcgcgcagcgggtggagtgtggctcggaggaccgcggcgggtcaagcacctttctcccccatatctgaaagcatgccctttgtccacgtcgtttacgctcattaaaacttccagaatgcaacaggacggacttggagtagggacaaggaacggaagtgggaaggggaggagcgtgcacccctcctggccttggtgcgcgccgcgccccctaaggtactttggaagggacgcgcgggccagacgcgcccagacggccgcgatggcgctgttggccggcgggctctccagagggctgggctcccacccggccgccgcaggccgggacgcggtcgtcttcgtgtggcttctgcttagcacctggtgcacagctcctgccagggccatccaggtgaccgtgtccaacccctaccacgtggtgatcctcttccagcctgtgaccctgccctgtacctaccagatgacctcgacccccacgcaacccatcgtcatctggaagtacaagtctttctgccgggaccgcatcgccgatgccttctccccggccagcgtcgacaaccagctcaatgcccagctggcagccgggaacccaggctacaacccctacgttgagtgccaggacagcgtgcgcaccgtcagggtcgtggccaccaagcagggcaacgctgtgaccctgggagattactaccagggccggaggattaccatcaccggaaatgctgacctgacctttgaccagacggcgtggggggacagtggtgtgtattactgctccgtggtctcagcccaggacctccaggggaacaatgaggcctacgcagagctcatcgtccttgactggctcttcgtggttgtggtatgcctggctgccttcctcatcttcctcctcctgggcatctgctggtgccagtgctgcccgcacacttgctgctgctacgtcaggtgcccctgctgcccagacaagtgctgctgccccgaggccctgtatgccgccggcaaagcagccacctcaggtgttcccagcatttatgcccccagcacctatgcccacctgtctcccgccaagaccccacccccaccagctatgattcccatgggccctgcctacaacgggtaccctggaggataccctggagacgttgacaggagtagctcagctggtggccaaggctcctatgtacccctgcttcgggacacggacagcagtgtggcctctgaagtccgcagtggctacaggattcaggccagccagcaggacgactccatgcgggtcctgtactacatggagaaggagctggccaacttcgacccttctcgacctggcccccccagtggccgtgtggagcgggccatgagtgaagtcacctccctccacgaggacgactggcgatctcggccttcccggggccctgccctcaccccgatccgggatgaggagtggggtggccactccccccggagtcccaggggatgggaccaggagcccgccagggagcaggcaggcgggggctggcgggccaggcggccccgggcccgctccgtggacgccctggacgacctcaccccgccgagcaccgccgagtcagggagcaggtctcccacgagtaatggtgggagaagccgggcctacatgcccccgcggagccgcagccgggacgacctctatgaccaagacgactcgagggacttcccacgctcccgggacccccactacgacgacttcaggtctcgggagcgccctcctgccgaccccaggtcccaccaccaccgtacccgggaccctcgggacaacggctccaggtccggggacctcccctatgatgggcggctactggaggaggctgtgaggaagaaggggtcggaggagaggaggagaccccacaaggaggaggaggaagaggcctactacccgcccgcgccgcccccgtactcggagaccgactcgcaggcgtcccgagagcgcaggctcaagaagaacttggccctgagtcgggaaagtttagtcgtctgatctgacgttttctacgtagcttttgtatttttttttttaatttgaaggaacactgatgaagccctgccatacccctcccgagtctaataaaacgtataatcacaaaaaaaaa

SEQ ID NO: 30184 - DNA, 2305 bp, Homo Sapiens
gagacggagtttccctcttgttgcccaggctggaaatggcgcgatctcggctcacagcaacctctgcctcccggatttaagcgattctcctgcttcagcctcccgagtagctgggattacaggcatgcaccaccatgcctggctaattttgtatttctagtagagatggggtttctccatgttggtcaggctggtcttgaactcccgacctcaggtgatccacctgccttggcctcccaaagtgctgggattacaggcgtgacgactgcacctgcagccgcctagtcctcttctccttctctttgatgattcagggcctcggcttccctcacgatattgcagaaagacacagctttcctcttcctctccaaaccacctcgaagcaggggcataattggaatatcatttggagaaagtgtcatggaagttctgcgtccacagcttataagatttgatggccggaattacaggaagaatccagtccaagaacagacctatcaacatgaagaagatgaagaggacttctatcaaggctccatggagtgtgctgatgagccctgtgatgcctacgaggtggagcagaccccacaaggattccggtctactttgagggcccccagcttgctctataagcatatagttggaaagagaggggacactaggaagaaaatagaaatggagaccaaaacttctattagcattcctaaacctggacaagacggggaaattgtaatcactggccagcatcgaaatggtgtaatttcagcccgaacacggattgatgttcttttggacacttttcgaagaaagcagcccttcactcacttccttgcctttttcctcaatgaagttgaggttcaggaaggattcctgagattccaggaggaagtactggcgaagtgctccatggatcatggggttgacagcagcattttccagaatcctaaaaagcttcatctaactattgggatgttggtgcttttgagtgaggaagagatccagcagacatgtgagatgctacagcagtgtaaagaggaattcattaatgatattcctgggagacccctagaagtggagatgccagggatagaatacatgaatgatgatcctggcatggtggatgttctttacgccaaagtccatatgaaagatggctccaacaggctacaagaattagttgatcgagtgctggaacgttttcaggcatctggactaatagtgaaagagtggaatagtgtgaaactgcatgctacagttatgaatacactattcaggaaagaccccaatgctgaaggcaggtacaatctctacacagcggaaggcaaatatatcttcaaggaaagagaatcatttgatggccgaaatattttaaagttgtttgagaacttctactttggctccctaaagctgaattcaattcacatctctcagaggttcaccgtagacagctttggaaactacgcttcctgtggacaaattgacttctcctgaggtggatcttggaaagcactagaaactaaacatcttcaccaggtgctgaagaaaagtgtcttcgttttaattgccaagcagggatgtggacatttggatggtgactttcctgggtggttccccatagattcaccattgcctctaatggtgtctacacccgtcatactaccagctgagatggtggtgggcataaggagaatttgtgcctataacccttagtgtgttctggttttttttcttttaatttttaaattgtcgtaaaatactcataaaacatactgtcttcaccatttttaagtgcacagttcagtaacgttaactgttaatacattcataatgctgtgtggccgtcaccgccgtccatctccataggcttctcagcttgtaaaatggaaactgtacccattaaacagtaattcccactcctcccagcccccgcagccaccattctgctttctgtctctctggttttgactattctcagtatctcatataagtggaatcatacagtgacttgtctttttgtgactggcttatttcacttagcataatgtcctcaaggttcatccatgttgtgtcaggtgacaggatttccttcctgtattatacatataatggaatgttccgttacatgtgcgtaccacactctgttcctccatcagtgaacacttggcttgcttcctcttgactattgggagtagtgctaatacagacacgggggtgcaaatatctctttgagactctgcctttaattcctttaccacccagagttttatctttagcaaaataaccattaaagttgtttgccttttaa

SEQ ID NO: 30185 - DNA, 1292 bp, Homo Sapiens
atccagcttgggctccagttttctgcccgcctccttttacgttattgcggagcgacggcgccggacagtcaacgtcatctaggagcaccgagcagcttggctaaaagtaagggtgtcgtgctgatggccctgtgcgcactgacccgcgctctgcgctctctgaacctggcgcccccgaccgtcgccgcccctgccccgagtctgttccccgccgcccagatgatgaacaatggcctcctccaacagccctctgccttgatgttgctcccctgccgcccagttcttacttctgtggcccttaatgccaactttgtgtcctggaagagtcgtaccaagtacaccattacaccagtgaagatgaggaagtctgggggccgagaccacacaggccgaatccgggtgcatggtattggcgggggccacaagcaacgttatcgaatgattgactttctgcgtttccggcctgaggagaccaagtcaggaccctttgaggagaaggttatccaagtccgctatgatccctgtaggtcagcagacatagctctggttgctgggggcagccggaaacgctggatcatcgccacagaaaacatgcaggctggagatacaatcttgaactctaaccacataggccgaatggcagttgctgctcgggaaggggatgcgcatcctcttggggctctgcctgtggggaccctcatcaacaacgtggaaagtgagccaggccggggtgcccaatatatccgagctgcagggacgtgtggtgtgctactgcggaaggtgaatggcacagccattatccagctgccctctaagaggcagatgcaggtgctggaaacgtgcgtagcaacagtaggccgagtatccaacgttgatcataacaaacgggtcattggcaaggcaggtcgcaaccgctggctgggcaagaggcctaacagtgggcggtggcaccgcaaggggggctgggctggccgaaagattcggccactaccccccatgaagagttacgtgaagctgccttctgcttctgcccaaagctgatatccctgtactctaataaaatgccccccccccccgttttaatctgttactgtggttttgttttgggtgttttttgttttttttgttgttgttttttttttgcgggggaggggatggtacagactaaacgtggggaaaagaagtaaaaagtgtggaagagaaagtacaggacactgggtctgtccccaccccaattcccttacaagtaatggagccggggatggaaataaatgacgtccaaggtcaaaaaa

SEQ ID NO: 30186 - DNA, 1226 bp, Homo Sapiens
gctgccgcatcccaggctaagcgccgcgccgaaagccgtgcggagattggaggccgcgcgggtccctggtctgggccatgtctggctgtgatgctggggagggagactgttgttcccggagatgcggcgcgcaggacaaggagcatccaagatacctgatcccagaactttgcaaacagttttaccatttaggctgggtcactgggactggaggaggaattagcttgaagcatggcgatgaaatctacattgctccttcaggagtgcaaaaggaacgaattcagcctgaagacatgtttgtttgtgatataaatgaaaaggacataagtggaccttcgccatcgaagaagctaaaaaaaagccagtgtactcctcttttcatgaatgcttacacaatgagaggagcaggtgcagtgattcatacccactctaaagctgctgtgatggccacacttctctttccaggacgggagtttaaaattacacatcaagagatgataaaaggaataaagaaatgtacttccggagggtattatagatatgatgatatgttagtggtacccattattgagaatacacctgaggagaagaccctcaaagatagaatggctcatgcaatgaatgaatacccagactcctgtgcagtactggtcagacgtcatggagtatatgtgtggggggaaacatgggagaaggccaaaaccatgtgtgagtgttatgactatttatttgatattgccgtatcaatgaagaaagtaggacttgatccttcacagctcccagttggagaaaatggaattgtctaagccaaaagaaagtctaattatatacagagataaagctaaacgtaattattatttaaatgaaagctatttttttaaatgaattgaaatttttcatgatgctactaatttgccactaaatactgcaaatggtcaccctgaatctcttctgacattggatgttatttgcttatattcttataattttaaatgagggcacagtgaaatgaaaattttatactctatgtttctgtttatttttaaatccttaacagcaaaatatttgcctttaatttcttttttatatatactctcgagagaattcctcttaatttttaaagatgctggtgataataaaattcattagaaaatttcctcattgtggaatgagcattctcttgttttaatgttggtgtcagaaaataaatatgaaacattaagtcc

SEQ ID NO: 30187 - DNA, 3615 bp, Homo Sapiens
agtggctttttggaggtgtctcggccatgacacacatttgacatgccctccctcaacctacttatagactatttttcttgctctgcagcatggaccaaagagaaattctgcagaagttcctggatgaggcccaaagcaagaaaattactaaagaggagtttgccaatgaatttctgaagctgaaaaggcaatctaccaagtacaaggcagacaaaacctatcctacaactgtggctgagaagcccaagaatatcaagaaaaacagatataaggatattttgccctatgattatagccgggtagaactatccctgataacctctgatgaggattccagctacatcaatgccaacttcattaagggagtttatggacccaaggcttatattgccacccagggtcctttatctacaaccctcctggacttctggaggatgatttgggaatatagtgtccttatcattgttatggcatgcatggagtatgaaatgggaaagaaaaagtgtgagcgctactgggctgagccaggagagatgcagctggaatttggccctttctctgtatcctgtgaagctgaaaaaaggaaatctgattatataatcaggactctaaaagttaagttcaatagtgaaactcgaactatctaccagtttcattacaagaattggccagaccatgatgtaccttcatctatagaccctattcttgagctcatctgggatgtacgttgttaccaagaggatgacagtgttcccatatgcattcactgcagtgctggctgtggaaggactggtgttatttgtgctattgattatacatggatgttgctaaaagatgggataattcctgagaacttcagtgttttcagtttgatccgggaaatgcggacacagaggccttcattagttcaaacgcaggaacaatatgaactggtctacaatgctgtattagaactatttaagagacagatggatgttatcagagataaacattctggaacagagagtcaagcaaagcattgtattcctgagaaaaatcacactctccaagcagactcttattctcctaatttaccaaaaagtaccacaaaagcagcaaaaatgatgaaccaacaaaggacaaaaatggaaatcaaagaatcttcttcctttgactttaggacttctgaaataagtgcaaaagaagagctagttttgcaccctgctaaatcaagcacttcttttgactttctggagctaaattacagttttgacaaaaatgctgacacaaccatgaaatggcagacaaaggcatttccaatagttggggagcctcttcagaagcatcaaagtttggatttgggctctcttttgtttgagggatgttctaattctaaacctgtaaatgcagcaggaagatattttaattcaaaggtgccaataacacggaccaaatcaactccttttgaattgatacagcagagagaaaccaaggaggtggacagcaaggaaaacttttcttatttggaatctcaaccacatgattcttgttttgtagagatgcaggctcaaaaagtaatgcatgtttcttcagcagaactgaattattcactgccatatgactctaaacaccaaatacgtaatgcctctaatgtaaagcaccatgactctagtgctcttggtgtatattcttacatacctttagtggaaaatccttatttttcatcatggcctccaagtggtaccagttctaagatgtctcttgatttacctgagaagcaagatggaactgtttttccttcttctctgttgccaacatcctctacatccctcttctcttattacaattcacatgattctttatcactgaattctccaaccaatatttcctcactattgaaccaggagtcagctgtactagcaactgctccaaggatagatgatgaaatcccccctccacttcctgtatggacacctgaatcatttattgtggttgaggaagctggagaattctcaccaaatgttcccaaatccttatcctcagctgtgaaggtaaaaattggaacatcactggaatggggtggaacatctgaaccaaagaaatttgatgactctgtgatacttagaccaagcaagagtgtaaaactccgaagtcctaaatcagaactacatcaagatcgttcttctcccccacctcctctcccagaaagaactctagagtccttctttcttgccgatgaagattgtatgcaggcccaatctatagaaacatattctactagctatcctgacaccatggaaaattcaacatcttcaaaacagacactgaagactcctggaaaaagtttcacaaggagtaagagtttgaaaattttgcgaaacatgaaaaagagtatctgtaattcttgcccaccaaacaagcctgcagaatctgttcagtcaaataactccagctcatttctgaattttggttttgcaaaccgtttttcaaaacccaaaggaccaaggaatccaccaccaacttggaatatttaataaaactccagatttataataatatgggctgcaagtacacctgcaaataaaactactagaatactgctagttaaaataagtgctctatatgcataatatcaaatatgaagatatgctaatgtgttaatagcttttaaaagaaaagcaaaatgccaataagtgccagttttgcattttcatatcatttgcattgagttgaaaactgcaaataaaagtttgtcacttgagcttatgtacagaatgctatatgagaaacacttttagaatggatttatttttcatttttgccagttatttttattttcttttacttttctacataaacataaacttcaaaaggtttgtaagatttggatctcaactaatttctacattgccagaatatactataaaaagttaaaaaaaaaacttactttgtgggttgcaatacaaactgctcttgacaatgactattccctgacagttatttttgcctaaatggagtataccttgtaaatcttcccaaatgttgtggaaaactggaatattaagaaaatgagaaattatatttattagaataaaatgtgcaaataatgacaattatttgaatgtaacaaggaattcaactgaaatcctgataagttttaaccaaagtcattaaattaccaattctagaaaagtaatcaatgaaatataatagctatcttttggtagcaaaagatataaattgtatatgtttatacaggatctttcagatcatgtgcaatttttatctaaccaatcagaaatactagtttaaaatgaatttctatatgaatatggatctgccataagaaaatctagttcaactctaattttatgtagtaaataaattggcaggtaattgtttttacaaagaatccacctgacttcccctaatgcattaaaaatatttttatttaaataactttatttataacttttagaaacatgtagtattgtttaaacatcatttgttcttcagtatttttcatttggaagtccaatagggcaaattgaatgaagtattattatctgtctcttgtagtacaatgtatccaacagacactcaataaactttttggttgttaaaaaaaaaaaaaaa

SEQ ID NO: 30188 - DNA, 3146 bp, Homo Sapiens; identical to SEQ ID NO: 23158

SEQ ID NO: 30189 - DNA, 5454 bp, Homo Sapiens
gctgacgtcgccggggcccggcgtcgcgtcagggctggccggcggcggaggcggcggcggcggcggcgatggcagcggaccctgagcgagcttgagggctcggacccagctccctcccgcgaaaccttgggcggatccggcgctgcggccccagctcgctccgctcctgctccctccccggccgctgcctgggcggaggcagaggcagaggcccgggctggccgccctgctcgtgccccagctcggccccggacggcccggctgctgtgcagagaggaggccgagtcggtagtgaaaagagaatactgaagaataggatctcaagatgagtaaaaagcccccaaatcgccctggaatcacttttgagattggtgctcgtttggaggcactggactacttacaaaaatggtatccatcacgaattgaaaaaattgactatgaggagggcaagatgttggtccattttgagcgctggagtcatcgttatgatgagtggatttactgggatagcaatagattgcgaccccttgagagaccagcactaagaaaagaagggctaaaagatgaggaagatttctttgattttaaagctggagaagaagttctggctcgttggacagactgtcgctattaccctgccaagattgaagcaattaacaaagaaggaacatttacagttcagttttatgatggagtaattcgttgtttaaaaagaatgcacattaaagccatgcccgaggatgctaaggggcaggtgaaatcccagcatccactaagctggtgttgtcctatcgacccagctggatcgtgtaaccagtctatgggaagtgaggattggatagctttagtcaaagcagctgctgcagctgcagccaagaacaaaacagggagtaaacctcgaaccagcgctaacagcaataaagataaggataaagatgagagaaagtggtttaaagtaccttcaaagaaggaggaaacttcaacttgtatagccacaccagacgtagagaagaaggaagatctgcctacatctagtgaaacatttggacttcatgtagagaacgttccaaagatggtctttccacagccagagagcacattatcaaacaagaggaaaaataatcaaggcaactcgtttcaggcaaagagagctcgacttaacaagattactggtttgttggcatccaaagctgttggggttgatggtgctgaaaaaaaggaagactacaatgaaacagctccaatgctggagcaggcgatttcacctaaacctcaaagtcagaaaaaaaatgaagctgacattagcagttctgccaacactcagaaacctgcactgttatcctcaactttgtcttcagggaaggctcgcagcaagaaatgcaaacatgaatctggagattcttctgggtgtataaaaccccctaaatcaccactttccccagaattaatacaagtcgaggatttgacgcttgtatctcagctttcttcttcagtgataaataaaactagtcctccacagcctgtgaatccccctagacctttcaagcatagtgagcggagaagaagatctcagcgtttagccaccttacccatgcctgatgattctgtagaaaaggtttcttctccctctccagccactgatgggaaagtattctccatcagttctcaaaatcagcaagaatcttcagtaccagaggtgcctgatgttgcacatttgccacttgagaagctgggaccctgtctccctcttgacttaagtcgtggttcagaagttacagcaccggtagcctcagattcctcttaccgtaatgaatgtcccagggcagaaaaagaggatacacagatgcttccaaatccttcttccaaagcaatagctgatggaagaggagctccagcagcagcaggaatatcgaaaacagaaaaaaaagtgaaattggaagacaaaagctcaacagcatttggtatcaggagttgggatttctcagcactgctaatgaagatcccctcttatagtccaataagcttatcaggacttccagagtcatgacatgaacagtttaattgaacccatccactctgggcaggtaagagaaaagaaaaagataaggaaagaagagagaagagagacaaagatcactacagaccaaaacagaagaagaagaaaaaaaagaaaaagaaatctaagcaacatgactattcagactatgaagacagttccctcgaatttttggaaaggtgctcttctccactaactcgatcttctgggagttctctggcttcacgaagcatgtttacggagaaaactacaacctatcagtacccaagggcaattctatccgttgatcttagtggtgaaaacttatcagatgtagacttcctagatgattcttcaacggagagtttgcttctgagtggggatgaatacaatcaggactttgattcaaccaattttgaggaatctcaggatgaggatgatgctcttaatgaaattgtgcgatgtatttgtgagatggatgaggagaatggcttcatgatccagtgtgaagagtgcttgtgttggcaacacagcgtgtgcatggggctgctggaggagagcattccagagcagtacatctgctatatctgccgggacccaccaggtcagaggtggagtgcaaaatatcgttatgataaggagtggttgaataatgggagaatgtgcgggttatcatttttcaaagaaaattattctcatctcaatgccaaaaagatagtttctacacatcacctgcttgctgatgtctatggtgttacagaagtgctacacgggctacagctgaagattggaatactaaagaataaacatcatcctgaccttcatctctgggcttgttccgggaagcgaaaagaccaagatcaaataatagctggggtggagaaaaaaatagctcaagacacagttaatcgagaagaaaagaaatatgtacagaaccataaagaaccacctcgtttgcccctaaaaatggaaggaacttatataacaagtgagcatagctatcaaaagccacaaagttttggtcaggactgtaaatctctcgcagaccctgggagctcagatgatgatgatgttagtagtttggaagaagaacaagaattccacatgagaagtaaaaacagtttacagtactcagcaaaagaacatggaatgcctgaaaagaatccagctgaagggaatacagtatttgtttataatgataaaaagggcaccgaagacccaggagactcacatcttcagtggcagctcaatctccttacacacatagaaaatgtgcagaacgaagttaccagcaggatggacctaatagaaaaagaagtcgatgttctggaaagctggcttgatttcacaggggagttggagccaccagatcctcttgcaagattgccccaacttaaacgccacataaaacagctcctaattgacatgggcaaagtacagcagatagcaactctttgctctgtatgacaacagtgaacacttaatgaaagaatgtggctttcttcagtcaaagcatttttattatccacgtgatggctaagtggataatttaaaagcttagtaatgtctggtcattcactgatttgtgatgtcaataggatggcaccttggaaagaaaaatgaagaacaactttatcaaggaagctagtatttaaaaacaaattcatgagcaagctgcaaatgagaatgtgttatatgccaaggaacaatgaagtagaatataatgtatactaagggatttcaagttctcagaatttttgagtagttgcttacgtgaagctcaagatacctgtagaaagaaatatggtatatttgtatagtttttaatagaaagatctatgtttataaaccagcacttggccaaaaacaaaattgtaaaggaaatttaaattctggagaattctacagggttgctctaagaactgtcttctcagcagttgatccagctgtacggaaatttagggtatttaaacttttaaaggatcatgagctgtttcttgggcgatgaatgttctcaatcagaaaactgacagtagaaatctcacttctggggaaaacagttgtggaattcttacttcattatgaatgtatttaaaaaacaaacaccaaataattggaatatattgcaggcattaagctcattaaaaacaaactggcttgcagaagggtccgatgtgccaagtgatcatgattctgctggaaagaggattttaaatattgtgggagttctcccaccctaagtcttacataatgccaccagtccatccaaaacctatatatcacctatactatatatatcatatatatagttgaatggcagtattcaggctcaacgtacagtttgatcctgagtatgcttggtgtttgccttcagaaaaaaaaaaatacattgtaaataacctcagctgggatgaggagtgacagaatatcaaaataatttgtggctgtggatttttttaactgctagtagtggaatactggaaaagcttcatttctgaagatgaattttatttttaaaaaatacatgcacactcaaaacttttagctttgatcacaagtggacaaatttctgaaaccaaaggcaactaagttgctgtgttagctcttgctggattttgagcctaggtcctactgtctgccagtactcatgtgagttgtatgtgcccccagtgctacatacgcaggtatgcgtaagtgtgtatgcttgttttaaacaaacactcaacgtacatatgtacataatctacacatatttatatcacatatctagttttattactatagactatacgaattggtggttaacatgaaatgttaccttttaacagactgtttttaaaaattaaaaatgtatgtataggttttgaaatttttttaaaaggggagaaagactgttaagaggaggctatttgatgacataacacttgaatattttatgcctcattctgtttatcagttctcgcaatctgtataaatgcattttagaactgatagacagtaaacttgaatttatctttgataagaatacatgccactgtacattcagatattatttaaatttgcaaacacattgttctatatgtaagggtactgtatgtaaaactctgtattaaaactattccacatatcctaaaatttcagcttgcctttttgcggccttatattttgatgtaaagattaaaagaatgtgcaaaacagtcagaaatttttattgccttttgagattctccaacttgacaaatgtgccaaagatcaacagacagaaaatatcatcctgtgtatttacttgtcatactttaactttgtgaaagatcttactgataaatgaaaagctttagcagaggtggtattgtggggtaattgcttaaatttacatatcaaagtaaaaaagtagtgcctgtaaaaaaaaaaaaaaaaaa

SEQ ID NO: 30190 - DNA, 5454 bp, Homo Sapiens; identical to SEQ ID NO: 30189

SEQ ID NO: 30191 - DNA, 1775 bp, Homo Sapiens
atgaaccctttaactaaggtgaagctgatcaacgagctgaatgaacgagaggtccagcttggggtggccgataaggtgtcctggcactccgagtacaaggacagcgcctggatcttcctgggagggcttccttatgaactgactgaaggggacatcatctgtgtgttctcacaatatggggagattgttaacattaatctcgtgcgggacaagaaaactgggaaatccaaaggattctgtttcctctgctatgaagaccagaggagcacaattctggccgtcgacaattttaatgggatcaagatcaaaggaagaactatccgagtggatcatgtgtctaactatcgggctcctaaggactcagaagaaatagatgatgtgaccagacaactccaggagaagggctgtggggctcgtaccccctcaccaagtttgtctgagagctctgaagatgaaaaaccaacaaaaaagcacaaaaaagacaaaaaggaaaaaaagaaaaaaaagaaagaaaaagagaaagccgaccgggaggtacaggcagagcaaccatcctcttcgtcacccagacgcaagacagtaaaggaaaaggatgacactggccctaagaagcacagcagcaagaactcagagagagctcagaagtcagagcccagggaggggcagaagctccccaaatccaggacggcctactctggtggagcagaggacctagagagggagctgaagaaggagaaacccaagcacgagcacaagtcctcaagcaggagggaggcaagagaagaaaagaccaggattagggacagagggcggcttcagatgcacattctagctggtataatgggcgttctgaagggcgtagttatagaagtagaagtaggagccgagataaatcccataggcataaaagggcccgacgctcccgggaggggagttcttcgaatcccagtgaccgttggcgtcactgaagacttcagctgcacagtagatttggaaataattatgttttttaaatgcagtcaaattcagttgggtggttactatttttgtatctaaaacttctggggctggattcttttaatcccttgactatttagagtcattgggagggctgcagtttcaacagctagatatcctggatattgtttgcaccatccattgtccctgtaccagagtatgtatcctgaactttggttcataaatatggctcttgaacccatagaccccagttgaagatggaattttcaggaaagggaaaatactagataattctagaattctagtcttcgtgttagatgtttatagcccagcatcttgggacctttccagttactaggtttggacagcttgatgtgaacgaatgggataggatttttaaaatcagccagctccatgcccaaaccttcctgtttgcagaactttttaatgtcttttctttttcattaaaacttttttgttcgatatgcctctttccacattttttccttgcaatgtatttattatttatttgtatttaggtgaaattcacataacataaagttaaccattttaaagggaacaattcagtggcatttggtactgaacatccacagtgttgtgtaaccattgcctctgtctagttccaaaacatttttttatcatcccaaaatgaaaccctgtagccattaaacaagagctccccgtttcctccctcctccctgtccctagcaaccaccagtggacttcctgtttatgggtttgcctattctggatctttcataaaaatggaattacac

SEQ ID NO: 30192 - DNA, 1506 bp, Homo Sapiens
cagataggcgacacgcggcgggcgctgaggcgggaatggctgctgtactgcagcgcgtcgagcggctgtccaatcgagtcgtgcgtgtgttgggctgtaacccgggtcccatgaccctccaaggcaccaacacctacctagtggggaccggccccaggagaatcctcattgacactggagaaccagcaattccagaatacatcagctgtttaaagcaggctctaactgaatttaacacagcaatccaggaaattgtagtgactcactggcaccgagatcattctggaggcataggagatatttgtaaaagcatcaataatgacactacctattgcattaaaaaactcccacggaatcctcagagagaagaaattataggaaatggagagcaacaatatgtttatctgaaagatggagatgtgattaagactgagggagccactctaagagttctatatacccctggccacactgatgatcacatggctctactcttagaagaggaaaatgctatcttttctggagattgcatcctaggggaaggaacaacggtatttgaagacctctatgattatatgaactctttaaaagagttattgaaaatcaaagctgatattatatatccaggacatggcccagtaattcataatgctgaagctaaaattcaacaatacatttctcacagaaatattcgagagcagcaaattcttacattatttcgtgagaactttgagaaatcatttacagtaatggagcttgtaaaaattatttacaagaatactcctgagaatttacatgaaatggctaaacataatctcttacttcatttgaaaaaactagaaaaagaaggaaaaatatttagcaacacagatcctgacaagaaatggaaagctcatctttagtttcagattaaagaaagctttgttttattttgctttgagagaatggtatgttttcttaactataggttattttatagagaatataaaagtataaaacattaaaaataaccctagatatactttaaaataatgttatatttatgctaaaatatgtaaattacactatacaaccatatgataggttatttctctaaccttgtcttctaacgttttaccaaaaattcataatctaatagtttatcagttttcaatagattaaataaaatgattactttaaaaataataaaatttatctaatttaaagttgatattatttttggccgttagttatctattactagtgatcagttatactgttttctatagctactttatttaacagcacagatttctatgcacctttactctttcctcaacccttgtctctatctgtacataattgctttgtcttgatgtttctatcaactatatcatgactatctattggttccataactctgtatcatgtgtattttcttattctggtataccacaaatgattcatgcaaatgaatttttggtgattgaaaaatattaaattcccaatttaaagtattatatgata

SEQ ID NO: 30193 - DNA, 767 bp, Homo Sapiens
tctcgctcaggctcggttttaccccggagtctattcgaagggggctgctacgtcagcgcgtctcagcgtaagacggcgctattccgctgtaacagcttccggcgggtcctggatgttgatgtcctgcatctaacgcggtgtaacccccgaagccgagcgagctccggaggaatttcagtatctgctacggtaacttcatcagcccgccaagatggcgatgcaagcggccaagagggcgaacattcgacttccacctgaagtaaatcggatattgtatataagaaatttgccatacaaaatcacagctgaagaaatgtatgatatatttgggaaatatggacctattcgtcaaatcagagtggggaacacacctgaaactagaggaacagcttatgtggtctatgaggacatctttgatgccaagaatgcatgtgatcacctatcgggattcaatgtttgtaacagataccttgtggttttgtactataatgccaacagggcatttcagaagatggacacaaagaagaaggaggaacagttgaagcttctcaaggagaaatatggcatcaacacagatccaccaaaataaatgttttctacattttcatttggactaaatcccacgaatgacaactaccacctttttttcctttttaattaatactaaatattgtgatttcttatttgaggttcaaaatgacctgcttgaaactttgatacatattggaatacattatgttaataaacttgtagctttttgtgaaaca

SEQ ID NO: 30194 - DNA, 1973 bp, Homo Sapiens
agccgccgcctcgccgcttcccctcgtcggagcggccgctcgtccgcccggcttgaggcccgcggggagcgcggcgcaattcgtcggcccgcgggggggcggcctcccggcatcttcgcggcgaccaaggactaccaggaaggggagcggctgggatggcgcgtccgcggccccgcgagtacaaagcgggcgacctggtcttcgccaagatgaagggctacccgcactggccggcccggattgatgaactcccagagggcgctgtgaagcctccagcaaacaagtatcctatcttcttttttggcacccatgaaactgcatttctaggtcccaaagacctttttccatataaggagtacaaagacaagtttggaaagtcaaacaaacggaaaggatttaacgaaggattgtgggaaatagaaaataacccaggagtaaagtttactggctaccaggcaattcagcaacagagctcttcagaaactgagggagaaggtggaaatactgcagatgcaagcagtgaggaagaaggtgatagagtagaagaagatggaaaaggcaaaagaaagaatgaaaaagcaggctcaaaacggaaaaagtcatatacttcaaagaaatcctctaaacagtcccggaaatctccaggagatgaagatgacaaagactgcaaagaagaggaaaacaaaagcagctctgagggtggagatgcgggcaacgacacaagaaacacaacttcagacttgcagaaaaccagtgaagggacctaactaccataatgaatgctgcatattaagagaaaccacaagaaggttatatgtttggttgtctaatattcttggatttgatatgaaccaacacatagtccttgttgtcattgacagaaccccagtttgtatgtacattattcatattcctctctgttgtgtttcggggggaaaagacattttagccttttttaaaagttactgatttaatttcatgttatttggttgcatgaagttgcccttaaccactaaggattatcaagatttttgcgcagacttatacatgtctaggatccttttatcaaggcagttatgatcatcgttttcctgccttgaccccaccatcatcaaacactcagttaaatataaattaacattttttagatgaccactcaacataatgcttaagaatggaatttcctctctgtgacagaacccaggaattaattcctaaatacataacgttggtatattgaagacgaaattaaaattgtccttcagttttgaggccatgtgtaaagtttaaccatattgtaaaatatctattccgtattagaaatagctagttgacagcttatacttctcaaaattcatattgttatgtacacaaactaagtttctatatgtgaagttagtgagtctttttgtgttactccaaaataaaggcaatgatttatttttttcccagtgccaatacaattttgagctaagcactcaaggtggatactttacattttaaagctggaatcagcaacagccctatgggaaaccagacaaagcattgacttttaaatgtagacttttaaaataaactgttttcttttggaactacaattagaatagttaatattcatccttaaaccattattatgtgtacattattgttgctattgtgataatagagaattttatttatttttatgccagcttatattgtgagaacacatttagtcagtttgggttttatcaatcctgttaatgcttgtccttggaacatctttcgcgtattcacggtttgtagttgaaaagtttactgtaaaaaaatcaaaaacaaaaaaatgtattgtttttacagaataaatttattgggatgtgtactgggagtaagatttgaggttgtaagcaaactaagttagtgtaatttggcttcatatatgtaacgtgaggtattaatgtaattcatatattaaagcaaaaattgttcgcagc

SEQ ID NO: 30195 - DNA, 3064 bp, Homo Sapiens
agacgggttcagttcgtcatggggctgtttggaaagacccaggagaagccgcccaaagaactggtcaatgagtggtcattgaagataagaaaggaaatgagagttgttgacaggcaaataagggatatccaaagagaagaagaaaaagtgaaacgatctgtgaaagatgctgccaagaagggccagaaggatgtctgcatagttctggccaaggagatgatcaggtcaaggaaggctgtgagcaagctgtatgcatccaaagcacacatgaactcagtgctcatggggatgaagaaccagctcgcggtcttgcgagtggctggttccctgcagaagagcacagaagtgatgaaggccatgcaaagtcttgtgaagattccagagattcaggccaccatgagggagttgtccaaagaaatgatgaaggctgggatcatagaggagatgttagaggacacttttgaaagcatggacgatcaggaagaaatggaggaagaagcagaaatggaaattgacagaattctctttgaaattacagcaggggccttgggcaaagcacccagtaaagtgactgatgcccttccagagccagaacctccaggagcgatggctgcctcagaggatgaggaggaggaggaagaggctctggaggccatgcagtcccggctggccacactccgcagctaggggctgcctaccccgctgggtgtgcacacactcctctcaagagctgccattttatgtgtctcttgcactacacctctgttgtgaggactaccattttggagaaggttctgtttgtctcttttcattctctgcccaggttttgggatcgcaaagggattgttcttataaaagtggcataaataaatgcatcatttttaggagtatagacagatatatcttattgtggggaggggaaagaaatccatctgctcatgaagcacttctgaaaatataggtgattgcctgaatgtcgaagatctacttttgtctataaaacactatataaatgaattttaataaatttttgctttagcacttggccccattgtagattgccctgtgcagtaaactttcaaggtgtcggctgccccagattgcttcatttgctgggtgtggaaagagttgctatggccaggcatatgggatttggaagctcagcagaagtgacttctgctctgtggttgctgctccccggctttcacagacatggtatggcagccattcttttatctatttaaccaagaggatgctggggaattgtgctgcttgtcctgttggctggtggctgcattatgtcctggggtgtgcatgtgggtctatttagagcttctgtcccttccttcccattgcaagttgcacccagatgagacagctgtagtactaggtctctttcacctctcattgcctgtccctgcttcgagctggttgtcttgtgcgtgggacatgggccttcctatctgtgttttctcaaagtcaggagctgaccaggagcacactaaggtgtggtcatgcatcataaccaacattcactcatctgggacattcttaagatacatttataaatcatttcagcagtagtactttgtatgtgttgagagtttacagagctctttgacatacgcgatcttagtctttacaaataaggaaaacagctcagtttgggaagtatcagagatgggattcaaacccagatcctctggtccaagttgtatgtgcactgaactaatcaggcaggaaaaaagcccagccactgtctcacagattgttttttgtatattgtagcaaaatcctgaaacaatggggtccttccagtctcatcatacaaaatggcaatcttggctgggtgcggtggttcatgcctataatcccagtgctttacaaggctgaggcaggaggctctcttgagaataggagttcaagaccagcctgggcaacatagcaagatcctgtctctccaaaaaaaaaaaaaaaaaaaaaaaaaaatttcatttttgagtccagaggccctcctattactcttgatttcatcttcagagtgtagttaaaaaattattttaaataattatttttttaaatcagttgtaggttcacagcaaaagtggacaaaaagaaatttctcatatatcccctgccctcacacatgcatagcctcccaccactatcagtatcccacaccagagtggtacatttgttacaatcaataaacctccattgacacatcattatcacccaaagtccatagtttacatgaagattcactctggtgttgtacattgtatgggcttagacaaatgtatgatgatatctacaattatagaatcatacagaataggttcactggcctaaaacctccccaaggcttaacctggttcatccctttcttccctaatcccctgggcaaccactttaaaaaaaaaattaggttcagggggtacatgtgcaggtaaactcgtgacaagggggtttgttatacagattatttagtgacccaggtactaagcctagtacccaatagttacttttctggtcctgtcccttttcccaccctccaccctcaggtaggccccagtatgttattcctttgtgtccatgttatttcactcccacttgtgagaacatggaatatttggtttcctgttcctatgttagtttgttaaggataatggcctccagccccatccatgttcctgcaaaggacatgatctttctttggcaaccactttttactgtcgccatagttcttccttttctagaatgtcatattggaatcatatagtatgtagccttttcagactggcttctttcacttaataatatgcaattaaggttcctccatgtcatttcatggcttaatagtgcatttatttttagcactgaataatactccattgtctagatgaatagtttatccattcacctattgaaagacttcttggtggtttccaagttttggcaattatgaataaagctgttgtaaacatctttgtgcaggtttttctatgggcatgtttttaattcatttgaataaataccaagagcttcagtgctggatcataaa

SEQ ID NO: 30196 - DNA, 5773 bp, Homo Sapiens
gtgaccacggaccaggcagtctctaatgaataggcaaggccacaacctccattctcccagaaaagaagaaatgctcatctgaaattcatcacctctctggagtcttcaaactgaccaagcattgaaaagaacacagtttcagaaaacagtttccagtgcctctggccttcctactgaaagcagacacagagtgcatgaagaccgttcaaatatgtcagggacctcctcccatgagtccttctatgactccctctcagacatgcaggaagaaagcaagaatactgacttcttcccgggcctttctgctttcctcagccaggaagagataaacaagagtcttgacctggcccggagagccatagccgactccgaaacagaagattttgactcggaaaaggagatctcgcagattttcagtacttctcctgcaagcctctgtgaacatccttcccataaggagaccaaattgggtgaacacgcctcgaggagacctcaggataacaggtcaacacctgtccagcctctggcagagaaacaaactaagagtatctcttcacctgtttcaaagaggaaacctgccatgtcacccctgctcaccaggcccagctacatccggagcctccgaaaggctgaaaagcgtggtgcaaaaactcccagcacaaacgtaaagcccaaaacgccacatcaaagaaagggtggcccccagagccagctgtgtgacaaggcagctaatttaattgaggagctaacatccatatttaaagccgcaaagccaagaaacagaagcccaaatggggagtcctcgtcaccagacagtgggtacctgtctcctaaaaatcagccgtcagccctgctgagtgcctcagccagccagagccctatggaagaccaaggggagatggaaagagaggtcaagtcccctggggccaggcattgctaccaggacaaccaggacttggcagtgccacacaaccgcaagtctcacccacagccccacagcgccctccacttcccagctgcacctcgattcatccaaaagctgaggagccaagaagtagcagaagggagccgagtttatctggagtgtagagtcactggaaaccccactcctcgagtcagatggttctgtgaagggaaagaactgcacaacactcctgatattcaaatccactgtgagggaggggacctccataccctgatcatagcagaggcctttgaggacgacacaggtcgctacacctgtttggctacgaatcccagcggctcagacacaacatctgctgaggtgttcattgaaggtgccagttcaacagattctgacagtgaaagtttagctttcaaatcaagagctggagctatgccacaagctcaaaagaaaacaacttctgtttccttgacaataggatcatcatctccaaagacaggggtgaccacagctgtgattcaaccactgtctgtccctgtgcaacaggttcacagtccaacttcatatctctgccgacctgatggaaccactactgcctactttcctcctgtttttacaaaggaactgcaaaacacagccgtggcggaaggccaggtggtggttctggagtgccgggtccgtggggcaccccctctgcaggtccagtggtttcggcaagggagtgaaatccaagactctccagatttccgaattctacagaaaaaacctagatctacagctgaacctgaggagatttgcaccctagttatcgctgagactttccctgaagatgcagggatctttacatgttcagcaagaaatgattatggatcagcaaccagcactgcccagctggttgtcacctcagccaacactgaaaactgtagttacgagtcaatgggagaatccaacaatgaccacttccaacactttccacctccccctccaatcttggagacaagttccttggagttggcttcaaagaaaccatctgagatccagcaggtgaacaaccctgagttaggcctgagcagggcagcccttcaaatgcaattcaatgctgctgagagggaaacgagcggagtccatcccagccgtggagtaaatggactgattaacggcaaagctaacagtaataaatctcttccaacaccagctgtcctgctttcacccactaaggagccaccacctctgcttgccaaaccaaaactaggatttccaaagaaggccagtagaactgctagaatagcctccgatgaggaaattcaaggcacaaaggatgctgttattcaagacctggaacgaaaacttcgcttcaaggaggacctcctgaacaatggccagccgaggttaacatacgaagaaagaatggctcgtcgactgctaggtgctgacagtgcaactgtctttaatattcaggagccagaagaggaaacagctaatcaggaatacaaagtctccagctgtgaacagagactcatcagtgaaatagagtacaggctagaaaggtctcctgtggatgaatcaggtgatgaagttcagtatggagatgtgcctgtggaaaatggaatggcaccattctttgagatgaagctgaaacattacaagatctttgagggaatgccagtaactttcacatgtagagtggctggaaatccaaagccaaagatctattggtttaaagatgggaagcagatctctccaaagagtgatcactacaccattcaaagagatctcgatgggacctgctccctccataccacagcctccaccctagatgatgatgggaattatacaattatggctgcaaaccctcagggccgcatcagttgtactggacggctaatggtacaggctgtcaaccaaagaggtcgaagtccccggtctccctcaggccatcctcatgtcagaaggcctcgttctagatcaagggacagtggagacgaaaatgaaccaattcaggagcgattcttcagacctcacttcttgcaggctcctggagatctgactgttcaagaaggaaaactctgcagaatggactgcaaagtcagtgggttaccaaccccagatctaagctggcaactagatggaaagcccgtacgccctgacagtgctcacaagatgctggtgcgtgagaacggggtgcactctctgatcatagagccagtcacgtcacgtgatgccggcatctacacatgtatagctaccaaccgagcaggacagaactcattcagcctggagcttgtggttgctgctaaagaagcacacaaaccccctgtgtttattgagaagctccaaaacacaggagttgctgatgggtacccagtgcggctggaatgtcgtgtattgggagtgccaccacctcagatattttggaagaaagaaaatgaatcactcactcacagcactgaccgagtgagcatgcaccaggacaaccacggctacatctgcctgctcattcagggagccacaaaagaagatgctgggtggtatactgtgtcagccaagaatgaagcagggattgtgtcctgtactgccaggctggacgtttacatttctcgacattaatagtgaaccacaccaggagaacaaatacccaacccagtggcatcagcagtcacagagcaccaagccaaaaaaagtacggccctcagccagtcgctatgcagcactttcggaccagggactagacatcaaagcagcgttccaacctgaggccaacccatctcacctgacactgaatactgccttggtagaaagtgaggacctgtaatccagcattcttgttaaagctgaaacactgaaacagccattgccttgaccaacatattcctttgtcacattatgtaaaaggcagaaacatacctttgactataagaaattaaaaaaaaacaccaaaataatatttttcttacttgatataccaaacttagtttaagtagataatgctaatacaaatatacacattgcacagaaaatacacatttactgtccaatttaaaactttggaattgctgtgattaaagtgatcaaaatgccaaaatactaaaggaaatcaattgttcacaggtaactacaatttgtattatctacaagtgcctttaaacacaagatataggtgctgtgtagcctgatagtgtgaaatgtttaatgagggagttgtaccacaaacagtactacaatgattctgaagcacagtgtattcagacagatacagtgaaccaagtgcaatatgtaaggatgaaagaagaagagatgacaaagaartccaagtaaatgccttgtctttgcaaatgtttttatattaaatcataaggaaggaactacttgccttaaatgttaatatcaaaagagttttctaacaaggttaataccttagttcttaacattttttttctttatgtgtagtgttttcatgctaccttggtaggaaacttatttacaaaccatattaaaaggctaatttaaatataaataatataaagtgctctgaataaagcagaaatatattacagttcattccacagaaagcatccaaaccacccaaatgaccaaggcatatatagtatttggaggaatcaggggtttggaaggagtagggaggagaatgaaggaaartgcaaccagcatgattatagtgtgttcatttagataaaagtagaaggcacaggagaggtagcaaaggccaggcttttctttggttttcttcaaacataggtgaaaaaaacactgccattcacaagtcaaggaacccagggccagctggaagtgtggagcacacatgctgtggagcacacatgctgtggagattgcagtgtgtctgaggtttgtgtagtagtggaagattttaggtatgtagagcaagttgaaaatggattgagactgcatggtggcataaatgagaaattgcctgtagcatctagtctacttgaaggaagtggagacataaggagagacaaaaacaggtttgtgccataaagtattttttcaaagacaccaagatgtggtaaatgaaaattattagttcacttccctgctgccatgaaactttgccttaagaaggtgctggattccaaggtttgtaaaggcatctcggtaaagactgctttttgaatgcatatgattttgcatcagctagactgagttgattctgaccagacttgatggttttaagtcggaaccgataaattttaaaaaggagaaaaaataatttgacctagtagtataaaacatgaggctttaatggtactttgctatgaaaagaaaacactgtattccttatgcaaaacacatgtatctttcattatttataagtggcctctcttagctcagttactcaattcatacgtaatattttttaaaataattttatatctgtgtaccaccccatatatttcatattactgtttcacatgtacagctttctacttctttgtaagaacaccaaccaaccaaggtttaagtgattaataggcttgagcaccgggtggcagatgttctatgcagtgtggttcaagtttctttgaccgcacttatatgcattgctagtatggaatttaagataccatacacagtctctcatggacctatctctattgtagaattatgacttatgtcttacttggcaaatttttctgaatgtgacctttttttgctgatttgctgggtttgggattaactagcattattttgccacctttatattgtatttataaaaaaaagtactatcaatcaatcatactactttggattgttgtgctggtgtaatgtggatttaacatcaataaatatttgacaaataaaaaaaaa

SEQ ID NO: 30197 - DNA, 1758 bp, Homo Sapiens
agcaagcggcctgtgcccagatcctgggagaaccccagccgagcccagcctagcccgagcccagcccgagcggagccggagccccaagcccgagccgcgcccagcccgagcagagccctccagccgctcaccccgcgtgccaccccagcgaccctcagccgctctctgcccttctctcggccccgcgcccgccctcgcggcccctctgcccaatgaaactggccgcgatgatcaagaagatgtgcccgagcgactcggagctgagtatcccggccaagaactgctatcgcatggtcatcctcggctcgtccaaggtgggcaagacggccatcgtgtcgcgcttcctcaccggccgcttcgaggacgcctacacgcctaccatcgaggacttccaccgcaagttctactccatccgcggcgaggtctaccagctcgacatcctcgacacgtccggcaaccacccgttccccgccatgcggcgcctctccatcctcacaggagacgttttcatcctggtgttcagtctggacaaccgcgactccttcgaggaggtgcagcggctcaggcagcagatcctcgacaccaagtcttgcctcaagaacaaaaccaaggagaacgtggacgtgcccctggtcatctgcggcaacaagggtgaccgcgacttctaccgcgaggtggaccagcgcgagatcgagcagctggtgggcgacgacccccagcgctgcgcctacttcgagatctcggccaagaagaacagcagcctggaccagatgttccgcgcgctcttcgccatggccaagctgcccagcgagatgagcccagacctgcaccgcaaggtctcggtgcagtactgcgacgtgctgcacaagaaggcgctgcggaacaagaagctgctgcgggccggcagcggcggcggcggcggcgacccgggcgacgcctttggcatcgtggcacccttcgcgcgccggcccagcgtacacagcgacctcatgtacatccgcgagaaggccagcgccggcagccaggccaaggacaaggagcgctgcgtcatcagctaggagccccgccgcgctggcgacacaacctaaggaggacctttttgttaagtcaaatccaacggcccggtgcgccccaggccgggagcgcgcgcggactggcgtctcccctcccggcgatccgcccccagcactggggaggcgccactgaaccgagaagggacggtcatctgctccggaaggaaagagaacgggccaagactgggactattccccacccccggtcccccattgaggcccgccacccccataactttgggagcgagggcccagccgagggtggatttatcttctcaaagacctaagagtgagcgcggggtgggggagggatgtgaagttatccagcctctgctaggcttcaagaaaccgtcatgcccgcttgagggtcaggacccacggggcattatcttgtctgtgattccgggttgctgtgacagccggtagagcctctgccctcccgaaactaagcgggggggcgtgggtcaaatcatagccaagtgacttgtttacatgtgagtgaaactgcacaaaggaacacaaaacaaaacttgcactttaacggtagttccggtgtcaacatggacacgaacaaaaccttacccaggtgtttatactgtgtgtgtgtgaggtctttaaagttattgctttatttggttttttaatatacaataaaataatttaaaatggaaaaaaaaaaaaaaaa

SEQ ID NO: 30198 - DNA, 1441 bp, Homo Sapiens
gcgaaggcggggtcggcgctgccgggtgaaatcgtaggacagtgaagatgctgctggaattgtccgaggagcataaggaacacctggccttcctgcctcaagtggacagcgcggtggtcgccgagtttgggcggattgctgtggaattcctgagacgcggcgcaaacccaaaaatctacgaaggcgccgccagaaaactcaatgtgagtagtgacactgtccagcatggtgtggaaggattaacgtatctcctcactgagagctcaaagctcatgatttctgaactggatttccaagactctgtttttgttctgggattctctgaagaattaaacaaattgttgcttcagctttatctggacaacagaaaagagatcagaacgattctgagtgaattggcaccaagccttcccagttatcataaccttgaatggcgactagatgtacagcttgcaagtagaagtctcaggcaacagattaaaccagcagtgactataaagctacaccttaatcaaaatggagatcacaacaccaaagttctgcagacagacccagccaccctgctccatttggttcaacaactggaacaagcattggaagagatgaagacaaatcactgtaggagagttgttcgcaacatcaagtagtaccagttttaaggttttaattcatttgaatcacttatgaattgatgatatacagcaattacttttcaaaattaattttttattaattcatgatgataaatacatagtattcctcagtatctattccaagatactgaggtcataatcagaagctaagctgggtgcagtggctcatgccagttatcccagcactttgggaggccgaggtgggcaaatcatgaggtcaggagattgagaccttcctggctaacatggtgaaaccccatctctactaaaaatataaaaaattagccaggtgtggtggcacgcatctatcagagtcccagctactcaggaggctgaggcaggagaatcgcttgaacctgggaggtggaggttgcagtgagctgagattgtgccactgcactccagcctgggtgacagagtgagactccatctcaaaaataataataataataataaagtaaaaataaaaataaaaaagtaatcagaagctaaagtaaagttcctttcctggtgctaactgtggtcttcttgacacattaagatgtattttgtattttaagagtctcatgctctaccgttggaactagccagatggccattattttgtattttaaatacataaataggattgaatcaactagaaatgaatctatatgttctgtatatatgaatgactatcttgtttttgctacttcttttgactgcttaattttattattttcatctttattgatcaaatttgaaaataaaattcacaatgtaatactactaaaaaaaaaaaaaaaaaa

SEQ ID NO: 30199 - DNA, 988 bp, Homo Sapiens
gtcgtgaggcgggccttcgggctggctcgccgtcggctgccggggggttggcctgggtgtcattggctctgggaagcggcagcagaggcagggaccactcggggtctggtgtcggcacagccatggcgggcgcgttggtgcggaaagcggcggactatgtccgaagcaaggatttccgggactacctcatgagtacgcacttctggggcccagtagccaactggggtcttcccattgctgccatcaatgatatgaaaaagtctccagagattatcagtgggcggatgacatttgccctctgttgctattctttgacattcatgagatttgcctacaaggtacagcctcggaactggcttctgtttgcatgccacgcaacaaatgaagtagcccagctcatccagggagggcggcttatcaaacacgagatgactaaaacggcatctgcataacaatgggaaaaggaagaacaaggtcttgaagggacagcattgccagctgctgctgagtcacagatttcattataaatagcctccctaaggaaaatacactgaatgctatttttactaaccattctatttttatagaaatagctgagagtttctaaaccaactctctgctgccttacaagtattaaatattttacttctttccataaagagtagctcaaaatatgcaattaatttaataatttctgatgatgttttatctgcagtaatatgtatatcatctattagaatttacttaatgaaaaactgaagagaacaaaatttgtaaccactagcacttaagtactcctgattcttaacattgtctttaatgaccacaagacaaccaacagctggccacgtacttaaaattttgtccccactgtttaaaaatgttacctgtgtatttccatgcagtgtatatattgagatgctgtaacttaatggcaataaatgatttaaatatttgttaaaaaaaaaaaaaaaaaaaaaaaaaaaaa

SEQ ID NO: 30200 - DNA, 1352 bp, Homo Sapiens
gcaggacaacgcctgccacgcgtcggaactcggccgcgggacatccacggggcgcgagtgacacgcgggagggagagcagtgttctgctggagccgatgccaaaaaccatgcatttcttattcagattcattgttttcttttatctgtggggcctttttactgctcagagacaaaagaaagaggagagcaccgaagaagtgaaaatagaagttttgcatcgtccagaaaactgctctaagacaagcaagaagggagacctactaaatgcccattatgacggctacctggctaaagacggctcgaaattctactgcagccggacacaaaatgaaggccaccccaaatggtttgttcttggtgttgggcaagtcataaaaggcctagacattgctatgacagatatgtgccctggagaaaagcgaaaagtagttatacccccttcatttgcatacggaaaggaaggctatggtagtcttgaagaagtctttcttctgcaaaatatccttgtctcatgtcacagaacaaccctgcatgtcttgaaatgcatgtacttgttagtgcttaataacaatacatgcgcagaaggcaagattccaccggatgctacattgatttttgagattgaactttatgctgtgaccaaaggaccacggagcattgagacatttaaacaaatagacatggacaatgacaggcagctctctaaagccgagataaacctctacttgcaaagggaatttgaaaaagatgagaagccacgtgacaagtcatatcaggatgcagttttagaagatatttttaagaagaatgaccatgatggtgatggcttcatttctcccaaggaatacaatgtataccaacacgatgaactatagcatatttgtatttctactttttttttttagctatttactgtactttatgtataaaacaaagtcacttttctccaagttgtatttgctatttttcccctatgagaagatattttgatctccccaatacattgattttggtataataaatgtgaggctgttttgcaaacttaacttgcaggaatggtatgactgtgtttcctactgctttattctgtaaacaagaattgtagcaccatgaaacagacctctgggtcccagtgggcattttttcccctttcaggatgtaggaggacatgtatagtatgtcaaaaactgcaagcttttcccaactttaaccttaccagcatgttaatatccagtttttttatagtttaaaagttaaagtgcctcatattttgaaaatatccattaaggacccaggaattagcatttcacttgtttatacatttttataacattatgaagacgatataaaa

SEQ ID NO: 30201 - DNA, 2797 bp, Homo Sapiens
ctctggtggctagcctgtcctgacaggggagagttaagctcccgttctccaccgtgccggctggccaggtgggctgagggtgaccgagagaccagaacctgcttgctggagcttagtgctcagagctggggagggaggttccgccgctcctctgctgtcagcgccggcagcccctcccggcttcacttcctcccgcagcccctgctactgagaagctccgggatcccagcagccgccacgccctggcctcagcctgcggggctccagtcaggccaacaccgacgcgcagctgggaggaagacaggacccttgacatctccatctgcacagaggtcctggctggaccgagcagcctcctcctcctaggatgacctcaccctccagctctccagttttcaggttggagacattagatggaggccaagaagatggctctgaggcggacagaggaaagctggattttgggagcgggctgcctcccatggagtcacagttccagggcgaggaccggaaattcgcccctcagataagagtcaacctcaactaccgaaagggaacaggtgccagtcagccggatccaaaccgatttgaccgagatcggctcttcaatgcggtctcccggggtgtccccgaggatctggctggacttccagagtacctgagcaagaccagcaagtacctcaccgactcggaatacacagagggctccacaggtaagacgtgcctgatgaaggctgtgctgaaccttaaggacggagtcaatgcctgcattctgccactgctgcagatcgacagggactctggcaatcctcagcccctggtaaatgcccagtgcacagatgactattaccgaggccacagcgctctgcacatcgccattgagaagaggagtctgcagtgtgtgaagctcctggtggagaatggggccaatgtgcatgcccgggcctgcggccgcttcttccagaagggccaagggacttgcttttatttcggtgagctacccctctctttggccgcttgcaccaagcagtgggatgtggtaagctacctcctggagaacccacaccagcccgccagcctgcaggccactgactcccagggcaacacagtcctgcatgccctagtgatgatctcggacaactcagctgagaacattgcactggtgaccagcatgtatgatgggctcctccaagctggggcccgcctctgccctaccgtgcagcttgaggacatccgcaacctgcaggatctcacgcctctgaagctggccgccaaggagggcaagatcgagattttcaggcacatcctgcagcgggagttttcaggactgagccacctttcccgaaagttcaccgagtggtgctatgggcctgtccgggtgtcgctgtatgacctggcttctgtggacagctgtgaggagaactcagtgctggagatcattgcctttcattgcaagagcccgcaccgacaccgaatggtcgttttggagcccctgaacaaactgctgcaggcgaaatgggatctgctcatccccaagttcttcttaaacttcctgtgtaatctgatctacatgttcatcttcaccgctgttgcctaccatcagcctaccctgaagaagcaggccgcccctcacctgaaagcggaggttggaaactccatgctgctgacgggccacatccttatcctgctaggggggatctacctcctcgtgggccagctgtggtacttctggcggcgccacgtgttcatctggatctcgttcatagacagctactttgaaatcctcttcctgttccaggccctgctcacagtggtgtcccaggtgctgtgtttcctggccatcgagtggtacctgcccctgcttgtgtctgcgctggtgctgggctggctgaacctgctttactatacacgtggcttccagcacacaggcatctacagtgtcatgatccagaaggtcatcctgcgggacctgctgcgcttccttctgatctacttagtcttccttttcggcttcgctgtagccctggtgagcctgagccaggaggcttggcgccccgaagctcctacaggccccaatgccacagagtcagtgcagcccatggagggacaggaggacgagggcaacggggcccagtacaggggtatcctggaagcctccttggagctcttcaaattcaccatcggcatgggcgagctggccttccaggagcagctgcacttccgcggcatggtgctgctgctgctgctggcctacgtgctgctcacctacatcctgctgctcaacatgctcatcgccctcatgagcgagaccgtcaacagtgtcgccactgacagctggagcatctggaagctgcagaaagccatctctgtcctggagatggagaatggctattggtggtgcaggaagaagcagcgggcaggtgtgatgctgaccgttggcactaagccagatggcagccccgatgagcgctggtgcttcagggtggaggaggtgaactgggcttcatgggagcagacgctgcctacgctgtgtgaggacccgtcaggggcaggtgtccctcgaactctcgagaaccctgtcctggcttcccctcccaaggaggatgaggatggtgcctctgaggaaaactatgtgcccgtccagctcctccagtccaactgatggcccagatgcagcaggaggccagaggacagagcagaggatctttccaaccacatctgctggctctggggtcccagtgaattctggtggcaaatatatattttcactaactaaaaaaaaaaaaaaaaaaaaaaa

SEQ ID NO: 30202 - DNA, 2397 bp, Homo Sapiens
agaggtctggctggacgcagcctcctcctcctaggatgacctcaccctccagctctccagttttcaggttggagacattagatggaggccaagaagatggctctgaggcggacagaggaaagctggattttgggagcgggctgcctcccatggagtcacagttccagggcgaggaccggaaattcgcccctcagataagagtcaacctcaactaccgaaagggaacaggtgccagtcagccggatccaaaccgatttgaccgagatcggctcttcaatgcggtctcccggggtgtccccgaggatctggctggacttccagagtacctgagcaagaccagcaagtacctcaccgactcggaatacacagagggctccacaggtaagacgtgcctgatgaaggctgtgctgaaccttaaggacggagtcaatgcctgcattctgccactgctgcagatcgacagggactctggcaatcctcagcccctggtaaatgcccagtgcacagatgactattaccgaggccacagcgctctgcacatcgccattgagaagaggagtctgcagtgtgtgaagctcctggtggagaatggggccaatgtgcatgcccgggcctgcggccgcttcttccagaagggccaagggacttgcttttatttcggtgagctacccctctctttggccgcttgcaccaagcagtgggatgtggtaagctacctcctggagaacccacaccagcccgccagcctgcaggccactgactcccagggcaacacagtcctgcatgccctagtgatgatctcggacaactcagctgagaacattgcactggtgaccagcatgtatgatgggctcctccaagctggggcccgcctctgccctaccgtgcagcttgaggacatccgcaacctgcaggatctcacgcctctgaagctggccgccaaggagggcaagatcgagattttcaggcacatcctgcagcgggagttttcaggactgagccacctttcccgaaagttcaccgagtggtgctatgggcctgtccgggtgtcgctgtatgacctggcttctgtggacagctgtgaggagaactcagtgctggagatcattgcctttcattgcaagagcccgcaccgacaccgaatggtcgttttggagcccctgaacaaactgctgcaggcgaaatgggatctgctcatccccaagttcttcttaaacttcctgtgtaatctgatctacatgttcatcttcaccgctgttgcctaccatcagcctaccctgaagaagcaggccgcccctcacctgaaagcggaggttggaaactccatgctgctgacgggccacatccttatcctgctaggggggatctacctcctcgtgggccagctgtggtacttctggcggcgccacgtgttcatctggatctcgttcatagacagctactttgaaatcctcttcctgttccaggccctgctcacagtggtgtcccaggtgctgtgtttcctggccatcgagtggtacctgcccctgcttgtgtctgcgctggtgctgggctggctgaacctgctttactatacacgtggcttccagcacacaggcatctacagtgtcatgatccagaaggtcatcctgcgggacctgctgcgcttccttctgatctacttagtcttccttttcggcttcgctgtagccctggtgagcctgagccaggaggcttggcgccccgaagctcctacaggccccaatgccacagagtcagtgcagcccatggagggacaggaggacgagggcaacggggcccagtacaggggtatcctggaagcctccttggagctcttcaaattcaccatcggcatgggcgagctggccttccaggagcagctgcacttccgcggcatggtgctgctgctgctgctggcctacgtgctgctcacctacatcctgctgctcaacatgctcatcgccctcatgagcgagaccgtcaacagtgtcgccactgacagctggagcatctggaagctgcagaaagccatctctgtcctggagatggagaatggctattggtggtgcaggaagaagcagcgggcaggtgtgatgctgaccgttggcactaagccagatggcagccccgatgagcgctggtgcttcagggtggaggaggtgaactgggcttcatgggagcagacgctgcctacgctgtgtgaggacccgtcaggggcaggtgtccctcgaactctcgagaaccctgtcctggcttcccctcccaaggaggatgaggatggtgcctctgaggaaaactatgtgcccgtccagctcctccagtccaactgatggcccagatgcagcaggaggccagaggacagagcagaggatctttccaaccacatctgctggctct

SEQ ID NO: 30203 - DNA, 6798 bp, Homo Sapiens
cggcgccggaagtggtcgcgggtcgttctgcttcctgcccgaggggcgtgcgcgggtcaggggcggccgcggaggcggaagcatccatggcggagggcggcagcccagacgggcgggcagggccgggctccgcaggtcgtaatctgaaggagtggctgagggagcaattttgtgatcatccgctggagcactgtgaggacacgaggctccatgatgcagcttacgtcggggacctccagaccctcaggagcctattgcaagaggagagctaccggagccgcatcaacgagaagtctgtctggtgctgtggctggctcccctgcacaccgttgcgaatcgcggccactgcaggccatgggagctgtgtggacttcctcatccggaagggggccgaggtggatctggtggacgtaaaaggacagacggccctgtatgtggctgtggtgaacgggcacctagagagtacccagatccttctcgaagctggcgcggaccccaacggaagccggcaccatcgcagcacccctgtctaccacgcctctcgcgtgggccgggcagacatcctgaaggccctcatcaggtacggggctgatgttgacgtcaaccaccacctgactcctgatgtccagcctcgattctcccggcggctcacctccttggtggtctgccccttgtacatcagcgcagcctaccacaacctccagtgcttccggctgctcctcctggctggcgcgaaccctgacttcaactgcaatggtcctgtcaacacacagggattctacaggggctcccctgggtgcgtcatggatgctgttctgcgccacggctgtgaggcagccttcgtgagcctgctggtagaatttggagccaacctgaatctagtgaagtgggaatcgctgggcccagagtcgagaggaagaagaaaagtggaccctgaggccttgcaggtctttaaagaggccagaagtgttcccagaaccttgctgtgtctgtgccgtgtggctgtgagaagagctcttggcaaacaccggcttcatctgattccttcgctgcctctgccagaccccataaagaagtttctactccatgagtagactccaagtgctgcggttgattccagtgagggagaaagtgatctgcagggaggtggacaccgagccctgagtgctgtgctgctgctggtctcctgatggctgttgctgcagaagatgtcctcgtagactgtcattgctcctcaggtgcctgggccgctgaacagtccttgggtcattgtcagctgagaggcttatactaaagttattattgtttttcccaagttctctgttctggattttcagttgcatattaatgtaacgggccatggggtatgtacatgtaggggctgaggttggaggcctactaatttccctgtagggaagactcccagcacttctggaactgtgcttctctttatttttctacttctcaatttgatggttcgattaaagccttctagtatctcaatgaaaagggagtttcgtaagcaaaatagaggacagaaatgcagttcatgaacttgctggttggtttttcctgctcctggggtaacacatgcgcttgtcatacacgccccttccttgccccttcagtattctctctttgcgatggaggtctcatagtgagtgtcttcactcaagggtggtttcctggctgcacggcacctgttccaacacctactgtgcctctcatcaggtgtcacgatttttctgccacttcaccttagggagcttccagtgattgattttaggaggcccacaccaaactccccaggaaatgactgccttccttgggaccaaggaccgttccaacagcattcactgccagttctaataggcgaggaaaatgcccgaggcgctgtcttctgtcccccacacgtaccagaaagtgaaaaatgcagcgagtcctctgggtggttatgagcctccaggcgcatgctgtccagtggacagaacatctggcggttggttgattgctctcttttgtcttggtcgctgcttctagaatctatgcaggggatagcagtgaggtcagaagtctttcccgggagagagatggcctgggttatcattgctgatagctttggctgcatgagttgggcttccccttacccagggctgcacagccaggtgtgagggtcaccggcaggtgggctggtggctgcagcctcagagccctcccaggttgctgctgtttccagtgaatcacatttcgtcatttgaagcccatgaggaccattgtgtggatccatggtgattctagacttcagatatatttaggaaggcgcagatttcaaatctgtgtttgattttctgtaataagagaaatccaatttgtaaaacttgaacaatgataccgttttatttacttagtagcatcactgtgtgtcttagcaggcaggcagtgtctggccattattgcgttctacagccagaggatagaattctatacccccaaccccttgtgtcacaaatgggctctgtgtgggtcaccccagctgacccgtgtatgtgcagatgcagttccgaagggaagaacagtcctcgggtgattcagaggggaaaatgcaatccgggaggtgtttcctcagctgaggtgacactgttagaagctgtgatggttgtgtaaatgtgggctgtgtgctgttcccgaggggagcttgggattgggtcctgctgaagccaggagggtcttcccaagataggagaggaaccgcaggtggtgagcggctggggagggccaggacagccggggctgggtgctgcaggggcttcagcccgggagagggggtgggcgtgttctttgtggtaccaaagtgggactaggacaaaaattgggctgtggctggggcaggagctatagggagttaaggaatgatgatacggaagttggagccaccaccgtggactgggccttgtcactggaggtcgtaggcagtggctcatcaccctggtagggctgataggggctttcagggaggctggttagctccctgcactctggctctttactggcttactgtttagctcctcccacctcgaggctcttcttcctgccaccctttgggctcagaggagggtggcttttttcgaggtgagccatgttgtagacacatgatacgctctgcgtctgctctactgagtactttctgcaggggcctgttaaggacgaggcctccccagccctgcccggtgcaggaggtggctcagttattgaaccttttgggaagcagcacctgggaatgctgcctcgtgggagtcccatgcgtgagtgtggtggtgtgaccttcaggctgcacagaggcaaggacccagatgtggcagcatgggcgtcatgctcctttgcacagcccagggcctgttttggagggaccaggtcactgcccctggtctctctaggaggagtggactgaatggatcgttgcagagaagactcacccagacctggccagggaatgatgtatctggggagagaatgagctggaggagggggcctctcatggcccttccctggcctgtggcccagcctggctggcctgcaggtgtctagggtctcagcttttcatttgcagaggacatgttcaacttcctctctgttcaagccagcctttgccaattttttcagaatccaaacaatttggaggtttggtatcttgtttcatagctgccaaatatgaatctgaaaacagggtgggtagctaaggtcattcctcctgggttttagtggcattgccttccttcactaaagctcccttttttttctgttggcaaggacaggttacagaataggaagagtagcactttccgcctaagcactttaggaaatcacctttctaagccctggggcgcccaagtcccatgggacagggaaacgtggtcctcagtgaggctgctgcctggctggcccggagtcctccctaggagaggggctcgatgggctgggggaaggagcctgaaggttgcccctggttgcatcccagaagcatctgactgtcaccactgccagtggctgtggaacagtcctgggccctgggccttggctgctgtcaacagatgggctgggctgggctgtggtggggtgggggacaacgttggtaactctgagaattcagctttggagtcccgggtgaggggttttagataaacccatcaatatcacccacattctgtgactctttgcatcactcgtgttatttatttatttatttatattctgccttgttccagaaaagtgtttaaggcaacaatgcttgttttttggtgttttcttttgacatttgaaaatttagtacattgttaaaatgtacttgttaaacaggtaattttaaagagaaggaacaattgtttttagtaagttttctttttcctttttcaatgaattgattcttcaaattaaaagttcttgagagaaggagaggaagatacagcagacataggactgagccaaggaagagtctgcctgagagagacgcttggcctgtgctttgctgccatccgtgcggccttggccacatccctattaacagaggcagctccacttcagacagggacaaggcttcctgctgtgcctttctggcagggttttgtggggtcacatgggaagcaatgtgttacgcaagcagtctccatgtgtgtgtaaactgctgtcctggtgacttgtccctcttcttagtggaaatgcatttgagatggtgacagggctggatgaacgtgtgaccctgggagatccgggctggactgtggaccccgatgggccagagtccttgtggcccacagcatagcactggggacagagcgctctatgcaggtgaggcgtatgagaacagcatggtaaataattgatgaagtcacatttgttcaacttaaaggattgttctttattctgaagttattttcttccttatttggatgataaaatttccttttatgtaatgaaggtaaaagtagagggcaatatttttgctttttgaaatgctcttggttgcaaaacaaaatgttggttgctgtttgtcagccccagaatttcttcttaagttcgcctgtctctgaaatcccaaagtcacggaaccgcagtctagctgtggtgcatgtttacgtattggtgagaaattcctcttgggttcttgaacagcctgtacgctggcaggcagcactgcagcatttctgctgctcatggccaagaacgagtctggagatcgctgcgtgcggttttaggaagtgccaacacccgtggtgatgggcctctggccacccctggatccatgggacacactcacaggaagctgatgtggccttctcggtgaggactgcaccttaacctgggcactgggagcctgtggcccccctgtatgttggtgatgacactagtgtgggtcttctggctctggggctacagcttctgcctcctcacctggccgtcggtactcggcaagcaggcctggcctcccggggcctggatccctaccggctgggattggcctcctggaagtacctgtttgggccatgtgacctcctttctcacttatgcctcactcccctcctcccgctccaaacccgaacctctcagtgtggaatgaacgctccaaacccgaacctctcagtgtggaatgaaacagtttagatgtgtacatgatgcacgtgggtgggattcacatcccaggagaattccacggagaggaatgtgcagattttgaagtgtacagtgatgtgtggaataaatactagaaattctcagcagacagtgggatggagaagtgagtgggggcaggagggggatttctgttgccttgacatgtcgttgctcagtgcctggattgcaggcgagtctctcttttttatgttgctttgatttcaagatctcttagatatactaggtagtgtatgaatgtgcataaatccagtttgagaatggtgtttatgaagaagctgtttcgtgtgtacagttgctgctgtaatttagccagcagtgccctgccctgccctgcagtgtctgctcagctcccactgcttctctttgctgttgggcatgtgaggcatgacttggaggggggcctggtgcctggggacctgctgaagagaatgctcaccaccagctctctgtttccctttctgctttggtaatcaacacgtgtttgcctgcagtggccgggaccgtgactgtttctgcccttgtgcctagttaagagccttcaaaagcataatgaacacttttgatatgatattgtaactttagtaaatgctttacttccctctaattgcccccaaatgccttaattttgtggactgtttatttcaacaggtggaagtgttggtcgtgcgaaatcttggtattcgcatttcaagaagggagttcttttttctttcttctttctatggaacgtttcaagtgattggatagaaagaagggctctgaagcaggagttttcacctgctctgagggaacttggggctccagggacgtaccccaaatgttgcccaggttgaaactccctgacagcctgttctacgtagtggctcgtggtttccagtttgaagagagttgtgcccctaaaagtgtttgaaacctgtggctttcaagcaaggtaccgttgtccccacagtgttccgtggggtagggggtgatggagactgtgggcaagcctgttgtttttggccccctgttgttacatgggacctgttttgacggtgggagggtgagatgtgaagatgtgggatgaacctggaatgaacgaattaaataaagacatgcatccatctgtcagcg

SEQ ID NO: 30204 - DNA, 2214 bp, Homo Sapiens
gtctctcgttttcggacggctgcagcatcgcggtggggatcgaaagcgggggcttctgggacgcagctctggagacgcggcctcggaccagccatttcggtgtagaagtggcagcacggcagactggtcaaacaaatggattttacagaggcttacgcggacacgtgctctacagttggacttgctgccagggaaggcaatgttaaagtcttaaggaaactgctcaaaaagggccgaagtgtcgatgttgctgataacaggggatggatgccaattcatgaagcagcttatcacaactctgtagaatgtttgcaaatgttaattaatgcagattcatctgaaaactacattaagatgaagacctttgaaggtttctgtgctttgcatctcgctgcaagtcaaggacattggaaaatcgtacagattcttttagaagctggggcagatcctaatgcaactactttagaagaaacgacaccattgtttttagctgttgaaaatggacagatagatgtgttaaggctgttgcttcaacacggagcaaatgttaatggatcccattctatgtgtggatggaactccttgcaccaggcttcttttcaggaaaatgctgagatcataaaattgcttcttagaaaaggagcaaacaaggaatgccaggatgactttggaatcacacctttatttgtggctgctcagtatggcaagctagaaagcttgagcatacttatttcatcgggtgcaaatgtcaattgtcaagccttggacaaagctacacccttgttcattgctgctcaagagggacacacaaaatgtgtggagcttttgctctccagtggggcagatcctgatctttactgtaatgaggacagttggcagttacctattcatgcagctgcacaaatgggccatacaaaaatcttggacttgttaataccacttactaaccgggcctgtgacactgggctaaacaaagtaagccctgtttactcagcagtgtttgggggacatgaagattgcctagaaatattactccggaatggctacagcccagacgcccaggcgtgccttgtttttggattcagttctcctgtgtgcatggctttccaaaaggactgtgagttctttggaattgtgaacattcttttgaaatatggagcccagataaatgaacttcatttggcatactgcctgaagtacgagaagttttcgatatttcgctactttttgaggaaaggttgctcattgggaccatggaaccatatatatgaatttgtaaatcatgcaattaaagcacaagcaaaatataaggagtggttgccacatcttctggttgctggatttgacccactgattctactgtgcaattcttggattgactcagtcagcattgacacccttatcttcactttggagtttactaattggaagacacttgcaccagctgttgaaaggatgctctctgctcgtgcctcaaacgcttggattctacagcaacatattgccactgttccatccctgacccatctttgtcgtttggaaattcggtccagtctaaaatcagaacgtctacggtctgacagttatattagtcagctgccacttcccagaagcctacataattatttgctctatgaagacgttctgaggatgtatgaagttccagaactggcagctattcaagatggataaatcagtgaaactacttaacacagctaatttttttctctgaaaaatcatcgagacaaaagagccacagagtacaagtttttatgattttatagtcaaaagatgattattgattgtgagataggttaggttttggggggccagtagttcagtgagaatgtttatgtttacaactagccttcccagtaaaaaaaaaaaaaaaaaaaaaaaaaattgtaaacatcacttatattactttattgcagcttcatcaccagtacattatatgttgtaatatttatttacctgatcattttgatcattttctgctttattttgctaataaactgtgatgttacttctagtgctaaacatggcatatttccacctatgattcgtgtttacctggtattaggagctcagaatggaatgcataaagcttcactggaagtgtatacaactgtggtgtagaatctgttattattatcattattattttatttagacttgactatctcttatgtttattaaagaacatgttttcct

SEQ ID NO: 30205 - DNA, 2817 bp, Homo Sapiens
gttcttctgtcgccggcttcagcagcccgcgcccgggcaggaatagaagatgaacaaacccataacaccatcaacatatgtgcgctgcctcaatgttggactaattaggaagctgtcagattttattgatcctcaagaaggatggaagaagttagctgtagctattaaaaaaccatctggtgatgatagatacaatcagtttcacataaggagatttgaagcattacttcaaactggaaaaagtcccacttctgaattactgtttgactggggcaccacaaattgcacagttggtgatcttgtggatcttttgatccaaaatgaattttttgctcctgcgagtcttttgctcccagatgctgttcccaaaactgctaatacactaccttctaaagaagctataacagttcagcaaaaacagatgcctttctgtgacaaagacaggacattgatgacacctgtgcagaatcttgaacaaagctatatgccacctgactcctcaagtccagaaaataaaagtttagaagttagtgatacacgttttcacagtttttcattttatgaattgaagaatgtcacaaataactttgatgaacgacccatttctgttggtggtaataaaatgggagagggaggatttggagttgtatataaaggctacgtaaataacacaactgtggcagtgaagaagcttgcagcaatggttgacattactactgaagaactgaaacagcagtttgatcaagaaataaaagtaatggcaaagtgtcaacatgaaaacttagtagaactacttggtttctcaagtgatggagatgacctctgcttagtatatgtttacatgcctaatggttcattgctagacagactctcttgcttggatggtactccaccactttcttggcacatgagatgcaagattgctcagggtgcagctaatggcatcaattttctacatgaaaatcatcatattcatagagatattaaaagtgcaaatatcttactggatgaagcttttactgctaaaatatctgactttggccttgcacgggcttctgagaagtttgcccagacagtcatgactagcagaattgtgggaacaacagcttatatggcaccagaagctttgcgtggagaaataacacccaaatctgatatttacagctttggtgtggttttactagaaataataactggacttccagctgtggatgaacaccgtgaacctcagttattgctagatattaaagaagaaattgaagatgaagaaaagacaattgaagattatattgataaaaagatgaatgatgctgattccacttcagttgaagctatgtactctggtgctagccaatgtcggcatgaaaagaaaaataagagcccagacattaagaaggttcaccagctgctgcaagagatgacagcttcttaaaactttattgaaaaagactcttgactttttatatacacctatctcaaccatttttttaactgatttttttcctaaatattcttctttacctttaacaaggcataggctgttgcaggacagtggttattaaagcatgggttgaacttccaaaatataaaaatagagccaccatatcaacacttagccctacccattagtatcacccccagttcttacagtaatccctgagaaatctccttcaagcatcaccaaacacagtttgaaaattacagggttagcaaaaagagcctgggctgtatgtagggtggaaacactctgatctgaagcccagctgactccactactaatttgctgtaaagctttggacatacacttagctgctgtgagccactaataacattgggctaatatctgctgtgcttctctgacaggtagtcatgaaaatcaaatgatgcaaaatatatacaagcactttgtaaattgtaaaatgatacaaaatttaaagtttatagagccagttacaaaatcctattagtcatatatttatagattgtgttcacagcaatcatttaaccacaaataaaatatcccttgatgatactgccataatgatatgtccattattagattatgttacatgacaaagttgaaggaatttggcagatgcagttaaggttcctaaacaactcactttgagactgttgaaagggcctgacctaatccaagtgaaccccttgcaagaagaattctccttgtaagccttgaagaagtatgtgagagggccacattggctaaaacctaaaggtggcctctaggagatgagacctaccttccagttgtcagcaagcaggaaaaaaaaattgggacctcagttgcaaccacaaggaactgaattctgccaaaaatctgagtcagcttagaagagtactccaagcttcagatgataaccacagcctgggctgacacctggatttcagctttgcatgatcctcagtatgagaatctatctgttctgtgctggacttctaatatatagaactgtgagataatgggtcacattggctggatgtggtggctcatacctgtaaatcccagcactttgggaggccgaggcaggcagatcacctgaggtcaagagttcaagaccggcctggccaacatggtgaaaccccgtctctactaaaaatacaaaaattagacgagcgtggtggtggacacctgtagtcccagctgcttgggaggctgaggcaggagactagctggaaccagggaggtagaggttgcagtgagctgagatcgtgccactgcactccagcctgggtgacagagtgagactccatcataaataaataaataaataaatgggtcccattaagcctttaaaa

SEQ ID NO: 30206 - DNA, 4493 bp, Homo Sapiens
gcactctgggggaacatggccgcttccggtctccctcccgggccggcgctggcctgactgcggccccggtccgtagcactccgccctccgcttctcccgccctgtagccgcgaagactgcttcagcctttccctgtgctgcccctgccgcgcgatggagaagagctcgagctgcgagagtcttggctcccagccggcggcggctcggccgcccagcgtggactccttgtccagtgcctccacttctcattcagagaattcagtgcatacaaaatcagcttctgttgtatcatcagattccatttcaacttctgccgacaacttttctcctgatttgagggtcctgagggagtctaacaagttagcagaaatggaagaaccacccttgcttccaggagaaaatattaaagacatggccaaagatgtaacttatatatgtccattcactggcgctgtacgaggaactctgactgtcacgaattataggttatatttcaaaagcatggaacgggatcccccatttgttttagatgcttcccttggtgtgataaatagagtagaaaaaattggtggtgcttctagtcgaggtgaaaattcttatggactagaaactgtgtgtaaggatattaggaatttacgatttgctcataaacctgaggggcggacaagaagatccatatttgagaatctaatgaaatatgcatttcctgtctctaataacctgcctctttttgcttttgaatacaaagaagtattccctgaaaatgggtggaagctatatgaccctcttttagagtatagaaggcagggaattccaaatgaaagctggagaataacaaagataaatgaacgatatgaactttgtgatacataccctgccctcctggttgtgccagcaaatattcctgatgaagaattaaagagagtggcatccttcagatcaagaggccgtatcccagttttatcatggattcatcctgaaagtcaagccacaatcactcggtgtagccagcccatggttggagtgagtggaaagcgaagcaaagaagatgaaaaataccttcaagctatcatggattccaatgcccagtctcacaaaatctttatatttgatgcccggccaagtgttaatgctgttgccaacaaggcaaagggtggaggttatgaaagtgaagatgcctatcaaaatgctgaactagttttcctggatatccacaatattcatgttatgagagaatcattacgaaaacttaaggagattgtgtaccccaacattgaggaaacccactggttgtctaacttggaatctactcattggctagaacatattaagcttattcttgcaggggctcttaggattgctgacaaggtagagtcagggaagacgtctgtggtagtgcattgcagtgatggttgggatcgcacagctcagctcacttcccttgccatgctcatgttggatggatactatcgaaccatccgaggatttgaagtccttgtggagaaagaatggctaagttttggacatcgatttcaactaagagttggccatggagataagaaccatgcagatgcagacagatcgcctgtttttcttcaatttattgactgtgtctggcagatgacaagacagtttcctaccgcatttgaattcaatgagtattttctcattaccattttggaccacctatacagctgcttattcggaacattcctctgtaatagtgaacaacagagaggaaaagagaatcttcctaaaaggactgtgtcactgtggtcttacataaacagccagctggaagacttcactaatcctctctatgggagctattccaatcatgtcctttatccagtagccagcatgcgccacctagagctctgggtgggatattacataaggtggaatccacggatgaaaccacaggaacctattcacaacagatacaaagaacttcttgctaaacgagcagagcttcagaaaaaagtagaggaactacagagagagatttctaaccgatcaacctcatcctcagagagagccagctctcctgcacagtgtgtcactcctgtccaaactgttgtataaaggactgtaagatcaggggcatcattgctatacactcttgattacactggcagctctatgagtagaaagtcttcggaatttagaacccatctatgagagaaagttcagtcactttatttattttaaatctctctaggatgagtttagaactgtagcagtgcaggtggcttaagtgaagtaactccatatgtaattacatgattatgatactaatcttttaagtatccaaagaatattaaaatacttcaatcctggattcacagtgggaacaagtttctattaaaaggcaaatgctgttacaaatttttggcatctggtaatattaaaaccattttagaaatacactctgtgctcactgtgcagaggaacatcagttttcaaaccaacactgaaattctgtggcatcacatatattgggccttgatgtcatgacagatcaaaatcatttgatatccctttctccattctaggtttttctttttttcagtaactgatttaccttgatcacttttcaacttccatattcttcatatagtaaaaggcaaagtgttgaagatactacggtgtggtagtagttgaaaattattgccgtcattatttacatacttaagacatattagcaagttgatccaaaatgggaggccttatagatgtgcttgggggaaaatgaaggggagaaagtagccatacaggagttcaaagaattccatgcccttcagattagcccaattaccagaaacatcatgaaagatattttaaaaactaattatttactacagtgtatttcacttgtcttgtgtgtctgaacacacagaagctaattagcaagtttttaagaagtatttaaaaatcttactaggattgacattttttctgaattctgtataaatagcttatagtgagaagtactgtgctcaaattttacatttttttcctttgcaaattctgtaatttcactcaacgattaagtctaccaaagaacacactgcatgtaaaagatgtattacaatctcaaagccagtaaaagaaatcttgcttcactgttcacctgctacaagtaagagtttggtgctggtagaaacatttgactctgatgtctattttattctacataagagccatatgtaatgtactgtaacaaaggagcttcttgtccccttggtcttttaattaaaagaaattccaactgacttttaaactttgttcttgtccaaagttgccatttcttttttttccccagaaatatttggaaattattggaggaatatgcaccccagatgaaaatgttcagtttgtacccatttttccttaaccaacacccaaatcaaacaattaaaatatacagtgtttttccactcactaattcactatacagagagtctgaaccttagcctccctcttggtcttgcagtgaggaagtttctattagtatatccaatttagcaaaattggtaccaaaatgatttctttggtaattgtgtgaaatataagctttttaacagggcatttaagtggctagcaaatcagtaattaaaaattaagctttctactccaagtatttcacaaacgcatctgccattttcctcatttaaaccttggttatcttggcctgataccacataaaagaatgtagaatggctgaagagatcaagaatttaaagcttctagtcttaacatacttgcatccacttcaaattcaaatcaaaagccagggaaatctaagtgcaaccctaccacttctctgctgagaaccttccagtggttcccctcaccttctgcagaagtctccaatatggagtacatgcacttgggcatttaatatataccactggtgtgtgtgggagggagggaggaggaatactagccctttttatatatttacacaagcaaaacttttaaatatttgaattgacagttacatgtttcataactttgtatgtctattggttgtgcaggtgtaattttttccctttttgattagggttacaaaatttagagaccagtatgattaagttgaagctccttagcctccttcgacctagtctctgcatacctcaacttttacgtaccaatgctactctgctgttcacaattgcctcatgtaatctgcagattcctgcctccccactttggttcagtctgtcttgtgcacctggaacaactgttctcccttgtgactaattcctattttctagagtttaggcatcatctcttcctttgggaagttatctgattcacgactgccttctctgacatccccaccttcctctgtgcccccatagcactgtgtataccgctactaccactgcaattcacattatattggaatgaacaattcacatgtctaccacaagtctgtaaacataaccttatttgaaatgaattgcaataaagctctgttacaacgt

SEQ ID NO: 30207 - DNA, 2309 bp, Homo Sapiens; identical to SEQ ID NO: 23212

SEQ ID NO: 30208 - DNA, 4898 bp, Homo Sapiens; identical to SEQ ID NO: 23193

SEQ ID NO: 30209 - DNA, 4148 bp, Homo Sapiens
gggcggcgcccagggcggtagcgtgaaacttggtggaagacgctgaccagtcgtgttggaatcaaaacagcggggaccctgcgccatgtcgcgactgatcgtgaagaatctcccgaatgggatgaaggaggagcgtttcaggcagctgtttgccgccttcggcacgctgacagactgcagcctgaagttcaccaaagatggcaagttccgcaagtttggttttattggcttcaagtccgaggaagaggcccagaaggcacagaagcatttcaacaagagcttcatcgacacatcccggatcacagtggagttctgcaagtcattcggggacccggccaaacccagagcctggagcaaacatgcccagaaaccaagccagcccaagcagcctccaaaagactctactactccagaaattaagaaagatgagaagaagaaaaaggtggcaggtcaactggagaagctgaaggaggatacagagttccaggagtttctgtcagttcatcagaggcgggcgcaggcagccacttgggcgaatgatggcctggatgctgagccctcgaaagggaagagcaagccggccagtgactacctgaacttcgactccgattctgggcaggagagtgaggaggagggagccggggaggacctggaagaagaggcaagcctcgaaccaaaggcagctgtgcagaaggagctgtcggacatggattacctgaaatccaagatggtgaaggctgggtcgtcctcttcctcggaggaagaggaaagtgaagatgaagccgtgcactgtgatgaagggagtgaggccgaggaagaggattcctccgccaccccagtcctgcaggaaagagacagcaagggtgcaggccaagagcaagggatgccagctgggaaaaagagaccaccggaggccagagccgagacagagaaaccagcaaaccagaaggaacccaccacctgccacaccgtgaagctgcggggagccccgttcaatgtcacagagaaaaatgttatggaattcctggcacccctgaaaccagtggccattcgaattgtgagaaacgctcatgggaataaaacaggatacatctttgtggatttcagcaatgaagaggaagtgaagcaagctctgaaatgcaaccgggagtacatgggtgggcgctacatcgaggtgttcagggaaaagaacgtccccaccaccaagggtgcaccaaagaataccaccaaatcctggcaaggccggatactcggggagaacgaagaggaggaggacctggccgaatccggaaggctctttgtacggaacctgccctacaccagcaccgaggaggatctggagaagctcttctccaaatatggtcccctgtctgagctccactaccccatcgacagcctgaccaagaaacccaagggttttgcattcatcaccttcatgttccctgagcacgctgtgaaggcctactcggaggtggacgggcaggtattccagggcaggatgctccacgtgttaccatctaccatcaagaaggaagccagcgaggatgccagtgccctgggatcgtcgtcctacaagaagaagaaggaggcccaggacaaagccaacagtgccagctctcacaactggaacacactattcatggggccgaatgccgtggccgatgccatcgcacagaagtacaacgccaccaagagtcaagtgtttgaccacgagaccaagggcagcgtggccgtgcgcgtggctctgggggaaacccagctcgtccaggaagtgcggcgttttctcatagacaacggggtcagcctggattccttcagccaggctgcagcagagcgaagcaagactgtgattctggtcaagaacctcccggcaggcaccctggcggccgagctgcaggagacgttcggccattttggcagcctgggccgcgtgctgctgccagagggcggaatcactgccatcgtggagttcctggagcccctggaggcccgcaaggccttcaggcatctggcctattccaagttccatcatgtccccctctatctggagtgggctccagttggcgtcttctccagcacagccccacagaagaaaaagctccaagacacaccttcagaacccatggaaaaggacccagcagagccagaaacagtgcctgatggcgaaaccccagaagatgaaaatccaacagaggaaggagcagacaactcttcagcaaagatggaagaggaggaggaggaagaggaagaagaagaagagagcctcccaggatgtactctgtttattaagaatctcaattttgacacaacagaagagaagctgaaggaagtgttttcaaaagtggggacagtgaagagctgctccatctccaagaagaagaacaaagcaggagtgctcctttccatggggtttggatttgtggaatacaggaagccggagcaagcccagaaagctctcaagcagctccagggtcacgtcgtggacggccacaagctggaagtgaggatctcggaacgagccactaagccagccgtgacattggctcggaagaaacaagttcccagaaagcagaccacctccaagatcctggtgcggaacatccccttccaggcccacagccgggagatccgagagctcttcagcacctttggggagttgaagacggtccgcctgccaaagaagatgactgggacaggcacacacagaggcttcggctttgtggacttcctcaccaagcaggatgcgaagagagccttcaacgccctgtgtcacagcacccacttgtacgggcggaggctggtgctggagtgggccgactccgaggtgaccctgcaggccctgcggcagaagacggccgctcactttcacgagcccccgaagaaaaagcggtctgtggtgttggacgagatcctggagcagctggaaggcagtgacagcgacagcgaggagcagacccttcagctgtgagctggcaccgagagggtgtgtggctccggggccctggggaccgggacagccgctccagcttctgcactcaccaccatgtgggctggggggcggggcggggagcggcaggcggccccaccctgcactggtccaaggtcggaggagacaggggatgaggaaggcctcaggccactgcccagcggcccaggcatcctgggtttcaccagtgacgcgttctagcagacactgactgcgcacctgctctgtagcagacacggaagagtccaagggagcagccacgttaggaagagagacttgggaacagctacacagggagctagaacccctgctccccctgtccccaccccaggagagtaaggggacgagggccagctctctggcatcaggctgcttggacatgaaaccccgtctccaagctcaagctgggagaccctggcccagtttccttatctccttgggcccagccttccccttgctagctagttcttacttcataaggttttagagagaaataaacgcagtaatgcatgaagagtgccgggcatggtgctgagccctgttcctgctctccctccagggctgctgagctagaattcccacctatgtctttccaagggactgttcacggcttgggacttggtctctgtcctgccccatcctcgtcacttgggaccacgagccctggttcagtcacccagggaagcctcccagcggctcatgaagcatcgagctccaagcccagatgccaagctccctggctgagctgaatgatgtcactcatggtggacgcgttctgctcacgggcccagagccctgtgaaatgcatcaaggtcctctccgctggccagcagcatccccaggcttctctcaggcgcccgtgttcacattttctccagcctgagacgcagcctcccgcctggaagggcctgtgccagcaccaggcagagggcaagacggagagggcagagcaagaactgcactgcatctcactgcagtctgaatctagacatcgccattccccgaggtgcgacctcagactaatgacatcctggctgagcctctgtttttctctctaggaaatgggggtgataattgtgcctacctcagatagacagtgccagaattaagtgagtcaagccaagtaaagcccagagaagattctcatcaaaaaaaaaaaaaa

SEQ ID NO: 30210 - DNA, 3007 bp, Homo Sapiens; identical to SEQ ID NO: 22968

SEQ ID NO: 30211 - DNA, 2286 bp, Homo Sapiens
gttcctcacccccgcttcgccctcacactttcgggatgtctgcgattcctgctgaggagagcgaccagctgctgatccgaccccttggagctgggcaagaagtaggaagatcatgtattattctcgagttcaaaggaagaaaaataatgctcgactgtgggatccaccctggcctagaaggaatggatgctcttccttatattgatttaattgacccagctgagattgatctcctattaattagtcatttccatttggatcactgtggagctctgccctggtttctacagaagacaagtttcaaaggaagaacatttatgactcatgccacaaaagctatttatagatggcttctttctgattatgtcaaagttagtaacatatcagcagacgacatgctgtataccgagacagatttggaagaaagcatggacaaaattgaaactatcaactttcatgaagttaaggaagttgcgggaatcaagttttggtgttaccatgcaggtcacgtcctaggagccgccatgttcatgattgagatcgcaggcgtgaagcttttgtacactggtgatttctcaagacaagaagataggcacttaatggcagctgaaattcctaatattaagcctgatattcttatcattgaatctacttatgggacccatatccatgagaaacgtgaagagcgagaagcaagattctgtaacactgtccacgatattgtaaacagaggaggcaggggtctcattcctgtctttgctcttggaagggctcaggagctgctcttgattctagatgagtactggcagaatcacccagaactacatgacattccaatatactatgcatcatctttggccaagaagtgtatggcagtgtaccagacatatgtaaatgccatgaatgacaaaatccgcaaacagatcaacatcaataatccctttgttttcaaacacattagtaacctcaagagcatggatcattttgatgacattggtcccagtgttgtaatggcctccccaggcatgatgcaaagtggcttatccagagaattatttgaaagctggtgtactgataagaggaatggtgtcattatagcgggatactgtgtagaagggacacttgccaagcacatcatgtctgaacctgaagaaatcactactatgtctggacagaagttaccactgaaaatgtctgttgattacatttctttctcagctcacacggattaccagcaaaccagtgaatttattcgtgctttgaaaccgcctcatgtgattttagtccatggagaacagaatgaaatggccagattgaaagcagcactgattcgagaatatgaagataacgatgaagttcacatagaggttcataatcctcggaatacagaagcagtgaccttaaacttcagaggagaaaaactagccaaggttatgggatttttagcagacaaaaaaccagaacaaggccagcgggtctcaggaatacttgttaaaagaaactttaattatcacatactttctccttgcgacctgtccaattatactgacctggccatgagcacggtgaagcagacccaagccattccatatactggtccctttaatttgctctgttaccagctgcagaaattgacaggtgatgtggaagaattagaaattcaagaaaaacctgctctgaaagtgttcaaaaatattactgtaatacaagaaccaggcatggtggtattagaatggctggcaaacccttctaatgatatgtatgcagatacagtaacaactgtgatattggaagttcagtcaaatcccaaaataagaaaaggtgcagtacagaaggtttctaaaaaattagaaatgcacgtttacagcaagaggttggagatcatgctccaggacatatttggagaagactgtgtaagtgtaaaggatgactctattcttagcgtcacagtggacgggaaaactgccaaccttaacttggagacacggactgtagaatgtgaagagggaagtgaagacgatgaatccctccgagaaatggtggagctggctgcacagagactgtacgaggccctgacgccagttcactgagactgtgcctgtatatgaactttgaaaaaatacttgactctacttttgttacctaaaataaaatgcattcgtttctctgggaaaaaaaaaaaaaaaaaaaaaaaaaaaaaaaaaaaaaaaaaaaaaaaaaaaaaaaaaaaaaaaaaaaaaaaaaaaaaaaaaaaaaaaaaaaaaaaaaaaaaaaaaaaaaaaaaaa

SEQ ID NO: 30212 - DNA, 4200 bp, Homo Sapiens
ccagcggctgggcctgagcgtcgagactcggggccgaggcggaggagcggccgccgcgccggggcccagccggagccgccgccctcgcccttgcctttgcctgcgcggctcagaatcaccatccgcggcgcgggagacgagccggccgtcccgggccgggggacccgcccgccatggccaccaaggctcgggttatgtatgattttgctgctgaacctggaaataatgaactgacggttaatgaaggagaaatcatcacaatcacaaatccggatgtaggtggaggatggctggaaggaagaaacatcaaaggagaacgagggctggttcccacagactacgttgaaattttacccagtgatggaaaagatcaattttcttgtggaaattcagtggctgaccaagccttccttgattctctctcagccagcacagctcaggccagttcgtcggctgccagcaacaatcaccaggttggcagtggcaatgacccctggtcagcctggagtgcctccaaatctgggaactgggaaagctcagaaggctggggggcccagccagagggggctggagcccaaagaaacacaaacactcccaacaactgggacactgccttcggccacccccaggcctaccaaggaccagcaactggtgatgatgatgactgggatgaagactgggatgggcccaaatcctcttcctactttaaggattcagagtcagctgatgcaggcggcgctcagcgaggaaacagtcgtgctagttcctcatccatgaaaattccccttaacaaatttcctggatttgcgaaacctggcacggaacagtatttgttggccaaacaactagcaaaacccaaagagaaaattcccatcattgttggagattatggcccaatgtgggtttatcctacctctacttttgactgtgtggtagcagatcccaggaaaggctccaaaatgtatggtctaaagagctacatcgaatatcagctaacacctactaacactaatcgatctgtaaaccacaggtataagcactttgactggttatatgagcgtctcctggttaagtttgggtcagccattccaatcccttctcttccagacaaacaagtcacaggccgctttgaagaggaatttatcaaaatgcgcatggagagacttcaggcctggatgaccaggatgtgtcgccatccagtaatctcagaaagtgaagttttccagcagttcctaaatttccgagatgagaaggaatggaaaactggaaagaggaaggccgagagagatgagctggcgggagtcatgatattttccaccatggaaccagaggcacctgacttggacttagtagaaatagagcagaagtgcgaggctgtggggaagttcaccaaggccatggatgacggcgtgaaggagctgctgacggtggggcaggagcactggaagcgctgcacgggcccattacccaaggaatatcagaagataggaaaggccttgcagagtttggccacagtgttcagttccagtggctatcaaggtgaaacagatctcaatgatgcaataacagaagcaggaaagacttatgaagaaattgccagtctcgtggcagaacagccaaagaaagatctccatttcctgatggaatgtaatcacgagtataaaggttttcttggctgcttccctgacatcattggcactcacaagggagcaatagaaaaagtgaaagaaagtgacaaactagttgcaacaagtaaaatcaccctacaagacaaacagaacatggtgaagagagtcagcatcatgtcttacgcgttgcaagctgagatgaatcactttcacagtaaccggatctatgattacaacagtgtcatccgcctgtacctggagcagcaagtgcaattttacgaaacgattgcagaaaagctgaggcaggccctcagccgctttccagtgatgtaggacagaacgggccttgaagagaatgccgcgtgctttctcctgacttggggcaatgcaattcaaaactttttttcccctattattcagaaaaaaaaggaaacaaaaccaaaaagaaagagttgcaaaaaactgcatttattttattagccaccctaaatgcgtcagttatttagggatggtcttttgttcatttccgcatccattatttaaaccagtggaaattgtctctatttttggaaagtacttaaaagttaccagaattttcaatggaaaatgaggggtttctccccactgatattttacatagagtcataatttatatgtcttataaattataagtcttatataatttataagtctcccacaatcttccagttcttacccagtgtcagataattaattactaattactttcttaaaaacatgaactatgccagaataaaaaatatctatgtttgtatatttttataactcctttcagtcctctggggctcctgtcattgagggaagtcgttacgcctttcactgccacagttacagctcaagtgcttacacttcaagagggaggacgctgggggcccctggggctgctagtgccatcgtggtgtgtggcaggtgggccatcccatgtccctccagggggaccccacagcctggcagatgagcagatacccctggccacccatgtcctcagcgacatttctgatgtgctgctcttatgtgaggaccagtgctttctctctttgcacttccttcctaatcttggttaaggcatgttttatgccatgaagaatacattagaagaattgagggactttgtagagaattttgtggctttggtccaacgggtgagtggctgtgcggaggcctgtgttcgggagggcctgggagaaggagggcacccagcaccccggcgtctctggccctttcttattctttggctcctcatccaccgtgatgagaagcgctgctgtggccacggcacactgcttggcttgggtggcgggttcatggccagttggtgtcatcagcaaagagaaaaagcacaggttagctccccattagatggaaaagtgtagggactgagaagggctgcagcctcagcagtgtacagagtccccggcgctctgaggttggagagaaagaacagaccagcgcccttcccgactacatccgaaacttcacacagggtgtttctgagcaccagcacttccagcgcttcacttaacggcataaagcaaaacaggaccttggcacaccgtcagctcgaactcaacactggcagccaccgtctcacccctgcggaggagcgctcccgtctcccacaggtgccttaccgcgttccctcccgctgctttcatttttctgacctaataattacgggaaatggaaagtctgggccagcatcaataaaatgacaccaaaaataagtagatgaaatcaaatgaatatgagaacatcttgttcttcaatatcacgggtttttgttaatgtttcataagtaattctccccacttgatttttcttctataaaatcccatagaacaatgtttatgctatagccatttaatatatgtacaaattgtaaagaatatgtataaatgttttacacgaatgtaagagcatgtagaagccaacatataaataaattgtttaaaaaaactgtacagtaaattctcaaagcactttttcaaaacactttttggactttgtgtgtgatttttgttgttgttgttaagtactttttattccagctgctgaaaatggtccaggtaatgaattcttccccaaatcctatttcttctgacatgaattcatcatttcagttccgtaggtcagtgttgcggtccgggaagcgtatcataaccacctgggagttgccaagaagcagacagtctcccagtgtctgactctcggatatttggatttgactggtgtgaggcaaagtgaaaaagggatgggggaaatggagatggcacgggctcctcagagcgtggtagccgactgtgaggaaaagcagagggaatgtgaaagaaaataagagaatccacgggatttgatgcctggaagattctccttcaagtggcaacatggcatatatatccttctccggggagtcacatgcaccatttggttcttagatacgttgatgttttgatttttaatgatttgtatcaacctgtaggtaccacagaagagctgtagtcatacaatcacataacttttacaaatatagtgg

SEQ ID NO: 30213 - DNA, 4061 bp, Homo Sapiens
cccacgcgtccgcggctctctttctcctctctgtcctgctgtcgcctcctctcctcactccagcctccttccctggcttattctgcccaggaaagtttggaacccccgccccccctccccaatcaggtcaacctgactaggagtagggggagatgtaggaaggcctgagagttcgggggggggaagctggaagctggtttcccagaaaatttccccccatcttctccatttagggtggtgggaattttttttaatcctgtttttgaggaggtggtaggtgtttagaaaaggatgtgggaatggaaggggtagatgagtcaaccctctttcaagattccaagggtggtgtgttacctgatccttttcgtgtgtggagttcagggggtcgggaggttggcctttattcccacattcaaagttggaacctcccccaaattaagaatggagttttagtacccacttgtggcaggaatcctggggggaaggggtccttttttcctttttcttttcttttttccctttttttccttttggcaacccacacccttccacacacgctcaccccaaaattaaacaccaagatcctctaacttgtttggattgactgatgaagacataaagctctatgttttttgaggtggagtgagtggtttttcttcatttttaaatggccaaatgacagcttgacccagtttgctttccaatcaaagggcatttattttgaatgtctctttgtggcgcaagagccaacgcaaaaatgatggcggcttacaatggcggtacatctgcagcagcaacaggtcaccaccaccaccatcaccaccaccttccacacctccctcctcctcacctgcaccaccaccaccaccctcaacaccatcttcatccggggtcggctgccgctgtacaccctgtacagcagcacacctcttcggcagctgcggcagccgcagcagcggctgcagctgcagccatgttaaaccctgggcaacaacagccatatttcccatcaccggcaccggggcaggctcctggaccagctgcagcagccccagctcaggtacaggctgccgcagctgctacagttaaggcgcaccatcatcagcactcgcatcatccacagcagcagctggatattgagccggatagacctattggatatggagcctttggtgttgtctggtcagtaacagatccaagagatggaaagagagtagcgctcaaaaagatgcccaacgtcttccagaatctggtctcttgcaaaagggtcttccgggaattgaagatgttgtgtttttttaagcatgataatgtactctctgcccttgacatactccaacctccacacattgactattttgaagaaatatatgttgtcacagaattgatgcagagtgacctacataaaattatcgtctctcctcaaccactcagctcagatcatgtcaaagtttttctttatcagattttgcgaggtttgaaatatctccattcagctggcattttacatcgagacattaagccagggaatctccttgtgaacagcaactgtgttctaaagatttgtgattttggattggccagagtggaagaattagatgaatcccgtcatatgactcaggaagttgttactcagtattatcgggctccagaaatcctgatgggcagccgtcattacagcaatgctattgacatctggtctgtgggatgtatctttgcagaactactaggacgaagaatattgtttcaggcacagagtcccattcagcagttggatttgatcacggatctgttgggcacaccatcactggaagcaatgaggacagcttgtgaaggcgctaaggcacatatactcaggggtcctcataaacagccatctcttcctgtactctataccctgtctagccaggctacacatgaagctgttcatctcctttgcaggatgttggtctttgatccatccaaaagaatatccgctaaggatgccttagcccacccctacctagatgaagggcgactacgatatcacacatgtatgtgtaaatgttgcttttccacctccactggaagagtttataccagtgactttgagcctgtcaccaatcccaaatttgatgacactttcgagaagaacctcagttctgtccgacaggttaaagaaattattcatcagttcattttggaacagcagaaaggaaacagagtgcctctctgcatcaaccctcagtctgctgcttttaagagctttattagttccactgttgctcagccatctgagatgcccccatctcctctggtgtgggagtgatggtggaagataatgtactactgaagatgtaatgtagctttccactggagtctgggatttgcaattctggaggttaatcatgcttgtactgtaattttactaatgaagttttaaattaacaaccactacttgtatgatatgaataatatttagaaatgttactagacttttaatcttgtaaagtggttgtgcttttagaagaaaaatattttacccagagttgcacatgttttatgaatttagtgcagctgttatggctcacctcagaacaaaagagaattgaaccaaatttgggagtttggggttttatgttttgtttttcttttctaaaatgaagtgagattgttcacacacacacacacacacacacacacacaaacacaaaggacagtcatacattttgatatttgagccattcctaaagatttggggttttctaaaactaaagaatctaggaaccttgcctgcgaccaatcatggagccacgtgagctgatcgtggctgcacctggggggagggtagggaggaggggcatgccacctaatgatcaagccctataattagcttctcattagagccgtgatggtgatgtgtgctgtctaaaatccaatgttgtgggtagagagaatgagtttgtgactaggagagactaaacttttgttttccttacccagtataaatatatatatatatatttaatctatttttattagaagtttttctgctctttcttacataaaagaaccccaagcatgcatctttcatgtgtgtaaataattcatttctgggctaatttcaaaagaatcccaatattgctgtatagaaagagaactagcttgcacattttaggtctgtgaaattttgtgagacttttcctgcactggacagtaaaaaaataataaaagacaaaaacaaatttaaaaaaaaatttaagccacaaaaaaaggcacatagggaattatgtcaaatgtgtttgtgtccttaggcaaagctgtgggagtcttgaaatgtcacagtagtaaataacttattactttttgacaagttctttttttctgttggaacactgaattcttctgtgcatatgtacatatgaatacaaatcgaaggcctctacctcctggagttatacaacttggcttgtttacctccacatgctgatgatgactatttttttttttgagttcagtgtggagacttgaaacttgaatgtcccttccaacttttatattaaaaataaaaagacaagaaaattgaagatcatttttcacctgtacaaggaatactaatggatcgtcttaaaattggtctaggaaaaaaccttggtgtgtgttatggacaattaactgttaaagttattgtaagttatctgtatttagcagagtattttcaacttgagtgatctgagctgaatttgaagactattaataagttatgtttggaagttttaacttcaatgaagtaattatttgctgtgaaagaaacaaacattgaattactaaacaaagatggtgcaatatctttgttttttttttatgaggctcctgagaatcaacccaactgaagcatttcaattcacttgaatgagaaacgtgtttagtatcaaaagagcccaagaagacactggtgtgaaaggtacaatctcagaggttggtcaattaccgtggcacactttctggtcactttgtacaatgtagatttgaagtacagtggtgaaaacattaaatgtgacatttgaaaaaaaaaaaaaaaa

SEQ ID NO: 30214 - DNA, 2096 bp, Homo Sapiens; identical to SEQ ID NO: 26499

SEQ ID NO: 30215 - DNA, 5008 bp, Homo Sapiens
gctaaccttgccgcgggccgagccctgcctcgccatggaccaggactatgagcggcgcctgcttcgccagatcgtcatccagaatgagaacacgatgccacgcgtcacagagatgcggcggaccctgacgcctgccagctccccagtgtcctcgcccagcaagcacggagaccgcttcatcccctccagagccggagccaactggagcgtgaacttccacaggattaacgagaatgagaagtctcccagtcagaaccggaaagccaaggacgccacctcagacaacggcaaagacggcctggcctactctgccctgctcaagaatgagctgctgggtgccggcatcgagaaggtgcaggacccgcagactgaggaccgcaggctgcagccctccacgcctgagaagaagggtctgttcacgtattcccttagcaccaagcgctccagccccgatgacggcaacgatgtgtctccctactccctgtctcccgtcagcaacaagagccagaagctgctccggtccccccggaaacccacccgcaagatctccaagatccccttcaaggtgctggacgcgcccgagctgcaggacgacttctacctcaatctggtggactggtcgtccctcaatgtgctcagcgtggggctaggcacctgcgtgtacctgtggagtgcctgtaccagccaggtgacgcggctctgtgacctctcagtggaaggggactcagtgacctccgtgggctggtctgagcgggggaacctggtggcggtgggcacacacaagggcttcgtgcagatctgggacgcagccgcagggaagaagctgtccatgttggagggccacacggcacgcgtcggggcgctggcctggaatgctgagcagctgtcgtccgggagccgcgaccgcatgatcctgcagagggacatccgcaccccgccactgcagtcggagcggcggctgcagggccaccggcaggaggtgtgcgggctcaagtggtccacagaccaccagctcctcgcctcggggggcaacgacaacaagctgctggtctggaatcactcgagcctgagccccgtgcagcagtacacggagcacctggcggccgtgaaggccatcgcctggtccccacatcagcacgggctgctggcctcggggggcggcacagctgaccgctgtatccgcttctggaacacgctgacaggacaaccactgcagtgtatcgacacgggctcccaagtgtgcaatctggcctggtccaagcacgccaacgagctggtgagcacgcacggctactcacagaaccagatccttgtctggaagtacccctccctgacccaggtggccaagctgaccgggcactcctaccgcgtgctgtacctggcaatgtcccctgatggggaggccatcgtcactggtgctggagacgagaccctgaggttctggaacgtctttagcaaaacccgttcgacaaaggagtctgtgtctgtgctcaacctcttcaccaggatccggtaaacctgccaggcaggaccgtgccacaccagctgtccagagtcggaggaccccagctcctcagcttgcatggactctgccttcccagcgcttgtcccccgaggaaggcggctgggcgggcggggagctgggcctggaggatcctggagtctcattaaatgcctgattgtgaaccatgtccaccagtatctggggtgggcacgtggtcggggaccctcagcagcaggggctctgtctcccttcccaaagggcgagaaccacattggacggtcccggctcagaccgtctgtactcagagcgacggatgccccctgggaccctcactgcctccgtctgttcatcacctgcccaccggagccgcatgctcttcctggaactgcccacgtctgcacagaacagaccaccagacgccagggctgattggtgggggcctgagacccccggttgcccattcatggctgcaccccaccatgtcaaacccaagaccagccccaaggccagaccaaggcatgtaggcctgggcaggtggctcggggccactggcggagccagtctgtggatccaagagacagtccccacctgggcttcacggcatccttgcagccacctctgctgtcactgctcgaagcagcagtctctctggaagcatctgtgtcatggccatcgcccggcggtcagtgggcttcagatgggcctgtgcatcctggccaagcgtcaccctcacactggaggaggatgtctgctctggacttatcaccccaggagaactgaacccggacctgctcactgccctggctggagaggagcacaacagatgccacgtcttcgtgcattcgccaacacgtgccctcacagggccagcgtcctccttccctgcgcaagacttgcgtcccccatgcctgctgggtggctgggtcctgtggaggccagcagcggtgtggcccccgcccccaggctgcctgtgtcttcacctgtcctgtccaccagcgccaacagccgtggggaagccaaggagacccaaggggtccaggaggtgggcgccctccatccttcgagaagcttcccaggctcctctgcttctctgtctcatgctcccaggctgcacagcaggcagggagggaggcaaggcaggggagtggggcctgagctgagcactgccccctcacccccccaccaccccttcccatttcatcggtggggacgtggagagggtggggcgggctggggttggagggtcccacccaccaccctgctgtgcttgggaacccccactccccactccccacatcccaacatcctggtgtctgtccccagtggggttggcgtgcatgtgtacatatgtatttgtgacttttctttggatttgttttgtgtttttgttgactagtcctggaaatgtttgaggctagacggggaggggccaggacccacccactgctcctgggggatgaggtcctggttttaaagccccgtcatttcaagcgggtcgatcttccacattcactggagagactctccccacctctgtctgggtggggcgcggacccctcactgtgcgcctgtgcagggggtgctggtgcacgtggcagtgtggatttccagtggtcacggtcttactgtttcaaggtttttaaataagaaaaccaaccctgccttcgcccatgcccgcccctgcccgcagttgccaaagagccgccttgtcgctgtgggcgtcagggcttggctggctcagtgcacaacccacagtggccttcagaggctcctcctgggactgggaaccgccgcagggccaggcggacggcgtgaggtttgtgttggggctggttctgcccatgctagggggtgggggagctcccaggacagaccagccttgtttctcatgtaatgcagtgacgctgtcattaaacacgtggattcatgtgtggccgggactggctggctctaggtccccggctcgggtggggtcacacggtcctgccctagagcccccatctggccctggagctgcagaagcagcttctgaggggcttcccaggcctgcatttcacagatggggagctcagccctcgaaggccgcagagacgcctcccaggcccgtctgccagggcgccggccacaatcctgcagggccaaggactggactccaggcaagtccctgcgctccagctggacggccctgttccagggaggaggtgctcggttgacaccatcagggagggagggtgggcactgctgggctgagttcacccccagggctggccagatggggccaggagggacagagcaaggggggtgaaggccgtggtgggagggtcccatgatgatgggccagggctcgtgtagaaatgggggaattggttccccatggcccaggacagctgagaggaggtggaggggccccaggggagtgtacgtcaggctttgcggggcacgggggccactcagcagcgctggggcaggtgcctctgctgtcagctccacccgacaggcagacgaaggccagtggggccatcgcttcctggggcgaccctggcagtggttgggagacgcccagatggagggggaggctgaccaagggccccgcagggcgggctgcaacttttctgttgatcctggaatgtagctggtgcagtgagagggaaagagaattgaaaaactcaggctgccataggttctgcgatgagaggtgcaggaggcaggagcctggcccagggggtgctggtgcctccccggggtctgggcggagagaacaggaggaatggctgggaagtggctgagggagccaggaggccggggggccgggggctgcaggggaggctgtgggggtcctggcagccaggaggccccaggtggttttgaggctcgctcttgcgcggtgcctgagaagagggtgaaggagctggggcaggccccatcctgggcattggagatgatgaaaccgagcagacctggcccatgtggagctggcatgggggacacagcccagagacagagaagcttatgaggaagtgaggaggtggcgtcacaagggtggggagggggccttggggaagggcggccttggatcagaggctcaccacaagcctggcatttcagccagggctggagaaggcagggacgcctgggtgagaggcaaagggcacagccatgcaaaggccctggggcaggacggcacctggtatgcgggaggaacagagtgaggagaggagggcagggcgtgcagggccttgtgggcctcagggaggacttgggcacctaccccgagggagtggagctcctgggtgcgtgtccagatgggaaaggcagggtcgtatctgtggggacctgacaagggcaggggaagcggagaccagggtgcaggctccgcccccacccaaggccgggcccagccagaggaggggcagggcagggcaggaggtttctggatgtttgttgggtttggtttggttttgttttgttttgtttattgtggtaaaatacaaaatctaccgtctt

SEQ ID NO: 30216 - DNA, 1232 bp, Homo Sapiens
ctagaggggcggaaagtaacaaggaggtgggggtacaaatcctcagctcctgcttccgcaagcactaacctgctctgaagtgagccaggcagctctggccatcttttcccagccacagaatcaggtgatggtccagaattaagagctgtcacctgtgtcattcactcacaatggaagaaatgaagaagactgccatccggctgcccaaaggcaaacagaagcctataaagacggaatggaattcccggtgtgtccttttcacctacttccaaggggacatcagcagcgtagtggatgaacacttctccagagctctgagcaatatcaagagcccccaggaattgaccccctcgagtcagagtgaaggtgtgatgctgaaaaacgatgatagcatgtctccaaatcagtggcgttactcgtctccatggacaaagccacaaccagaagtacctgtcacaaaccgtgccgccaactgcaacttgcatgtgcctggtcccatggctgtgaatcagttctcaccgtccctggctaggagggcctctgttcggcctggggagctgtggcatttctcctccctggcgggcaccagctccttagagcctggctactctcatcccttccccgctcggcacctggttccagagccccagcctgatgggaaacgtgagcctctcctaagtctcctccagcaagacagatgcctagcccgtcctcaggaatctgccgccagggagaatggcaaccctggccagatagctggaagcacagggttgctcttcaacctgcctcccggctcagttcactataagaaactatatgtatctcgtggatctgccagtaccagccttccaaatgaaactctttcagagttagagacacctgggaaatactcacttacaccaccaaaccactggggccacccacatcgatacctgcagcatctttagtcaagttggaggagaaagacaacacttggtctaagacacggcagcaagacatccctgcatattgttccagataaaaatgaaagctgctcacacccacttgcctccccaatctgttaaacagcttcgtgtctagtatgagctcagtacttgccctgtgaaaatcccagaagcccccgctgtcaatgttccccatccacaccctgcttgctcctgtgtaacagctcagatgatgaataataataaaactgtacttttttggatggtgaaaaaaaaaaaaaaaaaaaa

SEQ ID NO: 30217 - DNA, 4363 bp, Homo Sapiens
ccacgcgtccgggcgcgggaaggtgcgggttgttggctgaggcaagccgtggctcgggcgacgcggggccaggagggcaggaccgtctgccggcgacagcccataccgtctgccgttgcgcgacacgaaccaccctccgatccgccatccccgcgtcgtcgccgctagtccgcccgcccgccctcgggccccccgctgccgagcccgacctcctaagagctgaaagaaattattgagagtcatagtccatagccccctgcttcgtcccccaaccctcaacgacgaaaaggacttcggtcccctggcccggcgacgcccgggaaggaaaggagagcgacctccgccccgcgctcaggccaccctggagggagaagccgccccgcggccggtagagcgccccgccgccgcggagacccgaagccgcctggagcccaaggctgtacacgtgccctgtgctgattctctgcctaggaaaggaccatgcagctagagatcaaagtggccctgaacttcatcatctcctacttgtacaacaagctgccccggcgccgggcagacctgtttggggaggagctagagcggcttttgaaaaagaaatatgaaggccactggtaccctgagaagccactgaaaggctctggcttccgctgtgttcacattggggagatggtggaccccgtggtggagctggccgccaagcggagtggcctggcagtggaagatgtgcgggccaatgtgcctgaggagctgagtgtctggattgatccctttgaggtgtcctaccagattggtgagaagggagctgtgaaagtgctgtacctggatgacagtgagggttgcggtgccccagagctggacaaggagatcaagagcagcttcaaccctgacgcccaggtgttcgtgcccattggcagccaggacagctccctgtccaactccccatcgccatcctttggccagtcacccagccctaccttcattccccgctccgctcagcccatcaccttcaccaccgcctccttcgctgccaccaaatttggctccactaagatgaagaaggggggcggggcagcaagtggtgggggtgtagccagcagtggggcgggtggccagcagccaccacagcagcctcgcatggcccgctcacccaccaacagcctgctgaagcacaagagcctctctctgtctatgcattcactgaacttcatcacggccaacccggcccctcagtcccagctctcacccaatgccaaggagttcgtgtacaacggtggtggctcacccagcctcttctttgatgcggccgatggccagggcagcggcaccccaggcccgtttggaggcagtggggctggcacctgcaacagcagcagctttgacatggcccaggtatttggaggtggtgccaacagcctcttcctggagaagacaccctttgtggaaggcctcagctacaacctgaacaccatgcagtatcccagccagcagttccagcccgtggtgctggccaactgaccatctacctgcccgtggggccaggagcacccaagaccacagaaaagagaaaggaaaggccaaaaaaaagaggaaaagaaaaatgtacaaaaagattttcgatcttctcactcttacttctagaaaaaagatccagcccaggcacggaatgggagggccctgcaaagcacccaagtgtgtttcactcaccccttaccgctcgcccaccggcctgtgatttatttggttggtttgggttttatatttctttttcttttttttttttcttacatgtagttttctatataacatctttaatgagtggcttcctgtgctaagaatggtccagatgtgaactgctgctccctgctcctcccttcctccttcacactcctagtttaggattgatgtgtccaagctcatagggaagaaagagctgcagctggagcctgaccctccctggaacagggagaggctggcccgtgtcactgcctctgtcacccagctatcctcgcactcaaagccatccaacctcagcaggccttctcgggccctgccacctgaataggtctgaccccagtccccactccctttcaggctgggccacagggagttgctggctggccacttgacaccctccccctggagctgatgtctgtgactacagggagattagcacttcgtctagtgaaactcctttcatctctgtcctatggccccaccccaccattccctctaggcccagaccatcatcatggccctggccattgatgtgtatgggctttctttccctcatgcagccccttcttccccaggctggatgttgtgggtagggaggggtgtgtgtgtgtgtatttggtttgctgtccttttttaaaggattccaagccatgtgaaacttcccttctggatgtgattctgggtcgcaagtccttatttatatgtgaggctggggaatgggctgggggtattggcagtccttttgcagggcagtgtgtgtggtggggtgacaccgctgtggcttagcccaagacactcccagaggaaaacactgcagaaggaactggtttgcagactgtggaaggatctgcagttttgtttttgaccaaaaaaataataataagttagctctgaagggcagagggaatacccaagcccctgatgcctatgagaagtccctggacttcaaccctcctgttgtttggccttagcccagagggagctgctcacctgagcacccttgggggtgggcagagaggcagggtgggattttagagttagtgtctgtgcgggggcagccctgagcctggagttgagactttggggtctcttagtttggaggtgttgagtgcatttgtgcccctgcctggttgagagcttcttggtacctcttgccaccccttctcactgccctgacccaaccccactggaccttgatgctgcgaggagtggtgtcctgacggactcagcactcccgcctgatgtattggatcataggagagcacttgctctcctgcctctgccaggagagggcttgttcctccaactctaggaggccaggcaagcatggacaggagccaagggagcagggtcattaactttttcttctttgcaaagtgggcacttgccatcagggtcccaatcaccagaaagcaccaaagcccctggcaccccacccactccatcctacccagggaccccaagtaggcaactgttatggcagtgggtccagcccaggccagcactgccagcctcctctccctgcagtaggcaccagctctacctcccccggcaggcaatgtcctggcttctcagcccagcaccatctgttcccctagacttctcaggggccagcccagtctgggccaccctttgtttccctcatcctcggctcccacacaggtgacagacccagcagatagcttctctctgggaaaggttggatgctgccttacatccccttctagccctcctcccatccacacacacaggcacccacccacaccaggtcggcttgtttctcacatgtagggagagaggggagaccaacccctttgtgtcttttgaaatacgaagaaaaatgtgtgttcaggagcatgactccagtgctgcgctcttgggcctagttcagtctgtcttgtctcaaatctaggcatttttgcttcaattttattttttttaagaatacaaaaacagaaatctgcactaatttacctggtttcgtaggaaaacttttttttattttttacattttttggtgtccgtttgtattgaataatttgctacatttgtaaaatgtaagaggtatataatatatgtatatttctaacgtaaaaaacataatttttttcttttcaagattttttcttaaaaagatgagagaaacatattttttcaggaaaaacaaactttaaaaaaaaaagaggagaaataaaaccttttctcccctttccccatcctctatctatccctctttcccaggaacaaatcaaaaggtggattatcttctgaagaatggaaactgttagtccagaatgatgtctttttctcaatgcagtgagttatagattctctagttttctccctagggatgggaagggggcattgaggcaagcctggagaggagcccggggagcagggtcatgaacttttttctttagtgaaggaggaatacaatcaagggttttgtattcagaatgttgtgcaatattttggaatgggacattggtgtgtttagagattttagtttaaaaacaaaacaaaaagattgatcaaatctgtacagtttctattgttccagatttttttaagtttgtattaaaagcatgatccataataaaaaaaaaaaaaaaaaaaaaaaaaaaaaaaa

SEQ ID NO: 30218 - DNA, 3037 bp, Homo Sapiens
atgaggggagtcgagactcccgcgccccaccacccccggcggagctgctgctgagccactcaatctgagccctggctactaataaagttcgtttaaaaatcataatcattcttaagagagcgaaagagggtgcgaactagccgctcggccccgcagggagagctggcgcgtcgggaggagacagcggcggcagcggttgcgccgcgaccaggaggagccggtggcgccgggcggcgggtccgcggccggtgggggacggtgagtagcggctcgcgctgcggtgcagcggcgctgcactcactcgccctctccaggggctgggggttcgtccggctccactggggaagactcagcttctccccggggtcccgggttgtgccttactctccggagtgggcaggggtatcgagggcaggggcctcccggcccggctcccccatcccccggttcggaccgccgagcgccggctctcccctccctgagcaccgatcccaagttccagctagagaaggtgggcggcagcgccagcccggcgccccctcccagctcccagcgatttgagagggaagatctgatctcctagaattagagttggtacagaaaccatttcagctccaaaaatgttggaggaagatatggaagtcgccataaagatggtggttgtagggaatggagcagttggaaaatcaagtatgattcagcgatattgcaaaggcatttttacaaaagactacaagaaaaccattggagttgattttttggagcgacaaattcaagttaatgatgaagatgtcagactaatgttatgggacactgcaggtcaggaggaatttgatgcaattacaaaggcctactatcgaggagcccaggcttgtgtgctcgtgttctctaccacagatagggaatcttttgaagcagtttccagttggagagagaaagtagtagccgaagtgggagatataccaactgtacttgtgcaaaacaagattgatcttctggatgattcttgtataaagaatgaggaagctgaggcactggcaaaaaggttaaagttaagattctacagaacatcagtgaaagaagatctaaatgtgaatgaagtttttaagtatttggctgaaaaataccttcagaaactcaaacaacaaatagctgaggatccagaactaacgcattcaagtagtaacaagattggtgtctttaatacatctggtggaagtcactccggtcagaattcaggtaccctcaatggtggagatgtcatcaatcttagacccaacaaacaaaggaccaagaaaaacagaaatccttttagcagctgtagcataccctaagatgttttgggaggaaaacaattgaattacattgtgcaatgcattaagaaacccatccagctgtcatggtatgttacaaggttttcagcagactttgctcctaatggctctctgaaagtgacagacttaaatattgctctgcagtgcttttcagaatgtagagtgagacctctggtggaaaaattattgccctgtggactcctttaattttttttacattagacgaagcttctcctgtttgtaaaggaatgctataagaaatttcaaacacaggttttgcggaattttaaatgctggaaaacataaatgaaatgcctaaatatattgttacagattttaatactgtggatcaaggaaagatagcaagcattcttttcctgaaattggtcatgtagcttttctgcgaaatagtattgaatctgaatactttcacaaaataatactgaaaggtaaaccctaaatcttgccagactgcattagtattttggcattgaaacttgtgcaatatctgtgtaatgtagaatgtggggtgtgcatgcagatgtctggtactggagtaagctgaaggtatgtgcagtatttaagaaaatgtacattctaattaattcacttataaaaccatttacatattgtgtatatgtttttattttcaaatgataaactctagacatatattttgcaaaatgagcttgggtttaaaaagtgctttgtgccaaaaatatcatacctaatttttatagtgctttactatcagaatttatattgtttattatatcttttaaaagcagtaagcagttttcatctgacagcgtagataaaagaggagtataggaatttgaatgctagagcatctcccaggtgagccttattgcagatctttttgatatagtcacccataagcatggtgagctcctgctctcataaggtcagccaaagccccttaagaaggtacacagcacatctgcagtcattcaggaggtcctgtgaagtgtggtgatgcatctaacaccttttgctgctcactgagaacccagctttgaacttacaagattacactaaccatttttaaagtgcacaaaaatattattattagtcttaactaaaattacatattttataatgccctgcaactctaaaccatccttttgtttacacatttttgtatggtattttaagattatcaatcacttcaacatttctataaccttgtttgtatagcactttctcaagagctgtcagtcccacatacagaatcatttcttttacaaaatgatttaatatgtaatcatgtgtcaggacataaattttgtcacttgggacagtagctttccagctaagataattgcgtgaactctgttaaaactgattatcactcatcaatggctttatttttaacctataaataacccctttcaatatacctggtttttacagcattgcaaaatctgtaaaaataacttttattggaaaatgtcatgaagtcatttttcattatttgtactaaacaatgttttatgtactccttttgtgttttatcttttgtttttccatctgtactcccctcatcctcctaatgttgagaaaatcaaatttcctgggtgtgtccttgttaagtgatcaaaagtaaatgttctctttgccattttagatggaaaaataaaaaaaattaaaaagtaaaaaaaaaaaaaaaaaaaaaaaaaaaa

SEQ ID NO: 30219 - DNA, 4188 bp, Homo Sapiens; identical to SEQ ID NO: 23266

SEQ ID NO: 30220 - DNA, 817 bp, Homo Sapiens
agcccaggcgcagcgggaatccaatcaacttcgagagcgtaggccccacctatcgtgggtcgagttgcttggcggtcgtggttccggagttcctcgggatgtcggtggccttcgtaccggactggctgaggggcaaggcggaagtcaatcaagagactatccagcggctccttgaggagaatgaccagctgatccgctgtattgtggagtatcagaacaagggccgcgggaacgagtgcgtgcagtaccagcatgtgttacatagaaatctcatttatttggctaccattgcagatgccagtccaaccagcacttcaaaagcaatggaataatctttcaaaagcaatagaataatcttccatttggctgtcgtgaggagtaattgaatgtaatccatctcttacaaaatggagacagggtctttaccaactcaactggttaaaacatgaatgaaacctctgtggctctttcaaaacgtgaaaatgtgaagaaagctactaacttagctgtattctcatgtaaatattttttaaataattaagcaaatccctcaataagttgagcccaggtgtcctctttcctgaacttggagcatgtttggataacaaagacatcactgggatgttcaagtctactttttagtttcaacctgaagaggaaactcagtaggtgttgggcaggaattggtgagattcctgacttgataccttgctaaatggacatgtaactgtgtgctccttcctatcagtttgtaaatgtggtccccctgactgctgttttcagattgctttgaaataaagcttatttttctataaaa

SEQ ID NO: 30221 - DNA, 548 bp, Homo Sapiens
gggtgcttggccgtccctgccattagcgcgtaacgagagactgcttgctgcggcagagacgccagaggtgcagctccagcagcaatggcagtgacggcgttggcggcgcggacgtggcttggcgtgtggggcgtgaggaccatgcaagcccgaggcttcggctcggatcagtccgagaatgtcgaccggggcgcgggctccatccgggaagccggtggggccttcggaaagagagagcaggctgaagaggaacgatatttccgagcacagagtagagaacaactggcagctttgaaaaaacaccatgaagaagaaatcgttcatcataagaaggagattgagcgtctgcagaaagaaattgagcgccataagcagaagatcaaaatgctaaaacatgatgattaagtgcacaccgtgtgccatagaatggcacatgtcattgcccacttctgtgtagacatggttctggtttaactaatatttgtctgtgtgctactaacagattataataaattgtcatcagtgaaaaaaaaaaaaaaaaaaaaaaa

SEQ ID NO: 30222 - DNA, 2743 bp, Homo Sapiens
cgcccccaccgccacccaaccaagcatcacccattccagcacttccggcctgacccctgtccagcgcctttcctttctccagcttctgctctgccccaagagtggtcgccttcgtggcagggcacgactctctcccagctcgggtcgccgcccacattagtgtggggccctgcggcctagcgtccctcaccagaggcctccccttgcctagctggaccgccgagggacatcgacgagtatcctcctcctgctgtccccggcttcgcctgccgcccctaaccggccagtcaagatggccgccgctgggtgaggcaagctggcgcgccgcgggggcgtctgggagttgtagttcgggacggcgggctgacgcacttcgccgccggccgacgggcgccattgtgcggcgcgcgccgggactctgcccacttccaccagagacacattgagaaggaggaaactatggcctccaggcttccgacggcctggtcctgtgaaccagtgacctttgaagatgtaacactgggttttaccccggaagagtggggactgctggacctcaaacagaagtccctgtacagggaagtgatgctggagaactacaggaacctggtctcagtggagtatcctgagctccagctggaccctaaattggatcctcttcctgctgagagtcccctaatgaacattgaggttgttgaggtcctcacactgaaccaggaggtggctggtccccggaatgcccagatccaggccctatatgctgaagatggaagcctgagtgcagatgcccccagtgagcaggtccaacagcagggcaagcatccaggtgaccctgaggccgcgcgccagaggttccggcagttccgttataaggacatgacaggtccccgggaggccctggaccagctccgagagctgtgtcaccagtggctacagcctaaggcacgctccaaggagcagatcctggagctgctggtgctggagcagttcctaggtgcactgcctgtgaagctccggacatgggtggaatcgcagcacccagagaactgccaagaggtggtggccctggtagagggtgtgacctggatgtctgaggaggaagtacttcctgcaggacaacctgccgagggcaccacctgctgcctcgaggtcactgcccagcaggaggagaagcaggaggatgcagccatctgcccagtgacagtgctccctgaggagccagtgaccttccaggatgtggctgtggacttcagccgggaggagtgggggctgctgggcccgacacagaggaccgagtaccgcgatgtgatgctggagacctttgggcacctggtctctgtggggtgggagactacactggaaaataaagagttagctccaaattctgacattcctgaggaagaaccagcccccagcctgaaagtacaagaatcctcaagggattgtgccttgtcctctacattagaagataccttgcagggtggggtccaggaagtccaagacacagtgttgaagcagatggagtctgctcaggaaaaagaccttcctcagaagaagcactttgacaaccgtgagtcccaggcaaacagtggtgctcttgacacaaaccaagtttcgctccagaaaattgacaaccctgagtcccaggcaaacagtggcgctcttgacacaaaccaagttttgctccacaaaattcctcctagaaaacgattgcgcaaacgtgactcacaagttaaaagtatgaaacataattcacgtgtaaaaattcatcagaagagctgtgaaaggcaaaaggccaaggaaggcaatggttgtaggaaaaccttcagtcggagtactaaacagattacgtttataagaattcacaaggggagccaagtttgccgatgcagtgaatgtggtaaaatattccggaacccaagatacttttctgtgcataagaaaatccataccggagagaggccctatgtgtgtcaagactgtgggaaaggatttgttcagagctcttccctcacacagcatcagagagttcattctggagagagaccatttgaatgtcaggagtgtgggaggaccttcaatgatcgctcagccatctcccagcacctgaggactcacactggcgctaagccctacaagtgtcaggactgtggaaaagccttccgccagagctcccacctcatcagacatcagaggactcacaccggggagcgcccatatgcatgcaacaaatgtggaaaggccttcacccagagctcacaccttattgggcaccagagaacccacaataggacaaagcgaaagaagaaacagcctacctcatagctctcaagccagttgaagaaaccttgccttttcagcttgaccctgcaatataacatgcacaggcctgcttgtgaatcaggactgaatgtgaaagggaagtattgagtgaggacattcccaaaaccaaaggacaactgaggagactgcccagcacataatgaataaataagaaaatgagtgaggagttattaacatcatttggaaaaaagatttcccattcacttgatattgtttgttcactcatttagtcattaaaagtgagattaataaaatctgaaaatgttatataataactttaaaaagccaggtaattaataatctgcactgatattacatccacagtaccacagtatttatgtgtatgaattaaggattaaaagataatgtggataaataaactattgatctatgtctgtgt

SEQ ID NO: 30223 - DNA, 2167 bp, Homo Sapiens
gtccaccttgattctgcccgtagcaggtgaacctggtgtggtgcgcgcactgcgggtcctgattggctgtgcacgccacggtgaaaaacttgagcgtctactccgagtcctgcaagctcctagtgtctcctctgggtggacgcctaggcgcacggccgttacttctctttcacctgtggattcgtcagtttctcgttcgtttcaggaggcgatcccgcgccctgggtgcggtgaggccgctgggacagcggaggtgcctcccgacgcgaagcagcgagctgaggcggcggccagcggggaagatgagcggcagcagcgccaggtccagccacctgtctcagcccgtcgtgaagagcgtgcttgtgtaccgcaacggggaccccttctacgcggggcgccgcgtcgtcatccatgagaagaaggtgtccagcttcgaagtcttcctgaaggaggtgaccggcggcgttcaggcaccctttggggccgtcaggaacatctacaccccgcggactggccaccgaatccggaagctagaccagatccagagcgggggcaattacgtggctggaggccaggaagccttcaagaaactcaattacttggacataggagaaatcaagaaaagaccaatggaagttgttaatacagaggtaaaaccagtaatccatagcaggatcaacgtgtcagctcgctttagaaaaccgcttcaggagccgtgcactatcttcttgattgcaaatggagacctcataaacccagcttctcgcctccttatccccagaaaaaccttgaatcagtgggatcatgtactacaaatggtcacagaaaaaatcactctgaggagcggggctgttcacaggctttatactttagaaggaaaacttgttgagagtggagcagagttggagaatgggcagttttatgtggctgttggcagagataagtttaagaaactgccttacggtgagttactttttgacaagtcaacgatgagaaggccttttggtcagaaagcttcttcactacctcctattgtaggatccagaaagtctaaagggagtggaaatgatcgccactctaagtcaacagttggatccagtgacaactcatctcctcagcccctgaagaggaaagggaaaaaagaagacgtgaattcagaaaaactgacgaaattgaaacaaaatgtaaaattaaagaattcacaagaaaccattccaaatagtgatgaaggcattttcaaagctggagcagagaggtctgaaacacggggggcagcagaagtccaagaagatgaagatactcaggttgaggttccagtcgatcagaggccagcagaaatagtagacgaggaagaagatggagagaaggcaaacaaggatgcagaacagaaagaagacttttcaggaatgaatggtgaccttgaagaggaaggaggtagggaggctacagatgcccctgagcaagtcgaggagattctggatcacagtgagcagcaggcacgccctgctcgtgtaaatggaggcaccgatgaggagaatggtgaggagctgcagcaggttaataatgagcttcaactggtcctagacaaggaaagaaagtctcaaggagctggcagtggacaagatgaggctgatgtagaccctcaaagaccaccaaggccagaagtaaaaattaccagtccagaagaaaatgaaaacaaccaacaaaacaaggactatgctgccgtggcttagaagatttttaaaaagagagtatatggatcgcaagaaaaatgaagggttatcatacttgaaagataagcacatagttattgctgaatataatgtgacactatggtcgaatactacctacgaattataacattagaagcctagtggaaagaccagataactttaaatggctactaaaggataattacttacttttattgcatgtgttttaaaagtcatatagaaatattaaataagacggacagaggagaatttgcactggaagacaattgccacttgtaaaggatgaaaaataggatcactcttattgtacgctttattataagtttagaaggcagtttattctaaataatttttctctaggaaggcgtagaattttaaagaactggtaataggaaagcatgtactattttcttaaagcaataaactcttgaatg

SEQ ID NO: 30224 - DNA, 6065 bp, Homo Sapiens
agcgatgtttgcccgtcagtcgagtccggagtgaggagctcggtcgccgaagcggagggagactcttgagcttcatcttgccgccgccacggccaccgcctggacctttgcccggagggagctgcagagggtccatcgccgccgtcctctggagggcagcgcgattgggggcccggacctccagtccgggggggatttttcgtcgtccccctccccccaaccagggagcccgagcggccgccaaacaaaggtaccagtcgccgccgcgggaggaggaggagccggagcctctgcctcagcagccgctggacccgccgcccttcttccccatctctcccccgggcctgctggttttgggggggagaaggagagaggggactctggacgtgccagggtcagatctcgcctccgaggaaggtgcagctgaacctggtgttttagaggataccttggtcccagagtcatcatgaaggcccttgatgagcctccctatttgacagtgggcactgatgtgagtgctaaatacagaggagccttttgtgaagccaagatcaagacagcaaaaagacttgtcaaagtcaaggtgacatttagacatgattcttcaacagtggaagttcaggatgaccacataaagggcccactaaaggtaggagctattgtggaagtgaagaatcttgatggtgcatatcaggaagctgttatcaataaactaacagatgcgagttggtacactgtagtttttgatgacggagatgagaagacactgagacgatcttcactgtgcctgaaaggagagaggcattttgctgaaagtgaaacattagaccagctcccactcaccaaccctgagcattttggcactccagtcataggaaagaaaacaaatagaggaagaagatctaatcatataccagaggaagagtcttcatcatcctccagtgatgaagatgaggatgataggaaacagattgatgagctactaggcaaagttgtatgtgtagattacattagtttggataaaaagaaagcactgtggtttcctgcattggtggtttgtcctgattgtagtgatgagattgctgtaaaaaaggacaatattcttgttcgatctttcaaagatggaaaatttacttcagttccaagaaaagatgtccatgaaattactagtgacactgcaccaaagcctgatgctgttttaaagcaagcctttgaacaggcacttgaatttcacaaaagtagaactattcctgctaactggaagactgaattgaaagaagatagctctagcagtgaagcagaggaagaagaggaggaggaagatgatgaaaaagaaaaggaggataatagcagtgaagaagaagaagaaatagaaccatttccagaagaaagggagaactttcttcagcaattgtacaaatttatggaagatagaggtacacctattaacaaacgacctgtacttggatatcgaaatttgaatctctttaagttattcagacttgtacacaaacttggaggatttgataatattgaaagtggagctgtttggaaacaagtctaccaagatcttggaatccctgtcttaaattcagctgcaggatacaatgttaaatgtgcttataaaaaatacttatatggttttgaggagtactgtagatcagccaacattgaatttcagatggcattgccagagaaagttgttaacaagcaatgtaaggagtgtgaaaatgtaaaagaaataaaagttaaggaggaaaatgaaacagagatcaaagaaataaagatggaggaggagaggaatataataccaagagaagaaaagcctattgaggatgaaattgaaagaaaagaaaatattaagccctctctgggaagtaaaaagaatttattagaatctatacctacacattctgatcaggaaaaagaagttaacattaaaaaaccagaagacaatgaaaatctggatgacaaagatgatgacacaactagggtagatgaatccctcaacataaaggtagaagctgaggaagaaaaagcaaaatctggagatgaaacgaataaagaagaagatgaagatgatgaagaagcagaagaggaggaggaggaggaagaagaagaagaggatgaagatgatgatgacaacaatgaggaagaggagtttgagtgctatccaccaggcatgaaagtccaagtgcggtatggacgagggaaaaatcaaaaaatgtatgaagctagtattaaagattctgatgtcgaaggtggagaggtcctttacttggtgcattactgcggatggaatgtgagatacgatgaatggattaaagcagataaaatagtaagacctgctgataaaaatgtgccaaagataaaacatcggaagaaaataaagaataaattagacaaagaaaaagacaaagatgaaaaatactctccaaaaaactgtaaacttcggcgcttgtccaaaccaccatttcagacaaatccatctcctgaaatggtatccaaactggatctcactgatgccaaaaactctgatactgctcatattaagtccatagaaattacttcgatccttaatggacttcaagcttctgaaagttctgctgaagacagtgagcaggaagatgagagaggtgctcaagacatggataataatggcaaagaggaatctaagattgatcatttgaccaacaacagaaatgatcttatttcaaaggaggaacagaacagttcatctttgctagaagaaaacaaagttcatgcagatttggtaatatccaaaccagtgtcaaaatctccagaaagattaaggaaagatatagaagtattatccgaagatactgattatgaagaagatgaagtcacaaaaaagagaaaggatgtcaagaaggacacaacagataaatcttcaaaaccacaaataaaacgtggtaaaagaaggtattgcaatacagaagagtgtctaaaaactggatcacctggcaaaaaggaagagaaggccaagaacaaagaatcactttgcatggaaaacagtagcaacagctcttcagatgaagatgaagaagaaacaaaagcaaagatgacaccaactaagaaatacaatggtttggaggaaaaaagaaaatctctacggacaactggtttctattcaggattttcagaagtggcagaaaaaaggattaaacttttaaataactctgatgaaagacttcaaaacagcagggccaaagatcgaaaagatgtctggtcaagtattcagggacagtggcctaaaaaaacgctgaaagagcttttttcagactctgatactgaggctgcagcttccccaccgcatcctgccccagaggagggggtggcagaggagtcactgcagactgtggctgaagaggagagttgttcacccagtgtagaactagaaaaaccacctccagtcaatgtcgatagtaaacccattgaagaaaaaacagtagaggtcaatgacagaaaagcagaatttccaagtagtggcagtaattcagtgctaaatacccctcctactacacctgaatcgccttcatcagtcactgtaacagaaggcagccggcagcagtcttctgtaacagtatcagaaccactggctccaaaccaagaagaggttcgaagtatcaagagtgaaactgatagcacaattgaggtggatagtgttgctggggagctccaagacctccagtctgaagggaatagctcgccagcaggttttgatgccagtgtgagctcaagcagtagtaatcagccagaaccagaacatcctgaaaaagcctgtacaggtcagaaaagagtgaaagatgctcagggaggaggaagttcatcaaaaaagcagaaaagaagccataaagcaacagtggtaaacaacaaaaagaagggaaaaggcacaaatagtagtgatagtgaagaactttcagctggtgaaagtataactaagagtcagccagtcaaatcagtttccactggaatgaagtctcatagtaccaaatctcccgcaaggacgcagtctccaggaaaatgtggaaagaatggtgataaggatcctgatctcaaggaacccagtaatcgattacccaaagtttacaaatggagttttcagatgtcggacctggaaaatatgacaagtgccgaacgcatcacaattcttcaagaaaaacttcaagaaatcagaaaacattatctgtcattaaaatctgaagtagcttccattgatcggaggagaaagcgtttaaagaagaaagagagagaaagtgctgctacatcctcatcctcctcttcaccttcatccagttccataacagctgctgttatgttaactttagctgaaccgtcaatgtccagcgcatcacaaaatggaatgtcagttgagtgcaggtgacagcaggacttgctaaagcactttgcacttaatggctgttgagggccactttttttttatactgcacagtggcacaaaaaaatatcagacaagcactattttatatttaaaaattgtttcttgacaagctgacttggcacttaagtgcacttttttatgaagaaaaagtacaatgaactgcttttcctcaagcaataattgtttccaacttgtctgggaattgtgtgtctggtaactggaaggccttccactgtggcaaatggaggcttttcactgcctgtagagacaatacagtaagcatagttaaggggtgggtcagaacatgttaagataacttactgtatatgtattcccttgtattttgttaaagctggaacatttgatatttttccatttatttatgaaaaaatatgaacctattttcatttgtacaaggtaattgttttttaaagcaagtcaccttagggtggctttaattgtataagtcaagcacatgtaataaattcaaaacctgcagttaacaggatattagacatcaatcctggtaaccaaatattaaagattctctttaaaaaagactgaacatgtttacaggtttgaattaggctaaaaggtcttgcagtggcttttcatggcccttcaaattggaatggaactactgtactttgccatttttctataaatcagtatttttttttaattttgatatacattgtgtgaaaaaagaaaatggctaataaactgtattaaatcttaaacaatgtataaagattgtacttagccagttcaaagtgtatatttattcataatgaattataacagttatatttttgtgttttcttgtaaatgtttcttttcccttaaatacagataattcatttgtattgcttattttattatgagctacaacaaaaggacttcaggaacaagtaatgtattagtatggttcaagattgttgataggaactgtctcaaaaggatggtggttattttaaatataaatagctaatgggggtggtaggcctataaaattaaatgccttgtataaaatccaaaatgaatgcaaaattgttttcacttgtattgactttatgttgtatgattccaatctctgttctgtttggcacttgtatttaattcttcacctttgtaagacatttgtatattgtggatgtgttcattcaagctatttaatatctggcactgttaatacacagtactttattgtacagactgttttactgttttaattgtagttctgtgtactttttttggatggggctggcatgttttctttgtttcctggcaatacgacgtgggaatttcaatgcgttttgttgtagatgctaacgtgtcagaatcctttacattcaacttttctaagaaaagcattttcagtcttgtagtgtgtgcttacagtaactaattttgttgaaaatggtttcaagttattcaaatttgtacaggactgtaaagatttgttgacagcaaaatgttgaagaaaaaagcttatagaataaaagctataaagtatatattaggatctgcaaacaatgaagaattatgtaatatattgtacaaatgtaagcaaaggctctgaaataaaatgccatagtttgtgaatccttaaaaaaaaaaaaaaaaaaaaaaaaaaaaaaaa

SEQ ID NO: 30225 - DNA, 7414 bp, Homo Sapiens
agtgccgggccagacatggcggaagaggaggtggccaagttggagaagcacttgatgcttctgcggcaggagtatgtcaagctgcagaagaagctggcggagacagagaagcgctgcgctctcttggctgcgcaggcaaacaaggagagcagcagcgagtccttcatcagccgtctgctggccatcgtggcagacctctacgagcaggagcagtacagcgatctgaagataaaggttggggacaggcacatcagtgctcacaagtttgtcctggcagcccgcagtgacagctggagtctggctaacttgtcttccactaaagagttggacctgtcagatgctaatcctgaggtgacgatgacaatgcttcgctggatctatacagatgagctggagttcagagaggatgatgtgttcctgactgaactgatgaaactagcaaatcggtttcagctacagctcctcagggagagatgtgagaagggtgttatgtctctagtgaatgtcaggaactgtattcgcttctaccagacggcagaggagctgaatgccagcacactgatgaactactgtgcagaaattattgcaagtcattgggacgacctgaggaaggaggatttcagcagcatgagcgctcagttgttatacaaaatgatcaaatccaagacagagtacccgctacataaagccatcaaagtggagagagaagacgtggtcttcctgtatctgattgaaatggattcccagctccctgggaagctgaatgaagcggatcataacggagatctggcattagatctagccctctcacgacgactggagagtattgccaccacgctggttagtcacaaagctgatgtggacatggtggacaagagtggctggagcttgttacacaaaggaatccaaagaggagatctctttgctgccactttcctcattaagaatggggcctttgtcaacgctgctacactgggtgcccaggagacaccactgcaccttgtggccttgtacagttcaaagaaacactcagcagatgtgatgtctgagatggcgcagattgcagaggcccttctgcaggctggtgccaaccccaacatgcaggacagcaaggggaggactcctttacatgtgtccatcatggccgggaatgaatatgtgttcagtcagctgctgcagtgcaaacaactagatttagaactcaaagaccacgagggcagcacggctctgtggctggcagtgcagcatatcacagtgtcttctgaccagtctgtgaaccccttcgaagatgtccccgtggtaaatgggacttcatttgatgagaacagctttgcagccagactcatccagcgcggcagccacacagacgcacctgacacggcgacaggaaactgtttactacagcgggcagctggagcaggaaacgaggcagcagctcttttcctggcaaccaacggtgcccatgtcaaccacagaaacaagtggggagaaaccccgttgcacacagcgtgtcggcatggcctggccaacctcacagcagagctcctgcagcaaggcgccaacccaaacctgcagacggaggaagctctgcctctgccaaaggaggccgcatccctgaccagcttggcggacagcgtccatctgcagacgccactgcacatggcgatcgcctataaccatccggatgtggtgtctgtcatcctggagcagaaagccaatgctcttcatgccaccaacaacttgcagatcattccggacttcagcctcaaagattcccgagaccagactgtgctgggcctggcattatggactggcatgcacacgatcgcagcccagctgctgggctctggagccgccatcaatgacaccatgtcggatgggcagacgctactgcacatggccatacagcggcaggacagcaagagcgcactcttcctgctggagcaccaggcagatataaatgtcaggactcaggacggggagacagccctccagctggccatcagaaaccagcttccactcgtagttgatgccatatgcacccgaggagctgacatgtctgtgccagatgagaaggggaaccccccgctgtggcttgcattggcaaacaatctggaggacatcgcatccactctggtcagacatggctgtgatgccacatgctggggtccgggacctggtgggtgccttcagacgctcctgcacagagccattgatgaaaacaacgagcccaccgcctgctttcttattcgcagtggctgtgacgtgaacagtcccagacaaccaggcgccaatggagaaggagaggaagaggctagagatgggcagacccctttgcatttggcagcctcttgggggctggaagagacagtacagtgtcttctggagtttggtgccaacgtgaacgcacaggatgcagaaggaagaacccccatccacgtggccatcagcagccaacacggtgtcatcattcagctgttggtttctcaccccgatatccatttgaatgtacgagacagacaagggctgaccccgtttgcctgtgccatgactttcaagaacaacaagtcagccgaggccattctcaaacgagagtccggggctgctgagcaggtggataacaagggccggaatttccttcatgtggcagttcagaactctgatattgaaagtgtgctgttcctgatcagtgtccacgctaatgtgaattcaagagtccaggatgcctccaagttgacccccctgcacctcgctgtccaagcaggctcagaaattattgtccgcaatttgcttcttgcgggagccaaagtgaacgaattaaccaagcatcgccagactgccctccatcttgctgcccagcaggacctgcccaccatctgctcagtcctcctagagaatggcgtggactttgctgccgtggatgagaatggaaacaatgctcttcatcttgctgtcatgcacggccggctcaacaacatccgggttctcctgacagagtgcacagtggacgccgaagcctttaatctcagaggccagtcaccactgcacattttgggacaatatggcaaggagaatgcagcggccatctttgatctcttcctagaatgcatgccggggtatcctctggacaagccggatgcagacggcagcacggtgctgctcctggcatacatgaaagggaacgccaacttgtgccgcgccatcgtccggtcgggggctcgcctcggggtgaataacaaccagggagtcaacatcttcaactaccaggtcgccaccaagcagctcctgttccgactgctggatatgctgtccaaggagcctccgtggtgtgacggctcctactgctatgagtgcactgccaggttcggagtcaccactcgcaaacaccactgtcgtcactgcggacgtcttctttgccataaatgctcgaccaaggagattcctattataaagtttgatctgaacaagcctgtgcgggtttgcaacatttgttttgatgtactgactctgggtggggtttcttagtgagccccccggagggtccaggccacgtccttggtcacctccccagcagctgctctgctcaccagcctgaccccacccagagcaggagctggcgggtgtcttcctgcggcaatagactggaacgattaaggaccatggtgtgatagatcccatttcaaatgattccatatgattgtcagtgtgtgtgtcagactgtgatcgatttcactagatgtctcactcatcagaccaggccattgggcctaagtggtaaatgtgattaggaattagacctctccccattctgctagcaacatacagggacacttggaaaaccatttccccttccagtagcttggtgtccatcccagagcattcatgaagtcttcccgcctgggctgactgatgaggcagagcctctcagcgtaggaagctggctgcttaatgagctggctttactctagggtaagtggctgtggacttttctgcacagtgttttcataaagataataggatcctcttgccctgaagtctttttttctttttacgctaagctgtatttttagtgagctaccccttttaaaaaggtgaaatctttcttaacagggttcaaagatgagagctgaaaaatcgtggccttaacaactgaaagctttacagtgttcatgctactgaggtgtcaggagtgcagctgggccgcttgacacctcgtagcagccgtctcattctctcgtcttgctgcgtcctgtctgtggagtcctcagtcactctgctgttggagagtgctggaggaaatgcacttttactgtgctgcactttttatagagctgcattgtcggtgattccaatttaaaaatccatattcaaaaataccctcacacatccctgcatcagtgattctaatgatcagctttgactggacctcagctcacacgaatctccaaggaaaaactctacagagcatcttttagagcaagagattcatacaggccaagtgatgagagggggagtcaccaaggcttcagccccaagggcatctccagcctcaggccggcaggtcctatgtccttgacacaaatgcttcttgctgaaatcctccctagtgatgctgcgagtgctgttggtcccagttctgtgtagcttgccctgccccatgaagggccaccagccaagggccctggccacgtgtgcgccaccttactttggaagtctctggcttgtgtgctggatgaggctgccagaacttgttgggcgttcatcgctgttagtacatatattaaccgtgaggtgttaaacttttcttttgaaggtttggccagtttctaaaaaatgcacatttaaagagaagcatctaccacggctttaaaacaaaacaactctgagatgaacaatatgtgttatactcagagattaacaatctcaatcatacatactgattctttcagacatttaataaccactacatttttttgcattaatgaagtttgactatatgtgtaaagggactaaatatttttgcaacagcctgttctttgttcattcttttctggatagtgtgtcctctgtattgcggtagatttatacattctgttgcctaaatatgtgtgtaaaatgagctgataaactggagtactacttaaaaaaaagtctgtgatttataagatgtatatgctttctatgtgaatataagcttgtgcacaatgtttaaaagaaaaacaatgaattagaagagatcccccgtcccccagtctgacatatttcatacagaatgtttaaaagaaaaactctgctagtcttggcaaacatttggccatgtgaggcatgtggtcagtttccattttctattacctggaaagggccataaggaagcaggcagggcttaggtagcttggttacctaagttagaaagtaagagaatcatggttcggatatgaattgaagtggttggtacatggatacctgttctttaaaaggaatgtgggagatgagtcaagggtgaggccgattgttctgcccatgccctaccataccaatttcaataacaatcttgcctgtcattgcactcagaatcttaagatcatgtttcaaatatgttgattcaaacttgcttctaagcctgagtccagggatagcaatggtactgaccagctatggactgggagaacattgagtcctgttttccattggcttcagggcgcatccatgtggatataggaaaagcctctttccacagacttaggaagccccccgaccacgcggacgctcgctgggctgcactcagcaggctgcttgagtgggagctgactccaacatgccctgccctggctgggactaggcatgcttccagcccttcccgtgctctccctgctgtcaacacttgcgtacaaacctgcctagctgttgtaagttttcatcagtagcttaagtactagtagcaaaaacttaaattcattcagaaagttgccacttctgaatgagtagagcaggaaaagtaaactttactgaaacataatttgctgcaacagtcaacattgttatgctgaatgtgctctcaactgccctttgctcatcgccagatttattatccagtgtattcctaacagtcttttgttgtcgttgtttttaaaacaaaggtacggaccatgtgctatatataaatcgaatggcttaaactaatttgctatgatcctctaacaccgaaatttcccataaacttaagtgcctacacttaggacttttgaactttcagtcatctttttcgtggtgtctcactgaacgatgtgttagaacatgtgttccatttggagttttgggcctgtgcacggtcaaccccaattaccaatttagttgaggctggattcgattgctcagttcacctgccacgttctctccaaggagtggggtctacgtgacctttagtcctctacctcagagccccgagtcatttctgaccaccccgttctgtgtcctcactcttgtccctgaatgggtccctgtgtggatctcagtgtgtgtgtggtttctccactcctccccgctcatgtcccacacctgccatattgaaccgtttctgcactaatcttctccacgggcacggagtggagggaacgtcttgggaaaggggagagcttgacctccatctaggtttcttttatctggagaaaaagaacacttttgaactatgtaatgcttcaccctgaaaggcaagctaacgctaacttcccaggtgacagtagcaggaacaaggaagggtaatgtttccatgacagacacttgcttcccttgggacaagtcccagaagaactacctgaagcaccaaagctccccaccccagcctggtggcagaggaagcaggtggcaccaactcaccaaagggacttgggagccaccttctcactctgtggaagtactttagtgagagctgactggcaagataaaaaccctgaaattcccagaagttacagatgccttaaagactttctttggaagatcattgcctgtactattccttttttgtgtggcataaataatatattaacctgttacaactgacaacattggttttctgcagctagggagtcttgagtcgagactgctcgccttgatgacttgctcttttttggcagatgtgtggagttggctgttacgacatccctgtgtgatcccagaggaggggcagtagctgggcagaaactgcaggcacacatttgggtggatcacctggcttccagccccttcggggtggtgctcagtgtggggtgatggtatcatagaggaccacggcgcttatcagcattgtttctttggagtctgtgtaatggaatgtatttttcaaatactgatatttgcattttctgtaacaattccttataataaaatgaagtaaaattgtgaaaaaaaaaaaaaaaaa

SEQ ID NO: 30226 - DNA, 1152 bp, Homo Sapiens
tgagcagtgggctgcttaggaagagaaggtcagagttcgcgggggcagaggcattcttgccgctggcccagtcactatgtagtggaggggcagacaccctcccgcaaattctggaaggttcttagtctcgactagggcagtagccccaggactcctagtcgccggcttcaggtcactgccggctgaacggagctgccgtcgccatgtttggctgcttggtggcggggaggctggtgcaaacagctgcacagcaagtggcagaggataaatttgtttttgacttacctgattatgaaagtatcaaccatgttgtggtttttatgctgggaacaatcccatttcctgagggaatgggaggatctgtctacttttcttatcctgattcaaatggaatgccagtatggcaactcctaggatttgtcacgaatgggaagccaagtgccatcttcaaaatttcaggtcttaaatctggagaaggaagccaacatccttttggagccatgaatattgtccgaactccatctgttgctcagattggaatttcagtggaattattagacagtatggctcagcagactcctgtaggtaatgctgctgtatcctcagttgactcattcactcagttcacacaaaagatgttggacaatttctacaattttgcttcatcatttgctgtctctcaggcccagatgacaccaagcccatctgaaatgttcattccggcaaatgtggttctgaaatggtatgaaaactttcaaagacgactagcacagaaccctctcttttggaaaacataatttgaataaaataatttttaatggattctgaaatttgtcatgttttgaagataactgactccatctaaaagtatgaggtcaaaggatcacgaaacctaagtttaaaaactgcttagagactgaagcttaattaaaaatctttattaaaaattaaaaacattgaaaaatgaaaatatgttcatcattaaagacttttttccccttaagcttaaaataccattcaaaggcaagacattttgttttggctatgattcattttttttacttaaaaataaaacctataccaaacagtagtgtgccaagtaaaaaaaaaaaaaaaaaaaaaaaaaaaaaaaaaaaaaaaaaaaaaaaaaaa

SEQ ID NO: 30227 - DNA, 4084 bp, Homo Sapiens
gaggtgcgaccgggtcccggcctgagtcgcggccacccgcaggtctgagctgtgggctgaggcagcgcagccgctgccgcagggtgcgcgatgccttgaacctgggaaactatgtgaagcaacactctggattttgaaagacatcttttcatcatgggacagcaaatttcggatcagacacagttggttattaacaagttaccagaaaaagtagcaaaacatgttacgttggttcgagagagtggctccttaacttatgaagaatttcttgggagagtagctgagcttaatgatgtaacggctaaagtggcttctggccaggaaaaacatcttctctttgaggtacaacctgggtctgattcctctgctttttggaaagtggttgtacgggtggtctgtaccaagattaacaaaagcagtggcattgtggaggcatcacggatcatgaatttataccagtttattcaactttataaagatatcacaagtcaagcagcaggagtattggcacagagctccacctctgaagaacctgatgaaaactcatcctctgtaacatcttgtcaggctagtctttggatgggaagggtgaagcagctgaccgatgaggaggagtgttgtatctgtatggatgggcgggctgacctcatcctgccttgtgctcacagcttttgtcagaagtgtattgataaatggagtgatcgacacaggaattgccctatttgtcgcctacagatgactggagcaaatgaatcttgggtggtatcagatgcacccactgaagatgatatggctaactatattcttaacatggctgatgaggcaggccagccccacaggccatgaccttgaagtgaaagtcttctgttgctattgtgggctcaaatatttggtcatgggggaagaatgtagggttgtggcactggcacagacacaggaaaatccattttccccactcttttatttttgctattctgatcatttgtcccccttttaaaaataaacttcccatgtcttccatttgtggtactaaaatttgctactgttttagaccatattttcctattatttatctgttcaaatttgtattattacaactaatagctcttgaattctttgctaaaggtaacagcaacacttccagaggcttctaaaacactactgttttgcagggcaggagtattctggaatctttttacttagatataaaataaacctcgaatattaaaaagttgtagccatctgagagaggaaagtttaagtgactgaaaatgtagaatacttcaacgtgcatgttactacttaaaactagtctttctgctggaatctaaggagtatatatatatatgcccccttgtggttaattattgctcctttaataatttttacttgaaatgatccacaattatttcataactttagcagtgtgttttggaactactgtacttaaaggtttgtttgtttgtttttgccatactgtataatttgggtgaggtctacaaaattgggtgtgactttcctttgcaaatggatttctcctggggaattttcttggctgttctggaaatgctttcccacagctgggtaactgttctaaatggctttgataatgctcacacatcttggagtttcagaaggaaattattctgcatcacaaatactaaattttatatttctaaattactataggtcatttaatattggtttatggtgcttttatttccttaacttgaaaacatctttctgagatttcagagtcctcaaatttcttagattaagagacaagaggccagtgcagtggttcacacctgtaatcccagcactttgggaggccgaggtgggtggatcatttgaggttaggagtttgagaccagcctggccaacatggcgaaatcctctctctactaaaatacaaaaattagctgggcatggtggcaggtgcctgtaatctcagctactcgggaggctgaggcagaattgcttgaacccaggaggtggaggttgcagtgagccgagatcacaccactgcactccagcctgggagacagaacgagactcctaatcaaaaaaaaaacacaagaaaatagagtgaggcttttttaccgtatatacataaaatacttatgaaaattagaagataatttggcattcctactgtttcactgtacttccattgaaatactctttccattaaaatattctgaaacaatatagtaataatggaattgtgatcttcagttgcacctcaaccattttttttgcttatgaactaaaatttctaacattaacatttcggcatgtaataaaacaagggcctatctcctttaaaatttaacattccatgtaacttttctgacttatcattcataagttgcaaatattactattttcctaaaccagggtacacaatttaagttgccacttattgatgacagaatttctggatagtaggattttaataggcgagcaaataaaattcaaatcaatttcaaggaaaaacatctggccaggggtagcttgatttcgcccccaaaaatactgaagactaatccattgacattcataatgggacagctaagtaccaaatagctaactactccctatggaggtttatgcaagcagagtaccaggggttccatcatatcaacctggcaatgcacttggtggttgtgtgaccttgagaaagtctcttactcttgtttatgtgttcttactttagaaactgagactttatttgtggttttcacactatttcagcagcaaaaactttttcaaggaaaatcttacagaacctttaaacacgtgtgcatacacacataccctataccccactatataaaagtcatattattataaatttccttattatataaactttatatactataaatgtgattaagtcaatgaataaaaacattaatgcattggtgatatccagcatgtttgaatttggtgagtaacacacatatagtgggagtcgttttttttaaaaaaattttttaattaaattcaagtcaaatttgcagaaccctgtatctcctccatagattcttagtattccatggaacatattttgaaaaccttgggatagatgatccactgaaatcttttccagctctaagattttaaattgtccttttagattagacttgctgagtttaattcagattacctaattttaaaatgtttctgaaaagtgaacagagttaccttacagagttttggatctttccagggatagccaatgattttatcccccagaatccttcacctttcaaggagttatttaacaatgagcccagtgactcaatagggcccaaacctttttattttacaatatgagctccaagacacttactgatctactgtgaatataaaatgttattagccttatcaaataaataaatgagcacagctctttgttcgctctattgaactgggtgataattatttagatgtgaatgttaggtcagttctactgtaataactaatcgtaaaagttgtaaatttgtttaatggatgaaatgtacactttttgtattctgtacagctttgtcttttttaaatatgaagtacttaaatgtacttactatgataggaaatataatgtgtgccttctaggatttgtgaagtggtttcatgaactctaaggaatttgttttccctatcctaactcagtaacagagggtttactccgattatgtatagaaccttagtttgagaaaatgaattttactatgtactgaatttagaggttgagaataataggatctgtgttattcttagtacccactgataaattgtgcaataaataatctttcgcaagtgattttagctaattgaagagattattttcctatgtaatttcacattctaatatactaaatgtttatattccttagagaactattttatattgtgcgctgggggcttgtgatgtttgtgtgctgttttaaaattcatttcaaattggactcgatttccttatatctaatatatatctgggagaaaaggctgcttgaaaatatcttttgattcagtgatttttaacattgggaagttgagtttattaaaaggtagtctg

SEQ ID NO: 30228 - DNA, 1449 bp, Homo Sapiens
ccggagcctgcggcgggcggctgtgacggccccggcgctgacggcggcggccgggggggcggtgtcgacgcccgcggcgccggctggggcatcaccgcgggcctcgaccccgaaatggcgctgctggccgaacacttgctgaagccgctgcccgcggacaagcagatcgagaccgggcccttcctcgaggcggtgtcccacctgccgcccttcttcgattgccttgggtccccagtgtttactcccatcaaggcagacataagcggcaacatcacgaaaatcaaagctgtgtacgacaccaacccagccaagttccggaccctgcagaacatcctggaggtggagaaagaaatgtatggagcagagtggcccaaagtaggggccacactggcgctgatgtggctgaaaagaggcctccgcttcatccaggtcttcctccagagcatctgcgacggggagcgggacgagaaccaccccaacctcatccgtgtcaacgccaccaaggcctacgagatggccctcaagaagtaccatggctggatcgtgcagaagatcttccaggcagcactgtacgcagcaccctataagtctgacttcctgaaagcgctctccaaggggcagaatgttacggaggaggagtgcctggagaagatccgcctcttcctagtcaactacacggcgaccatcgatgtcatctacgagatgtacacccagatgaacgctgagcttaactacaaggtgtaggcatgcccactgctggacacgtccccgactcgtggccacatggagaaacaggcaaaccagaatcactgtgaatcaagtcggtgaactgcccctggcctgtgtcccccagagcagcccagggtcctgccagagtctgcaggggacagccctcgttttttaagtcttttttttttttttttttggtctattctaaaggaccagtaaataatgatcttacttccaaatctccttggaatttcacgacagcacagactgactttataccttcatttcagcgtggtaaaaaccgattaacacttctaatgagtcaagtcctagggttttttggttttgttttgttgccaacgaggaacacagctctgggggaatggtgtcatccacctcgctttaaaaataagcacatgatggctgggcaccgtggctcacgcctgtaatcccagcactttgggaggctgaggcgggtggatcacctgaggtcgggagtttgagaccagcctggccaacatggtgaaaccccatcgctactaaaaatataaaaaattagctgggcatggtggcgcacgcctgtagttccagctactcaggaggctgaggcaggagaatcgcttgaacccgggaggtggaggttgcagtgagctgagatcgcaccattgcactccagcctgggcaacaagagcgaaactctgtctcaaaaaaaaaaaaaaa

SEQ ID NO: 30229 - DNA, 5327 bp, Homo Sapiens
actttcggtcctgggggagctaggccggcggcagtggtggtggcggcggcgcaagggtgagggcggccccagaaccccaggtaggtagagcaagaagatggtgtttctgcccctcaaatggtcccttgcaatcatgtcatttctactttcctcactgttggctctcttaactgtgtccactccttcatggtgtcagagcactgaagcatctccaaaacgtagtgatgggacaccatttccttggaataaaatacgacttcctgagtacgtcatcccagttcattatgatctcttgatccatgcaaaccttaccacgctgaccttctggggaaccacgaaagtagaaatcacagccagtcagcccaccagcaccatcatcctgcatagtcaccacctgcagatatctagggccaccctcaggaagggagctggagagaggctatcggaagaacccctgcaggtcctggaacacccccctcaggagcaaattgcactgctggctcccgagcccctccttgtcgggctcccgtacacagttgtcattcactatgctggcaatctttcggagactttccacggattttacaaaagcacctacagaaccaaggaaggggaactgaggatactagcatcaacacaatttgaacccactgcagctagaatggcctttccctgctttgatgaacctgccttcaaagcaagtttctcaatcaaaattagaagagagccaaggcacctagccatctccaatatgccattggtgaaatctgtgactgttgctgaaggactcatagaagaccattttgatgtcactgtgaagatgagcacctatctggtggccttcatcatttcagattttgagtctgtcagcaagataaccaagagtggagtcaaggtttctgtttatgctgtgccagacaagataaatcaagcagattatgcactggatgctgcggtgactcttctagaattttatgaggattatttcagcataccgtatcccctacccaaacaagatcttgctgctattcccgactttcagtctggtgctatggaaaactggggactgacaacatatagagaatctgctctgttgtttgatgcagaaaagtcttctgcatcaagtaagcttggcatcacagtgactgtggcccatgaactggcccaccagtggtttgggaacctggtcactatggaatggtggaatgatctttggctaaatgaaggatttgccaaatttatggagtttgtgtctgtcagtgtgacccatcctgaactgaaagttggagattatttctttggcaaatgttttgacgcaatggaggtagatgctttaaattcctcacaccctgtgtctacacctgtggaaaatcctgctcagatccgggagatgtttgatgatgtttcttatgataagggagcttgtattctgaatatgctaagggagtatcttagcgctgacgcatttaaaagtggtattgtacagtatctccagaagcatagctataaaaatacaaaaaacgaggacctgtgggatagtatggcaagtatttgccctacagatggtgtaaaagggatggatggcttttgctctagaagtcaacattcatcttcatcctcacattggcatcaggaaggggtggatgtgaaaaccatgatgaacacttggacactgcagaggggttttcccctaataaccatcacagtgagggggaggaatgtacacatgaagcaagagcactacatgaagggctctgacggcgccccggacactgggtacctgtggcatgttccattgacattcatcaccagcaaatccaacatggtccatcgatttttgctaaaaacaaaaacagatgtgctcatcctcccagaagaggtggaatggatcaaatttaatgtgggcatgaatggctattacattgtgcattacgaggatgatggatgggactctttgactggccttttaaaaggaacacacacagcagtcagcagtaatgatcgggcaagtctcattaacaatgcatttcagctcgtcagcattgggaagctgtccattgaaaaggccttggatttatccctgtacttgaaacatgaaactgaaattatgcccgtgtttcaaggtttgaatgagctgattcctatgtataagttaatggagaaaagagatatgaatgaagtggaaactcaattcaaggccttcctcatcaggctgctaagggacctcattgataagcagacatggacagacgagggctcagtctcagagcaaatgctgcggagtgaactactactcctcgcctgtgtgcacaactatcagccgtgcgtacagagggcagaaggctatttcagaaagtggaaggaatccaatggaaacttgagcctgcctgtcgacgtgaccttggcagtgtttgctgtgggggcccagagcacagaaggctgggattttctttatagtaaatatcagttttctttgtccagtactgagaaaagccaaattgaatttgccctctgcagaacccaaaataaggaaaagcttcaatggctactagatgaaagctttaagggagataaaataaaaactcaggagtttccacaaattcttacactcattggcaggaacccagtaggatacccactggcctggcaatttctgaggaaaaactggaacaaacttgtacaaaagtttgaacttggctcatcttccatagcccacatggtaatgggtacaacaaatcaattctccacaagaacacggcttgaagaggtaaaaggattcttcagctctttgaaagaaaatggttctcagctccgttgtgtccaacagacaattgaaaccattgaagaaaacatcggttggatggataagaattttgataaaatcagagtgtggctgcaaagtgaaaagcttgaacatgatcctgaagctgacgcaacaggatgaaaatccatcagaatctcagactacagcactaaatatgctttgatgctacatcaaacggaatggaagcatagctgacttcgctaaagttacttcatctccatctagcaaatgaggcactgttctcaaccaaaggagatggggatctggtttagggcaatccctttataatttgatgtgctgtggtctccttggtaatgtataatttggtattgcacaggtgattagtcaaggaagtctggaaaagctttggtcccacagccttgcctcacagcatgtaaataattaaaacaatattgatgctgaggttcttctactgctagtatgaaagtgacaaatttttactggtgtgaattgggaagaaaacaatgctattccatgacgtttgtaaaatgtttgtaaaagctcaaacatgacgattccataaaataaacttgaggttaaataatgggtagtaaattatagaatgtataagaaaaaatataaaggagaaaatcaattatcaggaaagctaaagaacttttcaaatctagtaatttgaatatagacacaatgcactttattgcactttcaattcttataaagcaacaataatattaaggtccttgactatgtgtacaatgttttcacatatatagtttcatttaatcatttcaaagttaatctctgccatctcgctaaatcatcagtctcggctcttctgaaatagaaggtgcctgatcttcctaataattctgcctattttcatttgctttaaacaggcgccctattttctttctagttgtggctgcgcaaaaacatttatctcccaaataagatgtgctgcttaccgaggtatcacggggtggggctccagcttgggtcgttgaagctggggtttgggaaaccacttcagagatggcagcagcaagtttagcatcttcaaatttcttttattgaaaaaaattttattagtaacatgttgtatataaaattatgagcacaatgccatcacttaactataactcttaaagatagcttaatgactgtttattctcttgaccaaatagactcataataacatataattttaaaagaaatttaaattctttcttctctattgtattattttatacaatttgctatttctatttccttctcatattgattattctaaatactatgcaataatataacttagagttccacggtttgtttacacatttcctgttgtacatttaggttattcaaagttttcagctcttttaaaattgctctgaataagttctagtgagtgagttatggtgctggctatattttgctaaactgccctctcaaatgttgctaggaattcatactgcgaaaagcaatgaataagcatgcctgttttcccatggccttgcttgccagaatttgacttttattatgataatcagtgtaaaatgatatactactattgcttgtatattgtggtatacggtgtcaggtttcagggttttttttcaacgttaaatattctagaaactttctgaaataatttctgtttaaaaatattgaatatttgcttcatttcaaatactcccttttgacaaaaaaacttaggtataactgttgatgaaaaaccagaaaaaagtccagaactctttggtgactccaactatggatagcttattttgaaaaaggagaattgcaaattttaccaaaagatggagaaaagcacattaaaaagataccaacattcagaaattcatttcagcatgttattattggaaattatttaaactaatttagataactataagatacttattgtccatttataccctgtaaagccgttttagaatgtaatattttaggtaatccaaaatgtactaaattaaattcatttttagttatgagaaatctttgcttatatgacaaatgaaaagaataacaagttgtcaaatgaaaagaatgacattgaaacatttgtattgtctcttcttaaactatcttattgacttattatttaagccttttaatactaagtatgaaacaacctatggtctggaaatttgtatcgcaaagctatatgtgcatatgttatttaattcatctaacgctacacaaaagcataaaataatgatttttcactctctttaaaaatactaaatcatttatgtccatttctcaattttttcattgatctatgctttgagtttgctttctcaacattattgtattttccacttattattactgtataacatatgctagtgtttagttggattaatcttacctaaaagtactgaaaaatgctttttagtactttttcatattttatacatttattttccgaatgtatcattgaataattttattgagttataaaagtatcttattgctatttaataaaaaattaacacat

SEQ ID NO: 30230 - DNA, 2955 bp, Homo Sapiens
gcgacggaggtaggcttacgaggcctgtgtcgggtagaaagggtccttcctggaccgggaccctctgccacgaccatggaccgtaggaaaaagcctttggacgtcacggcctcctcgttggtagatcttaaggctgaactcttccgaaagcaagaagaattcaaacaagaaaaacttctaaaagattctggagtttttggaaaaccaaaaacaactaacaagaaaccaagtatctggagcaaacagaatgtaggcgtttcaaatcgagctgagaaggatgctgaacagaagattgaagaacagaagactttagacaaagcaagggaaaaattggaagaaaaagccaaattatatgaaaaaatgactaaaggagactttatagatgaagaagtagaggatatgtaccttgtggatttcacacagaagatcatagacaagcgcaaagaaatggaggcatctggtgcccatagagattctcaaaaggcaggagaaagggacgacgatgaggaaaaccttcctgagggagagatccctcctccccaagaccccagtgaagaatgggtggattacgtggactctttggggcgttcccggcgctgtatgagaaaggatttgccagatctgctggagatggataaaaatcttcaggggagactttttattagtcctgctaatgaaaaaaccctattatctgaagatatgagaaaagaacttcagcgccagcaatgggaggaagaagaaagagaggccctgaagaggcccatggggcccgtacattatgaagacattcgggaaaatgaggcccggcaacttggtgttgggtattttgcctttgcccgagacaaagagttgagaaacaagcagatgaaaaccttagagatgctgcgtgaacagacaacagatcagagaacaaaacgagaaaacataaaggaaaagcgaaaggctatcttagaggcaagacttgccaaacttcgacaaaaaaagatgaaaaaatcaaaagaaggtggaacagaagaagaaaatagagatggagatgttattgggcctttgccaccggagccagaggctgtgccaaccccacgtcctgctgcccagagtagcaaagtagaagtcattgtccaggagaggaaggacaccaagcctggagtgccacacatccgggagtgggaccgcggaaaagaattttcctttggatactggtcgaagaggcagtcagatctccgggctgagagagatcctgagtttgccccgccgtcagattactttgtgggtcagaagagaactggtttttccagcagccaggcatggagcagacctgggccagcacagagtgacccagggcagtgccctgaccagagccacggacctagccctgaacatacgtcacccactcctgcccccgacaacccaccacaagcccccacagttactttcaaaactctggatgacatgatttcctattacaaacaagtgacatgatctttcaaagcacgctgacttgggtttgtactttgacagtgcctttctctcccagagggagaaataactttaggaactgaattgtacctttgtcctgtcctttccctaggaggcacagacttcgggttggatttgtcagcaaggaggaaagttatggaaactttggccacttggctgttcattttattctaagtgggatagggacatacctacctggatttacatgtgagctgcgatagaatagaagtatttattctgtaaaattagacactgagatgtgcttataaccctgtttcatatctactcccacgacttactcatatttaagggttcttttccattccttttgcaaatccgagcatgcaggtgtctttattccaagggttcagcttccagatcagccgatggaccataggtcacgaggaatttctccctgtcaagcagtggaaaactgcatgggaggcaaaatgctctgttctccaagaggacccggaagtaatcacataggaaatgataaggaagaccaggaggagctcttcgtagtccagaaaggtagaagtgggagttgtttacttaattttactgtcataccatgctattacctacactcctgtgtgcagtgggcattcagtaaatgtgtgttgaaggactgggacgtacgtggaggctgctggacctggtcagagactgatgtgccttagcggcaatggttagagcttttcagtgcatcccacctccctgtcgcccccatgctcggcttcctcacattcaggagcctgacttggatcagacttggggctgcacagtggagcaggtgggttcccgtgtcattagtaataaggagagggttgggggtgggcagggctccagaaagtcagcagtgtgcctgggcacccaccccatcctctacctgccacacctcagagggttcctacagctgcacacaagcagttgagagttgatgaccaggcccatagggctcccacagctggttcccaggccagtgagtgctgtgagaatacagtagcacaagtccttgttctctgaagagtgggaaggagaggagtgagtgaagtagcctgtcccctgcaggtcctctgcgatggcattgtctcggttcccgcagtgctgcagtgtggaagggagtgccccatcctcattacagatgacacactggagtgtggaggggtcgatgacttgtgcagggtcatatggtacctaaggggcagatctcagacttaaacacaattgatgtctaacccctagacagtctttttagtgccctctgctctcagtcttgttgccctagtatcaagcaatcttagacaaacatcctgaattcttacaaacttacctctaaactctgaggataaagttgccagtccttttaatggtcagcctaatcattctgtcagcctaatcgggtaattgctttttttaataaatacacataaaaaccaaaaaaaaaaaaaaaaa

SEQ ID NO: 30231 - DNA, 1692 bp, Homo Sapiens
gggggagctcgctgtggcccggatgttcggtgcagctgccagatccgctgatctagtgcttctcgaaaaaaaccttcaggcggcccatggctgtcgatattcaaccagcatgccttggactttattgtgggaagaccctattatttaaaaatggctcaactgaaatatatggagaatgtggggtatgcccaagaggacagagaacgaatgcacagaaatattgtcagccttgcacagaatctcctgaactttatgattggctctatcttggatttatggcaatgcttcctctggttttacattggttcttcattgaatggtactcggggaaaaagagttccagcgcacttttccaacacatcactgcattatttgaatgcagcatggcagctattatcaccttacttgtgagtgatccagttggtgttctttatattcgttcatgtcgagtattgatgctttctgactggtacacgatgctttacaacccaagtccagattacgttaccacagtacactgtactcatgaagccgtctacccactatataccattgtatttatctattacgcattctgcttggtattaatgatgctgctccgacctcttctggtgaagaagattgcatgtgggttagggaaatctgatcgatttaaaagtatttatgctgcactttacttcttcccaattttaaccgtgcttcaggcagttggtggaggccttttatattacgccttcccatacattatattagtgttatctttggttactctggctgtgtacatgtctgcttctgaaatagagaactgctatgatcttctggtcagaaagaaaagacttattgttctcttcagccactggttacttcatgcctatggaataatctccatttccagagtggataaacttgagcaagatttgccccttttggctttggtacctacaccagcccttttttacttgttcactgcaaaatttaccgaaccttcaaggatactctcagaaggagccaatggacactgagtgtagacatgtgaaatgccaaaaacctgagaagtgctcctaataaaaaagtaaatcaatcttaacagtgtatgagaactattctatcatatatgggaacaagattgtcagtatatcttaatgtttgggtttgtctttgttttgtttatggttagacttacagacttggaaaatgcaaaactctgtaatactctgttacacagggtaatattatctgctacactggaaggccgctaggaagccctcgcttctctcaacagttcagctgttctttagggcaaaatcatgtttctgtgtacctagcaatgtgttcccattttattaagaaaagctttaacacgtgtaatctgcagtccttaacagtggcgtaattgtacgtacctgttgtgtttcagtttgtttttcacctataatgaattgtaaaaacaaacatacttgtggggtctgatagcaaacatagaaatgatgtatattgttttttgttatctatttattttcatcaatacagtattttgatgtattgcaaaaatagataataatttatataacaggttttctgtttatagattggttcaagatttgtttggattattgttcctgtaaagaaaacaataataaaaagcttacctacataaaattacaaaaaaaaaaaaaaaaaaaaaaaaaaaaa

SEQ ID NO: 30232 - DNA, 2290 bp, Homo Sapiens
gttgggcgctgaggcgcgagaggaggggatgggcggggcgcgcggccgttagcgcgcggccgttagcggtcggtttctactaacggtaggcgtcgccgcgattcccgaaggtcatagtccgcgtgacccacccccgtttgcgcgctcgcagtcttcgccggcgcagtcaccgcgcagggcggccgcccggaggtagctaccacggcctgtgtcaacgactaaagctccagtacagcggcgccctcagacagctgggagggtggctctggccgggagcggcggccggtgagctaccgcgaggaggagcggcggaggcgacctcggcccggccctgcactggccgcccggcaggcgcgacatgagcctggtctggcatccgcgggatgctccttaagccccttctccggctgttaacctccggggaacggttgtgaccacaccgacacgtattttacagataaatcattcttgcggcggcgggtcgaacacgtttatttattttttattttctcaacaagcttttacccagcacctgtccagtgaaacaacttgataatcgtttcgaggggcgtccgccgggttaggaagccactgcctggcagcttgtggaagcctcatttgcaaagccacccctcagatgttttgaagatcgtgacgtcttgtaactagcagtgtgtgcacagaatcctactcaaggaacgtcttggcccagcgatgcaaagaactgaagtttcaagctggaagagcctgtattgtcctcacaatagtatagaagaattcaagagaggagagagagacagcaccgaatgaagactgtaaaagaaaagaaggaatgccagagattgagaaaatctgccaagactaggagggtaacccagaggaaaccgtcttcagggcctgtttgctggctatgccttcgagaacctggggatcccgaaaaattaggggaatttcttcagaaagacaatatcagcgtgcattatttctgtcttatcttatctagtaagctgcctcagaggggccagtccaacagaggcttccatggatttctgcctgaagacatcaaaaaggaggcagcccgggcttctaggaagatctgctttgtgtgcaagaaaaagggagctgctatcaactgccagaaggatcagtgcctcagaaacttccatctgccttgtggccaagaaaggggttgcctttcacaattttttggagagtacaaatcattttgtgacaaacatcgcccaacacagaacatccaacatgggcatgtgggggaggaaagctgcatcttatgttgtgaagacttatcccaacagagtgttgagaacatccagagcccgtgttgtagtcaagccatctaccaccgcaagtgcatacagaaatatgcccacacatcagcaaagcatttcttcaaatgtccacagtgtaacaatcgaaaagagtttcctcaagaaatgctgagaatgggaattcatattccagacagagatgctgcctgggaactcgagccaggggctttctcagacttatatcagcgctatcagcactgtgatgcccccatctgtctgtatgaacaaggcagagacagctttgaggatgaagggaggtggtgcctcattctgtgtgctacatgcggatcccacggaacccacagggactgctcctctcttagatctaacagtaagaaatgggagtgtgaggagtgttcacctgctgcagccacagactacatacctgaaaactcaggggacatcccttgctgcagcagcaccttccaccctgaggaacatttctgcagagacaacaccttggaagagaatccgggcctttcttggactgattggccagaaccttccttattagaaaagccagagtcctctcgtggcaggaggagctactcctggaggtccaagggtgtcagaatcactaacagctgcaaaaaatccaagtaacaccttctgagtagctgctgtcccacacaatagggtatgaagctgcgctcctccatcgggtttggggagggagcactctgggactgtgagacaaggaagcagggccagcagtgagactatgagccaagcaaagagaagtctcagtggagcatgaggagggagcagtccagatgccaacaaggaaatgcgtttatggctacaagagtgcctctgctttctcctcctctcctcccaccaaggattcttccaccttaatcttgttttcatatgcctcttcttacttcacccatgtttgttgttatgcaaataaaggttttctctccaaaaaaaaaaaaaaa

SEQ ID NO: 30233 - DNA, 3483 bp, Homo Sapiens
attgcgcgcgccggaagtacctacctgggataacggcggcgagcggacggctgcatttacggggtctcccggagggccagagtcgtggcttacagaagagacgaaatgtggtctgagggacgatatgaatatgaaagaattccgagagaacgagcacctcctcgaagtcatcccagtgatggctacaatagactagttaatattgtgccaaagaaaccaccactgctagacagacctggtgaaggaagctacaatagatattacagtcatgttgattaccgagactatgacgagggccgcagtttttctcatgatcgaagaagtggtccacctcacagaggagatgaatctggttatagatggacaagagacgatcattctgcaagcaggcaacctgaatacagggacatgagagatggctttagaagaaaaagtttctactcttcccattatgcgagagagcggtctccttataaaagggacaatacttttttcagagaatcacctgttggccgaaaggattctccacacagcagatctggttccagtgtcagtagcagaagctactctccagaaaggagcaaatcatactctttccatcagtctcaacatagaaagtccgtgcgtcctggtgcctcctacaaacggcagaatgaaggaaatcctgaaagagataaagagaggcctgtccagtctttgaaaacatcaagagatacttcaccctcaagtggttcagcagtttcttcatcaaaggtgttagacaaacccagtaggctaactgaaaaggaacttgctgaggctgcaagcaagtgggctgctgaaaagctagagaaatcagatgaaagtaacttgcctgaaatttctgagtatgaggcgggatccacagcaccattgtttactgaccagccagaggaacctgagtcaaacacaacacatgggatagaattatttgaagatagtcagctaaccactcgctctaaagcaatagcatcaaaaaccaaagagattgaacaggtttaccgacaagactgtgaaactttcgggatggtggtgaaaatgctgattgaaaaagatccttcattagaaaagtctatacagtttgcattgaggcagaatttacatgaaatagagtctgcaggacagacttggcagcaggtaccccctgtgaggaacactgaaatggatcacgacggaacccccgaaaacgaaggcgaagagactgcgcagtcagccccgcagcccccgcaggccccgcagcccctgcagccccggaagaaacgggttcgtcggacgacacagcttcgtcggacgacaggagccccagacattacctgggggatgctgaagaagacaactcaggaggctgagaggatcctgctccgaacacagacaccattcactccagaaaatttgttccttgctatgctctctgttgtacattgcaactcacgcaaggatgtaaagccagaaaacaagcagtaactgctatgcctgacaaaactgttgctgcacacatctgtactcgtcaatcaacaaaacctgatgcaaaaaacagaaaaggggtgatgtaggagatggtcaggttggtaggagaagctataaggaaagacgcaattggaaggtcgggaggttttccaaagcttcaggagagaataaagctgaaggcagctttattaattaattctcttaccctgaggctgagggcgaacagtaggtagcaagggagtgtaaaggaatttatctagataagtttgtttacttatgccctccggaaatcatgcaagactgctccctgcaaaggggggcgacaatgttcattactcacaaattgtgttggcttcaggcctttggtattctgtctctactgaataaatacaaatggttccagcctatcaggactgcactctcttctcggctgcactaaagctggcactcccccagccgttctcatgcaaaatacctgtgtcagaatactcctttcatccatcactcagccagagtcttcaggacagactccgcatgggacttgtccaaaaaaactctaatcaaaagaggaaaattttggaatatgccaggaatagtggaattttattttttaaatttttttataggcccatatgctctatctcaagaaacaagatgattgtaacatgtccatgattaaactattggcagattattgctgtgttaatctctgtagtctaatgagttctttgttctgttctgctgccttttacgttttcttgtcctttcaaaagtgttcttgaaagaaacaaagcgaataggcagttagcacagcacagctaccccttaccaagcagtctatggaaacaacccctcatccaaatcatgggttagttaagaatctaactggggcaattaagatgaattccactcacttcctggtcacttcagcagcccagcggcattgagccaaaatatacaattctgtgttattagtgaggaaactttaaaactcatgtttgttattacttactacccaatttcattatcctcccttcctctttccatttctattctctctcacttgaattctggcattatttttagtggcctctactgataatacctaccctagagtacataaaaattatattaaaagaggaagtagcagtatgcataattttaacagattctataatgggtgcctcaaaatatgtattgtgccattccgcaaatttaaaagctaattgaggacaatttttttttaatttcctaaatgagaccaccttggatttttatttttgccatttagatgtttatacttatttagcttttataaaacataagccaagctaaatcccacataacaactctggtattcttccctcatatgagcagtgattttatttgttacccaccttagatagactaagaaagttctagtcttgtttctccttctccccgcttccctggggtttttccttaccataagtattctggtccgagggttcagttcctttagtcaagatgtcacaagtttaaaaacaaaacttgagaaactaccaaaggctcaggagttgtccactttgttgaaatccattaaattagagaagtctcactaacagatgtatttaaatataggtacaacaaataatttctttttctccccttccccaaattacagtcagcatttaaagctgtttatggcttgccatcagcattattctggtaggcttgttagtgttaaaatctatttgatttttttttttttttttgcctcttaaagtctaattttaggatggatgaattcagatgtttaccagagtgtgtattttacataatgttcttgattaaaaagacttgtttgtaaattatccgttgtttttgcatatgcccagttgatgtgataaaattttcattgtcttgccatataaagccttggttatcaacaggtggaatgtagatattgtaaagctttttgtgaattaaaagtgcaaaataaagcaaccacatttaagt

SEQ ID NO: 30234 - DNA, 6228 bp, Homo Sapiens
cgggttcctgctgcactaccatgcgccgtgcggcccgtgcgactcgccggacctcgcgggcgtccctgtacggagccctcggccggtcctagcagggattgtccccatttccagctccggagcgggcggctgcgccccgctcgtcgaggagctgcgctcacctcaggggcgggcccccgcctgcgttcgcggcgccaagaagagtattcctttccacttacaactaaataagacctgcttttgctggagctgtgctaggctgagggaattccacactgaattttacaagcgggatggatttctctaaggcagaagactgatttttggaaatatgtatttgggagacagtcacgtcctattgaataccttgtgctggtgctgccatcgaaaaatctggttacactctggggaggactgctaccactgcagaactgaaccacttcggccgtgagatgagtgtccggcctgagcaggcacaccatgaatagatacacaacaatcaggcagctcggggatggaacctacggttccgtcctgctgggaagaagcattgagtctggggagctgatcgctattaaaaaaatgaaaagaaaattttattcctgggaggaatgcatgaaccttcgggaggttaagtctttaaagaagctcaaccatgccaatgtagtcaaattaaaagaagttatcagggaaaatgatcatctttattttatcttcgagtacatgaaggaaaatctttaccagctcattaaagagagaaataagttgtttcctgagtctgctataaggaatatcatgtatcagatattacaaggactcgcatttattcacaaacacggcttctttcatcgagacttaaagcctgagaacctcctctgcatgggaccagaacttgtgaaaattgcagactttggtttggcccgagaaatacgatcaaaacctccatatacagattatgtatctaccagatggtacagggctccagaagtactcctgaggtctaccaactacagctcccccattgacgtctgggcggtgggctgcatcatggcagaagtttacaccctcaggccactcttccctggagccagtgaaattgacacaatattcaaaatttgccaagtgctggggacaccaaaaaagactgactggcctgaaggctatcaactttcaagtgcaatgaacttccgttggccacagtgtgtacccaataacttaaagaccttgattcccaatgctagcagtgaagcagtccagctcctgagagacatgcttcagtgggatcccaagaaacgaccaacagctagtcaggcacttcgatatccttacttccaagttggacacccactaggcagcaccacacaaaaccttcaggattcagaaaaaccacagaaaggcatcctggaaaaggcaggcccacctccttatattaagccagtcccacctgcccagccaccagccaagccacacacacgaatttcttcacgacagcatcaagccagccagccccctctgcatctcacgtacccctacaaagcagaggtctccaggacagatcacccaagccatctccaggaggacaagccaagcccgttgcttttcccatccctccacaacaagcatccacagtcgaaaatcacagctggcctggagcacaaaaatggtgagataaagccaaagagtaggagaaggtggggtcttatttccaggtcaacaaaggattcagatgattgggctgacttggatgacttggatttcagtccatccctcagcaggattgacctgaaaaacaagaaaagacagagtgatgacactctctgcaggtttgagagtgttttggacctgaagccctctgagcctgtgggcacaggaaacagtgcccccacccagacgtcatatcagcggcgagacacgcccaccctgagatctgcagccaagcagcactatttgaagcactctcgatacttgcctgggatcagtataagaaatggcatactctcgaatccaggcaaggaatttattccacctaatccatggtctagttctggcttgtctggaaaatcttcagggacaatgtcagtaatcagcaaagtaaattcagttggttccagctctacaagttctagtggactgactggaaactatgtcccttcctttctgaaaaaagaaatcggttctgctatgcagagggtacacctagcacctattccagacccttcccctggttattcctccctgaaggccatgagacctcatcctgggcgaccattcttccacacccagcctagaagcactcctgggttgataccacggcctccagccgcccagccagtgcatggccggacagactgggcttccaagtacgcatctcggcgatgactgtctgccttggtgatgaatctcttcctagggagaagcaggatactttccctcagctgactggtgttctacctgcaagatgtgcagagggcataaaagcaaatcaacactttatagttattcttctgaactaagacatgtcaatattcttttttaaagtttttttttaaaatattgatttgaatgcagtaggcttttttgtataaaattattttattctaaaactgggtcccattattttcttaaacaacagcattttgtatatatggattatgttttagcattttatacagtcaactttgtaatgaactttttaaaaattaattgattttcctttggggttccagataatattttctacagattttgaaaaatgtaataatattaatgcagtattgcaacaggggtgcaatttaaggctatgtgatagagggttatttactcagtgtgtgcagatatttatgaagtggtgaaatttcaagtgtggctcactaggtacttcaggccttcttggactgttgttagaaaagtgatcctctgcttttcttagtaggtcattggtttgatttttggataccactctgctgttctaaaaggactattatattatataattcactttgttttacttttgttccccagatgaaagaactctaagtaaatacattttaaaaaatttttctgacaccctttaatgtggttgcagatctcagatgaaaccaagcttaattatactatgccattatattctaatttattccatttttgaaatcaagttgtatgtgtaccaataaaagagatttctgcttcaaaaggctctcaacatgaaggttaacacagtcaatcaaacttacattcctgccaagatgcatggccaaaaaactaagtatcaaagcagcagaaggtttttgattatagtaactgagatggaattttgtgcctagctcagttctccagatctggctaggagcagtcaatgactaatgttctgtcctagccaaattctcaggacaatttggggagcagaaagagttatggcagaggttccactcatctacaaagtcacagtcacatgccacatttgatctcctaaccctggtgtagtttctttcaagagtgagaactttatttgttgggcagaggctgttccattgagaggaatgtttacagcagtttcaaaaatgacaaagtcagtttggagacagaaaaagacaaaaggtccagtctcatccatctctatatggtacatttgcctcacttatggttgccttaaaggcaagagggaaggtcaccatcagtgaacgcaatgcaatctcaacagtgtattgattcatattctcctagggctcaaactactctctattggttccaggataatgacaaattgaaccatatgtaagtaatcttttattttttattttttttttgagacagagtctcactctgtcacccaggctggagtgcagtggcgcgatcttagctctctgcaacctctgcctcccaggttcaagcctcctgagtaactgggactacaggcgcccgccaccacgcccagctaattttttgtatttttagtagagacggggtttcactgtgttagccaggacggcctcgatctcctgacctcgtgatccaccctcctccacctcccaaagtactgggattacaggcatgagccactgcacccagccaagtgatcatttttataggttaaaatgataggtgaaatgaatatagacactttcatatggttcaacctaatgacttggtaaattattgccttggtgtattaataatatgttgcattctgaacaaataaccatggcttccaaagggccctaacctaaaatcggagagtaatttatgctttggagaatttgactcaaatatatacttgaccaagcaccatgatccctaggggcatgagaaaagcacataatggatgtggatgtgataggtggtcttttcctgttaacaagctggcagcaaagcttcagaaaatatatatgcaagcacaacttgaagctgaattcatttctgtattatattctcaactcgttatctaaagcatcagaacatgtgttttcagagatgagtcctttactataaggttaatatttattttcattttctgtattatatatgaaaagtaaattaatgtgaaacctggcccagcttgctggaaagcaggttttaaattgtaaatattccttagaggagcaaatggattgtttaataccatagtctcagtaatctagcttatataaggtcattacattttttaactgaaaaacctagttacctgattattgcacattataaaattgtttttctaatactttatagggcccaacttcagaaaatacttcgcttttttctttttatgctttcgtttgtttaccagcaagcaacttccctggggaagccaaacacatattcataaaaaaaatcaagtagctgatgtgcagttgagaaaactagaggactgaaaaaacaaattttaactagcaaatgctgtgaattactcttcctccccttctctgaaatgggtaaaggacaaattgtgtaaaaaaacctatgcactatagaagggaatagtaaccatttcttttgtctctctgtttctgttctgactgagaacctgcagccatttcttgttacatgaaaacaaaatgctacttgttacctctattttttgttactatacaattatgaaatgtaatgtaagacaccaacagaaatgatatacctgtaactgtacctatcaggactatacctcatttacagtcagaaagcttactgggatgtcaggaaatgatacagggttggttctcatttcgtgccgaaatgagacagaaattcagtgacgaaggtgcgttgtaggggtattgatgtgccccaggtagtgccagcagagtagggaaaactgcatttgcataaaaactactcttgacatgattgttcattttacaaaaaaattccattaattaccaagccctcacccagcccatgtgtgataggatttatgtaggaagaaacttgattttcaaataattttttaaatgtatctcttgcctaaaggactatatacatctaataaagtaacactgtgtcatcttctggagttatcaaaaattgtatacaatcaagacaacacaagaattattttatttttgagtgcaaatacaggtactgttggagttgatgggcaccatgctttctcatgaagtagcatttccctaccatcaagccattgttttgtgccattcaggagaggaaaaaaaggaatttatgctgtacatttcagttcagtgtatgaccaaaagcaatatgtttataagaagatgtttgacatactaattattttatatcatttaaaccatactgtagcaacataatatatggagctaatttgtagaattatttttacgatttccaaacaaatgtactgtactgttatataatttattgtgaggaccttctcatggaagccattaggaaaacaaactagaggtaaatatcacattaatctgtattatcaatttctcatagacactgtgctaatgtgaattttaaatgacctgcatcaagtcttctgatctcagataactcagtacagatagcaattagtcagctgatttgattacaatggagtaaccgacaatatatttatttataaagcacatattcataataacgagaagaattcagaaaaccacttaagcaagacccttctgaaataaaaaatgttgctttttaaatagtttgtcctaaggtgtttaaaacatgtcaaccttatgtaaggaaaaatttcctggtccaaataaagttgaagtttaagaaaaattg

SEQ ID NO: 30235 - DNA, 3381 bp, Homo Sapiens
gcggccgcagcgcgcatttgggctccgaggaagttgaccgaggcggctgccgcaggatcccgggcccggatcgcacgaagcccgcgcggccgtctcctccgcgcgccacccctgcgcctcccgcgagctccacttcccatctgctattgtttccgattgttttccggtggcgagcccggctccgaaacttacaaagtgttggatgtcccccgttcgaactgagggactgcagaccgcctctgggtagctggatgaagcccaccccgtccccttctggtaccaaagtgcttactcctctccaaagtgccgtgtctgaactgccgctgggaagaagcggctcctgagacgcgcccacacctttcacctgccgcgcgcttccccctcctcggccaccttcccggcggaagcagcgaggagggagccccctttggccgtcctccgtggaaccggttttccgaggctggcaaaagccgaggctggatttgggggaggaatattagactcggaggagtctgcgcgcttttctcctccccgcgcctcccggtcgccgcgggttcaccgctcagtccccgcgctcgctccgcaccccacccacttcctgtgctcgcccggggggcgtgtgccgtgcggctgccggagttcggggaagttgtggctgtcgagaatgggggtctgtgggtacctgttcctgccctggaagtgcctcgtggtcgtgtctctcaggctgctgttccttgtacccacaggagtgcccgtgcgcagcggagatgccaccttccccaaagctatggacaacgtgacggtccggcagggggagagcgccaccctcaggtgcactattgacaaccgggtcacccgggtggcctggctaaaccgcagcaccatcctctatgctgggaatgacaagtggtgcctggatcctcgcgtggtccttctgagcaacacccaaacgcagtacagcatcgagatccagaacgtggatgtgtatgacgagggcccttacacctgctcggtgcagacagacaaccacccaaagacctctagggtccacctcattgtgcaagtatctcccaaaattgtagagatttcttcagatatctccattaatgaagggaacaatattagcctcacctgcatagcaactggtagaccagagcctacggttacttggagacacatctctcccaaagcggttggctttgtgagtgaagacgaatacttggaaattcagggcatcaccagggagcagtcaggggactacgagtgcagtgcctccaatgacgtggccgcgcccgtggtacggagagtaaaggtcaccgtgaactatccaccatacatttcagaagccaagggtacaggtgtccccgtgggacaaaaggggacactgcagtgtgaagcctcagcagtcccctcagcagaattccagtggtacaaggatgacaaaagactgattgaaggaaagaaaggggtgaaagtggaaaacagacctttcctctcaaaactcatcttcttcaatgtctctgaacatgactatgggaactacacttgcgtggcctccaacaagctgggccacaccaatgccagcatcatgctatttggtccaggcgccgtcagcgaggtgagcaacggcacgtcgaggagggcaggctgcgtctggctgctgcctcttctggtcttgcacctgcttctcaaattttgatgtgagtgccacttccccacccgggaaaggctgccgccaccaccaccaccaacacaacagcaatggcaacaccgacagcaaccaatcagatatatacaaatgaaattagaagaaacacagcctcatgggacagaaatttgagggaggggaacaaagaatactttggggggaaaaaagttttaaaaaagaaattgaaaattgccttgcagatatttaggtacaatggagttttcttttcccaaacgggaagaacacagcacacccggcttggacccactgcaagctgcatcgtgcaacctctttggtgccagtgtgggcaagggctcagcctctctgcccacagagtgcccccacgtggaacattctggagctggccatcccaaattcaatcagtccatagagacgaacagaatgagaccttccggcccaagcgtggcgctgcgggcactttggtagactgtgccaccacggcgtgtgttgtgaaacgtgaaataaaaagagcaagaaagaaaaaggaaacaaaataagaccgtctgacagcaacaacggtcccacaaacaagtcacaaaagataccgttaaacttttttttttttttatcattttactacatgaacatcatggataacaagggattctgattcattattaatttcattaattatattttctgatatgagtctagaacttactgcaaaaacaagacaaaactaaaaaaatacaactgagaagggtgaagagaagtatgtttgttaaacagtaaaaatgaatagtatacttcttaactaggtttacaactggtggaccacacaccaggcactaatcacctggtgaggatttggcatatccaccaaaaaatgcatccgatttaaccaacatctccaccagcgctacggactcctcccaattctgacatctcttgcagacaatactatgctctctacacactgtttagaaatggaaaggtgatctgcactgtatcttgggtttgttggctatgcttcctttgatgacatatattatacagtatatatatacatatattttttttgttagagttctagccattttatttctccgcagggtcctttctcagacattactgcatgctgtatatggcgttagctgtgtgttgatcttctaaaagatgatagagtttactggtaattgtgtaatcagctcctgcctttttattttcttgggttatttacatgtcagagacatttataaaaagtgaaaggataaaaaaaaaaaaaaacaactaataccgggcgcagcatctttccaggtgtggctctgcgctaggccaccccaggtggccccgctttctccattctgccctgtggcgttaacagacagcaagcagctgaacaagcagtaccgtcagtacccacttgctttagcccattatgggaatctctgatgcctttgtgaccactggagagtttaatcctcttggtttattttatttcccacctttgtgtgagtgtgtatgaaagagaagaaaatgcaatttttaggtaatcttttttttttttcccctcccctgaaagtctgggaacctgagagtcctcggggaggggtcctggatgtgatgagggaaagggggattgggggatccgggagggtggggttgtctctgacttgacattaaaaagtgttccatgtccctcttcaaaaaaa

SEQ ID NO: 30236 - DNA, 3345 bp, Homo Sapiens
cagatgtccagttccagatgcctggacccagagtgtgggggaaatatctctggagaagccctcactccaaaggctgtccaggcgcaatgtggtggctgcttctctggggagtcctccaggcttgcccaacccggggctccgtcctcttggcccaagagctaccccagcagctgacatcccccgggtacccagagccgtatggcaaaggccaagagagcagcacggacatcaaggctccagagggctttgctgtgaggctcgtcttccaggacttcgacctggagccgtcccaggactgtgcaggggactctgtcacaatctcattcgtcggttcggatccaagccagttctgtggtcagcaaggctcccctctgggcaggccccctggtcagagggagtttgtatcctcagggaggagtttgcggctgaccttccgcacacagccttcctcggagaacaagactgcccaccttcacaagggctttctggccctctaccaaaccgtggctgtgaactatagtcagcccatcagcgaggccagcaggggctctgaggccatcaacgcacctggagacaaccctgccaaggtccagaaccactgccaggagccctattatcaggccgcggcagcaggggcactcacctgtgcaaccccagggacctggaaagacagacaggatggggaggaggttcttcagtgtatgcctgtctgcggacggccagtcacccccattgcccagaatcagacgaccctcggttcttccagagccaagctgggcaacttcccctggcaagccttcaccagtatccacggccgtgggggcggggccctgctgggggacagatggatcctcactgctgcccacaccgtctaccccaaggacagtgtttctctcaggaagaaccagagtgtgaatgtgttcttgggccacacagccatagatgagatgctgaaactggggaaccaccctgtccaccgtgtcgttgtgcaccccgactaccgtcagaatgagtcccataactttagcggggacatcgccctcctggagctgcagcacagcatccccctgggccccaacgtcctcccggtctgtctgcccgataatgagaccctctaccgcagcggcttgttgggctacgtcagtgggtttggcatggagatgggctggctaactactgagctgaagtactcgaggctgcctgtagctcccagggaggcctgcaacgcctggctccaaaagagacagagacccgaggtgttttctgacaatatgttctgtgttggggatgagacgcaaaggcacagtgtctgccagggggacagtggcagcgtctatgtggtatgggacaatcatgcccatcactgggtggccacgggcattgtgtcctggggcatagggtgtggcgaagggtatgacttctacaccaaggtgctcagctatgtggactggatcaagggagtgatgaatggcaagaattgaccctgggggcttgaacagggactgaccagcacagtggaggccccaggcaacagagggcctggagtgaggactgaacactggggtaggggttgggggtggggggttgggggaggcagggaaatcctattcacatcactgttgcaccaagccactgcaagagaaacccccacccggcaagcccgccccatcccagacaggaagcagagtcccacagaccgctcctcctcaccctctacctccctgtgctcatgcactaggccccgggaagcctgtacatctcaacaactttcgccttgaatgtccttagaaccaccttcccctacttcatctgttgacacagcttttatactcacctgtggaagagtcagctactcacccgctattagagtatggaggaaggggttttcattgcattgcatttctgaaacattcctaagaccctttagttgaccttcaaatattcaagctattctgcagctccaagatgcaattatagaaacagctccttttttattttatgtcctctatatgccaggtgcttcacctgttatttcacttaatcctcataccatatttgcaaaggatgtgttattatctatgtgtgacaaatgaggaaactgaggctcaggggataaagggacttgcccaagtcccacagctggtgtgtgactgcagagactgtgctcttcccagtgtgctgcaatacttctcaaccctcctctaacctgctgtgtcacccgctttccctcccagcccccacatccttaccattttccctccctgggaattcctgcttctgcgaaaatggtatcctctagctcacactttcctaatggccccatctcctgcagaagccaggtgagcccagcactggactgaagttcttgcagacaccccacctgtgcccctatcatcaggggaactgctccacctgagaggaccaactctttaatttttagtaaaacctgaaggtgatgggccgggcgcagtggctcacgcctgtaatcccaacaccttaggagtccgaggtgggtggatcacgaggtcaggagatccagcccatcctggccaacatggtgaaaccccatctctactaaaaatacaaaaattagccgggcgtggtgacacgtgcctgtagtcccagctactcgggaggctgaggcaggagaatcacttgaacctgggaggcggaggttgcagtgagctaagatcacgccactgcactccagcctgcggacagaccaagacttcatcccccccaaaaaaaaaagattggaggtgatttacagtgaaagacacaaataaaatacaactgttcaatggaaatagaaaataaacaccataaaagagagaagagaggtaatttgttagcatcaagagtcaagttgctatatggtcaaaggttaaatttatctctaaaaaatggcaggattcaaagttgtacatacatgtgattacttctgttttttacacccacatacagtacaaaagattattaaaaatattcccaaaaggcaggtgcaatgatgcacacttatacccccagccactcaggaggctgatgcaagaggatcgcttgagcccaggagttgaagtccagcctaagcaacatagtgaaaccccatctccaaaaatataataataattctctcaaaatactaaacagaggtggttttattgataagattttggctgtttggttttccactattctctattggctaaaatttgtttaatgagcatgaaatgtttttattttattttgcttatttttatgattgcaaaaaatgatatgagtttctccctgccaaggcaaaaaatatatatatatacctataaaaaaaaaaaaaaaaaaaaaaaaaaa

SEQ ID NO: 30237 - DNA, 833 bp, Homo Sapiens
aaaggatgtacagaggatccccaaccgcctgcgaaacccaagccgccgcgtaggagcgtgcgttcgggccctcttctcccacctgttcgactccccatccccaggatgtcaacctcagtccctcaaggccatacctggacccaacgggtgaagaaagacgatgaggaggaggacccgctggaccagctgatctcccgctctggctgtgctgcctcccactttgcagtgcaggagtgcatggcccagcaccaggactggcggcaatgccagccacaggtgcaggcgttcaaggattgcatgagtgaacagcaggcgaggcggcaagaggagctgcagaggaggcaagaacaagccggtgcccaccactgagaccccaaaccacctatccccagtagatggccctgccaagaccagcacccagcaagattatagaggaagaaatcctaaatgctggtgtgggaggtctaaaacatggggagagtttttggatctggagttgagagccatgggtttggacatgactggcacaaacagctgtcatatgttcatggtcagatgtcatacattctcagctgtcttgttccaccagtatttaccaggaaaacaaagaatgtgttaagggatgctcccccaccccacatcttaagtcagtgtgccaagtactgagatgattttagggacattttattttaaattaaatttacaatctaatggtaaattgattacctaattagtgcctttctctttcatcacttgttctggatgtttcaatcagtttagtggaaggaaaaataaatggggaaactttttattcaaaaaaaaaaaaaaaaaaa

SEQ ID NO: 30238 - DNA, 2113 bp, Homo Sapiens
ggagttgagaattagggaggaggtggtagagtccgggtagtgagcggagggacaggaagggtagggcaagaaagggagaggggacaggagggaagggtgggccaaagcggtgagaaaggagggccagccagttgggtgggggagagggccgaggcccgggggcaggagtgcagggctctgaggcggggagaggagaggagagaagagccgcggggggcccagcccggagccaggatgcccgcgccgcgcgcccgggagcagccccgcgtgcccggggagcgccagccgctgctgcctcgcggtgcgcggggccctcgacggtggcggcgggcggcgggcgcggccgtgctgctggtggagatgctggagcgcgccgccttcttcggcgtcaccgccaacctcgtgctgtacctcaacagcaccaacttcaactggaccggcgagcaggcgacgcgcgccgcgctggtattcctgggcgcctcctacctgctggcgcccgtgggcggctggctggccgacgtgtacctgggccgctaccgcgcggtcgcgctcagcctgctgctctacctggccgcctcgggcctgctgcccgccaccgccttccccgacggccgcagctccttctgcggagagatgcccgcgtcgccgctgggacctgcctgcccctcggccggctgcccgcgctcctcgcccagcccctactgcgcgcccgtcctctacgcgggcctgctgctactcggcctggccgccagctccgtccggagcaacctcacctccttcggtgccgaccaggtgatggatctcggccgcgacgccacccgccgcttcttcaactggttttactggagcatcaacctgggtgctgtgctgtcgctgctggtggtggcgtttattcagcagaacatcagcttcctgctgggctacagcatccctgtgggctgtgtgggcctggcatttttcatcttcctctttgccacccccgtcttcatcaccaagcccccgatgggcagccaagtgtcctctatgcttaagctcgctctccaaaactgctgcccccagctgtggcaacgacactcggccagagaccgtcaatgtgcccgcgtgctggccgacgagaggtctccccagccaggggcttccccgcaagaggacatcgccaacttccaggtgctggtgaagatcttgcccgtcatggtgaccctggtgccctactggatggtctacttccagatgcagtccacctatgtcctgcagggtcttcacctccacatcccaaacattttcccagccaacccggccaacatctctgtggccctgagagcccagggcagcagctacacgatcccggaagcctggctcctcctggccaatgttgtggtggtgctgattctggtccctctgaaggaccgcttgatcgaccctttactgctgcggtgcaagctgcttccctctgctctgcagaagatggcgctggggatgttctttggttttacctccgtcattgtggcaggagtcctggagatggagcgcttacactacatccaccacaacgagaccgtgtcccagcagattggggaggtcctgtacaacgcggcaccactgtccatctggtggcagatccctcagtacctgctcattgggatcagtgagatctttgccagcatcccaggcctggagtttgcctactcagaggccccgcgctccatgcagggcgccatcatgggcatcttcttctgcctgtcgggggtgggctcactgttgggctccagcctagtggcactgctgtccttgcccgggggctggctgcactgccccaaggactttgggaacatcaacaattgccggatggacctctacttcttcctgctggctggcattcaggccgtcacggctctcctatttgtctggatcgctggacgctatgagagggcgtcccagggcccagcctcccacagccgtttcagcagggacaggggctgaacaggccctattccagcccccttgcttcactctaccggacagacggcagcagtcccagctctggtttccttctcggtttattctgttagaatgaaatggttcccataaataaggggcatgagcccttcctccc

SEQ ID NO: 30239 - DNA, 4652 bp, Homo Sapiens
ggcattagagtcaaggattacattcttcctggagccaagcatggggccagctgtaaacaagccgcatttctccttggggagactgataatttaaaaggtttgttgtgtcagaaacattcccagcttcatcaccaaccctttccttccacctctgcccactggagaccacttacatcccgaagcggacgcggcagctgaagtcaggaaaccatgcatcacattagcaggagccaactgcagactttaaactccgttcaacatgtggatgcggcagagaaatgacctgtccagacaagccggggcagctcataaactggttcatctgctccctgtgcgtcccgcgggtgcgtaagctctggagcagccggcgtccaaggacccggagaaaccttctgctgggcactgcgtgtgccatctacttgggcttcctggtgagccaggtggggagggcctctctccagcatggacaggcggctgagaaggggccacatcgcagccgcgacaccgccgagccatccttccctgagatacccctggatggtaccctggcccctccagagtcccagggcaatgggtccactctgcagcccaatgtggtgtacattaccctacgctccaagcgcagcaagccggccaatatccgtggcactgtgaagcccaagcgcaggaaaaagcatgcagtggcatcggctgccccagggcaggaggctttggtcggaccatcccttcagccgcaggaagcggcaagggaagctgatgctgtagcacctgggtacgctcagggagcaaacctggttaagattggagagcgaccctggaggttggtgcggggtccgggagtgcgagccgggggcccagacttcctgcagcccagctccagggagagcaacattaggatctacagcgagagcgccccctcctggctgagcaaagatgacatccgaagaatgcgactcttggcggacagcgcagtggcagggctccggcctgtgtcctctaggagcggagcccgtttgctggtgctggaggggggcgcacctggcgctgtgctccgctgtggccctagcccctgtgggcttctcaagcagcccttggacatgagtgaggtgtttgccttccacctagacaggatcctggggctcaacaggaccctgccgtctgtgagcaggaaagcagagttcatccaagatggccgcccatgccccatcattctttgggatgcatctttatcttcagcaagtaatgacacccattcttctgttaagctcacctggggaacttatcagcagttgctgaaacagaaatgctggcagaatggccgagtacccaagcctgaatcaggttgtactgaaatacatcatcatgagtggtccaagatggcactctttgattttttgttacagatttataatcgcttagatacaaattgctgtggattcagacctcgcaaggaagatgcctgtgtacagaatggattgaggccaaaatgtgatgaccaaggttctgcggctctagcacacattatccagcgaaagcatgacccaaggcatttggtttttatagacaacaagggtttctttgacaggagtgaagataacttaaacttcaaattgttagaaggcatcaaagagtttccagcttctgcagtttctgttttgaagagccagcacttacggcagaaacttcttcagtctctgtttcttgataaagtgtattgggaaagtcaaggaggtagacaaggaattgaaaagcttatcgatgtaatagaacacagagccaaaattcttatcacctatatcaatgcacacggggtcaaagtattacctatgaatgaatgacaaaagaatcttctggctagggtgttagatatatttatgcatttttggttttgtttttaaatcaagcacatcaacctcaagcccgtttagcaatgaggcagtgtagatgaatacgtaaaataaatgactttaaccaagtagctataatgggacttagcactgtatgcatacttaaaaaggttttgaaaaacaaactacttgagaaatatttgtttatatttttctctaacatcatgctatgtgtcagtctgaacatctgacaacagaaatttcagttattattctagctaagttttgaaaacatttgtcatgctgtttaatagaaaactgcaaaccagagatactgactccattaataaaccatattttgtgccgttttgactgttctgaccaaatactaatgggaacaattcttgacgtttttctgttgctgattgttaacatagagcagtctctacactaccctgaggcaactctacattggaacactgaggcttacagcctgcaagagcatcagagctgaccatacatttaaacagaaatgctggtttatttgcaaaatcaccagtatattttctattgtgtctataaaaaatcagtcatttaagtacaagaatcatattttccattcctttttagaaatttattttgttgtccctatggaaatcattcacatctgacaatttatatgttaaagagttttactctctctattttggtccaatttgtatctagtggctgagaaattaaataattctaaagtatgaagttacctatctgaaaatgtacttacagagtatcattttaaaatggatgtctctttaaaaattttgttacttttaccaacaatgtaatataatttatgtatattttattaataatagtgaattccttaaaatttgttctatgtacttatatttaatttgatttaatggttactgcccagatattgagaaatggttcaaatattgagtgtgtttcaatatattatctggcttatttcaacatgagtaatatgagcaaaataagttaaaacctgcgtctgatcaattttcctcatgactagaactaaaacagtaaatttggacaatattaagcctcaaataatcatctccaaactccttctaacactttttaaatcagattggaagacatggacaaatcaggttcatgtgttgcatctttatgtcctttgccaatatccaagatcatcacatatggtagatattcacatggagtttcaaattcagaatagattaccattaccttcctgcccttacacatcctactccttatttaaaagttctatttgtgacttttcatttcctgaaagtttaaaaatacaatttgagaatgtttataatacattctctcctgtcttttcacggttacgtctgttattgctgaaatacaccacattttctttgttctggtcaaggttaactcaatatctgtgtgaaagggaactactaacaacgttacaatagaggctagatttgaaaaaaaaaatctatagatctaattgatacaattgtagaacaaaatgtcaaaataatgttttaagtataagagaagatggaccaaggagagagagatcatttgaaaatctaattgtagcttttctaggctcacattcatgtactacttttagcacccttatgggctgtgctcgccccctggacagttgagctttggattatcttcctcttcaattttccctctattgacccgagtgtctccctctgcttctacagatttatagtactctttggctcttttgagtctccacttttactcactgtctctgggatttttaagatccttttcttctcttataaatcatcctcttaatgaaaattagcctaacaaaagtttggagactggaatcctactttgagccactgacttgaaataactcttttggcaagttgcctgacaccctgtcttaccaaggtggcatatttgcatttttactgcttaaaacatttttttttttttaccatccttatccaaatttatcatattgatggtaggactaacaggctttttagaagctggctttaactttgagtctcaagctacaatgctgttgggcagcctggtcttcccacgtgagggtttaactttgtttatttgcctccagttattccaaaatgcttattaaatgaaaggcccaggaacatgtttattttagtcacctttgctttttaacaattttgttttgtaatcaatgagtaattcatgatgaattatttttgactaatggatagccgaaggccaagcttttaattctaataggtaatgttcttcttttgtcttattgaaacaatgagaatactctgtgcatttcaaatgcactccgattatgctgtggttttattcacataagcacaatatgtgttttatttataacttcataacaaacttataatataataatttaccttagcagacatgcaaaagcctattcttgtgtgacttactttctttaagctaataatataaaaataaatatgtatcttaaaaatctataataaaacattagaaattaaagatatgtgctttttattttgcagatgagttcatttgcttctgtagatgtgttttcagagctaggtacagaggaatgtttgctacctttagcggtgaaaaaagaaagagagtcaagaattttgttggattgtgtttgtgtgtgcatatatttgatatcatcatcatatttgtaatctttggacttgtaatcatagcctgtttattctactgtgccattaaatatactttaccttatacataacgaaaaaaaaaaaaaaaaaa

SEQ ID NO: 30240 - DNA, 1647 bp, Homo Sapiens; identical to SEQ ID NO: 25501

SEQ ID NO: 30241 - DNA, 3493 bp, Homo Sapiens
ggccgagctggagctggaagaggacgaggaggagggggaggaagcggagctggacggagacctgctggaggaggaggagctggaggaagcagaggaggaggaccggtcgtcgctgctgctgctgtcgccgcccgcggccaccgcctctcagacccagcagatcccaggcgggtccctggggtctgtgctgctgccagccgccaggttcgatgcccgggaggcggcggccgcggcggcggcggcgggggtgctgtacggaggggacgatgcccagggcatgatggcggcgatgctgtcccacgcctacggccccggcggttgtggggcggcggcggccgccctgaacggggagcaggcggccctgctccggagaaagagcgtcaacaccaccgagtgcgtcccggtgcccagctccgagcacgtcgccgagatcgtcggccgccagggttgtaaaattaaagcactgagagccaagacaaacacgtatatcaagactcctgttcgtggtgaagagcccatttttgttgtcactggaaggaaagaagatgttgccatggccaaaagagagatcctctcagctgcagagcacttctccatgattcgtgcatctcgaaacaaaaatgggcctgccctgggaggattatcatgtagtcctaatctgcccggtcaaaccaccgtccaagtcagggtcccttatcgtgtggtaggattagtggttggacccaaaggagcaactattaaaagaattcagcagcagacccacacctacatagtaactccgagcagagataaggaacctgtctttgaagtgacagggatgcctgaaaatgttgaccgagcacgggaagaaatagaaatgcatattgccatgcgtacaggaaactatatagagctcaatgaagagaatgatttccattacaatggtaccgatgtaagctttgaaggtggcactcttggctctgcgtggctctcctccaatcctgttcctcctagccgcgcaagaatgatatccaattatcgaaatgatagttccagttctctaggaagtggctctacagattcctactttggaagcaataggctggctgactttagtccaacaagcccatttagcacaggaaacttctggtttggagatacactaccatctgtaggctcagaagacctagcagttgactctcctgcctttgactctttaccaacatctgctcaaactatctggactccatttgaaccagttaacccactctctggctttgggagtgatccttctggtaacatgaagactcagcgcagaggaagtcagccatctactcctcgtctgtctcctacatttcctgagagcatagaacatccacttgctcggagggttaggagcgacccacctagtacaggcaaccatgttggccttccaatatatatccctgctttttctaatggtaccaatagttactcctcttccaatggtggttccacctctagctcacctccagaatcaagacgaaagcacgactgtgtgatttgctttgagaatgaggttattgctgccctagttccatgtggccacaacctcttctgcatggaatgtgccaacaagatctgtgaaaagagaacgccatcatgtccagtttgccagacagctgttactcaggcaatccaaattcactcttaactatatatatatacataaatactatatctctatatggactcgtaaaggcatgggtataatggtaccccccagtaaacttcctaatgatttcttatgactgttatcaggctttattgggattaggctaaagttgttagtaaacttataaaaggctgctatggtaacactaaacctaagtggtctcttgtctattagtttggtttgaattattagtactatcctgtagacccagagacatagtttatataagaattgctaaagctgaagttcaacttggctgagtgaagataatcataggttgtgtgagcctatgaaaaagtgtatacgtctaagatttcaaaacaatgggtcccaaagcctaaccactttaagagtttatggagggtacttggcattacagacgattcatacacttccagtgctgccttctttacactgccagttttgacaaaacaggtttgttttttattttacaacaacatatgcctaattctgcaggattgcaagtaactttttaatgcattgtgattacttattggtaatgatagggctgatggcagtttactagatcactggttataatttgggacaaaaactgctacatcaactttcatctcgcccagagtgctcaaggctggtatgatcagtggatcaggaatgcaattgtgaattcctgcccattgcctctcttggtgaatgtggaaatggccacctgggttttcccatatcaggaagggctttgggatggcacctatattggctgataattgaggatgcaaacattccattcattagtgtgatcgagctgttaatttttagactatagatcaaaatgtgaaacattttatgttcaatccatatttgtcttgcacattataaatatatttttattttttagtaatttaggggagggaggagggagaaagggataatgatgcccttggcataattcacaaaagcagctgtgacaacctccaatcagtttacttcatttcaaaactatttccaatcacaaggaaagatttatttaaaatatactcgtacatttcacctgtggatgtctataacttcatcctcagtatgttcccaaatctgtgctggcattgaaaggacaaaacattatactagtgggtttttctactaattattttttgaagcattattttcccaacacaaaagagcttttttctcggtataatgaaaattgaaatcctatgtgtattcaatagtaaatagacaaattttattttttatttccacttgaagagttacatttcgtataaaagtttacaaataacggtttttattttgattttttcagtataaaaaaagttgccttgatggcatattatgatgtaatgctaattgcttgtaggatagtaaatggtcagtattgaaacctaatctctagctgccgtcttgtagatatgaacgaatgttcaccaagcatgtattttgtattttgttgcattgtacactgcaactaataagccaaggaatcgacatatattaggtgcgtgtactgtttctaaaaaccacaaactaagaatgataaattatcaatatagtttagtatttgctaattttactacactcttttgttatgtatatgtagggaagtcatagggattataaattcaatttgagtaaaatttaaaaccatatattttatgataaagggcctttaacttaagatggccaaagcactgatattatatatttgctgtaaagagaattataagagttttatttttctgatattaaaagttacttgataaagacttgtttccattaacttgaaaaaaaaaaaaaaaaaaaaaa

SEQ ID NO: 30242 - DNA, 3775 bp, Homo Sapiens
ccctgctcctccgcctgggcggcccggctgcggtgacggctctcgctgcccgactgggggccatgaagccgagtccggccgggacggcgaaggagctggagcctccggcgccggcccgaggcgagcagcgcacggcggagcccgaggggcgctggcgggagaagggcgaggcagacaccgagcggcagcgcacccgggagcggcaggaggccacgctggccgggctggcggagctggagtacctgcgccagcgccaagagctgctggtcaggggcgccctgcgcggcgccgggggtgcgggagccgctgcgccccgcgctggggagctactgggggaggcggcgcagcgcagtcgcctggaggagaagttcttggaggagaacatcttgctgctaagaaagcaattgaactgtttgaggcgaagagatgctggtttgttgaatcagttgcaagagcttgacaagcagataagtgacctgagactggatgtagaaaagacatctgaagagcacctggagacagacagtcggcctagctcagggttttatgagctgagtgatggggcttcaggatccctttccaattcctctaactcggtgttcagtgagtgtttatccagttgtcattccagcacctgcttttgcagccccttggaggcgaccttgagtctctcagatggttgccccaaatctgcagatctcataggattgttggaatataaagaaggccactgtgaagaccaggcctcaggggcagtttgccgttccctctccacaccacaatttaattcccttgatgtcattgcagatgtgaatcccaagtaccagtgtgatctggtgtctaaaaacgggaatgatgtatatcgctatcccagtccacttcatgctgtggctgtgcagagcccaatgtttctcctttgtctgacgggcaaccctctgagggaagaggacaggcttggaaaccatgccagtgacatttgcggtggatctgagctagatgccgtcaaaacagacagttccttaccgtccccaagcagtctgtggtctgcttcccatccttcatccagcaagaaaatggatggctacattctgagcctggtccagaaaaaaacacaccctgtaaggaccaacaaaccaagaaccagcgtgaacgctgaccccacgaaagggcttctgaggaacgggagcgtttgtgtcagagccccgggcggtgtctcacagggcaacagtgtgaaccttaagaattcgaaacaggcgtgtctgccctctggcgggataccttctctgaacaatgggacattctccccaccgaagcagtggtcgaaagaatcaaaggccgaacaagccgaaagcaagagggtgcccctgccagagggctgcccctcaggcgctgcctccgaccttcagagtaagcacctgccaaaaacggccaagccagcctcgcaagaacatgctcggtgttccgccattgggacaggggagtcccctaaggaaagcgctcagctctcaggggcctctccaaaagagagtcctagcagaggccctgccccgccgcaggagaacaaagttgtacagcccctgaaaaagatgtcacagaaaaacagcctgcagggcgtccccccggccactcctcccctgctgtctacagctttccccgtggaagagaggcctgccttggatttcaagagcgagggctcttcccaaagcctggaggaagcgcacctggtcaaggcccagtttatcccggggcagcagcccagtgtcaggctccaccggggccacaggaacatgggcgtcgtgaagaactccagcctgaagcaccgcggcccagccctccaggggctggagaacggcttgcccaccgtcagggagaaaacgcgggccgggagcaagaagtgtcgcttcccagatgacttggatacaaataagaaactcaagaaagcctcctccaaggggaggaagagtgggggcgggcccgaggctggtgttcccggcaggcccgcgggcgggggccacagggcggggagcagggcgcatggccacggacgggaggcggtggtggccaaacctaagcacaagcgaactgactaccggcggtggaagtcctcggccgagatttcctacgaagaggccctgaggagggcccggcgcggtcgccgggagaatgtggggctgtaccccgcgcctgtgcctctgccctacgccagcccctacgcctacgtggctagcgactccgagtactcggccgagtgcgagtccctgttccactccaccgtggtggacaccagtgaggacgagcagagcaattacaccaccaactgcttcggggacagcgagtcgagtgtgagcgagggcgagttcgtgggggagagcacaaccaccagcgactctgaagaaagcgggggcttaatttggtcccagtttgtccagactctgcccattcaaacggtaacggccccagaccttcacaaccaccccgcaaaaacctttgtcaaaattaaggcctcacataacctcaagaagaagatcctccgctttcggtctggctctttgaaactgatgacgacggtttgagtgacatcattggtgtagaaagtttgtgtgtttttttttcttctccctagttgccaaaattaaaaaggtggtgttttcatttttgtataatactttaatggaatgctttttaaaaaaatataaaaccaaggtaaattattgtttcatcttcacgtatggatgctagtgcctttaatggaaggtaaagaatgttttgctagttagaagtacatattgaggttttaatggtggtgatagtgagttttgtggcaccagctgttttttattttaaactttctgagcatccggcaaggtacaggttttgatgttcaagttttattgggataagatcttttgatcccaaggtcaggtggatggaatttttggatttatatttgttccttgagtcttcagggcagtgtctccatgagggttttcctgttgaggggcaccacatacaatagtgtgaagtaggtatgaggggcagtcattgtattctatagtttttttatgtagtctacatttctcagatgtatccccattcggttttattctcagaactgttactagactcatgacttggaggccaaaccttaaatccagagatagcagcctcgatagggaccttaaaaggattcacaaaaacttttgccacacttggtgcctaggccctgttcctaataaccccttctagggccgtttatccaacatttagatgccttcttttccctccctaatttgtagccagtccaacctttcattccttggaggatttagttttgggataaaattttggtccttgggcacagagacattcactattaatgaagtaacccttgggcatgactccaatcccagaattgctcactgagcgctatgccaccgaagcgttgacctgaacatattagtgcaatccagtccagattggacctttgatcctatgtggaagggctgttttttaagaaaaaatttttggtaaacagtattgtgtaaaattgctttttgtataccaatatatgcatgttttgtgcatgagtagtacttgtgttgatactcctgttgatgttaaattactatataatataaacagtatgtgtttttatatatcattgtgtaaatttaatataacatatgcagtaataaaccatttgttttactgctgttaagtttgttatttgggtataaaaccagatgtttacacctgtaaaaaaaaaaaaaaaaaa

SEQ ID NO: 30243 - DNA, 4406 bp, Homo Sapiens
ctttccgacactctttgggaagagaatctctaatgacggcaacagtggagaacctaacgttccagaaggacactttgggaaatgctgttgacaaaaacacatccagattggagctccgttcctactcccttgcacggcgccacggctcgacagagccactcgtcctcgcctggtcatcccagttccggaggctgacctggggatgcgccctggacgccctgcaccgcagtccttgcgtcgctgctagtcagcacggcgttacccacctcatccgcagctccaggacgccgcactccacgcgctgccgcaaggaggacgcgcagcctggtcaccatggaaacggtgccgcctccgtcacggctcaagcgagaggtcaaaggtcagtcctgcaagttccgcttccggttccgagatcctgtttgttttctgaaagctttgtggtttcggtgagctctcagagccgatttctagcgtccgtgccggggacaggtgtccagaggtcgactgctgcagacatggcggcctccaccgcggccgggaagcagcggattcccaaagtggccaaggtgaaaaacaaagccccggctgaggtacagataactgctgaacaactcttaagagaggctaaagaaagagaacttgagcttcttccacctccacctcaacagaagatcacagatgaagaagaattaaatgattataaactaaggaaaaggaagacttttgaagataatataagaaaaaacaggactgtgattagtaactggataaaatacgcacaatgggaagaaagcctaaaggagattcaaagggctcgatccatatacgagcgtgctttagatgtagactaccgaaatattacactctggctgaaatacgcagaaatggaaatgaagaatcgccaagtcaaccatgctcgaaatatctgggaccgggccataacaacgctgcctcgagttaatcagttctggtacaagtacacgtacatggaggaaatgttgggaaacgttgccggtgcccggcaggtgtttgagcgctggatggagtggcagcctgaggagcaagcctggcactcctacatcaactttgagctgagatacaaagaggtggatcgggcccgcaccatttatgagcgatttgtcctcgtgcaccctgatgttaagaactggatcaagtatgcccgctttgaagaaaaacatgcttattttgcccatgcacggaaagtgtatgagagagctgtggaattctttggagatgaacatatggatgagcacctttatgttgcctttgccaagtttgaagaaaatcagaaagagtttgaaagggtacgagtgatttacaagtatgccctggacagaatttcaaaacaagatgcccaagaactctttaaaaattataccatctttgagaagaagtttggtgataggcggggtattgaagatatcattgtgagcaaacggagattccagtacgaagaagaagtgaaggcgaatccacacaattatgatgcatggtttgattacttgcgcttggtagaaagtgacgcagaagctgaagccgtgagagaagtctatgaaagggccattgccaatgtcccacccattcaggagaagaggcactggaagcgctacatttatctttggatcaactatgcactctatgaagaattggaggcaaaggatcctgagaggacaagacaggtgtatcaagcctctttggaactaattcctcacaaaaagttcacatttgccaaaatgtggatactgtatgcacagtttgaaatacgacagaagaatctgtcattagccagaagagcattgggaacttccataggcaaatgtccaaagaacaaattatttaaagtttacatagaattggagctacagcttcgagaatttgacagatgccggaagctttatgaaaagttcctggaatttggacctgaaaattgtacctcatggattaaattcgctgaattagagacaatccttggtgatattgacagagcacgggcaatctatgaattagccatcagtcagccacgtttagacatgccagaggtgctttggaaatcatatattgattttgaaattgagcaggaagaaacagaaagaacacgaaacctttaccggcggttgcttcaacggacgcagcatgtcaaggtatggatcagctttgctcagtttgagttgtcttcaggaaaagaaggaagtttgactaaatgcagacaaatttatgaagaagctaacaaaaccatgcgaaactgtgaagaaaaggaagagagacttatgctgctggaatcttggcgaagttttgaagaagaatttggaacagcttcagataaggagagagtagacaaactcatgccagagaaagtcaagaagagaagaaaggtccagactgatgatgggtctgatgcaggctgggaagaatactttgattacatctttccagaagatgctgccaaccaacctaacctcaaactcctggccatggccaaactgtggaagaaacagcagcaggaaaaggaggatgctgagcaccatccagatgaggacgtcgatgagagtgaatcctgatctttttttcatagacaaatgttttgttatttttataaattaattgtttggaactcttgtgactcctggaagttcttatatatttcaccagtaagaaattgattggtatctttgatggctactttttaagttattttttaaatgctcttgggttagctaggggtagggattgcaagtaaaggacttttttaactgctggatttgtttttccaactgagtccaaacttttctaatgtctgtccacatcatgcattaggaaatgtaattaaggtaacattctacagttacttttcatgtcatacccataaagatagtttatgcattcatctgaaatgtgtaactttttcatgtcttcagagtcacagacttgagttcatttcccagctctgccactcatgattatataacttaattttcattttcctcattcacaaaatgggccaatagtttgacagctcattttgaagattacattataaaaggaatatacctggtgggtgcatagtaagtgctcagtaaattgtttgttctaagccacttttaaaaatggtttcattccttgtagaattgaatgcgagtggattaataatttaccttactttcttactagtgtccagttatattgttttttagaacaacacttggaaaataatttgcagtgattatatttctgaacaaggttcagaaaacattgtttactaagaatttagtctaataatttcagttaggcgctcatcagttctccagagtggttgagtttgtaataccttgtttaaagaataatggcttgttcacgtgtgtgctatgaaaaatgatgtcccatgttcacataaatttgggaaattctggactaagacttaagtctcgttaatcaaatctctttatagttaggcttctgtacattatgtatctccagtagcaatgttgccatattatttatttcccaaacttagtggacaatggagtcatttctacctagagtaccagtaaacatctcccagtgtgctatagtagaaaatgtctactcctcactgctgacatgttaaacttactcttggtttagagcatgtgtagaaacacctaaggtagctctatgctaaataatgaagagtagcacaagaatgaatgtatttgctgatacgttgctcacattctcaagcaaaaattcaactgcattaaccgatctgagagttttcctttaacctggactgtgtttctcaagcacattttttctttgttcactgcccaaggactagaactgtatttttaaggttgttttcccctaaaaggacctttagtaagcaaatttattattaaatgtgcacatcttattcacccaagggaataaaagctacttcgtaatgttgttactaaattttatcttgaaaataaataacagtgtttgaggacagaagaaactaggactgttgttgagataaaatctgttttcagcctgactgctttagtcactggacgagcatcagctactgcggtgtcagatcacttctcgagtagaggtctgcctagtgagtgagcaggagaacatcatcttaatagcctttggctcacccagagtcagggagagatgaaaataataggtcagaatgcaagtgacttaatcacagtcttcctagaattatctgtttatgttgcatgaatgcataagaaaaaaattctgtcatgttcccaaggtagaattgtaataagcatgtgccagtgtgaaagctggaaggaaaaaagctattctctaacaggagaacataaagattcatttctctcccaccctcaactccaccaaagtaaatcctttcgatagtaaaagtttaa

SEQ ID NO: 30244 - DNA, 3271 bp, Homo Sapiens
gcgccgagccggtttccccgccggtgtccgagaggcgcccccggcccggcccggcccggcccgcgccctccgcccccgcctccccgggccggcggcggtgggcgagctcgcgggcccggccgcccccagccccagccccgccgggccccgccccccgtcgagtgcatgaggttgacgctactttgttgcacctggagggaagaacgtatgggagaggaaggaagcgagttgcccgtgtgtgcaagctgcggccagaggatctatgatggccagtacctccaggccctgaacgcggactggcacgcagactgcttcaggtgttgtgactgcagtgcctccctgtcgcaccagtactatgagaaggatgggcagctcttctgcaagaaggactactgggcccgctatggcgagtcctgccatgggtgctctgagcaaatcaccaagggactggttatggtggctggggagctgaagtaccaccccgagtgtttcatctgcctcacgtgtgggacctttatcggtgacggggacacctacacgctggtggagcactccaagctgtactgcgggcactgctactaccagactgtggtgacccccgtcatcgagcagatcctgcctgactcccctggctcccacctgccccacaccgtcaccctggtgtccatcccagcctcatctcatggcaagcgtggactttcagtctccattgaccccccgcacggcccaccgggctgtggcaccgagcactcacacaccgtccgcgtccagggagtggatccgggctgcatgagcccagatgtgaagaattccatccacgtcggagaccggatcttggaaatcaatggcacgcccatccgaaatgtgcccctggacgagattgacctgctgattcaggaaaccagccgcctgctccagctgaccctcgagcatgaccctcacgatacactgggccacgggctggggcctgagaccagccccctgagctctccggcttatactcccagcggggaggcgggcagctctgcccggcagaaacctgtcttcgcaaggacctgggtcgctctgagtccctccgcgtagtctgccggccacaccgcatcttccggccgtcggacctcatccacggggaggtgctgggcaagggctgcttcggccaggctatcaaggtgacacaccgtgagacaggtgaggtgatggtgatgaaggagctgatccggttcgacgaggagacccagaggacgttcctcaaggaggtgaaggtcatgcgatgcctggaacaccccaacgtgctcaagttcatcggggtgctctacaaggacaagaggctcaacttcatcactgagtacatcaagggcggcacgctccggggcatcatcaagagcatggacagccagtacccatggagccagagagtgagctttgccaaggacatcgcatcagggatggcctacctccactccatgaacatcatccaccgagacctcaactcccacaactgcctggtccgcgagaacaagaatgtggtggtggctgacttcgggctggcgcgtctcatggtggacgagaagactcagcctgagggcctgcggagcctcaagaagccagaccgcaagaagcgctacaccgtggtgggcaacccctactggatggcacctgagatgatcaacggccgcagctatgatgagaaggtggatgtgttctcctttgggatcgtcctgtgcgagatcatcgggcgggtgaacgcagaccctgactacctgccccgcaccatggactttggcctcaacgtgcgaggattcctggaccgctactgccccccaaactgccccccgagcttcttccccatcaccgtgcgctgttgcgatctggaccccgagaagaggccatcctttgtgaagctggaacactggctggagaccctccgcatgcacctggccggccacctgccactgggcccacagctggagcagctggacagaggtttctgggagacctaccggcgcggcgagagcggactgcctgcccaccctgaggtccccgactgagccagggccactcagctgcccctgtccccacctctggagaatccacccccaccagattcctccgcgggaggtggccctcagctgggacagtggggacccaggcttctcctcagagccaggccctgacttgccttctcccaccccgtggaccgcttcccctgccttctctctgccgtggcccagagccggcccagctgcacacacacaccatgctctcgccctgctgtaacctctgtcttggcagggctgtcccctcttgcttctccttgcatgagctggagggcctgtgtgagttacgcccctttccacacgccgctgccccagcaaccctgttcacgctccacctgtctggtccatagctccctggaggctgggccaggaggcagcctccgaaccatgccccatataacgcttgggtgcgtgggagggcgcacatcagggcagaggccaagttccaggtgtctgtgttcccaggaaccaaatggggagtctggggcccgttttccccccagggggtgtctaggtagcaacaggtatcgaggactctccaaacccccaaagcagagagagggctgatcccatggggcggaggtccccagtggctgagcaaacagccccttctctcgctttgggtcttttttttgtttctttcttaaagccactttagtgagaagcaggtaccaagcctcagggtgaagggggtcccttgagggagcgtggagctgcggtgccctggccggcgatggggaggagccggctccggcagtgagaggataggcacagtggaccgggcaggtgtccaccagcagctcagcccctgcagtcatctcagagccccttcccgggcctctcccccaaggctccctgcccctcctcatgcccctctgtcctctgcgttttttctgtgtaatctattttttaagaagagtttgtattattttttcatacggctgcagcagcagctgccaggggcttgggattttatttttgtggcgggcgggggtgggagggccattttgtcactttgcctcagttgagcatctaggaagtattaaaactgtgaagctttctcagtgcactttgaacctggaaaacaatcccaacaggcccgtgggaccatgacttagggaggtgggacccacccacccccatccaggaaccgtgacgtccaaggaaccaaacccagacgcagaacaataaaataaattccgtactccccaccc

SEQ ID NO: 30245 - DNA, 2415 bp, Homo Sapiens
cccgcggctgccgccgccatttcgggcgctgctgtgaagctgaaaccggagccggtccgctgggcggcgggcgccgggggccggaggggcgcgcgcggcggcggcaccccagcgtttaggcgcggaggcagccatggcgggcaacttcgactcggaggagcggagtagctggtactgggggaggttgagtcggcaggaggcggtggcgctgctgcagggccagcggcacggggtgttcctggtgcgggactcgagcaccagccccggggactatgtgctcagcgtctcagagaactcgcgcgtctcccactacatcatcaacagcagcggcccgcgcccgccggtgccaccgtcgcccgcccagcctccgcccggggtgagcccctccagactccgaataggagatcaagagtttgattcattgcctgctttactggaattctacaaaatacactatttggacactacaacgttgatagaaccagtttccagatccaggcagggtagtggagtgattctcaggcaggaggaggcggagtatgtgcgagccctctttgactttaatgggaatgatgaggaagatcttccctttaagaaaggagacatcttgagaatccgggacaagcctgaagagcagtggtggaatgcggaggacagcgaaggcaagagagggatgattccagtcccttacgtcgagaagtatagacctgcctccgcctcagtatcggctctgattggaggtaaccaggagggttcccacccacagccactgggtgggccggagcctgggccctatgcccaacccagcgtcaacactccgctccctaacctccagaatgggcccatatatgccagggttatccagaagcgagtccccaatgcctacgacaagacagccttggctttggaggtcggtgagctggtaaaggttacgaagattaatgtgagtggtcagtgggaaggggagtgtaatggcaaacgaggtcacttcccattcacacatgtccgtctgctggatcaacagaatcccgatgaggacttcagctgagtatagttcaacagttttgctgacagatgggaacaatcttttttttttttttccaactgccatctatacaattttcttacagatgtcaaaagcagtctagtttatataagcattctgttacctgtgatattttttagactgaactgctccattcctagtcttaattaccatattcagggtacgaactggagggcttgtgtgttagcttctgaattggcaattggaggcggtagtggtcgtgcctgtgtgtatcagaagggataggtatcttgcctcctttctctcaggcagtgcaaatcaccctgtggaaaaccgatggacaggaaggagtgttacacactgcttaccctgatttattcagtggttttgttttcattctggaaccatactatcaaatggcgacagactgttccgttccacccccgtgaagtaatcatgcaccgtgtgaatagtatcaagcaggattgctttcattgtatggagcatgaccagcgtgtgactcattctgacatttcagatcctaagaattctaagaacactactagaagcatttgttccctcctagtcaatgcttcatactttttcttgggattcttttagcccttgacattcttgtcccccaaacctgtaagtaggtgaattcctaagataagtgtgtattttcattccaggtgaaaagcaggatgtaccgagcactttattcagtgcatagctttaagccagtgttggattcactaagtggacagccagtctcccagctctctgccttccccaaaagggtcgtagtaggtcacccttctacagcagctaactagagtcctaactaatgggatccagcagggccatttctccagagggccagtatcctattaggagactcttggaattcttaggttctactcaagagtggaaggaccaatcacctctgatattctgtggaaggttttggggtcaaattctgccctctgcattctgtgcaacttgtataaaagtcaagttagtattacatgaatttggggtagggttagtgctttgaaaaaatgttgaaccggctgggcgcggtggctcacgtctgtaatcccagcactttgggaggccgaggcgggtggatcatgaggtcaggagttcgagaccagcctggccaacatagtgaaaccccatctctgctaaagatataaaaaattagcccggcgtggtggtgcacgcctgtaatcccagctactcgggaggctgaggcaggagaattgcttcaacctgggaggtggaggctgcagtgagccgagatcgcaccactgcgttccagcctgagcgacagggcaagactcagtctcaaaaaaaaaaaaaaggaaaaaaaaaagaaaaaaaaa

SEQ ID NO: 30246 - DNA, 6203 bp, Homo Sapiens
ggaaaagctcctcggagatgagcgtgaccccctggctcgtggtggccgcctgttctcactaacgccatggcggggaccggagtgagaaaccggtgtctgtcactgactgcaaagtgagcgagaagcaggctgcgggccgtcccagcacgacgtggagccccgcggagacctcgagatgccccgcggggaagctcctggccccgggagacggggggctaaggacgaggccctgggcgaagaatcgggggagcggtggagccccgagttccatctgcagaggaaattggcggacagcagccacagtgaacagcaagatcgaaacagagtttctgaagaacttatcatggttgtccaagaaatgaaaaaatacttcccctcggagagacgcaataaaccaagcactctagatgccctcaactatgctctccgctgtgtccacagcgttcaagcaaacagtgagtttttccagattctcagtcagaatggagcacctcaggcagatgtgagcatgtacagtcttgaggagctggccactatcgcttcagaacacacttccaaaaacacagatacctttgtggcagtattttcatttctgtctggaaggttagtgcacatttctgaacaggctgctttgatcctgaatcgtaagaaagatgtcctggcgtcttctcactttgttgacctgcttgcacctcaagacatgagggtattctacgcgcacactgccagagctcagcttcctttctggaacaactggacccaaagagctgcacggtatgaatgtgctccggtgaaaccttttttctgcaggatccgtggaggtgaagacagaaagcaagagaagtgtcactccccattccggatcatcccctatctgattcatgtacatcaccctgcccagccagaattggaatcggaaccttgctgtctcactgtggttgaaaagattcactctggttatgaagctcctcggatcccagtgaataaaagaatcttcaccaccacacacaccccagggtgtgtttttcttgaagtagatgaaaaagcagtgcctttgctgggttacctacctcaggacctgattggaacatcgatcctaagctacctgcaccctgaagatcgttctctgatggttgccatacaccaaaaagttttgaagtatgcagggcatcctccctttgaacattctcccattcgattttgtactcaaaacggagactacatcatactggattccagttggtccagctttgtgaatccctggagccggaagatttctttcatcattggtcggcataaagttcgaacgagcccactaaatgaggatgtttttgctaccaaaattaaaaagatgaacgataatgacaaagacataacagaattacaagaacaaatttacaaacttctcttacagccagttcacgtgagcgtgtccagcggctacgggagcctggggagcagcgggtcgcaggagcagcttgtcagcatcgcctcctccagtgaggccagtgggcaccgtgtggaggagacgaaggcggagcagatgaccttgcagcaggtctatgccagtgtgaacaaaattaaaaatctgggtcagcagctctacattgagtcaatgaccaaatcatcattcaagccagtgacggggacacgcacagaaccgaatggtggtggtgaatgtaagacctttacttccttccaccaaacactgaaaaacaatagtgtgtacactgagccctgtgaggatttgaggaacgatgagcacagcccatcctatcaacagatcaactgtatcgacagtgtcatcagatacctgaagagctacaacattccagctttgaaaagaaagtgtatctcctgtacaaatacaacttcttcctcctcagaagaagacaaacagaaccacaaggcagatgatgtccaagccttacaagctggtttgcaaatcccagccatacctaaatcagaaatgccaacaaatggacggtccatagacacaggaggaggagctccacagatcctgtccacggcgatgctgagcttggggtcgggcataagccaatgcggttacagcagcaccattgtccatgtcccacccccagagacagccagggatgctaccctcttctgtgagccctggaccctgaacatgcagccagcccctttgacctcggaagaatttaaacacgtggggctcacagcggctgttctgtcagcgcacacccagaaggaagagcagaattatgttgataaattccgagaaaagatcctgtcatcaccctacagctcctatcttcagcaagaaagcaggagcaaagctaaatattcatattttcaaggagattctacttccaagcagacgcggtcggccggctgcaggaaagggaagcacaagcggaagaagctgccggagccgccagacagcagcagctcgaacaccggctctggtccccgcaggggagcgcatcagaacgcacagccctgctgcccctccgcggcctcctctccgcacacctcgagcccgaccttcccacctgccgccatggtgcccagccaggccccttacctcgtcccagcttttcccctcccagccgcgacctcacccggaagagaatacgcagcccccggaactgcaccggaaggcctgcatgggctgcccttgtccgagggcttgcagccttacccagctttcccttttccttacttggatacttttatgaccgttttcctgcctgacccccctgtctgtcctctgttgtcgccatcgtttttgccatgtccattcctgggggcgacagcctcttctgcgatatcaccctcaatgtcgtcagcaatgagtccaactctggacccacccccttcagtcaccagccaaaggagagaggaggaaaagtgggaggcacaaagcgaggggcacccgttcattacttcgagaagcagctcacccttgcagttaaacttacttcaggaagagatgcccagaccctctgaatctccagatcagatgagaaggaacacgtgcccacaaactgagtattgtgttacaggcaacaatggcagtgagagcagtcctgctactaccggtgcactgtccacggggtcacctcccagggagaatccatcccatcctactgccagcgctctgtccacaggatcgcctcccatgaagaatccatcccatcctactgccagcgctctgtccacaggatcgcctcccatgaagaatccatcccatcctactgccagcacactgtccatgggattgcctcccagcaggactccatcccatcctactgccactgttctgtccacggggtcacctcccagcgaatccccatccagaactggttcagcagcatcaggaagcagcgacagcagtatataccttactagtagtgtttattcttctaaaatctcccaaaatgggcagcaatctcaggacgtacagaaaaaagaaacatttcctaatgtcgccgaagagcccatctggagaatgatacggcagacacctgagcgcattctcatgacataccaggtacctgagagggttaaagaagttgtactaaaagaagacctggaaaagctagaaagtatgaggcagcagcagccccagttttctcatgggcaaaaggaggagctggctaaggtgtataattggattcaaagccagactgtcactcaagaaatcgacattcaagcctgtgtcacttgtgaaaatgaagattcagctgatggtgcggccacatcctgtggtcaggttctggtagaagacagctgttgagtgactgtgaggatgaaccttcataccctttccaagacgtgttacacagacagacctttttaagtcctggacttttaaatgaccatgaagttatcattgaatgttaagattttttcttcttgattttttaatacacgtaatctttttgaagcagacattgtatacagaatcttacttctctttgttcctgatatattaaaatggccagttaggctctttttgtagttgaattgtcttctaaagagattggatggcctctaaagaggtatgtgtatctttatttcagatgtcacccagagtaaattataattagaagtatagctagaatgagccccaaaccttagcctcatttattttgttctgttacataagtcattttccccttagagtgcttgaagaaatgccacctacaggttgtgtacttttcataatggtttccatgaatgtagtacgttcatacaggcttcattcaacctggcgttcccctccataattaagatgaaacattccggttttctcacaacacattagcacatactgtccattagcatatctgggataaccaggttttgggggttgagttttggccttcatccttgtagatccctttcctattgatttcccaccttccagtgaaattctgaaagtcttatcttaaaaatcgatccgcttaccatgggcctattcttgtaagtttcagttagcatttgcatgtgtaatattaaaatgaaagagcttcttacccagtgctgttgcccttttgagtatttttgtttttaaaataatgattgtaaaatgttttacaagtaatgtaaaagctagtatcattcttacatacttctgtgtttaaattttcattcttaccaaaacagttaactctttctttccaatcaatttatacaaaagaggtcgctccagccctaccacaggtctgactggcactgccttttgtttgcccttgaacagggcagtgttgtggggactgcaaaagagaaaacgtccaggcgagcccagttgtcctcgcccacagggtcctgcaggctccatcagtcaccgctttctatggcgtttgtagttgtgtcttttaagaagtgagtgtgattgtttacttgataaatcagctcactctctggtgctttttagagaagtccctgattccttcttaaacttggaatgatagatgaaattcacacccctgcagatcagaaaaaacaaatagaagaaaatgagggttacagtaacctgttgtctttatataacttgcaacaaactaatttatttttttttcctttttttgtttttggttttttatggttttttaaggaaaatacttttctcctttgaagttttacagctttttgtaaatgcgtcctgataatgattaggaaaatcgaccttttcatccatgatgaccatcctcatagctcagatctcctttcaaagtagtggctttctggatggtaattccatcttaaggtgtcagaactattttcaaatgctgcctttgacagttcttggaattttctgatattaagcagttccatgcaaatattcgtgttttataaatagctctcatagtctgctccatcttgatagttaagtgatttctgaagcgtttgtgtgtgtgttgatcaggttgtgtgatatttttgcttgatagagaatcaaatttgaaacaattaaccagccagtagattgtctgtcagtgaccttctgtagtaataaagtttttgccactgtaaataaaaacagtatccgtagctatcaggatcattgcgcactcatatatgctaagccttctgttctctaatagaagcctttcttttccattgtttctggatatttgtattatccaaatgtgcttatttctttgccttagcacacgttttatggagtacttgttatactaggtttgatttgaaactggtgcttgtcgcagaactgtcagagcatgaggagcgctcctcctgtgggtggacgcattcacgcactcccaggttgcacctgctgctggcggtgagcagggggttcagcagcttgaccgatgccccccgagggggctctccccagcttaaactttgttgtttaaatttgttaactttttatattaatgactattgaaagtggtaataaaaatttatattataggcttcaatgttttcatgaatgttacccaaaaagctgtgttttctttggtcagaggtcaaaatttatgaaaaacaaaatgctgtatgaatggaaatcattttgcaattgagtgacacttcattgtaattcacagtgtaaatttaatccaaactgaaattttgtttcaactgaatttgtaattaactctgaatttgtttttaatcattagtaatatttcagttgggtatctttttaagtaaaaacaacaaataaactctgtacatgtaaaacgtga

SEQ ID NO: 30247 - DNA, 2162 bp, Homo Sapiens
agtccttcagcggccgggttcgcgccgcggtcgccggctgcttacgtgggcgggcctagtgtggggctgagggtgcgggtcgctatggcggtggacatcacgctgctattccgggccagcgtcaagaccgtgaagacgcggaacaaggcgctgggagtggcggtgggcggcggggtcgatggcagccgggacgagctgttccgccggagcccccggcccaagggcgacttctccagccgggcccgcgaagtgatttctcacattggcaaactgagagattttcttctggaacacaggaaagattatattaatgcttatagccataccatgtctgaatatgggaggatgacagacacagaacgagaccagatagaccaggatgcccagatattcatgaggacctgttcagaagcaattcagcaactacgaacagaagctcacaaggagatacattcccagcaagtgaaggagcacaggaccgctgttttggatttcattgaagattacttgaaaagagtatgtaaactttactcagaacagagagccatccgagttaaaagagtggtggataagaaaagattatctaagctggaaccagaaccaaatacaaagacaagagaatccacatcttctgagaaagtttcacagagtccttcaaaagactctgaagaaaaccctgccactgaagaacgtccagaaaaaattttggctgaaacacaacctgaattgggaacgtggggagatggcaaaggcgaagatgagttatccccagaagaaatacaaatgtttgaacaggaaaatcagcgactaattggtgaaatgaacagcttgtttgatgaagtgaggcaaatcgaagggagagtggttgagatttccagactccaagagatattcacggaaaaggttttgcaacaggaagctgagattgacagcattcaccagttagttgtgggggcaactgaaaatatcaaggaaggcaacgaagacataagagaggccattaaaaacaacgctggcttccgcgtgtggatcctcttcttcctcgtgatgtgctccttctccttgctcttcctcgactggtacgacagctagccagggccacgggggcccagcacgagagtcctcatgggcactcacagactgcgtgctttcatgtacttccagtgctggagcatggtatgaccagattttatcacagtgccatttgaagggaaaggagttcagacagacagacgtattccccaaaaagggataccccaggccgatggtgttcagccatttagcagctgaaaaaggaaacagtgcacaccaatgggaggcagcctgcgtagccctcatcaggcaagacagactgaatgcaggagtgggtgattagctgctccttgaacttgaggctgccttggcagcaggggcacagcaggcctcaagagcccctaattgtctcagggttcaaaggaagacactgacctttcccatcccggtagcttcagggaagatcatagttaataacgtctctcaacaaatgattacttctttgtttccttgtggcttcttgtctgtctgagtcaacgaatacacagacttactggattatagaagagaaaattcacatctgccttgttaatctaataaatataattacagccccttaatgtgttgtcaatgagtctaagttgacaaattcagtggcagcccagccacctcctatcaatcaatcagggaagaaatgcaggggagactggggccctcagtgaggggctgcctggcattactcctccaaagactgctgcccccagaacaggcagggggtgtgggagggccagtttcccgccactgggtccaaggagcctttgttcaaaggaagaagtgggccacggaagaacgggcctgcttctctcgtgcctgtgcttctgacctccaggaactgtaaacaggaacacctatgtgtaactgaaggcatgagacatctgtacaggaagcatcccagcgcccacatgggcatgagacagtctgcactgcgcctggtgaaatgcgtgtgtgtacagacagtccactgggcagcacaggtatcctcatgttctttatttgcacagagtgaaatgtcagaagttacatgtaaatgaattcacagtcaataaagtccacgtctacctggaaaaaaa

SEQ ID NO: 30248 - DNA, 2416 bp, Homo Sapiens
tgagtgggcagagctgacccggtgcgggtgggagtcagggcgcccggaaaacccggctctgggtagcagaccccgcccgggctggctcggcgccgggccttcgggcttccactcagtctttgaccctcggtcctcgctcagcggcccggcaggccgcacaactgtaaccgctgccccggccgccgcccgctccttctcgggccggcgggcacagagcgcagcgcggcggggccggcggcatggctgtgtcctggaggagctggctcgccaacgaaggggttaaacacctctgcctgttcatctggctctccatgaatgtcctgcttttctggaaaaccttcttgctgtataaccaagggccagagtatcactacctccaccagatgttggggctaggattgtgtctaagcagagcctcagcatctgttcttaacctcaactgcagccttatccttttacccatgtgccgaacactcttggcttacctccgaggatcacagaaggttccaagcaggagaaccaggagattgttggataaaagcagaacattccatattacctgtggtgttactatctgtattttctcaggcgtgcatgtggctgcccatctggtgaatgccctcaacttctcagtgaattacagtgaagactttgttgaactgaatgcagcaagataccgagatgaggatcctagaaaacttctcttcacaactgttcctggcctgacaggggtctgcatggtggtggtgctattcctcatgatcacagcctctacatatgcaataagagtttctaactatgatatcttctggtatactcataacctcttctttgtcttctacatgctgctgacgttgcatgtttcaggagggctgctgaagtatcaaactaatttagatacccaccctcccggctgcatcagtcttaaccgaaccagctctcagaatatttccttaccagagtatttctcagaacattttcatgaacctttccctgaaggattttcaaaaccggcagagtttacccagcacaaatttgtgaagatttgtatggaagagcccagattccaagctaattttccacagacttggctttggatttctggacctttgtgcctgtactgtgccgaaagactttacaggtatatccggagcaataagccagtcaccatcatttcggtcataagtcatccctcagatgtcatggaaatccgaatggtcaaagaaaattttaaagcaagacctggtcagtatattactctacattgtcccagtgtatctgcattagaaaatcatccatttaccctcacaatgtgtccaactgaaaccaaagcaacatttggggttcatcttaaaatagtaggagactggacagaacgatttcgagatttactactgcctccatctagtcaagactccgaaattctgcccttcattcaatctagaaattatcccaagctgtatattgatggtccttttggaagtccatttgaggaatcactgaactatgaggtcagcctctgcgtggctggaggcattggagtaactccatttgcatcaatactcaacaccctgttggatgactggaaaccatacaagcttagaagactatactttatttgggtatgcagagatatccagtccttccgttggtttgcagatttactctgtatgttgcataacaagttttggcaagagaacagacctgactatgtcaacatccagctgtacctcagtcaaacagatgggatacagaagataattggagaaaaatatcatgcactgaattcaagactgtttataggacgtcctcggtggaaacttttgtttgatgaaatagcaaaatataacagaggaaaaacagttggtgttttctgttgtggacccaattcactatccaagactcttcataaactgagtaaccagaacaactcatatgggacaagatttgaatacaataaagagtctttcagctgaaaacttttgccatgaagcaggactctaaagaaggaatgagtgcaatttctaagactttgaaactcagcggaatcaatcagctgtgttatgccaaagaatagtaaggttttcttatttatgattatttaaaatggaaatgtgagaatgtggcaagatgaccgtcacattacatgtttaatctggaaaccaaagagaccctgaagaatatttgatgtgatgattcacttttcagttctcaaattaaaagaaaactgttagatgcacactgttgattttcatggtggattcaagaactccctagtgaggagctgaacttgctcaatctaaggctgattgtcgtgttcctctttaaattgtttttggttgaacaaatgcaagattgaacaaaattaaaaattcattgaagctgaaaaaaaaaaaaaaaaaaaaaaaaaaaaaaa

SEQ ID NO: 30249 - DNA, 6334 bp, Homo Sapiens
ttctgtgaacatttggaattctgtattcaaatctattttgaccattcccaagtgattttgaaggtctttggcatgtcataatttgttattttgtcaaggccagtgtttgggtgtgagagtggtgcacagggcaggagtgtgtaactttgttaggaagtgagcctagccacaccctcctgagtcactggttctttactatcctggggtaggcaatatcttttgttcagctgataaaagctttgtcattgtgaagattggctcccaatgataggaaactgctggtgatgaaaataaaggggtcttaaagattattctcagccagaaaaaataagtgttagacaaattaaatggaaaataattaatattttagtagtctttacaatttggaggtctaaggctctgtcagcatgggttctttaaggtcaaggatctaggatacacatgcacaggaaaaaagactggaagtatgctaagcagtgactatctctgaatgattgtgaaaaaatttaggatgaataagcagaaaaaaacaataaatgacaaaatataacaatggagttttcttgacaatgaaattctcttaaacttaaatctctttaattaggcaggtaaactattttatcatcttcgtttgacctggcccttcttttcaatgttaacagaagccatgcagtgacacccgctaagacttgttggtagccatgtcggagccccacagggtccagttcacctctctcccaggttccctgaatcctgcgtttttgaagaagtcccggaaggaggaggctggggcaggagaacagcatcaggactgtgagccggctgcagcagctgttcggattacactcaccctctttgaaccagatcacaaacgctgcccagagttcttctacccagagctggtgaagaatatccgagggaaggtaaaaggccttcagcctggagataagaagaaagatctgtcagatcctttcaatgacgaagaaaaggaaaggcataaagtagaggcccttgcccgaaaatttgaagaaaaatacggtggaaagaaacgtagaaaagaccgaatacaggacttgatcgatatggggtatggttatgatgaatccgactccttcatcgataactctgaggcgtatgatgagcttgttcctgcttctttgactacgaagtatggaggattttacattaactcgggaaccctgcagtttagacaagcatcagagtctgaagatgacttcattaaagaaaagaagaaaaaatctccaaagaagcggaagttgaaggaaggtggtgagaagataaagaagaagaaaaaagatgacacttatgacaaggagaagaaatcgaaaaagtccaagttttccaaagccggcttcacagccctcaatgccagtaaggagaagaagaagaagaaatattctggggctttaagcgttaaagagatgctaaagaaatttcagaaagagaaagaggctcagaaaaaaagggaggaggagcataagcctgttgcggtcccatcagcggaagttcagggcctgcgggaactggagggtgcctctgaccccttgctctcactctttggctctacttctgacaacgacttgctccaggcggccactgccatggactcgctgacggatttggacttggagcatctgctcagtgagtctccagaaggaagtcccttccgagatatggatgatggaagtgattcccttggggtgggattggaccaggaattcaggcagccctcttctctccccgaaggcctgccagcacccctggagaagcgcgttaaggagctggctcaggctgccagagctgctgagggggagagcagacagaagttcttcacccaggatattaatggaatcctattagacatagaggcgcagactcgggagctgagcagtcaggtccgctctggggtgtatgcctatcttgcgtcattcctgccctgcagcaaggatgccctgctcaagcgtgctcggaaacttcacctctatgaacaggggggccgtctgaaggagcctctccagaagctcaaggaagccattggcagggcgatgccagagcagatggccaagtaccaggacgaatgccaggcacacacgcaggcaaaggttgccaagatgctggaagaggagaaagacaaggagcagagggaccggatttgttcggatgaggaagaagatgaagaaaaagggggcaggaggataatgggacctcggaagaagttccaatggaatgatgagatcagggagctactgtgccaggtggtgaagatcaaactggagagccaggacctggagaggaacaacaaagcccaggcttgggaggactgtgtgaagggctttctggatgcggaagtcaagcccctctggcccaaaggctggatgcaggccagaactctgtttaaggagagcagacgaggccatgggcacctgacttcaatcctggccaagaagaaagttatggccccttctaaaatcaaggtgaaggagtcgtctacgaagcctgataaaaaggtttctgtcccatcaggacagattggtggccccattgctttgccctcagatcaccaaacaggaggcctgagtattggggcctcgagcagggagctcccatcccaggcatcgggcggccttgctaaccctcctcctgtcaacctggaggactcattggatgaagacttgatccgcaatccagcctcctcggtggaagccgtgtccaaggaattggctgcattgaatagcagagcagctgggaactctgaattcacactgcctgcaccctcaaaagcacctgcagaaaaagttggaggcgttttatgtacagaagaaaaaaggaacttggcgaagcctagtccttctgctccaccaccagctagctctctgcagtcacccctcaattttctggcagaacaggctctggcactggggcagtcctctcaggagaaaaaaccagagagttctggctacaaagagctgtcctgccaggctcccctcaataagggcctgccagaagtacatcagtccaaagctaagcaccacagcttgccacggacgtctcacgggccccaagtggcagttcctgtgcctggcccccaggtcaaagtctttcatgccggcactcagcagcagaaaaacttcacgcccccatctccatttgccaataagctccaaggcccaaaggcttctcccacacagtgtcatcgttccctcctgcagttagtgaagacagcggccaaaggccagggcttccatccctctgcaccagccacctcaggaggcctgtcagcctccagcagcagctctcacaagaccccagcctcgtcctcttctgccctgagccatccagcaaagccacattcagtcagctctgcaggctcatcttacaagaataatccctttgccagctcaatctccaaacatggggtttcttctggcagctcttcctcgggaggaacaccagtccagagttctgtttctgggagcctggtccctggcatacagcctccctccgtgggacagcccaccagccgacccgtcccaagttcagcagggaaaaaaatgcctgtttcccagaagttgactctggtagcccctccaggcggtccaaacggagattccagtggtgggacccagggagtggcaaagttgctgacctcgccgtccctaaagccctctgcagttagtagtgtgacatcgtctacctccttgtcaaaaggagcgagtgggactgtgctgctggccggctcctctttgatggcttcaccctacaaatccagcagcccaaagctgtctggggccatgagctcgaactccttgggaattataacccctgtccctattcctgtccatgtgctctccttcagcgctgactcctctgccaaagcaggggtctccaaggatgccatcgtcacaggccctgcccccgggtccttccaccatggccttggccacagtcttctggctggcttgcactccagcccgccccatgcagcgcctctcccacacgctgcggtgcccacccatatcccgcagagtctgccaggtgcttctcagcttcatgggaaagggcctgctgtaccacggaaattgtgaccgcttcagaggcaaggcttgccacttgggtctgggtggaatcagaacgtgcaggtctcccaggatgtacactcactgcgccctttctgctgcttggtgttcttctggaggagcgtgagttctcagcggagcgcttctcggcacttctgatgtgcctcccatggagggagccgggcccttgctgctcaggaggtgcagactgccccgtgctctggcttgcagctctgtcgctagacggttgttagaggggcagctctaggctggggcttgcgctgggccgtggtgggaggcacagtgtttacaggctctggtggcagagcagttggcacacctgtgggtgaatctgcctgatcccctggcatttggtcagagtacctcagagcaccccactgctcaggggctccttctggctgcagtaagctccctggatggtcacagtgccgccccatccccaggctgtgtgctcaaagcggacaaaactcaggccagagccacagctgggagacctgcactgtccctgcgaaatactaagaacacctagggtgtgctcactgtgggggccagtttctcctcggaacatgacaatgaagctcttttagagaaaagacctttgtagattcaacaattatgataggatttttacagacacctattttgggctcagttttcatcattaccattaaatgccattggatagaaggggactgttcttcacacatcatattataggaagacataattccagtgcctttatggtggagcagaattcgacaacacatgtccattctgccctctgaatggatctgagacgaagaccttttaaaagatatgtctgtattgaagagaaagccagttttgagttttctacacttgcacatcattatctgtgccgtcctgactagaatgtgtctgggcccccaaattccatgtccctttatatccatggctcccattttgttttttcccgagttcgtggaggtggactgcatagcccagagcccttcatctctctgagggtcaaggataccagggtcccaagtcacagatagacattccagtttgtattcttaggaatcattcttaggcagtgcggtataatcaggcctctgtgaagtgtctgccgggtagaaataggccttgaagtcctggggctctccaggcagtggggttatgtgtcgactgaagggtgatgtgcagaagatcttggagagtggatcagagagactaggacagttactgcagagctcctaagtcaccactcaaccagtggctgtttcacaaggatttgagggcacttgcctgtcttgtgaggtctgtgccacaaggtgagtctgaactgactgctccagctaagtgatcaggcacgttgagagtatatggtgtcctcagcacatacacctgtgggaaaacggaccgctcttggctcctgactcccagggtacagcgcccagtaactcatccttcattcagaggtttgctggccttcccggtttcccaaggagcaagacctctgtctgccctttggcccggcctctgctctgactcctttttttacataagaaccaatctgtgtttcacattgggctaagtggattccttatccctttgttatatatattttttgcaacttggatttccagtttgtttacagagtagtcttaggtagtagcaaaagagccaaagaagagatttgtattgctgagctcaaagccaagcagaggccggcagtggaggctgagcagggactctccaggcttctctgcccataaacacccgggtcccaggccctccttcctttccctttggtgctccctcctccccatgtaccattgcgcgtgcagctggagcagaataccctcatttttaggaatctagtgatgcctcttgcctcagggaaacgtttctttgatggggagtttgagatttcttttccttgtttatgctttatttgtggtaatgaaagagcgaatgactgaacagccatggcaaggcagacctacaggcgaggccgcagcagagggtggggcagagcagcctcggggtctgggggctgcaggggtttccctggcgcagcgaaagtctctgagcacttaccgggcgtgaccgtttcttaggtgtgagaggggctgtggcttttgtgcagcgactatgttggtgttaggggtggtgtggagattgttaatcttgtataaagcaattcaataaattgtttcaaggtttccaaaaca

SEQ ID NO: 30250 - DNA, 2009 bp, Homo Sapiens
ccaaccgcgccccccctcccggatggggaaaaaaaaagatgtcagctcctccgctgtagtattgctccttaaaaacccctctctctgaaaatgacatgccctcgcaatgtaactccgaactcgtacgcggagcccttggctgcgcccggcggaggagagcgctatagccggagcgcaggcatgtatatgcagtctgggagtgacttcaattgcggggtgatgaggggctgcgggctcgcgccctcgctctccaagagggacgagggcagcagccccagcctcgccctcaacacctatccgtcctacctctcgcagctggactcctggggcgaccccaaagccgcctatcgcctggaacaacctgttggcaggccgctgtcctcctgctcctacccacctagtgtcaaggaggagaatgtctgctgcatgtacagcgcagagaagcgggcgaaaagtggccccgaggcagctctctactcccaccccttgccggagtcctgccttggggagcacgaggtacccgtgcccagctactaccgcgccagcccgagctactccgcgctggacaagacgccccactgttctggggccaacgacttcgaagcccctttcgagcagcgggccagtctcaacccgcgcgccgaacatctggaatcgcctcagctggggggcaaagtgagtttccctgagacccccaagtccgacagccagacccccagccccaatgaaatcaagacggagcagagcctggcgggccctaaagggagcccctcggagagcgaaaaggagagggccaaagctgccgactccagcccagacacctcggataacgaagcgaaagaggagataaaggcagaaaacaccacaggaaattggctgacagcaaagagcggaaggaagaagaggtgcccctatactaaacaccagacgctggaattggagaaagaatttctgttcaatatgtatttgacgcgagagcgccgcctggagattagcaagaccattaaccttacagacagacaagtcaaaatctggtttcaaaatcgcagaatgaaactcaagaaaatgaaccgagagaatcggatccgggaactgacctccaattttaatttcacctgagagcgcggcctctcctcctcccttcccgctccttcctctccccgcccctcctccctttgtgcctggtgatatatttttttttcctccctgagtataaatgcaatgcgactgcaaaaaaggcaaagacctcagactctccttccaagggacctgtggttcgtgctgcgaagatgcttccacttaaagcatgagaaatggggtgccgggatgtggggtgtggtgtgtgccctcatagatgggggtgggagtgtggctggtgtgtgtgtcaagccctcactcacccacgcactcacacacagcattctgttctccatgcaaagttaagatcgaatccatccgcttgtaggggaaaaaaaggaaaaaaattaaccagagagggtctgtaatctcgcagagcacaggcagaatcgttccttccttgctgcatttcctccttagactaatagacgttttggaaagttcggctagtgttcgtgtgtttgtcgtagcacccagagcctccaccaaaccctctccatgtctttacctcccagtcgctctaagaatctgcttgaagtctcgtatttgtactgctttctgcttttctcccacccctcctagcacccccacatcccccatctagtaacatctcagaaatttcatccagaggaacaaaaaaattaaaaatagaacatagcaaagcaaagacagaatgcccccccccccaaatattgtcctgtccctgtctgggagttgtgttatttaaagatattctgtatgttgtatcttttgcatgtagcttccttaatggagaaaaaaaaacctaataaatttccagaatcataatcctcaaaaaaaaaaaaaaaaaaaaaaaaaaaaaaaaaaaaaaaaaaaaaaaaaaaaaaaaaaaa

SEQ ID NO: 30251 - DNA, 2283 bp, Homo Sapiens
atggaaagcgcctcggaagggcaggaggcgcaccgagaagtggcggggggcgcggcggtagggctgagccccccggctccagccccttttcccctggagccgggggacgccgcgaccgctgccgccagggtgagcggagaggaaggggcagtggcggcggcggcggccggagcggcggcggatcaggtacaactccactcggaacttctgggcaggcaccaccacgccgccgccgccgccgcgcagaccccgctggccttctcgcccgaccacgtcgcctgcgtgtgcgaggcactgcagcaggggggcaacctggaccgcctggcccggttcctgtggtccctgccccagagcgacctgctacgtggcaacgagagcctgctgaaggcgcgggcgctcgtggccttccaccagggcatctaccccgagctctacagcatcctcgagagccacagcttcgagtcggccaaccacccgctgctgcagcagctctggtacaaggcgcgctacaccgaggccgagcgagcccgcggccggccgctgggagccgtagacaagtaccggctgcgcaggaaattccccctgccccgcaccatctgggacggcgaggagacggtgtattgtttcaaggagaagtcgcgcaacgcgctcaaggagctctacaagcagaatcgctacccttcgcccgccgagaagcggcacctggccaagatcaccggcctctccctcacccaggtcagcaactggttcaagaaccgccggcagcgcgacaggaacccctccgagacccagtccaaaagtgagtcagatggcaaccccagcactgaagatgaatccagcaagggacatgaggatttatctcctcacccactctccagttcatctgatggcatcaccaacctcagcctttccagtcatatggagccagtatatatgcaacaaattggaaatgctaagatatcattaagctcttctggagttctgttgaatggaagcttggtacctgcaagtacttcacctgtcttccttaatggaaattcttttattcagggacccagtggagttatccttaatggattaaatgtgggaaatacacaggcagtggcattgaacccaccaaaaatgtcatcaaacattgtgagcaatggtatatccatgactgacatactggggtctacttcccaggacgtgaaggaattcaaagtcctccagagttctgctaactcagcaaccaccacgtcctacagccccagtgtccctgtctcattcccaggcctgatacccagcactgaggtgaaaagagaaggcattcaaacagtggcttcccaagatggagggtctgtagtgacttttactacaccagtgcaaattaaccagtatggcattgtccagatccccaattccggagcaaacagccagttccttaatgggagcattggattctctccactgcagctgccccctgtgtcagtggcagcttcacaaggtaatatctcagtaagctcaagcacttcagatggaagcacatttacaagtgagtctaccacagtccagcaaggaaaggttttcttgagctctcttgctcccagtgcagtggtatacacggttcctaatacaggccagactataggatctgtgaaacaggaaggcttggaaaggagcctggtattttctcagttgatgcctgtcaatcagaatgcacaagtaaatgcaaacctgtcttctgaaaacatctcggggagtggcctgcctccactggcctcctcattagttaatgtatctccaactcacaatttttctctcagtccctctacactactaaatcccactgagctaaaccgcgacattgccgatagccaaccaatgtctgcaccggtggcaagcaaatctactgtgacatctgtcagcaacactaactatgcaactcttcagaactgctcccttattactggtcaagacctattgtcagtccctatgactcaggctgcccttggggaaatagttcctacagctgaagatcaggtaggtcacccctccccagcagtacatcaggattttgtccaagaacatcgtttggttctgcaatcggtagctaacatgaaagagaatttcttatcaaattctgagagcaaagcaacaagtagcttaatgatgctggactctaaatccaagtatgtcttagatggcatggttgatactgtctgtgaagacctggaaacagacaaaaaagagcttgccaagctccagactgtccagctggatgaagatatgcaagacttatga

SEQ ID NO: 30252 - DNA, 3947 bp, Homo Sapiens
ttgggaaacccctacctgtctgtacctgtaggtcttttctctggggtctggaagaagaatccttcaatatcttgccttctggtaatctgagagcagggcgagaaaaggaagatcagagttccacccttaaatctgtaggttttcactcccccactctcctttgcagtcccgtggagtctccatctgagccctttcctagtccaggcatcccgatgttggtggatggcccatctgagcggccagccctgtgcttcttgctgttggctgtggcaatgtctttcttcggctcagctctatccatagatgaaacacgggcgcatctgttgttgaaagaaaagatgatgcggctgggggggcggctggtgctgaataccaaggaggagctggccaatgagaggctcatgacgctcaaaatcgctgagatgaaggaggccatgaggaccctgatattcccacccagcatgcactttttccaggccaagcatctcattgagagaagtcaagtgtttaatattctaaggatgatgccaaaaggggctgccttgcacctccatgacattggcatcgtgactatggactggctggtgaggaatgtcacctacaggcctcactgccacatctgtttcaccccaagggggatcatgcagttcagatttgctcacccaactccccgtccatcagaaaaatgttccaagtggattctgctggaggattatcggaagcgggtgcagaacgtcactgagtttgatgacagcttgctgaggaatttcactctggtgacccagcacccggaggtgatttacacaaaccaaaatgttgtctggtcgaaatttgaaaccatcttcttcaccatctctggtctcatccattacgcaccagtgttcagagactatgtcttccggagcatgcaggagttctacgaggacaacgtgctctacatggagatcagagccaggctgctgccggtgtatgagctcagtggagagcaccatgacgaagagtggtcagtgaagacttaccaggaagtagctcagaagtttgtggaaactcaccctgagtttattggaatcaaaatcatttattcggatcacagatccaaagatgtggctgtcatcgcagaatccatccgaatggccatggggctccgaatcaagttccccacggtggtggcagggtttgacctggtggggcatgaggacactggccactccttgcatgactacaaggaagctctgatgatccccgccaaggatggcgttaagctgccttacttcttccacgccggagaaacagactggcagggtacttccatagacaggaacattctggatgctctgatgctgaacactaccagaatcggccatggatttgctttgagcaaacaccccgcagtcaggacttactcctggaaaaaggacatccccatagaagtctgtcccatctctaaccaggtgctgaaactggtgtctgacttgaggaaccaccctgtagccactctgatggccactgggcaccccatggtgatcagctctgatgacccagctatgtttggtgccaaaggcttgtcctatgatttctatgaggtcttcatgggcattggggggatgaaggctgacctgaggaccctcaaacagctggccatgaactctatcaagtacagtaccctgttggagagtgagaaaaatactttcatggaaatctggaagaagagatgggataagttcatagcagatgtggctacaaagtgaggagaagctagccagccctctacaagctgtcttcttgcacacgctgtcacttcctctcactcgttcttgaatcagctccatgtgcccatgaaatcaatggcctctgtatggagcgaccctgtgagaagcacttggctggctgagcaaattcatcctctggaaatattctctctcagccacagtgacattgaccctcttggttttctcctgtctctggccatttcttccagtttccctatttcagagtcttctcctctctctgatctctgtgctgtttcctcaggactcagtcctgggctctcttctattctggtctctttatttttttatttttgtattttttcgagatggagttttgctcttgttgcccaggctggagtacaatggtgcgatctcagctcagtgcaacctccgccacccgggttcaggcaattctcttgcatcagcctcgcgagtagttggaattataggcatgtgccaccacacccagctgatttttgcatttttagtagagacaggttttcaccatgttggcgaggctggtatccaactcttgacctcaggtgatccactcgccccttggctcccaaagtgctggaattacaggcattagccaccatgcctggcctattctggtctctttaactctctcctctttatttctcttctctctctgtacacttttcctgggtggtctcatccattcctttgctttttcataccatttatttgttaatgattcccacatttatttatgcacttggagagctcacaggaatctcagaaactgatgaggtacaattctgaaccctcagtctcttccctttaaacctttctttttctctactttaatttttctaaagagtgtcttgctatgttgcccaggctggtctccaactcaagtgatcctcctgccgcagtctcccgaagtgctgggattactgacatgagccaccacactcagccctttaaacctttccctggcctttcccatagctggtgaaggacacctccatccattccacgcagttgctcaaagcagaaattttcagtgcaagtcttgatgctgcgccgtcccccactccctacatcagaacgcatccctcatctggactccagcggtggcttcttgatgctgcgcggtcccccactccctacatcagaatgcatcccgcatccagactccagcggtggtgctctacctgcacgctgttgccaagtccaagctaccatactcctgcctgagctatgacaacagcctcctcactgatctcccctttcttccctttgcctcctccagctcatttttcacagtgtagaatgacattttgtttgtttgttttgttttgtttgagatggagtctcgctctgttgcccagggtggagtgcagcggtgcgatctcggctcactgcaacctccacctcccgggttcaagcggattctcgtgcctcagcctcctgagtagctgggattacaggcatgcaccaccatgcccggataatttttgtatttttagtagagatggggtttcactatgttggccaggctggtctcgaacacctgacctcgtggtccacccgcctcggcctcccaaagcactgggattacaggcgtgagccacccggcctggcctagaatgacttttaaaagatcaaattaaatcaggtcactcctttgcttacaacgcagtgcgtttagaggtacaccccatgtctccacagggcatacagcatccgatttaatctggatccattccggcgccttcctctcccagtcacccagagggccccaaccccggcggccctttcttcctcaaatgtcctcggctctataccgtgcctgggtcttttctctttctctctgcctggaagattccttctttccccttttgtcttgcccactcctgtttacccttcaagtttcaagttcatgtcactgtctcagagaggttttcctgtgctcgccctgtttctctcaggaagccttgctcttttccatcatgcctctaatcacagcttataatcggatatttatttctgtgtctacagtcttgccctgccagactgtatgccccatgtgggcaggcgctcatgattgtttctgattgtttcacgcatgctgctaacccagagcctgggcccaaagctagttagtactcaataaacaatgcattgaatgcattgaaaaaaaaaaaaaaa

SEQ ID NO: 30253 - DNA, 2358 bp, Homo Sapiens
ggcctcttaggctaggtcagaaaggaggcggaactcggtgatctgactggcggtttcccggccggactgagaaggggagcgcgctgcgcgtcgcaggagtaacctacttggtctcctgctttcgcgacatggccttcaattttggggctccctcgggcacctccggtaccgctgcagccaccgcggcccccgcgggtgggtttggaggatttgggacaacatctacaactgcaggttctgcattcagcttttctgccccaactaacacaggcactactggactctttggtggtactcagaacaaaggttttggatttggtactggttttggcacaacaacgggaactagtactggtttaggtactggtttgggaactggactgggatttggaggatttaatacacagcagcagcagcaaactacattaggtggtctcttcagtcagcctacacaagctcctacccagtccaaccagctgataaatactgcgagtgctctttctgctccaacgctgttgggagatgagagagatgctattttggcaaaatggaatcaactgcaggccttttggggaacaggaaaagggtatttcaacaataatattccgccagtggaattcacacaagaaaatcccttttgccgatttaaggcagtaggttatagttgcatgcccagtaataaagatgaagatgggctagtggttttagttttcaacaaaaaagaaacagagattcgaagccaacaacaacagttggtagaatcattgcataaagttttgggaggaaaccagacccttactgtaaatgtagagggcactaaaacattgccagatgatcagacagaagttgttatttatgttgttgagcgttcgccaaatggtacttcaagaagagttccagctacaacgctatatgcccattttgaacaagccaatataaaaacacaattgcagcaacttggtgtaaccctttctatgactagaacagaactttctcctgcacagatcaaacagcttttacagaatcctcctgctggtgttgatcctattatctgggaacaggccaaggtagataaccctgattctgaaaagttaattcctgtaccaatggtgggttttaaggaacttctccgaagactgaaggttcaagatcagatgactaagcagcatcaaaccagattagatatcatatctgaagatattagtgagctacaaaagaatcaaactacatctgtagccaaaattgcacaatacaagaggaaactcatggatctttcccatagaactttacaggtcctaatcaaacaggaaattcaaaggaagagtggttatgccattcaggctgatgaagagcagttgcgagttcagctggatacgattcagggtgaactaaatgcacctactcagttcaagggccgactaaatgaattgatgtctcaaatcaggatgcagaatcattttggagcagtcagatctgaagaaaggtattacatagatgcagatctgttacgagaaatcaagcagcatttgaaacaacaacaggaaggccttagccatttgattagcatcattaaagacgatctagaagatataaagctggtcgaacatggattgaatgaaaccatccacatcagaggtggtgtctttagttgacagttcacaaacttgtgtaaaggtttgtgaaatgcatcttcttactgcatcagaccttccttaagaatgaaaccgaccacatggagggaaaaagaaaacaattctttcttggattggttttttgagaagtttactgacaaattactgttcatcaaatctgaaatagtcacctcacagctcttcaaagaaaacctttgaaagatttatatctaaaagctgtatttactttaaaagaagtgcataattaccaaaattgtatgtactattgtacatttttacaacagcattttcttaaacataatctgtgtttaatgattattgtccattgagcctgtactctgctttccataccaagtaaatatgaaataatctactttgcacataacagaacaaactataattacttggctgttggagatttgtacttgagtataaatgtacaccagtttttgtatttgtgaactcatctgtgggaggagtaaagaaaatccaaaagcatttaatgttttgtttttgttctataaagatatgaaaatgtatttttatattattttacttatttggaatttacagagcacacctaagcaattaggatataacaaaactacttaaccatttttgcaaccattttgttttttaagcctttttatttctaaaaagatgaaaacttataaataaattcttaatttgtaattacttttaaaaa

SEQ ID NO: 30254 - DNA, 2065 bp, Homo Sapiens
cgcgccgcccgcccgccgccgctggagctagagatggatttgcagccgctgcaagtgtgtggaagggccgtgttcgtgttggcaaagaaggtcggctgctgagccagggcgtgtctcccggaggcctgtgggctgccaggatccccacctctctgcaatgggctgcccaggctgaccagccggttcctgctggaagctcctggtctgatctggggataccatgtccaagccccccgacctcctgctgcggctgctccggggcgccccaaggcagcgggtctgcaccctgttcatcatcggcttcaagttcacgtttttcgtctccatcatgatctactggcacgttgtgggagagcccaaggagaaagggcagctctataacctgccagcagagatcccctgccccaccttgacaccccccaccccaccctcccacggccccactccaggcaacatcttcttcctggagacttcagaccggaccaaccccaacttcctgttcatgtgctcggtggagtcggccgccagaactcaccccgaatcccacgtgctggtcctgatgaaagggcttccgggtggcaacgcctctctgccccggcacctgggcatctcacttctgagctgcttcccgaatgtccagatgctcccgctggacctgcgggagctgttccgggacacacccctggccgactggtacgcggccgtgcaggggcgctgggagccctacctgctgcccgtgctctccgacgcctccaggatcgcactcatgtggaagttcggcggcatctacctggacacggacttcattgttctcaagaacctgcggaacctgaccaacgtgctgggcacccagtcccgctacgtcctcaacggcgcgttcctggccttcgagcgccggcacgagttcatggcgctgtgcatgcgggacttcgtggaccactacaacggctggatctggggtcaccagggcccgcagctgctcacgcgggtcttcaagaagtggtgttccatccgcagcctggccgagagccgcgcctgccgcggcgtcaccaccctgccccctgaggccttctaccccatcccctggcaggactggaagaagtactttgaggacatcaaccccgaggagctgccgcggctgctcagtgccacctatgctgtccacgtgtggaacaagaagagccagggcacgcggttcgaggccacgtccagggcactgctggcccagctgcatgcccgctactgccccacgacgcacgaggccatgaaaatgtacttgtgaggggcccgccaggtcacctccccaacctgctcctgatggggcactgggccgcccttcccggggaggcaagattgagggcccgggagagggaggcccgagctgccaccgggcttaggcaggctgttgaggagctgtgggagcaggcccagtgggaggctgtggacaccccgaggacagtgtcctgtctcgaggcagggctgacacatggtgccatagccagcggagggcgctcagtgagtgccccgggccttctagacaacaggcaggaaggatgaacctcagggcacccccaggtggtgcggaaagccaggcagttgggacagaggtgcccacgagggcagaggccggtgctaaggggatggggaagaagggacaagattcccagagaggagaggaggctgttggtaggaaagtggcagggctgggggagacccagccccaagggtccggggcggaggatgctttgttcttttctggttttggttcctctttcgcggggggtgggggaggtcaacagggactgagtggggcagaggcccagaagtgccagcctggggagccgtttgggggcagccccttctgcccaccccatccttcttcctctccagagatgccaggggggcgtgtatgctctaccccttccctcagacaggggctgggtggggaggctctttaggctcaggagaagcattttaaagaaacccccaccctgccgcccgcattataaacacaggagaataatcaatagaataaaagtgaccgactgtcaaaaaaaaaaaaaaa

SEQ ID NO: 30255 - DNA, 5041 bp, Homo Sapiens
aaaatggcggctgccactgtggggcttctgccggccggtagtccctggcgctgctgacccagcatcggcttttctacgtcttgaacctggattcgcctaggggttgggaagggctgtggacggcgttgggggaggcctgacgagattaataaagaactcttcagaattcctggtgtttcatcatatatacgactaagatatcaactcttctagcttgctgtttctggaccaaaaaaaatgacgtctattatcaaattaactaccctttctggggtccaagaagaatctgccctttgctatcttctccaagttgatgagtttagatttttattggactgtggctgggatgagcacttttctatggatattattgattccctgaggaagcatgttcaccagattgatgcagtgctgttgtctcaccctgatcctctccaccttggtgccctcccgtatgctgtcggaaagttgggtctgaactgtgctatctatgcaaccattcctgtttataaaatgggacagatgttcatgtatgatctttatcagtctcgacacaatacagaagattttacactctttacattagatgatgtggatgcagcctttgataaaatacagcagctaaaattctctcagattgtgaatttgaaaggtaaaggacatggcctgtctatcacacctctgccagctggtcatatgataggtggaacaatatggaaaatagtcaaagatggagaagaagaaattgtttatgcagttgacttcaaccacaagagggagatccatttaaatggatgttccctggaaatgctaagcaggccttccctacttatcacagattcattcaatgctacatatgtacagcctagaagaaaacagagagatgagcagcttctgacaaatgtcctggaaacacttcgaggtgatggaaatgtgttaatagcagtggacacagcaggcagagttttggaacttgctcaacttcttgatcagatttggaggactaaagatgcaggattgggtgtttactcattggcactcctaaataatgtcagttacaatgtggtggagttttctaagtcccaggtagaatggatgagtgataaattgatgagatgttttgaagacaaaagaaataatccgtttcagtttcgccatctctctttatgtcatggtctttctgacttggcccgtgtacctagccctaaagttgtacttgccagccaacctgacctggaatgcggattttcaagggatctctttattcagtggtgtcaggaccctaaaaactcaatcattctaacctacagaactactcctgggactttagcacgtttcctaattgataatccttctgaaaaaattacagaaatagagttgaggaaacgtgtgaagcttgaagggaaagaacttgaagaatacttggaaaaagagaaactaaagaaagaagctgccaaaaagcttgagcagtcaaaagaggcagatatagattccagtgatgagagtgatattgaggaagatattgaccagccatcagctcataagacgaagcatgacttgatgatgaaaggtgaaggcagtcgtaaaggaagttttttcaaacaggcaaaaaagtcctatcctatgtttcctgccccagaagaaagaattaaatgggatgaatatggagagattatcaaaccagaggatttcttagtgccagagcttcaagctactgaagaagaaaaaagcaaattagaatctggtttgacaaatggagatgaacctatggatcaggatttatctgatgttcctactaaatgtatttctacaacagagtctattgaaataaaagcccgggttacctacatagactatgaaggacgctctgatggggattccattaaaaaaatcattaatcagatgaaaccacgacagttgatcatcgtccatggcccaccagaggccagtcaagatctggcagagtgctgtcgcgcctttggtgggaaagatattaaagtgtacatgccaaagctacatgaaacagttgatgccactagtgaaactcacatctaccaggtgaggttaaaagactcacttgtcagctctcttcagttttgtaaggcaaaagatgctgaattagcttggatagatggtgtcttagatatgagagtttccaaagtggacacaggggttattttagaagaaggagaactaaaggatgatggagaagactcagagatgcaagtggaagctccctcagattctagcgttatagcacaacaaaaggccatgaaaagtctgttcggagatgatgaaaaagaaacaggtgaagaaagtgagatcattcctactttggaacccttgccacctcatgaggttcctggacatcagtcagtttttatgaatgaaccaaggctgtcagacttcaagcaagttctcttacgggaggggattcaagctgaatttgtaggaggtgtacttgtttgcaacaatcaagtagcagtccgcagaacggaaactggacgcattggattagaaggctgcctttgtcaagatttttataggataagagaccttttatatgaacaatatgccattgtataaaggacatgatgtcaagaagtatctgcttgacctttctaagaaaaagggattcttatcttactctgagcttttgatgttttgttttgtaacatacaaaaagaatctgccagaaaaacttacatgtatcagatttttaaaaatataaatagagaacattttgcaaatgctcaaatgagcattctatcttttggctttcagagtgatagagctcctaacaggtgtacaggcccaagagttgaaggtgattggttttctttacagactccttgttctctagaagggctttttacttgaataaaacaatgcaacttagcaaaccaatttatggccttagagaaacatttttgcatgagttcttacaaactgtttgttatattttctggaatgataagtgagaattatttagaaaagacatgctccaaaaaaaaaacaaaactgataaaacagtttttcgaaacttacttttaaaagcatacgtgctatgactctctccagtttgaatatgcaattgttttcacaggcaggatgtctgttttctgcctgtatttcccagtgatttactctagggtaaggtagtacacatttggttcagaaattaatttttatttctcctatatcttgttttatcaagattttgttgtggcatttcaatgtaaattataacaccatcatttgagtatacataattcaaaagaactacttgatgcagtatagtcttaagggttctgcatacattttagaaacatcttagccgtaagttaggtcctgtgttaaactgtttagtgctctgtttttaagaaaacaaatgttgaacctcacacttttatgtggtgacagtgtaatttaattaaaaggtgtaaatgttttcatctcttaggcttgctgtctcctaaggtcacccaagcagtggttggattttatacacattactactaaaataatactgaagttggataaggttatcctttctgtatttgcgtctttcttgtgactaaccaccctgatatagtattaaccactgtgttcaagagtaaaaacaatatatgcaattttcattgaacttaaagagtgaaaaccatgtaaactattgaaactattgtaatccattaatgcttttttagaatggcagaccttgatgtttatttctcaaatggttaagccctcttctttactcttaatttttttttgagacagagtcacccaggctggagtgcagtggtgagattttggctcactataacctcttcctccagggttcaagtgattctcccacctcagcctcccaagtagctgggactacgggcacatgccactgcacctggctaatttttatatttttggtagagacagggtttcaccatgttggccaggctggtctcaaactcctgacctcaagcgatccacccacctaggcctcccaaagtgctgggattacaggcatgaatcaccacaactagcctacccttagatttttggaaggatcgatcttatttaactatgtgtggaacaacccagtaatatcagactcgaattactatttcattctatttcaaatgcttataaagctactattgtagattatagtgttaatgcaaagtttacagacttttgatatggaaaaccagataaaacaatgttacaaaaggcaaatataaagagtatgttttctttttagtgctttggaaaaatttcacttaaactcttattactgtatagattaagccctataatgctatttatattccaggggaacgaaaatctgaatttgttttatgatttaaagcatctggtttgcatattgtattgtaatactgatacagtttggctgtgtccccaccaaattgaattgtgttaatagttcccataatccctacgtgttgtgggagggacccagtgggcagtaatttaatcatggtggtggttaccctcatgctgttcttgtgatggtgagttctcatgagatctgatgggtgtttttttttgttttgttttttgttttttgagatggagttttgctcttgttgcccagactggagtgcaatggcacacgatctcggctcaccgcaacctctgcctcctgggttcaagcgattctcctgcctcagcatctcgagtagctgggattacaggcatgcaccaccacgcccagctaattttgtatttttagtagagacggggtttctccatgttggttaggctggcctcaaactcccgacctcaggtgatccgcccgcctgggcctcccaaagtgctgggattacaggcgtgagccactgctcctggcccaagatctgatggttttgtaagggaattttccccctttgcttggcacttcttcctgctgccatgtgaagaaggatgtgtttgcttccccttccaccatgattgtaagtttcatgaggcctccccagcctgtgggactgtgagtcaattaaacgtgtttactttataaatt

SEQ ID NO: 30256 - DNA, 2496 bp, Homo Sapiens
gatcgggggcgcgaggcctcacggagctcgtagtttcccggacgggccgctcccggcctcgcggcctcgcctccccacactacaactcccacggggcagcgggcgcggctccccgtacccaccagctggccgggcagggcagccacttcgcggtcgggcccgccggctgcgggcacccgcgcgacgggcgggaagatggcggacgtggtcgtgggtaaagacaagggcggggagcagcggctcatctcgctgcctctatcccgcatccgggtcatcatgaagagctcccccgaggtgtccagcatcaaccaggaggcgttggtgctcacggccaaggccacggagctctttgttcaatgcctagccacctattcctacagacacggcagtggaaaggaaaagaaagtactgacttacagtgatttagcaaacactgcacagcaatcagaaacttttcagtttcttgcagatatattaccaaagaagattttagctagtaaatacctgaaaatgcttaaagaggaaaagagggaagaagatgaggagaatgacaatgataatgaaagtgaccatgatgaagctgactcctaaaccaaaagtgctttaaaaaccagcctggcgaggacagccctggacccactccactgtctctaagtaaacacagcactgcccgcttttagcgtcttcacttcttcacagagttccagtgcgtggtattctttcgaggtattctttccaggccgagattgagcacctcatgtacctacgccacagacagccagagggaaagcgacccagacagcagcccctcctcgacaggcccaccctgcagctcaggcaccaagaaaacagccgatactggcagccattgcagctccaaactgcagaggcaaggccaattttaacttttcaatttacagtcgattttgaagagcttctacatatcggttatgtaaattcatatatgtatttttggaatcagttcttataaacagctcgattcagttttagctaaatttatagtttaggtagtatgttacatttgaatttttgtcttaagaaaagttgactgttcagatatttttctactgtaaagaaatatacttttctattaaagatctgtacatatttttacagtaaaatgctttatggaactagttttagagccctctatggctttaaggccttgcttactgcctgcaaattttgagaaatttaaaaataagcattctaacacttttattcccacagaaaaattccaagtcaaattatcaaatcaaacacaaaaataagtcttacctcttgtataagcatgttgtactaaaaaaaaattttgaaacattttgtatattggagatctctctcatcttactgttctttgctttaaattcctggcacttctttttactgtctataagagaaaacctatcataagcccaatttttttttttccacttagggtaaatgtttggctcttctcatttcattatcttttttttttttttttaaagacagattctcactcagttgcccaggctggattgcggtggcgctgtctcagctcactgcaacctccgcctcccaggttcaagtgattctcctgcctcatcctcctgagtagctgggattacaggcgtgtgccaccatgcccaacctatttttgtattttttagtagagacggggttcaccatgttggccaggcttgtctcaaactcctaacctcaactgatccacctgcctcagcctcccaaagtgccgccgggattacaggcgtgagccaccatgcctggccttcattatctcttttttaaaaatgaaaaagtttataatttacattcagtaaaatcaccctttttagtgtctagtctgtgaattttgacaaatgcatggttttgtaaccaatcgataggacagttctgccacccaggacattcccctctgttcctctgttcctctcttctcctgccccctagcaaccactggtgttttctgtccctcttgttcattgacatttattttaaaataaaatattttaaaatctactttttggtgtacagttctgagttttggcaaatgcagtcaagtcactaccaccaccacaattaacagctatatcaccctccagtaaattccctgtggtcagctccttccccaccttttaccgtggcaaccgtcaagctattctctgtccctataccaggtgtcatcaaatttttttctggaaaggcccatgcagtaaatagttcaagctttgtgggcttttatagtctctgttgctgctgctgaactcagctgttgtagcacgaaagcagccaggtaattactagatgaaggaatgcaggtggctgtgtttcaatagagctttatttctgcaaactgaaacttgagttttgtgtaattttcatgtgtcatgaaatactgttttctccaaccatttaataatgtaaatacttgctagcttatgtgccattaaaaaatgacttgatttggcttac

SEQ ID NO: 30257 - DNA, 6039 bp, Homo Sapiens
  misc_feature (1324)..(1324): n is a, c, g, or t
gtcatttaaaagtgtgtggtggctgcggcggcggctgcgcgcgtggggcccggggcgcggggcgaggccgtggggacgtgcgagcggggccgcggtggggctcgggggcgcgtccacgtggccagagggcggccacccggagccagcggagggacaggcctgtccccaggcgcggctgccggccatgccctctgtctgcctcctcctgctgctcttccttgccgtggggggggccctgggcaacaggcccttccgtgccttcgtggtgacagacaccacgcttacccacctggctgtgcaccgggtgactggggaggtgttcgtgggcgcagtgaaccgagtctttaagctggcccccaacctgactgagctgcgggcccatgtcacggggcccgtcgaggacaacgctcgctgctacccgccccccagcatgcgcgtgtgtgcccaccgcctggcccccgtggacaacatcaacaagctgctgctcatagactatgcggcccgccgcctggtggcctgcggcagcatctggcagggcatctgccagttcctgcgtctggacgacctcttcaagctgggtgagccgcaccaccgcaaggagcactacctgtcgggggcccaggagcccgactccatggctggtgtcattgtggagcagggccaggggcccagcaagctgtttgtgggcactgctgtcgacggcaagtcggagtacttccccaccttgagctcccgcaagctcatcagtgatgaagacagcgcggacatgttcagtctcgtgtaccaggatgagtttgtgtcctcccagatcaagatcccctcagacacgctgtccttgtaccctgcccttgacatctactacatctacggcttcgtcagcgcctccttcgtgtacttcctgacgctgcagctggacacccagcagacgctgttggacacagcgggcgagaaatttttcacgtccaagatcgtgcgcatgtgcgcgggagactcagagttctactcatacgtggaattccccatcggctgctcctggcgcggcgtggagtaccgcttggtgcagagcgcccacctggccaagcctggcctgctgctggcccaggccctgggcgtgccggctgatgaggacgtcctcttcaccatcttctctcagggccagaagaaccgggccagcccaccccggcagaccatcctctgcctcttcaccctcagcaacatcaatgcccacatccggcgccgcatccagtcctgctatcgtggggagggcactctggctctgccctggctgctgaacaaggagctgccctgcatcaacacccccatncagatcaacggcaacttctgtgggctggtgttgaaccagcctctgggaggcctgcatgtgatcgaggggctgcccctgctggccgacagcaccgacggcatggccagcgtggccgcctacacctaccgccagcactctgtggtcttcattggcacgcgcagcggcagcttgaagaaggtgcgggtcgatggcttccaggatgcccacctgtatgagacagtccccgtggtggatggcagccccatcctccgagacctgctcttcagcccggaccaccggcacatctatctcctgagtgagaagcaggtgagccagctcccggtggagacctgtgagcagtaccagagctgcgcagcctgcctgggctccggggacccgcactgtggttggtgtgtgctgcgacacaggtgctgccgcgaaggggcctgtctgggcgcctctgccccacacggctttgctgaggagctgagcaagtgtgtccaggtgcgggtccggcccaacaatgtgtcagtgacgtcacctggggtgcagctgaccgtcaccctgcacaacgtgccagacctcagtgcgggcgtgagctgcgccttcgaggcggcggcggagaacgaggcggtcctgctgccctccggtgaactgctctgcccctcaccctccctccaggagctccgagctcttaccagggggcatggggccacccgcactgtgcggctgcagcttctctccaaggagacaggcgtgaggtttgccggtgctgactttgtcttctacaactgcagcgtcctccagtcgtgcatgtcctgtgttggcagcccttacccctgccactggtgtaagtaccgccacacgtgtaccagccgcccccacgagtgctccttccaggagggcagggtccacagccctgagggctgccctgagatcctgcccagtggggacctcctgatccccgttggggtcatgcagcctcttaccttgcgggctaagaacctacctcagccgcagtcgggccagaagaactatgagtgcgtggtgcgggtgcaggggcggcagcagcgggtgcctgccgtgcgcttcaacagcagcagtgtgcagtgccagaacgcctcgtactcctatgaaggtgatgagcatggtgacaccgagctggacttctccgtggtctgggatggagacttccccatagacaagcctcccagcttccgagccctcctgtacaagtgctgggcgcagcggcccagctgtggcctctgcctcaaggctgatccccgcttcaactgtggctggtgcatctcagagcacaggtgccagctgcggacccactgcccggccccgaagaccaactggatgcacctgagccagaagggcacccggtgcagccacccccgcatcacgcagatccaccctctcgtggggcccaaggaaggaggcacccgggtcaccatcgtgggtgagaacctgggcctcttgtcccgagaggtgggcctgcgggtggctggcgtgcgttgcaactccattccggccgagtacatcagtgctgagaggatcgtgtgtgagatggaggagtcgctggtgcccagcccgccgccggggcccgtggagctgtgtgtgggtgactgttcagccgacttccgcacgcagtcggagcaggtctacagctttgtgaccccaacgtttgaccaagtgagtcccagccgtggcccggcgtccgggggcacacggcttaccatctcaggcagctctctggatgctggcagcagggtcacagtgactgtragggacagcgagtgccagtttgtaaggagagatgccaaggcgatcgtgtgcatctcacctctctccaccctgggccccagccaggcccccatcacacttgccattgaccgggctaacatctccagccccgggctcatctacacctacactcaggaccccaccgtcacccgccttgagcccacctggagcatcatcaatggaagcactgccatcactgtgagtgggacccacctgctgacggtccaggagccccgggtccgtgccaagtaccgcggcattgagaccaccaatacatgccaagtgatcaacgacactgccatgctgtgtaaggcccccggcatctttcttgggcggccccagcctcgggcgcaaggcgagcaccctgatgagtttggcttcctgctggaccacgtgcaaacggcccgctccctcaaccgctcctcctttacctactaccctgatcccagctttgagccgctggggccctctggcgtgctggacgtcaaaccgggctcccacgtggtgctgaagggcaagaacctgattcccgcggcagccggcagctcccgcctcaactacactgtgctgataggaggccagccgtgttcgctcactgtctcggacacacaactcctgtgcgactcacccagccagactggccggcagcctgtcatggtgctggtgggtggcctggagttctggctgggcaccctgcacatctcggcagagcgggcgctgaccctaccggccatgatggggctggcggcggggggtgggctcctgctgctggccatcacagccgtgctggtggcgtacaagcgcaagactcaggacgcggaccgtaccctcaagcgtctgcagctgcagatggacaacctggagtcccgtgtggccctggagtgcaaggaagcttttgcagagctgcagacggacatcaatgagctgactaaccacatggacgaggtgcagatccccttcctggactaccggacttacgccgtgcgcgtgctcttcccgggcatcgaggcccacccggtgctcaaggagctggatacgccacccaacgtggagaaggccctgcgcctcttcgggcagctgctgcacagccgcgcgttcgtgcttaccttcatccacacgctggaggcccagagcagcttctccatgcgcgaccgcggcaccgtggcctcgctcaccatggtggccctgcagagccggctcgactatgccacggggctgctcaagcaactgctggccgacctcatcgagaagaacctcgagagcaagaaccaccccaagctgctgctacgcaggacagagtcagtggctgagaagatgcttaccaactggttcacgttcctgctgcataagtttctgaaggagtgtgctggggagcctctcttcctgctttactgtgccatcaagcagcagatggagaagggccccattgatgccatcacgggcgaggcacgatactccctgagcgaggacaagctcatccgtcagcagatcgactacaagacactgacccttcactgcgtgtgtccggagaacgagggcagcgcccaggtcccagtgaaggttctcaactgtgacagcatcacccaggccaaagataagctgctggacactgtgtacaagggcattccgtactcccagcgtcccaaagctgaggacatggacctggagtggcgccagggccgcatgactcgcatcatcctccaggatgaggatgtcaccaccaagatcgagtgtgactggaagaggctcaactcactggcccactaccaggtgacagacggttccttggtggcattggtgcccaaacaagtgtctgcctataacatggccaactccttcaccttcacccgctccctcagccgctacgagagcttgctccgcacggccagcagccctgatagcctccgctcacgggcacccatgattacgcctgaccaggagacaggcaccaaattgtggcacctggtgaaaaaccacgaccatgccgaccatcgcgagggggaccgtggcagcaagatggtctccgagatctacctgacacggctgctggccaccaagggcacactgcagaagttcgtggatgacctctttgagacagtgttcagcacagcccaccggggctcggccctgcccctggccatcaagtacatgttcgacttcctggatgagcaggcggaccagcgccagatcagcgaccccgatgtgcgccacacctggaagagcaactgcctgccgctgcgcttctgggtgaatgtgatcaagaacccgcagttcgtgttcgacatccacaagaacagcatcacggatgcctgcctgtcggtggtagcccagaccttcatggactcctgctctacatccgagcaccgcctggggaaggactcgccctccaacaaactgctctacgccaaggacatccccaactacaagagctgggtggagaggtattatcgagacattgcaaagatggcatccatcagcgaccaggacatggatgcctacctggtggagcagtcccgcctccacgccagcgacttcagcgtcctgagtgcgctcaacgagctgtatttctatgtcaccaagtaccgccaggagattctcacggctctggaccgagatgcctcttgtcggaagcataagttgcggcagaaactggaacagatcatcagcctcgtgtccagcgacagctaaggtggtggaatcggtgaggagggggcttctcagtcctgtgccgtcctcccatccaggggagtggctggctcaagcctgggtccccgggctgagccctggattgggtatcgtggggcaggtcaccctggccacgatgcccccggcacacccaggcccccttcattagtgccttgctttgggccctgcagggggaggggtgacagggcgagcccccaccccagcagcagcaataccccccc

SEQ ID NO: 30258 - DNA, 1077 bp, Homo Sapiens
atggcggggcaggacgctggctgcggccgtggcggcgacgactactcagaggacgagggcgacagcagcgtgtccagggcggctgtggaggtgttcgggaagctgaaggacctaaactgccccttcctcgagggtctgtatatcacagagccaaagacaattcaggaactgctgtgcagcccctcagagtaccgcttggagatcctagagtggatgtgtacccgggtctggccctcactgcaggacaggttcagctcactgaaaggggtcccaacagaggtgaagatccaagaaatgacgaagctgggccacgagctgatgctgtgtgcgccagatgaccaggagctcctcaagggctgtgcctgcgcccagaagcagctacacttcatggaccagttgctcgataccatccggagcctgaccattgggtgctccagttgctcgagcctgatggagcacttcgaggacaccagggagaagaacgaggccttgctgggggagctcttctctagcccccacctgcagatgctcctgaatccagagtgcgacccgtggcccctggacatgcagcccctcctcaacaagcagagtgatgactggcagtgggccagtgcctctgccaagtccgaggaggaggagaagctggcggagcttgccaggcagctgcaggagagtgctgccaagttgcacgcgcttagaacggagtactttgcacagcatgagcaaggggctgctgcgggcgcagccgacatcagcaccctagaccagaagctgcgtctggtcacttccgacttccaccagctaatcttggcttttctccaagtctacgacgacgagctgggcgagtgctgccagcgcccaggccctgacctccacccgtgcggccccatcatccaggccacgcaccagaatctgacttcctacagccaactgctgcaagtggtcatggcagttgctgacacctctgcgaaggccgtggagaccgtgaagaagcagcaaggcgagcagatctgctggggtggcagcagctccgtcatgagtctagctaccaagatgaatgaactaatggagaaatag

SEQ ID NO: 30259 - DNA, 1901 bp, Homo Sapiens
ccgcggcgagtggagcgggagccgactggaagaagggctctagggagggggctgtggctgctggggtccgaggtggggccgggtacaccagccccatcactgtttgcagagagtcagggaggcggaaaagacacgcgctctaggctcccatcagggcacatggcccgggcccatcccccgcgcgtctccccggctgcggggcgcggggggctgccgggtgcgcttggctgtggcgcggcgcgttggagactttattgcgatgggacgataagaggggcgggggcggggtcctgggggccgaggcggcagcgctttaattaaaacggaaattgcggccccgggccgcgcgggggccggagggttccaagcggccccttagctggaagcgtttctccaggacccccccgcaacccccgccacgcccgggctgccccctcccgccaggccctgccggacccggcgccgtcttctcctccttgtcacccgcggtcgcttcgggcggggatcggtgccaccgagcgcaaagcctgcctcgccccccttccccgtcccccccatctcccaccgcccagtccccggcggcgatgagacagagcggcgcctcccagcccctgctgatcaacatgtacctgccagatcccgtcggagacggtctcttcaaggacgggaagaacccgagctgggggccgctgagccccgcggttcagaaaggcagcggacagatccagctgtggcagtttctgctggagctgctggctgaccgcgcgaacgccggctgcatcgcgtgggagggcggtcacggcgagttcaagctcacggacccggacgaggtggcgcggcggtggggcgagcgcaagagcaagcccaacatgaactacgacaagctgagccgcgccctgcgctactactacgacaagaacatcatgagcaaggtgcatggcaagcgctacgcctaccgcttcgacttccagggcctggcgcaggcctgccagccgccgcccgcgcacgctcatgccgccgccgcagctgctgccgccgccgcggccgcccaggacggcgcgctctacaagctgcccgccggcctcgccccgctgcccttccccggcctctccaaactcaacctcatggccgcctcggccggggtcgcgcccgccggcttctcctactggccgggcccgggccccgccgccaccgctgccgccgccaccgccgcgctctaccccagtcccagcttgcagcccccgcccgggcccttcggggccgtggccgcagcctcgcacttggggggccattaccactagacggggcggtcgggtgcctgcggcctcgcccgcacgcctagagtctcgcccgatcccatcggcatcccggggagggcccgggagcctccgtcaaccgtcctctaatccagagtttactccacctgccgcacttagcagggggacgggaccgaagctccctcaatccttgtctggtactagatttgctcctgtcccaccccgcagtcccctgaggagggcgatgtgcgccctctttcaccttttttcttctaggtctccaggtcccggaggggatttgtggacctctcttgtctccccaccactccagtgcatttccgcctggctcctagaagccccattcaatatcactactctttaacgagtgccaaatcttttcccacttttgctcttccccaaggaactgctcccacctcagcacgtggaggcctctcacggtcctccttcctgggacctgagcaggtttggtgaaagccaccgtcctccgtgacacacggcccccttcctcctgtccccacactcccaggagaaactcccggtgtgtttctgaccctttcagccccattaaagctcctgagctctcaaaaaaaaaaaaaaaaaaaa

SEQ ID NO: 30260 - DNA, 4361 bp, Homo Sapiens
cacatttcttagcttctctgagcctccatttcagcatctgtaaaatgttactacctactttataggttttctgatgaggcttaagtgtggttgtgcatgtgaccatcttagcatagtgtgtggcaatggtaagcactcagtgctgtcagctgtttttaccgctgttattatattactgtgttttcccatgtcattaggtctgtgatccaggcttcagcagacaatccaggctgatgcttttgctgagtgcactaagggatgctggcctggcgggatggtgaactggaagcagaaacgtcatcctctctcttccttcttgccatgcaggtgtggatgtgtgggggccgcatggaggacatcccctgctccagggtgggccatatctacaggaagtatgtgccctacaaggtcccggccggagtcagcctggcccggaaccttaagcgggtggccgaagtgtggatggatgagtacgcagagtacatttaccagcgccggcctgaataccgccacctctccgctggggatgtcgcagtccagaaaaagctccgcagctcccttaactgcaagagtttcaagtggtttatgacgaagatagcctgggacctgcccaaattctacccacccgtggagcccccggctgcagcttggggggagatccgaaatgtgggcacagggctgtgtgcagacacaaagcacggggccttgggctccccactaaggctagagggctgcgtccgaggccgtggggaggctgcctggaacaacatgcaggtattcaccttcacctggagagaggacatccggcctggagacccccagcacaccaagaagttctgctttgatgccatttcccacaccagccctgtcacgctgtacgactgccacagcatgaagggcaaccagctgtggaaataccgcaaagacaagaccctgtaccaccctgtcagtggcagctgcatggactgcagtgaaagtgaccataggatcttcatgaacacctgcaacccatcctctctcacccagcagtggctgtttgaacacaccaactcaacagtcttggaaaaattcaataggaactgagccctcatgtccccttggcaggccccccagggtctggcactcactgcagacttcctctttcaagggaggcagggcccctgtgggcactaggtgtaaaaggtgctggccaaatggttcagggtgaagagggctcttgattcaggggctggggtctgcctggtccttgagcccctgagttgtgggggtagggtgaagagcatatcccacaagaggccccacagggagcagagactgctttaatccctgctgacatcacggaaaagcaacagagccttttcaactttgtcactatgtccccttgaacattatgtgggagaacaccaaggtagcctaggccacccaaaagtgagtcctgcgaggttgcccagccctcagatggctctcctacatgatggtgctttagaaacaaaggtaaaatttgcctgtttggggcagcttttagtatcgatgccactcatctgcagcagaagagaaagaagtcctcttggggctttttagtttctgccgtcctggggggaacattgcagttactgcacagcttctgttctctgtcacaaccccaggtgatttggtccggtcaaaggccatacttggggccctaagagtgttcagtattgaatgctgatcagctgccaggtgaggagtcagaagagggagcccccctagacatttctttgcagctatggacatgcgggatatctccccctgctctctgggtatttgaaatgtcaattttagcactctccaggcacaaggacagcccagcaccagctttacagggcagtgtttcagatggccctgagcccacggaaaaggccaggtagacctccaaactagaaatgctggctgatttgccctgatccatgcttccatttccctgtctctcttccccaggcaattactggcctcaaaagaggaacagaggtgctgcgaggtgctcacctcacagagtctggaggcctccaggatcaactgtgggcaaagtgcctgcctctgacctcatcatggttctagttctcatacagaactccagaatttttaaagaactctataattggattgcaaactaggatgctacataggattctggtattccacatccaatatggatttctagaatgctgtgattaaaggagccagccaggtgtaatacagtcaaggcagcccccagcctagagacaatctgtgaaatccaaagttggtggtgttgggaaagcagggggacatgtgtccctcagctcagcagaggctgtggtacaacatggtccttggtgaagacctgcacccctggaacctcccaccatcatcacaactgtagtctcatttgcagtggagaaaagaacccgacgtcccacagccagatatacacccagctccatgccagcccttcatgtttaccttttgctttgttaattacatgtcagactcctagagggcctccagactaataggaagcatttctgtaaccaacctgccacccactgattcagaaatggaaatcacattccacaatctatggcttccaccagctagcccaggaaatacttgaaatcagcattccaattagtgttgagtctcttgattgtgtcatttaccaattaaataactgagacctaagtctgggaacagagccacgaatctgcctttgagatgctggcagatctcaaggccatcaattattgggggagggagggacaaacactcccaatcatccaccagtcagactgaatgtgtagctggcgaggaattacttccacttctggcccagcacaagccctgctttggccacctgtctgcaagagaggcggcccctgtgcttgcaacgcttacgtgttgatcccagtgtccttttccaaatgagtgctgtagctttagaagtggccctctatagaaagaagtcaaaagatgaggccccttctagaatctaggataacaagagtgttgacagtttgaggagtcgaattgagattcatcatcaaagagcaatgcagcgtcgttaaaataaaaactgtgccttttaaaaagaaaaatgcaaatatagagcaaatccctaaacttgaaccatttcctagtgccttgctagacaaacataaaggggcagggttgtggggaggggaacgtttttggtggtgtgtgcagttcctactggatgagtgtgtgtttcttaatgtctcatttcaagcaggagatgttgggtctggagcaagatctgagactgagatgtcccccaagggtgacaggtcagatttatttcagtcagtgcaagtcacactccaaactaaaggctgggcagtgcgtttagtctgtggcctagaagacctcatcagcccccgagaggaggccttgcattacctcactgggacctgtttgggggccatccctgcggtccaccctctgaacccccagcatgtttgtcctgtttctcaccattgggttaaggggtgccgagcactagctagacttccacatagtcccaccccaagtgggcggcagtgttcctggcatgaccaggattcctgtgaaagcaggagcagcagcaagccgtcccgggcctgcctttcccatcctttggttctcctttccagtctgggttcacaccctgaaaagggatgggtgtgtcctctgagcactctggcatttgtcattgctgagcccatatcagtaggtcctgggacttgacaaagtatgtgggaggggaaggaaggacagaacttgactggctccatttcatggaccaactgatcaattgccagtactaagccactcattgttatggcttcctttttgaaaaccacctgtctcaaggattcaggtttctgctcacatccccagctgatgctcaataaaactcagccaggagcatatggagatgctgacagccaggtaatgggtgagactgtggggtcccttttcctctaaagcctttactctgaggataaggtcacaaagtagggtgtgacttgaaagtatcgtgaccatgtggcccaccagcagcctttccaaaggggaactccagagacatttcataatgcaaacagcactgttgctttaagaacaaggcctttggaggtggctaaacttgcacgcacgtgtgtgaaaagccatcccatcttctgcctccagttggagctttcagctgttaaaacagtcagaaactattgattcttccctttaggaaaaaatgctcaggcagaacggggtacatccacaggaggaatcggacgagaggatgtgacattcggtccaggagagaaagagcagtttctgttaaagatgta

SEQ ID NO: 30261 - DNA, 1888 bp, Homo Sapiens
gccgttttctttcctggtgtcccgtcgcggcttgggacccggcaagatgggcaagaagggcaagaaggagaagaagggccgcggcgcggagaagacggccgccaagatggagaagaaggtgtctaagcgctcgcggaaggaggaggaagacctggaagcgctcatagcccatttccagacactcgatgccaagaggactcagactgtggaacttccgtgccccccaccctcaccaaggttaaatgcctccctctcggttcatcctgagaaagatgagttaatcctttttggaggtgaatatttcaacggccaaaaaacttttttgtataacgagctctatgtctacaataccagaaaggacacctggaccaaagttgacatccccagtccacctccgaggcgctgtgctcaccaggcggtggtagtgcctcaaggtggcggacagctgtgggtctttggaggggagtttgcctctcccaacggagagcagttctaccactacaaggatctctgggtcctgcatttggccaccaagacctgggaacaagtcaaatcaacaggcggtccttcgggtcggagtggacatcggatggtggcctggaagagacaattgatcctgtttggtggcttccatgaaagtacacgggattacatctactacaacgacgtgtatgcctttaatctggacaccttcacatggagcaagctgtccccgtcagggacggggcccacacccagatcaggctgccagatgtccgtcactccccagggcggcatcgtcgtctatgggggctactcgaaacagagagttaagaaagacgtggacaagggcacacggcactcagacatgttcctgctgaagccagaggacggaagagaagacaagtgggtttggactcggatgaacccttcgggggtcaagcccaccccacggtctggcttttccgtggccatggccccgaatcaccagacactgttcttcgggggtgtctgtgacgaggaagaggaggagagcctgtcgggcgagttcttcaacgatctgtacttctacgacgccaccaggaaccgttggtttgagggacagctgaagggacccaagtctgaaaagaagaaacgcaggcggggcagaaaagaggagcccgaaggtggtagcaggccggcgtgtgggggagctggcacccaggggcctgtgcagctggtcaaggaggtggtggccgaggatggcaccgtggtcaccattaagcaggtgctcaccgcgccaggctcggcggggcagccccggtctgaggacgaagacagccttgaggaggccggcagccccgcacctgggccgtgtccacgctccaacgccatgctggctgtgaagcatggggtgctctacgtctatgggggcatgtttgaggccggcgaccgccaggtcaccctcagcgacctgcactgcctggacctgcacaggatggaggcgtggaaggccttggtggagatggacccagaaactcaggagtggctggaggagacggactcggaagaggacagtgaggaggttgagggcgccgagggtggggtcgacgacgaagacagcggagaggagagcggtgcggaggactgagaagagcccctgccaggggcgcctggcaagtgctgtgcccacgtccgcccaggacccagccgtgttgagtgaagctcttggggccagcgtgcgtcctgacgcacaggagagagctgaaggtgggtggcccaggccagggtgtgaactttctcccatggtttagtctctgacgcggcactgggccggaagttcaactgagtgcagtgcaggtggattccctcagcagcctgtgtgttgtgtgaaataaattggacttgaaacaagaaaaaaaaaaaaaaa

SEQ ID NO: 30262 - DNA, 4653 bp, Homo Sapiens
agagcgaagctgaggagtccagcgctcgccgacaggggcctgggctgtcccgagccggaatccagatcttacataagatggaagtctctcacactagatactgaacattaaatagaaaatctatttagtaaaatctaagttgccatggaagaaataccagtaaaagttgctgtaagaattagacctctgctttgcaaagaagctcttcataatcatcaagtttgtgtgagagttattccaaacagccagcaagttatcattgggagagatagagtcttcacttttgattttgtttttggcaaaaattccactcaagatgaagtttataacacatgtataaagcccctagtgttgtcactcattgagggctataatgcaactgtttttgcctatggacaaactggatctgggaagacatacaccattggagggggccatattgcttcagttgtggagggccaaaagggtatcattcctcgagctattcaagaaatatttcaaagcatctctgaacatcctagcattgactttaatgtaaaagtatcttatatagaagtgtacaaggaagacctaagagatcttctagaattggagacatccatgaaggatcttcacatccgagaagatgaaaaaggaaacacagtgattgttggggccaaggaatgccatgtggagagtgcaggtgaagtgatgagtcttttggagatggggaatgcagccagacatacaggtaccactcaaatgaatgagcactccagcagatcacatgcaatttttacaatcagcatttgtcaagttcataaaaatatggaggcagctgaagatggatcatggtattcccctcggcatattgtctcaaagttccactttgtggatttggcaggatcagaaagagtaaccaaaacggggaatactggtgaacggttcaaagaatccattcaaatcaatagtggattgctggctttaggaaatgtaataagcgctcttggggacccacgcaggaagagttcacatattccatatagggatgctaaaattacccggcttctgaaagattctctgggaggcagtgctaagactgtcatgatcacatgtgtcagcccctcctcctcgaattttgatgagtccttaaattctctcaaatatgccaacagagcacggaacattagaaacaaacccactgtaaacttcagccccgagtcagaccgtatagatgaaatggaatttgagattaaattgcttcgagaagctttgcaaagccagcaggctggtgtcagccaaactacccagatcaatcgagaagggagtcctgatacaaataggattcattctcttgaggagcaagtagctcagcttcaaggagaatgtctgggttaccagtgttgtgtagaagaagcctttaccttcctggttgacctaaaagatactgtcagactaaacgaaaagcagcaacacaaactgcaggagtggtttaacatgatccaagaggtcaggaaggctgtcctcacctcatttcgaggaatcggaggcactgcaagtctggaagaaggaccacagcatgttacagttctccagctgaagagagagcttaagaaatgccagtgtgtgcttgctgctgatgaagtagtatttaatcagaaggaactggaggtgaaggaactgaagaatcaagtgcagatgatggtacaggaaaacaaagggcatgctgtatctttgaaagaagcgcaaaaagtgaatagactgcagaatgaaaaaataatagaacaacaacttcttgtggatcaactgagtgaagaactaacaaaacttaacctgtcagtgacttcttcagctaaagaaaattgtggagatgggccagatgccaggatccctgaaaggagaccatatactgtaccatttgatactcatttggggcattatatttatatcccatcaagacaagattccaggaaggtccacacaagtccgcctatgtactctctggatcgaatatttgctggatttcgaacacgaagtcagatgctgttgggtcacatagaagaacaagataaggtcctccactgccaattttctgataacagtgatgatgaagaatcagaaggccaagagaaatctggaactagatgtagaagtcgttcatggattcagaagccagactctgtttgttcccttgttgaattgagtgatactcaggatgaaacacaaaagtcagatttggagaatgaagatttaaagattgattgtctccaggagagtcaagaattgaatttgcaaaaattaaagaattcagaacgcatacttactgaagctaaacaaaaaatgagagaacttacaattaacatcaagatgaaggaagatctgattaaagaattaataaaaacaggtaatgatgccaagtctgtaagcaagcagtattctttgaaagtaacaaagctagagcatgatgcagaacaggcaaaagtcgaactgattgaaacacaaaagcagctacaggagctggaaaacaaagatctttctgatgttgcaatgaaggtaaaattacagaaagagtttcgtaaaaagatggatgctgcaaagctgagagttcaggtcttgcagaagaagcaacaagatagtaagaaactggcatcactgtcaatccaaaatgagaaacgtgctaatgagctagagcagagtgtagatcacatgaaatatcaaaagatacagctacaaagaaaactacgagaagaaaatgaaaaaaggaagcaactggatgcagtaattaagcgggaccagcaaaaaatcaaagaaatacaattaaaaacaggacaggaagaaggtctaaaaccgaaagctgaggaccttgatgcatgtaacttgaaaaggagaaaaggttcgtttggaagtatagaccatctccagaaattggatgagcaaaagaaatggttagatgaagaagtagagaaagttctgaaccaacgccaagaattagaggagctggaagcagacttaaagaaacgggaggccatagtttctaagaaggaggctctgttacaggagaagagtcacctggaaaataagaaattgagatctagtcaggccttaaacacagatagtttgaaaatatcaactcgcctgaacttactggaacaagagttgtctgaaaagaatgtgcagctccagaccagtacagctgaggagaaaacaaagatttcagaacaagttgaagtcctccagaaagaaaaggatcagctccagaaacgcagacacaatgtggatgaaaaacttaaaaatggtagagtgttatcacctgaagaagaacatgttcttttccaacttgaagaagggattgaagctttggaagctgcaattgaatacaggaatgaaagtatccagaatcgccagaagtcacttagagcatcattccataacctctctcgtggtgaagcaaatgtcttggaaaagctagcttgcctgagtcctgttgagattagaactattcttttcagatatttcaataaggtggtgaatttgcgagaagctgaacggaaacaacagttatataatgaagaaatgaaaatgaaagttctggaacgggataatatggttcgtgaattagaatctgcactggaccatctaaaattgcagtgtgaccggagactgaccctccagcaaaaggaacacgaacaaaagatgcagttgctattacatcatttcaaagaacaagatggagaaggcattatggaaactttcaaaacatatgaagataaaatccagcagttggaaaaagatctttatttctataagaaaaccagccgggatcataagaagaaacttaaggaactggtaggggaagcaattcggcggcaactagcaccatcagagtatcaagaggctggagatggagtcctgaagccagaaggaggaggcatgctttcagaagaattaaaatgggcatccagacctgaaagtatgaaattaagtggaagagaaagagaaatggacagttcagcaagcagcttaagaacacagccaaatcctcaaaagctctgggaagatatcccagaattacctccaattcatagttctttagcaccccccagtgggcatatgttaggtaatgagaataaaacagaaacagatgataatcagtttacaaaatctcacagtcgactgtcatcccaaattcaggttgtgggaaatgtgggacgacttcatggtgtcacacctgtaaaactgtgtcgaaaagaattacgtcaaatttccgccttggaactatcattgcgacgttccagtcttggagttggcattggatcaatggctgctgattccatcgaagtatctaggaaaccaagggacttaaaaacttagacattgaataatagaacttttagtagatatgtaaaaagattcctttttctaacctgttaaaaactaaagctcaagttcactacctctttcctcagaataaaggaagaaggggaggaaggaatccctaattcttttatatgctatagatgtgtacatcttctatatatatttggggagttttagtttatattcccatagtaatcaaacatgttttccaatacttgataacatttaaatatttataaatacgcttaaatgtttttccaggcatatttgaagattaaaactagtaatagactaaaa

SEQ ID NO: 30263 - DNA, 3182 bp, Homo Sapiens
ggaggctgagcgggcggcgcgacgcgggggccgacgggggcgccgggtggccgcgccggaagtgccttgcgcggcagaggaagcgcagggacagagcggagcaggccgagccggcggaaagggtctttgctgctgcgcccgggcaggggctgccgcggccccaggtcccgcttcgagacgcggcgcggtccaggcgggaggcgactccctaggaagggacccggggcgggaggaggaagtgaggccgcgcggaaggaaggcggcgagccccggggccccgaggccttggccgcgtcacagcacccacatggcctctggagtgggcgcggccttcgaggaactgcctcacgacggcacgtgtgacgagtgcgagcccgacgaggctccgggggccgaggaagtgtgccgagaatgcggcttctgctactgccgccgccatgccgaggcgcacaggcagaagttcctcagtcaccatctggccgaatacgtccacggctcccaggcctggaccccgccagctgacggagagggggcggggaaggaagaagcggaggtcaaggtggagcaggagagggagatagaaagcgaggcaggggaagagagtgagtcggaggaagagagcgagtcagaggaagagagcgagacagaggaagagagtgaggatgagagcgatgaggagagtgaagaagacagcgaggaagaaatggaggatgagcaagaaagcgaggccgaagaagacaaccaagaagaaggggaatccgaggcggagggagaaactgaggcagaaagtgaatttgacccagaaatagaaatggaagcagagagagtggccaagaggaagtgtccggaccatgggcttgatttgagtacctattgccaggaagataggcagctcatctgtgtcctgtgtccagtcattggggctcaccagggccaccaactctccaccctagacgaagcctttgaagaattaagaagcaaagactcaggtggactgaaggccgctatgatcgaattggtggaaaggttgaagttcaagagctcagaccctaaagtaactcgggaccaaatgaagatgtttatacagcaggaatttaagaaagttcagaaagtgattgctgatgaggagcagaaggcccttcatctagtggacatccaagaggcaatggccacagctcatgtgactgagatactggcagacatccaatcccacatggataggttgatgactcagatggcccaagccaaggaacaacttgatacctctaatgaatcagctgagccaaaggcagagggcgatgaggaaggacccagtggtgccagtgaagaagaggacacatgaaggcttgctacccccagtggaaaatcatcccctccccttgtgtgtatgtgacagcgtgtatgtaacggcttctgatttctgtgaaagctgctcagcaacaaacgtacttccaccagatgtgtccccagatccacagcaggcacatatctctccaagggatgaccagttttatgcttactgtgtgcttctcatcccctggttgtggtaggtcaaggaaaagagcccctttgatccaccaggagcaattaagaaaggtccttcaggtaatccctcaatggctgctttgaacttactcaggaaagccagcccccataatattgtattaccaaacagtatcgctttgttaggaaggatctggaataatcttgaagggaagtcagagttttctccctgcctattaacaaaaacccaattttgttcatattgaagcatgaaataaatgagagcaaggtagggccaaattaactcttgtggacagtccctaaaagtccagttctacatttgtgaaaattgtggtgccatgaattaagatggatgactggaaaaaggtgttggagaaagagttaaagatgaggaagagatatttttagtatatgaagttatccaggacttgatattcataattcagtgctgtggaaatgaaaaaaatgattgaagaggtggaacggaaatgaccttagggggaaaaaaaaggaccaaagaagtctgattaaaagttgaaatcagtatttctgaattcaaattgcttgaatttccaaaatagtcagtaaaggatctaatagaaccagaattatttgggtgaattctgcaggttttatgggcttgtcacaacgtgaagggctggaatgtatattaccaaatgggaatttccattgtaggtttttgctagtcccacccccattttagcctaatttggcttaaacgcagtatggggagaattgttcccattccatgtgttctgaattcagctcatctcccagcatatagatatatcctcctttaactccgaccagaacccttcttcctgtggcactccccacccatagaccttcagatcatctcccacaccctggatctcactctcctcttagtaacagagacactcctgaggttggacttccttgcttttctctacttccaaatcacaatttcttacaaccaagctttgtgctcccgagtaagcagggatgtactaggggaatgtaaaactgcaaacttaaaaacctgcatcttcttgaagcatcagttttacttaccaaatggtttagagtcataagatgacctatttttatataaaagttatattatagaataaaatgttcatacgcatagactgttaagataaaaaaataggaatcttgcaaggtaattcttatttgcaagtgggttatgtgttcactctcctctacctttatggtattttggtgttcacttacgaagcatacaactagaaccatatccaagcagactctgggttgctgttaacccagggcctagacttctagtgcctctgaggcagaaccaaaggagcctgcactggggaaaatcccttttcctgcctgcctgtctgcctgtgacctgtgtacgtattacaggctttaggaccagctgattgttatgcttgcaggatggttttgaaacagaaacaatacttgtttactgtaggaatcctatttatattatttttcagtcctgtgaatgctgtgaaaagatttattcctttgaggccaggaagctcccaggcatatatgcttctaggttaggattgtcctgactcactaaagatgccaggatattggggctgaggggagtttgaggtgttaaaaaaaaaaaaaaaaaa

SEQ ID NO: 30264 - DNA, 2944 bp, Homo Sapiens
ctgcgggcgggcggtgcgatgtccggagaggatggcccggcggctggcccgggggcggcggcggcggctgcccgggagcggcgacgggagcagctgcggcagtggggggcgcgggcgggcgccgagcctggccccggagagcgccgcgcccgcaccgtccgcttcgagcgcgccgccgagttcctggcggcctgtgcgggcggcgacctggacgaggcgcgtctgatgctgcgcgccgccgaccctggccccggcgccgagctcgaccccgccgcgccgccgcccgcccgcgccgtgctggactccaccaacgccgacggtatcagcgccctgcaccaggcctgcattgatgagaacctggaggtggtgcgcttcttggtggagcagggcgccactgtgaaccaggcagacaacgagggctggacgccactgcacgtggccgcctcctgtggctacctagatatcgccaggtacctcctgagccacggggccaacatcgccgccgtcaacagtgacggggacctgcccctggacctggccgagtcggacgccatggaggggctgctgaaggcggagatcgcccgccgaggtgtggatgtggaagcagccaagcgggcagaagaggaattgctccttcatgacacgaggtgctggctgaatgggggcgccatgccagaggcccggcacccccgcacaggcgcctctgccctgcacgtggctgctgccaagggctacattgaggtgatgaggttgctccttcaggctggctacgacccagagctccgggacggggacggctggactcccctgcacgcagcggcacactggggcgtggaggatgcctgccgcctgctggccgagcatggcgggggcatggactcactgacccatgcggggcagcgtccctgtgacctggccgatgaggaagtactgagcctgttggaggaactggcccggaaacaggaggaccttcggaaccaaaaagaagcttcccagagccggggccaggagccccaagcgccctctagcagcaaacacagaaggagctctgtgtgtcgtctgagcagtcgcgagaagatttccctccaggacttgtccaaggagcgccggcctggtggggctggggggccccccatccaggacgaggatgagggggaagaaggtcccaccgaaccaccccctgcagaacccagaaccctcaatggcgtctcctccccgccgcaccccagccctaagagtcccgtgcagcttgaagaggcccccttctccaggcgctttggcctcctgaagacagggagttctggtgccctgggtccccctgaaaggcggacagcggagggagcccctggggctgggctgcagcgctcggcttcctcctcctggctggaagggacctccactcaggccaaggagctccgtcttgccagaattaccccgaccccctccccgaagctgccggagccctctgtcctgtctgaggtcaccaagcctcctccttgcttggagaactcctcgcctccctccaggattccggagcctgaatccccagcgaagccaaacgtccccacagcctccacggcgcccccagcggactcccgggaccgacggaggtcctaccagatgcctgtgcgggatgaggagtcggaatcccagagaaaagctcgctcccgtctcatgcgccagtctcggaggtccacacagggtgtgactcttacagacctgaaggaggcagagaaggctgcagggaaggccccagagtcagagaagccggcgcagagcctggacccttcccgaaggccccgcgtccctggagtggagaactctgacagccctgcccagagagcagaggcgcccgacgggcagggtccgggaccgcaggcggccagggagcaccgcaaggtcggaaaggagtggagggggcctgcggagggggaggaggcggagccggctgaccgcagccaggagtccagcaccctggagggcggcccctcggcccgcaggcagcggtggcagcgggacctcaacccagaacctgagccagaatcggaagagccagacggaggctttaggacgctgtatgcagagctgcgcagggagaacgagcggcttcgcgaggccctgaccgagaccacgctgcggctggcgcagctcaaggtggagctggagcgggccacgcagaggcaagaacgcttcgctgagaggccagccctcctggaactggagagattcgagcgcagggccctggaacgcaaggccgcagagctggaggaggagctgaaggccctgtctgacctccgcgctgacaaccagcgcctcaaggatgagaatgcagcgttgatccgcgtcatcagcaaactctccaagtgacccggagggactttcccgcacccgtatttatacagctgcttctgccacacgcaccccttcccccgtgtgaacacgagtgacagggctccgggggaagtctcagagaagccatagcccccctgggacctccggactgggaggggagcagagtccccaggagccgagggggccacccgaggccaggatggaggtgggaggccgagccaagcagggggacgttgccagaggggaccagggccagagacgggaccaggaaggaactgaggaccaagaagtgcaaggatcagtagccaggaccagagtggccgcctggaggtccccatctcacgtgtgatgccaccccgtcacccctcccctcctgagcagggatccaagaatgtgccaagagtcccgccagcctcagccaggtgggcctgtatatagggtccatgtgcaatagggagggacgtcttctattttttgctgccccctccccgcccactgtctggggcagggggagaaggtattttcgagataaagcacaggcaccacaaataaaagtcgtgaagttgccactcaaaaaaaaaaaaaaaaaaaa

SEQ ID NO: 30265 - DNA, 9312 bp, Homo Sapiens
atgccgccgctcctggcgcccctgctctgcctggcgctgctgcccgcgctcgccgcacgaggcccgcgatgctcccagcccggtgagacctgcctgaatggcgggaagtgtgaagcggccaatggcacggaggcctgcgtctgtggcggggccttcgtgggcccgcgatgccaggaccccaacccgtgcctcagcaccccctgcaagaacgccgggacatgccacgtggtggaccgcagaggcgtggcagactatgcctgcagctgtgccctgggcttctctgggcccctctgcctgacacccctggacaatgcctgcctcaccaacccctgccgcaacgggggcacctgcgacctgctcacgctgacggagtacaagtgccgctgcccgcccggctggtcagggaaatcgtgccagcaggctgacccgtgcgcctccaacccctgcgccaacggtggccagtgcctgcccttcgaggcctcctacatctgccactgcccacccagcttccatggccccacctgccggcaggatgtcaacgagtgtggccagaagcccgggctttgccgccacggaggcacctgccacaacgaggtcggctcctaccgctgcgtctgccgcgccacccacactggccccaactgcgagcggccctacgtgccctgcagcccctcgccctgccagaacgggggcacctgccgccccacgggcgacgtcacccacgagtgtgcctgcctgccaggcttcaccggccagaactgtgaggaaaatatcgacgattgtccaggaaacaactgcaagaacgggggtgcctgtgtggacggcgtgaacacctacaactgccgctgcccgccagagtggacaggtcagtactgtaccgaggatgtggacgagtgccagctgatgccaaatgcctgccagaacggcgggacctgccacaacacccacggtggctacaactgcgtgtgtgtcaacggctggactggtgaggactgcagcgagaacattgatgactgtgccagcgccgcctgcttccacggcgccacctgccatgaccgtgtggcctccttctactgcgagtgtccccatggccgcacaggtctgctgtgccacctcaacgacgcatgcatcagcaacccctgtaacgagggctccaactgcgacaccaaccctgtcaatggcaaggccatctgcacctgcccctcggggtacacgggcccggcctgcagccaggacgtggatgagtgctcgctgggtgccaacccctgcgagcatgcgggcaagtgcatcaacacgctgggctccttcgagtgccagtgtctgcagggctacacgggcccccgatgcgagatcgacgtcaacgagtgcgtctcgaacccgtgccagaacgacgccacctgcctggaccagattggggagttccagtgcatctgcatgcccggctacgagggtgtgcactgcgaggtcaacacagacgagtgtgccagcagcccctgcctgcacaatggccgctgcctggacaagatcaatgagttccagtgcgagtgccccacgggcttcactgggcatctgtgccagtacgatgtggacgagtgtgccagcaccccctgcaagaatggtgccaagtgcctggacggacccaacacttacacctgtgtgtgcacggaagggtacacggggacgcactgcgaggtggacatcgatgagtgcgaccccgacccctgccactacggctcctgcaaggacggcgtcgccaccttcacctgcctctgccgcccaggctacacgggccaccactgcgagaccaacatcaacgagtgctccagccagccctgccgccacgggggcacctgccaggaccgcgacaacgcctacctctgcttctgcctgaaggggaccacaggacccaactgcgagatcaacctggatgactgtgccagcagcccctgcgactcgggcacctgtctggacaagatcgatggctacgagtgtgcctgtgagccgggctacacagggagcatgtgtaacatcaacatcgatgagtgtgcgggcaacccctgccacaacgggggcacctgcgaggacggcatcaatggcttcacctgccgctgccccgagggctaccacgaccccacctgcctgtctgaggtcaatgagtgcaacagcaacccctgcgtccacggggcctgccgggacagcctcaacgggtacaagtgcgactgtgaccctgggtggagtgggaccaactgtgacatcaacaacaatgagtgtgaatccaacccttgtgtcaacggcggcacctgcaaagacatgaccagtggctacgtgtgcacctgccgggagggcttcagcggtcccaactgccagaccaacatcaacgagtgtgcgtccaacccatgtctgaaccagggcacgtgtattgacgacgttgccgggtacaagtgcaactgcctgctgccctacacaggtgccacgtgtgaggtggtgctggccccgtgtgcccccagcccctgcagaaacggcggggagtgcaggcaatccgaggactatgagagcttctcctgtgtctgccccacgggctggcaagcagggcagacctgtgaggtcgacatcaacgagtgcgttctgagcccgtgccggcacggcgcatcctgccagaacacccacggcggctaccgctgccactgccaggccggctacagtgggcgcaactgcgagaccgacatcgacgactgccggcccaacccgtgtcacaacgggggctcctgcacagacggcatcaacacggccttctgcgactgcctgcccggcttccggggcactttctgtgaggaggacatcaacgagtgtgccagtgacccctgccgcaacggggccaactgcacggactgcgtggacagctacacgtgcacctgccccgcaggcttcagcgggatccactgtgagaacaacacgcctgactgcacagagagctcctgcttcaacggtggcacctgcgtggacggcatcaactcgttcacctgcctgtgtccacccggcttcacgggcagctactgccagcacgatgtcaatgagtgcgactcacagccctgcctgcatggcggcacctgtcaggacggctgcggctcctacaggtgcacctgcccccagggctacactggccccaactgccagaaccttgtgcactggtgtgactcctcgccctgcaagaacggcggcaaatgctggcagacccacacccagtaccgctgcgagtgccccagcggctggaccggcctttactgcgacgtgcccagcgtgtcctgtgaggtggctgcgcagcgacaaggtgttgacgttgcccgcctgtgccagcatggagggctctgtgtggacgcgggcaacacgcaccactgccgctgccaggcgggctacacaggcagctactgtgaggacctggtggacgagtgctcacccagcccctgccagaacggggccacctgcacggactacctgggcggctactcctgcaagtgcgtggccggctaccacggggtgaactgctctgaggagatcgacgagtgcctctcccacccctgccagaacgggggcacctgcctcgacctccccaacacctacaagtgctcctgcccacggggcactcagggtgtgcactgtgagatcaacgtggacgactgcaatccccccgttgaccccgtgtcccggagccccaagtgctttaacaacggcacctgcgtggaccaggtgggcggctacagctgcacctgcccgccgggcttcgtgggtgagcgctgtgagggggatgtcaacgagtgcctgtccaatccctgcgacgcccgtggcacccagaactgcgtgcagcgcgtcaatgacttccactgcgagtgccgtgctggtcacaccgggcgccgctgcgagtccgtcatcaatggctgcaaaggcaagccctgcaagaatgggggcacctgcgccgtggcctccaacaccgcccgcgggttcatctgcaagtgccctgcgggcttcgagggcgccacgtgtgagaatgacgctcgtacctgcggcagcctgcgctgcctcaacggcggcacatgcatctccggcccgcgcagccccacctgcctgtgcctgggccccttcacgggccccgaatgccagttcccggccagcagcccctgcctgggcggcaacccctgctacaaccaggggacctgtgagcccacatccgagagccccttctaccgttgcctgtgccccgccaaattcaacgggctcttgtgccacatcctggactacagcttcgggggtggggccgggcgcgacatccccccgccgctgatcgaggaggcgtgcgagctgcccgagtgccaggaggacgcgggcaacaaggtctgcagcctgcagtgcaacaaccacgcgtgcggctgggacggcggtgactgctccctcaacttcaatgacccctggaagaactgcacgcagtctctgcagtgctggaagtacttcagtgacggccactgtgacagccagtgcaactcagccggctgcctcttcgacggctttgactgccagcgtgcggaaggccagtgcaaccccctgtacgaccagtactgcaaggaccacttcagcgacgggcactgcgaccagggctgcaacagcgcggagtgcgagtgggacgggctggactgtgcggagcatgtacccgagaggctggcggccggcacgctggtggtggtggtgctgatgccgccggagcagctgcgcaacagctccttccacttcctgcgggagctcagccgcgtgctgcacaccaacgtggtcttcaagcgtgacgcacacggccagcagatgatcttcccctactacggccgcgaggaggagctgcgcaagcaccccatcaagcgtgccgccgagggctgggccgcacctgacgccctgctgggccaggtgaaggcctcgctgctccctggtggcagcgagggtgggcggcggcggagggagctggaccccatggacgtccgcggctccatcgtctacctggagattgacaaccggcagtgtgtgcaggcctcctcgcagtgcttccagagtgccaccgacgtggccgcattcctgggagcgctcgcctcgctgggcagcctcaacatcccctacaagatcgaggccgtgcagagtgagaccgtggagccgcccccgccggcgcagctgcacttcatgtacgtggcggcggccgcctttgtgcttctgttcttcgtgggctgcggggtgctgctgtcccgcaagcgccggcggcagcatggccagctctggttccctgagggcttcaaagtgtctgaggccagcaagaagaagcggcgggagcccctcggcgaggactccgtgggcctcaagcccctgaagaacgcttcagacggtgccctcatggacgacaaccagaatgagtggggggacgaggacctggagaccaagaagttccggttcgaggagcccgtggttctgcctgacctggacgaccagacagaccaccggcagtggactcagcagcacctggatgccgctgacctgcgcatgtctgccatggcccccacaccgccccagggtgaggttgacgccgactgcatggacgtcaatgtccgcgggcctgatggcttcaccccgctcatgatcgcctcctgcagcgggggcggcctggagacgggcaacagcgaggaagaggaggacgcgccggccgtcatctccgacttcatctaccagggcgccagcctgcacaaccagacagaccgcacgggcgagaccgccttgcacctggccgcccgctactcacgctctgatgccgccaagcgcctgctggaggccagcgcagatgccaacatccaggacaacatgggccgcaccccgctgcatgcggctgtgtctgccgacgcacaaggtgtcttccagatcctgatccggaaccgagccacagacctggatgcccgcatgcatgatggcacgacgccactgatcctggctgcccgcctggccgtggagggcatgctggaggacctcatcaactcacacgccgacgtcaacgccgtagatgacctgggcaagtccgccctgcactgggccgccgccgtgaacaatgtggatgccgcagttgtgctcctgaagaacggggctaacaaagatatgcagaacaacagggaggagacacccctgtttctggccgcccgggagggcagctacgagaccgccaaggtgctgctggaccactttgccaaccgggacatcacggatcatatggaccgcctgccgcgcgacatcgcacaggagcgcatgcatcacgacatcgtgaggctgctggacgagtacaacctggtgcgcagcccgcagctgcacggagccccgctggggggcacgcccaccctgtcgcccccgctctgctcgcccaacggctacctgggcagcctcaagcccggcgtgcagggcaagaaggtccgcaagcccagcagcaaaggcctggcctgtggaagcaaggaggccaaggacctcaaggcacggaggaagaagtcccaggacggcaagggctgcctgctggacagctccggcatgctctcgcccgtggactccctggagtcaccccatggctacctgtcagacgtggcctcgccgccactgctgccctccccgttccagcagtctccgtccgtgcccctcaaccacctgcctgggatgcccgacacccacctgggcatcgggcacctgaacgtggcggccaagcccgagatggcggcgctgggtgggggcggccggctggcctttgagactggcccacctcgtctctcccacctgcctgtggcctctggcaccagcaccgtcctgggctccagcagcggaggggccctgaatttcactgtgggcgggtccaccagtttgaatggtcaatgcgagtggctgtcccggctgcagagcggcatggtgccgaaccaatacaaccctctgcgggggagtgtggcaccaggccccctgagcacacaggccccctccctgcagcatggcatggtaggcccgctgcacagtagccttgctgccagcgccctgtcccagatgatgagctaccagggcctgcccagcacccggctggccacccagcctcacctggtgcagacccagcaggtgcagccacaaaacttacagatgcagcagcagaacctgcagccagcaaacatccagcagcagcaaagcctgcagccgccaccaccaccaccacagccgcaccttggcgtgagctcagcagccagcggccacctgggccggagcttcctgagtggagagccgagccaggcagacgtgcagccactgggccccagcagcctggcggtgcacactattctgccccaggagagccccgccctgcccacgtcgctgccatcctcgctggtcccacccgtgaccgcagcccagttcctgacgcccccctcgcagcacagctactcctcgcctgtggacaacacccccagccaccagctacaggtgcctgagcaccccttcctcaccccgtcccctgagtcccctgaccagtggtccagctcgtccccgcattccaacgtctccgactggtccgagggcgtctccagccctcccaccagcatgcagtcccagatcgcccgcattccggaggccttcaagtaaacggcgcgccccacgagaccccggcttcctttcccaagccttcgggcgtctgtgtgcgctctgtggatgccagggccgaccagaggagcctttttaaaacacatgtttttatacaaaataagaacgaggattttaattttttttagtatttatttatgtacttttattttacacagaaacactgcctttttatttatatgtactgttttatctggccccaggtagaaacttttatctattctgagaaaacaagcaagttctgagagccagggttttcctacgtaggatgaaaagattcttctgtgtttataaaatataaacaaagattcatgatttataaatgccatttatttattgattccttttttcaaaatccaaaaagaaatgatgttggagaagggaagttgaacgagcatagtccaaaaagctcctggggcgtccaggccgcgccctttccccgacgcccacccaaccccaagccagcccggccgctccaccagcatcacctgcctgttaggagaagctgcatccagaggcaaacggaggcaaagctggctcaccttccgcacgcggattaatttgcatctgaaataggaaacaagtgaaagcatatgggttagatgttgccatgtgttttagatggtttcttgcaagcatgcttgtgaaaatgtgttctcggagtgtgtatgccaagagtgcacccatggtaccaatcatgaatctttgtttcaggttcagtattatgtagttgttcgttggttatacaagttcttggtccctccagaaccaccccggccccctgcccgttcttgaaatgtaggcatcatgcatgtcaaacatgagatgtgtggactgtggcacttgcctgggtcacacacggaggcatcctacccttttctggggaaagacactgcctgggctgaccccggtggcggccccagcacctcagcctgcacagtgtcccccaggttccgaagaagatgctccagcaacacagcctgggccccagctcgcgggacccgaccccccgtgggctcccgtgttttgtaggagacttgccagagccgggcacattgagctgtgcaacgccgtgggctgcgtcctttggtcctgtccccgcagccctggcagggggcatgcggtcgggcaggggctggagggaggcgggggctgcccttgggccacccctcctagtttgggaggagcagatttttgcaataccaagtatagcctatggcagaaaaaatgtctgtaaatatgtttttaaaggtggattttgtttaaaaaatcttaatgaatgagtctgttgtgtgtcatgccagtgagggacgtcagacttggctcagctcggggagccttagccgcccatgcactggggacgctccgctgccgtgccgcctgcactcctcagggcagcctcccccggctctacgggggccgcgtggtgccatccccagggggcatgaccagatgcgtcccaagatgttgatttttactgtgttttataaaatagagtgtagtttacagaaaaagactttaaaagtgatctacatgaggaactgtagatgatgtatttttttcatcttttttgttaactgatttgcaataaaaatgatactgatggtgaaaaaaaaaaaaaaa

SEQ ID NO: 30266 - DNA, 4758 bp, Homo Sapiens
gagccggagccgggtccctgtccccgggccgggcgccgccgccgccccctgcccagcgcccgcgtctccgcggcgccaccccagcgccaatattccggagatcaagcgttacgcggcggcggcggcggcggcggcggggcccggagcgggaggcgccggggaccggggcgaggcggcccccgccgccgccatggaggcgctgggacccggacctccggctagcctgtttcagccacctcgtcgtcctggccttggaactgttggaaaaccaattcgactgttagccaatcattttcaggttcagattcctaaaatagatgtgtatcactatgatgtggatattaagcctgaaaaacggcctcgtagagtcaacagggaggtagtagatacaatggtgcggcacttcaagatgcaaatatttggtgatcggcagcctgggtatgatggcaaaagaaacatgtacacagcacatccactaccaattggacgggatagggttgatatggaggtgactcttccaggcgagggtaaagaccaaacatttaaagtgtctgttcagtgggtgtcagttgtgagccttcagttgcttttagaagctttggctgggcacttgaatgaagtcccagatgactcagtacaagcacttgatgttatcacaagacaccttccctccatgaggtacaccccagtgggccgttcctttttctcacccccggaaggttactaccaccctctgggagggggcagggaggtctggtttggttttcatcagtctgtgagacctgccatgtggaatatgatgctcaacattgatgtatctgcaactgctttctaccgggctcagcctatcattgagttcatgtgtgaggttttagacattcagaacatcaatgaacagaccaaacctctaacagactcccagcgtgtcaaatttaccaaagaaatcagaggtctcaaagttgaggtgacccactgtggacagatgaaacgaaaataccgagtttgtaatgtgactagacggccagccagtcatcaaacttttcctttgcagctagaaaacggtcaagctatggaatgtacagtagctcaatattttaagcaaaagtatagtctgcaactgaaatacccccatcttccctgtctccaagtgggacaagaacaaaagcatacatacttgccactcgaggtctgtaatatagtggcaggacagcgatgtatcaagaagctcacagacaatcagacttccacaatgatcaaagctacagcaagatctgctcctgacagacaggaagagatcagtagactggtgaagagcaacagtatggtgggtggacctgatccataccttaaagaatttggtattgttgtccacaatgaaatgacagagctcacaggcagggtacttccagcaccaatgctgcaatatggaggccggaataaaacagtagccacacccaaccagggtgtctgggacatgcgaggaaagcagttttatgctggcattgaaattaaagtttgggcagttgcttgttttgcacctcagaaacaatgtagggaagatttactaaagagtttcactgaccagctgcgtaaaatctctaaggatgcaggaatgcccatccagggtcagccatgtttctgcaagtatgcacaaggtgcagacagtgtggagcctatgtttaaacatctgaaaatgacttatgtgggcctacagctaatagtggttatcctgcctggaaagacaccagtatatgcggaggtgaaacgtgttggagatacccttctaggtatggccacacagtgtgtccaggtaaaaaatgtagtgaagacctcacctcaaaccctttccaatctttgcctgaagataaatgcaaaacttggaggaattaacaatgtgcttgtgcctcatcaaaggccctcggtgttccagcagcctgtcatcttcctgggagcggatgtcacacaccccccagcaggggatgggaagaaaccttccattgctgctgtggttggcagtatggatggccaccccagccggtactgtgccaccgttcgggtgcagacttcccggcaggagatctcccaagagctcctctacagtcaagaggtcatccaggacctgactaacatggttcgagagctgctgattcagttctacaaatccacacgcttcaaacccactcggatcatctattaccgtggaggggtatctgagggacaaatgaaacaggtagcttggccagaactaatagcaattcgaaaggcatgtattagcttggaagaagattaccggccaggaataacttatattgtggtgcaaaaaagacatcacacacgactcttctgtgcagataaaacagaaagggtagggaaaagtggcaatgtaccagcaggcactacagtggatagtaccatcacacatccatctgagtttgacttttacctctgtagtcatgcaggaattcagggaaccagccgtccctcacattaccaggtcttgtgggatgacaactgcttcactgcagatgaactccagctactgacttaccagctgtgtcacacctatgtgaggtgcactcgctcagtctctattccagcccctgcatattatgcccggcttgtagcatttagggcaaggtatcatctggtggataaagatcatgacagtgcggaaggcagtcatgtgtcaggacagagcaacggccgggatcctcaggccttggctaaggctgtgcaaatccaccatgatacccagcacacgatgtattttgcctgagagtctcagaaaaagaactcaaccaatttggcaccccatgcagcctcaaaatgtttcaaatgcctaccgcctctagatcgagccacgttgacttcaggtggtcttctaccagcagctcggaatagttgcactgaatctatactttgcagcactgtctgatgcgtcaacaaaattgagccatttttttaaagtaatagatactaatagattatcttttctgatgcactggactgaatttttacctcaatgtgcaaaggctgatcagcctgaactttctaaaggactttacaagaagggtttctatggaatattttgctagctgtggtgttcaccgcatccctctagtcttagaagagaagattattccttttttctgtagtcattgagtggggtatatgcataagtgggagagaaaaaccaaacaatctacttcagttcagtgtaactatttaattgtgtgggtccatagactttttaatgaagatttctgactttgccactgtaaatgcctttaatgagcattaatttttgaaagttttacagagttttattagttttactactttatcttattgatctctgcagacttgtgctggtgcaagtacatgctgacaggcaatttgcactatatttggctgcagattcaaataggcagttctcttatttggtcgacttttgtgaatgtgtgacataaacagatgtaatgcatgtcacagtgacggagataacactgccatgataaaagtactcatgtttcccctatttggaaaaaaaaattgcttttagtatttttccaagttttcaaaagtgcccattttatgctgctgtgtggtttgttaaatctaaatgatttttaaacttttctcatagaaacttaactttggcaataaacattttttaaggtctctcctcttccttccccaacaatgtagttttctagatgagatttcagtatgattttatcagctatttcttatatatcataatctggcaatttctgaaaccagtcagaaaagacatatatttccatgcctttttaaagaattatttttacctgttttatattcacagttggtgtcctgtcactttgttttaaaataagctagaaccaggatgcttccttattggaaaggctttgccagtccttaaggtacaatgagtgatgctgcaacttgcaaatgtaccagcatttaaaatttcttttcctgggaatcaaggtaactcacacgactacttgcagtacaaattttttgcttctctttcgacatgaaatgtacttggtgggttttccttccttttattaaactaaaactgtgtggaaaaggttgatttttcttaatagattctggattccactcacagggagatgggattcctttcttgtccaaacaaagggagttgctctaaagcgagcatcagttaaaatgtaggggaaaatgtattctgtatgtagtgtagataatactttgtgaatggacaacagttacatagtgtcttggtagcaccagccagtgtttcccagcccagagtttactgacttgtaattctctatccaggacatcaggagtgagggatggaaaaggggataaaaggcctggagccacactctatatggctgaggaaggagctagggaaagagatagacacaatggggtgaaaacaattttgccgcccctgcctggaaactgctggtggggaaatgatggtgaagggtgtttgcttgaactcatgagacggtccaaatctcataaactagccttctcaaaatcccagcaatataaagcactgtttttcttcagtcgtttaaataaacttgtaaatacattgaagtttacatttccatgtgctgttgatcaacggcgccacctgtgtttgctgagactggtctctgagagagttttatgtcgatcgaggcctgttgctcattaagctgagtgcagacgtccttaatccctgcagatagtgggatgaaagcaagttct

SEQ ID NO: 30267 - DNA, 6031 bp, Homo Sapiens
gctgggtcctaggccaggtctggggtaacctggaacttccacctgggctctgcgctaggtctctgtttcactccctccccgcggggcgcgcagctcgcgggtctttggacaccaccggtcctgagtccgcggactgccattttcattaagaactgccacttagaggtaccaaaataaagggtatttgctacctttaatacttgccagttcaggttggaggcacaggcagcagcaagaatggaaagaaatgttcttacaacattttcacaggaaatgtcccagttaattttgaatgaaatgccaaaagctgaatattccagtttattcaatgattttgttgaatctgaattttttttgattgatggggattcattacttatcacatgtatctgtgagatatcatttaagcctgggcagaacctccatttcttctatctggttgaacgctatcttgtggatcttattagcaaaggaggacaattcaccatagttttcttcaaggatgccgagtatgcgtatttcaacttccctgaacttctttctttgagaactgctttaattcttcatcttcagaagaataccaccattgatgttcgaacaacattttcgagatgcttatcaaaagagtggggaagtttcttggaagagagttacccatatttcctgatagttgcagacgaaggcctgaacgatctacaaacacagcttttcaactttttaatcattcattcttgggcaaggaaggtcaacgttgtactttcctcagggcaagaatctgatgttctttgcctttatgcataccttcttccaagcatgtacagacaccagattttttcctggaagaataagcagaacattaaagatgcttatacaaccctgcttaaccagttggaaagatttaagctttcagcattagcacctctttttggaagtttaaaatggaataatattacggaagaggcacacaagactgtatctctgcttacacaagtctggccagaaggatctgacattcggcgtgtcttttgtgttacttcatgctcattatctttgagaatgtaccatcgctttttaggaaacagagagccctcctctggtcaggaaactgagatccaacaggtgaacagtaattgcttaaccctgcaggagatggaagatttgtgtaaactgcattgtctcactgtggtttttctactccatctgcctctttctcaaagagcttgtgctagagtcatcacttcacattgggctgaggacatgaagcctttattacaaatgaaaaagtggtgtgaatatttcatcttaagaaatatacatacttttgaattttggaatctgaatttaattcacctttctgacttaaatgatgagcttttgttgaagaatattgctttttactatgaaaatgaaaatgtaaaaggcctacatttgaatttgggagataccattatgaaagattatgaatatctctggaataccgtatcaaagttggtcagagactttgaggttggacagccatttcctctgagaacaacaaaagtttgttttcttggaaagaaaccatcaccaatcaaagacagctccaatgaaatggtgcccaatttgggttttattccaacgtcatcttttgtggttgataaatttgctggagatattttgaaagatttgccttttctaaagagtgatgatcctattgttacttcactggttaaacaaaaggaatttgatgaacttgtgcactggcattctcataaacccctgagtgatgattatgacaggtccaggtgtcagtttgatgaaaaatctagagaccctcgtgttcttagatctgtgcaaaagtatcatgttttccaacggttttatgggaattcattagaaacagtctcttcgaaaatcatcgtgactcaaactattaagtcaaagaaggattttagtgggcccaagagcaaaaaggcacacgagaccaaggctgaaataattgctagagagaataagaaaaggttatttgccagggaagaacaaaaggaagagcaaaagtggaatgctttgtcattttctattgaagagcaattgaaagaaaatttacactctggaataaagagcctggaagattttttgaaatcctgtaaaagtagctgtgtgaaacttcaggttgaaatggtggggttaactgcttgcttgaaagcctggaaagaacattgccgaagtgaagaaggtaaaaccacgaaagatttaagtatagctgttcaggtgatgaaaaggatccactccttgatggaaaaatactcagaacttttacaagaagatgatcggcaactcatagccagatgccttaagtatttaggatttgatgagttggcaagttctttacatccagcccaggatgcagaaaatgatgtaaaagtgaagaaaaggaataaatattcaattggcattgggccagctcggttccaactgcaatacatgggccattatttgatacgagatgagagaaaagacccagatcccagggtccaggattttattcccgacacatggcagcgagagctccttgatgttgtggataagaatgagtcagcagtgattgttgccccaacgtcctcaggcaaaacatatgcctcctactactgtatggagaaagtgctgaaggagagcgacgacggggtggtcgtgtacgttgcacccacaaaggcccttgttaatcaagtggcagcaactgttcagaatcgttttacgaaaaatctgccaagtggtgaagttctctgtggtgttttcaccagggagtatcgtcatgatgccttaaactgtcaggtacttattacagtgcctgcctgctttgaaattctgctgcttgctcctcatcgccaaaactgggtgaaaaagatcagatatgttatatttgatgaggttcattgtcttggtggagaaattggagcagaaatctgggaacatctccttgtcatgatccgatgtccctttttggctctttcagctaccataagtaatcctgaacatctcaccgagtggctacaatcggtaaaatggtactggaaacaagaagacaaaataattgaaaataataccgcttctaaaagacatgtgggtcgtcaggccggctttcccaaagactacttgcaagtaaaacaatcgtataaagttagacttgtgctctatggagagaggtataatgatctagagaagcatgtatgttcaataaaacatggtgacattcattttgatcattttcacccatgtgctgcactaacaacagatcatattgaaaggtatggattccctcctgatcttaccctttcacctcgagaaagcatccagctgtatgatgccatgtttcaaatttggaaaagttggcctcgggcccaggaactgtgcccagaaaacttcattcattttaacaataaattagtcattaaaaagatggatgctaggaaatatgaagagagtctaaaggcagaattaacaagttggattaaaaatggcaacgtagagcaggccagaatggtacttcagaatcttagtcctgaagcagatttgagtccagaaaacatgatcaccatgtttccacttctagttgaaaaactaaggaaaatggagaagttacctgcactattttttttattcaagttaggagctgtagaaaacgcagctgaaagtgtgagcactttcctaaagaaaaagcaggagacaaaaaggcctcccaaagctgataaagaagcccatgtcatggctaacaaacttcgaaaagttaaaaaatccatagagaaacaaaagatcatagatgaaaagagccagaaaaaaaccagaaatgtggatcaaagcctaatacatgaagctgaacatgataatctagtgaagtgtctagagaagaacctggaaatcccacaggactgcacatatgctgatcaaaaagcagtggacactgagactttgcagaaggtatttggtcgagtaaaatttgaaagaaaaggtgaagaattgaaagccttggcagaaaggggtattggatatcatcacagtgctatgagtttcaaagaaaaacaattagttgaaatcctctttagaaaaggatatcttagggtggtgacagctactggaacacttgctttaggtgtcaacatgccttgtaaatctgtggtttttgctcaaaactcagtctatctggatgcgttgaattatagacagatgtctggccgtgctggaagaagaggtcaagacctgatgggagatgtatatttctttgatattccattccccaaaataggaaaactcataaaatccaatgttcctgagctgagaggacacttccctctcagcataaccctggtcctgcgactcatgctgctggcttccaagggagatgacccagaggataccaaggcaaaggtgctatcagtgctaaagcattcattgctgtccttcaagcaacccagagtcatggacatgttaaaactttacttcctgttttctttgcagttcctggtgaaagagggctatttagatcaagaaggtaatcctatggggtttgctggacttgtatcacatttgcattatcatgaaccttctaatcttgtttttgtcagttttcttgtaaatggactcttccatgatctctgtcagccaaccaggaaaggctcaaaacatttttctcaagacgttatggaaaagctagtattagtattggcacatctctttggaagaagatattttccaccaaagttccaagatgcacacttcgagttttatcaatcaaaggtgttccttgatgatctccctgaggattttagtgatgctttagatgaatataacatgaaaattatggaggactttaccactttcctacgaattgtttccaaactggctgatatgaatcaggaatatcaactcccattgtcaaaaatcaaattcacaggtaaagaatgtgaagactctcaactcgtatctcatttgatgagctgcaaggaaggaagagtagcaatttcaccatttgtttgtctgtctgggaactttgatgatgatttgcttcgactagaaactccaaaccatgttactctaggcacaatcggtgtcaatcgctctcaggctccagtgctgttgtcacagaaatttgataaccgaggaaggaaaatgtcgcttaatgcctatgcactggatttctacaaacatggttccttgataggattagtccaggataacaggatgaatgaaggagatgcttattatttgttgaaggattttgcactcaccattaaatctatcagtgtttccttgcgtgagctatgtgaaaatgaagacgacaacgttgtcttagcctttgaacaactgagtacaactttttgggaaaagttaaacaaagtctaaaaacaaagtctatgcaaaccacttaaaaataattccatagtagtttttcaggtcacgtttttgattcttatgcttcttgccagaaatacattatgataaagtggaaatacattacgatgaagtggaaagagcaaacactttggaatcaaacagagttgcaatcaaacctgcaatgttctgtcatgaatactcacaaattatttagtatacctgaatcttggtttctttttataactgagtaataatggttacatctcaggtagtttgaggattgactaaaaaaatgcgagaatgttgtatgtgactgaataacaatttttactctgcgaagccaaagtaaatataatattatcagtaactttatccccagtgtcagtatttataaaatgtttattaaggctagaaaaaatgaatacaatatcctgaaggtgaaatatattctcttcaattagcataaatatgatttacataagttagctatacagctattgagatagtactttctagtaaacttaaactactttttaaacatacattttgtgatgatttaacaaaaatatagagaatgatttgctttattgtaattgtatataagtgactggaaaagcacaaagaaataaagtgggttcgatctgttaaataaaaaaaaaaaaaa

SEQ ID NO: 30268 - DNA, 2392 bp, Homo Sapiens
agtgggcggttcggcggctctgggcgctgttgtttggtctttaggcctgcggaggggcgttatctggagggccgcgggtgcaggccgcagtgacagggccgctcgccccgctagtcctgcctgtctcccggtgcagctgtgttcgcggcctgcaggcccaacatggcgcaggaggtgtcggagtacctgagccagaacccgcgggtggcagcctgggtggaggcgctgcgctgcgacggcgagactgacaaacactggcgccaccgccgggattttttgcttcgcaacgccggggacctggcccccgctggcggcgctgcctccgctagcacggatgaagctgccgacgccgagagcgggacccgaaaccggcagctgcagcagctcatctccttttccatggcctgggcgaaccacgtcttcctcgggtgccgataccctcaaaaagttatggataaaatacttagtatggctgaaggcatcaaagtgacagatgctccaacctatacaacaagagatgaactggttgccaaggtgaagaaaagagggatatcgagtagcaatgaaggggtagaagagccatccaaaaaacgagttatagaaggaaaaaacagttctgcagttgagcaagatcacgcaaaaacctctgccaagacagaacgtgcatcagctcagcaggaaaacagttcaacgtgtatagggtcggccatcaaatcagagagtgggaactcagctcggagctctggcatctccagtcagaatagctctacaagtgatggagatcgatctgtttccagccaaagcagcagcagcgtttcctctcaggtaacaacggcaggatctgggaaagcttctgaagcagaagctccagataaacacggttctgcatcatttgtttccttgctgaaatccagtgtgaatagtcacatgacccaatccactgattctagacaacaaagtggatcacctaaaaagagtgctttggaaggctcttcagcctcagcttctcaaagcagctcagagatcgaggtgcccttgttgggctcctcaggaagctcagaggtagaattgccactattgtcttccaaacctagttcagagacagcttcaagtgggttaacttccaaaactagttcagaggcaagtgtttcatcatcagttgctaaaaacagttcctcatcaggcacatccttactgactcccaagagcagctcttcaacaaatacatcgctgctaacttccaagagcacttcccaggtagctgcatcactactagcttccaagagcagctcccagaccagtggatctctggtttccaaaagcacttccttagcaagtgtgtcccagttggcttctaagagtagttctcagactagcacctcacagttgccttctaaaagtacttcacagtcaagtgagagttctgtcaaattctcttgcaagttaaccaatgaagatgtgaaacagaagcaaccttttttcaatagactatataaaacggtggcatggaagttggtagctgttggtggctttagtcccaatgtgaatcatggagagctcctaaatgcagctattgaggctctgaaagcaacactggatgtattttttgtcccactaaaagaattggcagatctgcctcaaaataagagctctcaagaaagtattgtttgtgaattgaggtgcaagtctgtgtatttgggcactggctgtggaaaaagcaaagaaaatgcaaaagcagttgcatcaagagaagcattgaagttatttctcaagaaaaaggtggtggtaaaaatatgtaaaaggaaatacagaggcagtgaaatagaagatctagtactccttgatgaagaatcgaggcctgtaaacttacctccagcactaaaacatcctcaagaattactataatgtgtccaaaatatcactgcatacaatatctggtatttgaagagaaaaactgacttttgtatagtataaaacacaggctttcacaaattttgtattgctttttttccagttttgcagaaaatttacattctagttctcttcacacagtagcagttgtaaataatttatgaatgacagtacacattaaaaggtatgcattagcagcatattagtatgctgttttatttgctgaagaaaatactgtcttctatttttaatgatacattaggtacgatgtgtagttcggtagagtcccaaaatttttgtactactttcaatttggtgaaaatgtattaagttgtctaccatgttttcttttctagctgaataaaccacatcaaaggaaagggaccacagtatttgaatgtttgaaagtctgtaaagcttaaggttttaaaaatgttgcccgtaatgttgaacgtgtctgttagaaaaaaaaaaaaaaaaa

SEQ ID NO: 30269 - DNA, 867 bp, Homo Sapiens
atggcagccccaagaacggaagatcctcaggcagattctaagcctcctgaaggattgttaggattccacacagactggctgacattaaatgttggagggcggtactttacaactacacggagcacttcagtgaataaagaacctgacagtatgctggtccacatgtttaaggacaaaggtgtctggggaaataagcaagatcatagaggagctttcttaattgaccgaagtcctgtgtactttgaacccattttgaattacttgctttgtggacagctcattgtaaataatggcattaatttattgggtgtgttagaagcagcaagattttttgaaatttattcattgattgaacacctagaagtggcaataaagaattctcaaccaccggaggatcattcaccaataccccgaaaggaatttgtccaatttttgctagcaactccaaccaagtcagaactgcgatgccagggtttgaacttcagtggtgctgatctttcttgtttggaccttcgatacattaacttcaaaattgccagtttaagccgctgcagtcttgcacatgcaaatctttgctgtgcaaatcttgaacgagctgatctctctggatcagtgcttgactgtgcaaatctccagggagtcaagatgctctgttctaatgcagaaggagcatccctgaaactgtgtaattttgaggatccttctgctcttaaagccaatttagaaggtgctaatctgaaaggtgctgatatggaaggaagtcagatgacaggaattaacctgagagtggctaccttaaaaaaatccaaaggagctatatttgaagagatgctgacaccattacacatgtcacaaagtgtcagatga

SEQ ID NO: 30270 - DNA, 6335 bp, Homo Sapiens
gcccaacatggctggagcgcggcggaggtgagccggccgcccgcccgcagacgccccagcctactgcgcccgagtcccgcggccccagtggcgcctcagctctgcggtgccgaggcccaacggctcgatcgctgcccgccgccagcatgttgggcgccccggacgagagctccgtgcgggtggctgtcagaataagaccacagcttgccaaagagaagattgaaggatgccatatttgtacatctgtcacaccaggagagcctcaggtcttcctagggaaagataaggcttttacttttgactatgtatttgacattgactcccagcaagagcagatctacattcaatgtatagaaaaactaattgaaggttgctttgaaggatacaatgctacagtttttgcttatggacaaactggagctggtaaaacatacacaatgggaacaggatttgatgttaacattgttgaggaagaactgggtattatttctcgagctgttaaacacctttttaagagtattgaagaaaaaaaacacatagcaattaaaaatgggcttcctgctccagattttaaagtgaatgcccaattcttagagctctataatgaagaggtccttgacttatttgataccactcgtgatattgatgcaaaaagtaaaaaatcaaatataagaattcatgaagattcaactggaggaatttatactgtgggcgttacaacacgtactgtgaatacagaatcagagatgatgcagtgtttgaagttgggtgctttatcccggacaactgccagtacccagatgaatgttcagagctctcgttcacatgccatttttaccattcatgtgtgtcaaaccagagtgtgtccccaaatagatgctgacaatgcaactgataataaaattatttctgaatcagcacagatgaatgaatttgaaaccctgactgcaaagttccattttgttgatctcgcaggatctgaaagactgaagcgtactggagctacaggcgagagggcaaaagaaggcatttctatcaactgtggacttttggcacttggcaatgtaataagtgccttgggagacaagagcaagagggccacacatgtcccctatagagattccaagctaacaagactactacaggattccctcgggggtaatagccaaacaatcatgatagcatgtgtcagcccttcagacagagactttatggaaacgttaaacaccctgaaatacgccaatcgagctagaaatatcaagaataaggtgatggtcaatcaggacagagctagtcagcaaatcaatgcacttcgtagtgaaatcacacgacttcagatggagctcatggagtacaaaacaggtaaaagaataattgacgaagagggtgtggaaagcatcaatgacatgtttcatgagaatgctatgctacagactgaaaataataacctgcgtgtaagaattaaagccatgcaagagacggttgatgcattgaggtccagaattacacagcttgttagtgatcaggccaaccatgttcttgccagagcaggtgaaggaaatgaggagattagtaatatgattcatagttatataaaagaaatcgaagatctcagggcaaaattattagaaagtgaagcagtgaatgagaaccttcgaaaaaacttgacaagagccacagcaagagcgccatatttcagcggatcatcaactttttctcctaccatactatcctcagacaaagaaaccattgaaattatagacctagcaaaaaaagatttagagaagttgaaaagaaaagaaaagaggaagaaaaaaagtgtggctggtaaagaggataatacagacactgaccaagagaagaaagaagaaaagggtgtttcggaaagagaaaacaatgaattagaagtggaagaaagtcaagaagtgagtgatcatgaggatgaagaagaggaggaggaggaggaggaagatgacattgatgggggtgaaagttctgatgaatcagattctgaatcagatgaaaaagccaattatcaagcagacttggcaaacattacttgtgaaattgcaattaagcaaaagctgattgatgaactagaaaacagccagaaaagactgcagactctgaaaaagcagtatgaagagaagctaatgatgctgcaacataaaattcgggatactcagcttgaaagagaccaggtgcttcaaaacttaggctcggtagaatcttactcagaagaaaaagcaaaaaaagttaggtctgaatatgaaaagaaactccaagccatgaacaaagaactgcagagacttcaagcagctcaaaaagaacatgcaaggttgcttaaaaatcagtctcagtatgaaaagcaattgaagaaattgcagcaggatgtgatggaaatgaaaaaaacaaaggttcgcctaatgaaacaaatgaaagaagaacaagagaaagccagactgactgagtctagaagaaacagagagattgctcagttgaaaaaggatcaacgtaaaagagatcatcaacttagacttctggaagcccaaaaaagaaaccaagaagtggttctacgtcgcaaaactgaagaggttacggctcttcgtcggcaagtaagacccatgtcagataaagtggctgggaaagttactcggaagctgagttcatctgatgcacctgctcaggacacaggttccagtgcagctgctgtcgaaacagatgcatcaaggacaggagcccagcagaaaatgagaattcctgtggcgagagtccaggccttaccaacgccggcaacaaatggaaacaggaaaaaatatcagaggaaaggattgactggccgagtgtttatttccaagacagctcgcatgaagtggcagctccttgagcgcagggtcacagacatcatcatgcagaagatgaccatttccaacatggaggcagatatgaatagactcctcaagcaacgggaggaactcacaaaaagacgagagaaactttcaaaaagaagggagaagatagtcaaggagaatggagagggagataaaaatgtggctaatatcaatgaagagatggagtcactgactgctaatatcgattacatcaatgacagtatttctgattgtcaggccaacataatgcagatggaagaagcaaaggaagaaggtgagacattggatgttactgcagtcattaatgcctgcacccttacagaagcccgatacctgctagatcacttcctgtcaatgggcatcaataagggtcttcaggctgcccagaaagaggctcaaattaaagtactggaaggtcgactcaaacaaacagaaataaccagtgctacccaaaaccagctcttattccatatgttgaaagagaaggcagaattaaatcctgagctagatgctttactaggccatgctttacaagatctagatagcgtaccattagaaaatgtagaggatagtactgatgaggatgctcctttaaacagcccaggatcagaaggaagcacgctgtcttcagatctcatgaagctttgtggtgaagtgaaacctaagaacaaggcccgaaggagaaccaccactcagatggaattgctgtatgcagatagcagtgaactagcttcagacactagtacaggagatgcctccttgcctggccctctcacacctgttgcagaagggcaagagattggaatgaatacagagacaagtggtacttctgctagggaaaaagagctctctcccccacctggcttaccttctaagataggcagcatttccaggcagtcatctctatcagaaaaaaaaattccagagccttctcctgtaacaaggagaaaggcatatgagaaagcagaaaaatcaaaggccaaggaacaaaagcactcagattctggaacttcagaggctagtctttcacctccttcttccccaccaagccggccccgtaatgaactgaatgtttttaatcgtcttactgtttctcagggaaacacatcagttcagcaggataagtctgatgaaagtgactcctctctctcggaggtacacagatcctccagaaggggcataatcaacccatttcctgcttcaaaaggaatcagagcttttccacttcagtgtattcacatagctgaagggcatacaaaagctgtgctctgtgtggattctactgatgatctcctcttcactggatcaaaagatcgtacttgtaaagtatggaatctggtgactgggcaggaaataatgtcactggggggtcatcccaacaatgtcgtgtctgtaaaatactgtaattataccagtttggtcttcactgtatcaacatcttatattaaggtgtgggatatcagagattcagcaaagtgcattcgaacactaacgtcttcaggtcaagttactcttggagatgcttgttctgcaagtaccagtcgaacagtagctattccttctggagagaaccagatcaatcaaattgccctaaacccaactggcaccttcctctatgctgcttctggaaatgctgtcaggatgtgggatcttaaaaggtttcagtctacaggaaagttaacaggacacctaggccctgttatgtgccttactgtggatcagatttccagtggacaagatctaatcatcactggctccaaggatcattacatcaaaatgtttgatgttacagaaggagctcttgggactgtgagtcccacccacaattttgaaccccctcattatgatggcatagaagcactaaccattcaaggggataacctatttagtgggtctagagataatggaatcaagaaatgggacttaactcaaaaagaccttcttcagcaagttccaaatgcacataaggattgggtctgtgccctgggagtggtgccagaccacccagttttgctcagtggctgcagagggggcattttgaaagtctggaacatggatacttttatgccagtgggagagatgaagggtcatgatagtcctatcaatgccatatgtgttaattccacccacatttttactgcagctgatgatcgaactgtgagaatttggaaggctcgcaatttgcaagatggtcagatctctgacacaggagatctgggggaagatattgccagtaattaaacatgaatgaagataggttgtaaactgaatgctgtgataatactctgtattctttatggaaaatgttgtcctgtacttactaggcaaaacgtatgaatcggattaactggaaaatatatctgaattcaactgctgactataaatggtattctaataaaattgtgtactatcctgtgtgcttagttttaagatcaaccaatagatatatatcctacaattgatatattgctttattcacacttttattgtggctgaatttttgtgcctatctataaaacacactttcaaattatttgaattaccaagacgtctgcttttgtgacagtcagaaaacacacctggaatacgatgcagcccaccattaactcattcatgtagtttattcaagtgatttatgtatttaaactaaatattgaaaatgttagtcaaattgtggtttgcttgtcaggtatttatatcagtctgtagtggattcccaaatttcaaagctcttttaatgtaatggacaaaaataagatatgagaatattattgatgaattttcataaggtggaattgatcttaatctactaacagagaagggtagacagtttgtgttaaatgttggcatttacttgtattgaccaaagttttgcagctctactatattctgtgctcaggactaaaatgctgttaatttttttttttttttccagtgctgtgcatatattctgtgatgggaaacattgttgatgtcctaacagaaatatattttgatctattttcctatggagttgtttctattatgaccatttaattttgtttttatttaatagtagtatttccttcccttttatctaattttttatatgctgctaaatatattttaaatatactatgtttgcgaaccttggtagctatgatgagagctattatcatctgtggtgggaaaagctatgtaaataggtagattgtatagagagactatcttgtgttgtgcctgtatgaatttttaaaagttgttgactggattttgcaaaaggatgtataatatttctgtctgctcagaatattaatttgtaaattctgcaagtttaatttttatgtagatggtataacatttgaaaatattgtcttatgtgattttttcccctgaaaatatttgcttgtaaatgaaaacttagctagggcttaaataaacatgttgctatgaaattaaaaaaaa

SEQ ID NO: 30271 - DNA, 6334 bp, Homo Sapiens; identical to SEQ ID NO: 23858

SEQ ID NO: 30272 - DNA, 2178 bp, Homo Sapiens
attttggcctgtcaggtccatccggcgatgctgggtctggacgagctcgggaggagtggttgtggccattgcacacaggcggatctgaggttcggcgacgccgctggtcgcgacccgggacaggacaacgacaggaacaccgccgagcccgcgttccccccccgcccagagtcatggcggcagcagccgctctgagggcgcctgctcagagcagtgtgacctttgaagatgtggctgtaaacttttccctggaggaatggagtcttcttaatgaggctcagagatgcctgtaccgtgacgtgatgctggagaccttgacacttatatcctccctgggttgttggcatggaggggaagatgaggcagcaccttctaagcagagcacgtgtatacatatatacaaagaccagggaggtcatagtggagaaaggccttatgagtgtggggaatataggaaattatttaagaacaagtcctgcctcactgaacccagaagagatcacaaacacaggaatgttcgcactggagaaaggccttatgagtgcagcaaatatgggaaattatttcaccaaaagcctacactccatattcatgagagatttcatctgggcaaaagacctatgagtgcagtgagtgtggaaaatcatttcaccaaagctcttcactcttgcagcgtcagacacttcacactagagaaaggccttatgagtgtattgaatgtgggaaagcctttgctgaaaagtccagtctcattaaccacaggaaagttcactctggagcaaagcgttatgaatgcaatgaatgtgggaagtcctttgcttatacatctagtctcattaaacacaggaggattcacactggagagaggccttatgagtgcagtgaatgtgggagatcctttgctgaaaactccagtcttattaaacacttgagagttcacacaggagaaaggccttatgaatgcgttgagtgtggaaaatcatttcgccgaagctcttcactcttgcagcatcagagagttcacactagagaaaggccttatgaatgtagtgaatgtgggaaatcctttagcttaaggtccaacctcattcaccatcagcgagttcatactggagaaaggcatgagtgcgggcagtgtgggaaatcctttagccgaaaatctagccttattatacatctgagagttcacactggagaaaggccttatgagtgcagtgactgtgggaaatcctttgctgaaaactccagccttattaaacacttgagagttcacactggaggaaggccatatgaatgcattgattgtggaaaatcatttcgccacagttcttcgttccgtcgccatcagggagttcatactggaatgaggccttataagtgaagcaaattttggaaattctcttgcccaggctttttgctccttcaaggccagagagttcacaccagatcaaggtgttatgagtgtgacaaatggggaatattctttagctagaatgctagcttctttacataaaagagtgctcccactgaagaagtgccttttgagtgcaatgaatgtgagaaagccttcagccctctctcattggttaccacaatatttacatgaggaaaataccacagatgtggaggtaatattattttttcttcaatataacactggaggaaaccccttatgaggatgccatctgcctaaattgaatgtcatacatcaaatagctgcatacattccaggtatgtgggaactgcatagtatttttcgacctgcccaggtctcttgctagacttctgtgacttacagttctcttctaaaaagcatttcacctttaccacttggcaggtgcccacagtacatcattcgcctaactcatcatgatccagaagtaactttgattttgtttcattcaacagagggattttttagtatcctcagcactcattctattctcattcctttctctccaatgagttaggccatgaacctgactcatttttggcacagaggactcttctgataacttgaaaaaatggactacctttttcagggatcttttggatctcacagagttcttaagatggaattttccagcctgccagtcatgaatctcagacagcctgccacctattgccctgatttgtgttataataaaggccttgttgcttaaaaaaaaaaaaaaaaaa

SEQ ID NO: 30273 - DNA, 5541 bp, Homo Sapiens
cagtgccgtttaacctttattgtggtggagtccaccccgctgtgggcctcagataaccctgtacaaaagggaatggagattgcctgtatccacctagattcataagctgccctgaggcgatcttggcatcaagaaagacagcattgaggcacatctcaccatcagcttcagaggatgtcagcctttgatatgtcccatgatttctttttctgcttaacttcagaatgggaaatacaacctagaaccaaacggtcatcacttcagcagggttttttgaagaatcaaatattcactgggatacaaatgcagacaagaagctacagtggatggaaactctgtgagaattgtggagaggtcttcagtgaacagttttgccttaagacacacatgagagctcagaatggagggaacacttttgagggtaattgttatggaaaagacagcatcagtgtgcacaaggaagcctctattggacaagaactttccaaacttaatccatgtggaaaagtcttcaccttaactccaggccttgctgtgcatcttgaaattctcaatggaagacaaccctacgaatgtaaggaatgtggaaaaggctttaagtattttgcaagccttgataatcacatgggaatccacattggagagaaactctgtgaatttcaggaatgtgagagagccatcacaacttcctcacacttaaagcagtgtgtagcagttcatactggaaagaaatccgaaaagactaagaactgtgggaaatccttcactaatttttctcaactttctgcacatgcaaaaactcataaaggagagaagtcctttgaatgtaaagaatgtggaagatcctttagaaattcctcatcctttaatgttcacattcaaattcacactggaataaaaccacacaaatgtacggaatgtgggaaagccttcactagatcaactcaccttactcaacatgtaagaactcacactggaataaaaccctatgaatgtaaggaatgtggccaagccttcactcagtacacgggccttgctatacacatacgaaatcacactggagagaaaccctatcagtgtaaggaatgtgggagagccttcaatagatcttcaacgcttactcaacatagaagaattcacacaggagagaagccttatgaatgtgttgaatgtgggaagaccttcattacttcttcccatcgtagtaaacatttgaaaactcacagtggagaaaggtaaatgcaagatatgtgggaaagaatttctgtattcctcaccccacctgtgaactcctaccagagagaaaccttttgtatgtaaagaatttgggaaagcatttgctctttcctcatgcctaagtatgcatgaaagaattcacactggggagaaatactatgaatgtaaggatatgagtgttgttaccatttagcccattggttgccatctttaattattggcagtgcaaagatcatcagattagtcctaaatgccttttggaggttgtaatggctcacagattggccttagatgcatcccgagggtctgaaattaaacctacaggttctgaatacaacatcatggttacctgagtctgggcatctgtgaagaagggtcatggatggtgaggtcagtactgcaggctgcctcaccttggtgattagattcctaagatcatagcattaacaagttctgtacgagataaatcatgcagattgatcccagcccctgttggttagtggctgccagtgtggcacattcatgtcaaaatttaccagaagccaagatgatgtaggccccagaggtggattgttaaaaagatgctcctccaaggttctcttctgttcccatggatcctgcagagcatgtcaggagtgaaaccatccataactgccagtgccctttcacagctgattatttctatgtccccttcttgtaaaataagaagtgtgacaaccttgactgttctgttctgtcttctctgtccattttaggtggcacaatgtaagtggcagtgtctcttatagtataatccagtctctcttctcacttctgttaagatggctgatatagtccatgaatcccactcatgatctctttatcaaatgattgttcagccacactttgaggattctcttcagtacaagttttctaatttttgcagtatggataggctgagaattttccaaatctccaagttctggttcctttttccttaacaacttcttctgcaattcaggtctccttttgcatttttgccgagaccagctgggtcgtggagaccctaacccagtggctctagaggaattaagacaaagacacagaaatatagtgcagagtgggaatcggggctcacagccttcagagctgagcttgaacagagtttgtcccacatatttattgacagtaagcctgtgataaacattattcctatagattgtagatcagctataagtattccttatgagaaagaaagggacaggctctggcttgttatctgcaacaggaatatgtccttaaggcacaaatcactcatgctattgtttgtggtttaggaatgccttgagcagttttccagttttctgccctgggtgggccaggtgttgcttgccctcattctggtaaaccagcagcctccagcatgggcgtcatagccatcacgagcatgtcacagtgctgcagagattttgtttatggccagtttctcattgcctgtttatggccagatttggggggcctgttcccagcacattttcctgtaagcactcaggaataatgaagcttcctgtgtcctttaacactttaattacagatcttagtgatacataccattttatctgtctcaagctctaccttccgtaaaatgctagaatacagttctgccaagttcttcaccactttatatcaagggttgtcttttcttcatttcccaatagcatgttcctcattccccaatgacacctcaccagaataacccttaccaaccttatttccagcttgcacatcagaatttttccagcctctactcatttgtcagtttcaaagctgcttcacatttttagtttttttgtttgtttttaattgcagtacctcacttctcagtaccaatatctgccttagtcagctcagacaaccataagagaataccgcagaccaaatggcttagaaattaatttaattttaaatcaatgaggttaaaaacacaggatttttttttttttttttttttttttttgaaatggagttttgctcttgttgcccaggctggagtgcaatggtatgatcttggctcaccgcaacctccacctcctgagttccagtgattctcctgcctcaccctcagtagctgggattattggcatgcaccacaaaccttagctaagtttgtatttttagtagagacagggtttctccatgttggttaggctgatctccatgttggtcagatctgacctttggtgatccacctgccttggcctcccaaagtgctgggattacaggcctgagccaccgtatctggcccaaaacacaaatttatattctcacatatctggaggctggaagtctgagatcagagtgccagcatggtcaacctctagtgagagctctcttcctggcatgtaagtgcccacttcctcatgttttcacacgatggagaccaacaaataggtcggtcggtctcccccctccccgcccccttctcttttcacatacagtcacattgaggtttggaacttcatatgaaatttggggggtcactgtgtgtgtgtgtgtgtgtgtgtgtatgtgtatatatatatacatatatatacacatatgtatgtatacctaactcctaaagtggaacagtaagagtcattatttatagattatctgattctctatgtggaaagagaaaagaatcatattaagtactttggactgaacaatggcccccaaaattcgtatgacgatgaagctctctctaaatattttcttgctttactggactgattttaacccgctgcacaacaccaactaaaagtagtaataccagcatacttgtctttgcagttctggtgagatatgcactctattttgttggtttggctgtaggcttttatttcttttttattttttgaagaggttatgtcctgtcagggaaccagccccgatattcacataggttcttttctattttccctaagtgtcagccaacttgagaaataaagggacagagtacaaaagagagaaattttaaagctgggtgtccggggcagacatcacatgtcggtaggttccgtgatgccccacaagccgcaaaaaccagcaagtttttattagggattttcaaaaggggagggagtgtgcaaataggtgtgggtcacagacatcaagtactttacaaggtaatagaatatcacaaggcaagtggaggcagggcgagatcacaggaccaaggtgaaattaaaattgctaatgaagttttgggcaccattgtcattgataacatcttatcaggagacggttttgagatcaactggtctgactaaaatttattaggtgggaatttcctcttcctaataagcctgggagtgctatgggagactggggtctatttcacccctgcagtctcgaccataagagatggctacacccaggggggccagttcagagacccactcccaggtgtgcattctctttctcaaggatgttccttgctgagaaaaagaattcagtgatatttctcccatttgcttgtgaaagaagagaaatgtggctttgttccacctggctcaccggcggtcagaatttaaggttatctctcttgtttcctaaacattgctgttatcctgttcttttttcaaggtgcccagatttcatattgctcaaacacacatgctgtataatttgtgcagttaatgcaattattacagggtcctgaggtaatatacatcctcctcagctgacaggattgagagattaaagtaaagacaggcataggaaatcacaagggtattgactggggaagtgataagtgtccatgaaatctttacaatttatgtttagagattgcagtaaggacaggcataagaaattataaaagtattaatttggggaactaataaatgtccatgaaacctccacaatccatgtttttctgccatggcttcagccagtccccccgtttggggtccctgacttcctgcaacaatgtcctgcaggaaaagttttttctttatatccagtttttacatgatgaattatttcccaatatttcatagtttatgaggctgaattcctcttgaatttattaaatgcttccttcacatcctctgtgatgatcatgtttatttactgataaaactcaatacctagaactgcacctagctcatgatggtacctaataaatacttcaatgaaatgatgtggtgatgcatgcctatagttttagctacttgggagggtggcctgagcccaggggttctagaccagcttaggcaacatagcaagaccccatctcaaaaaaaaaagcatcagcaaaaacaaaaaaaaaaaaaaaaa

SEQ ID NO: 30274 - DNA, 4028 bp, Homo Sapiens
gcatgatgggagagtgtgtggagtgggcggggggtctccgcggaggaggtggaggaggcggcggcggcggcggaagagggcggagggtagtgggatgggggtcccgcggcagcggtgaaactccgggtgggcgtccatggtgctgctgcgctgacagggctgtgagcagccggccttccgctctcaccagttccgcgtcggaatagacggtccttccccggggagtcagttcctccccgggcccctgagccatgcccatcgcagccgccccgaaggagccaggtgtaaattaattatttgaaagcaactgaacaatggagccagacatcattcgaatgtactcttcatccccaccaccattagacaatggagcagaggatgatgatgatgatgaatttggggaatttggtgggttttcagaagttagcccttctggtgtagggtttgttgatttcgatacaccagattatactcgtcccaaggaagagtttgtaccttcaaaccattttatgccaattcatgaattctcagaaaatgtagatagccttacaagctttaagtccattaaaaatggtaatgataaggacatcactgctgaactttctgctcctgtgaaaggacagtctgatgttttactttctaccaccagcaaagaaataatttcatctgaaatgttagctacttccattgatggcatggaaagaccaggaaatttaaataaagtagtggagcagagacagaatgttggaacacttgaaagtttctctccaggagattttagaactaatatgaatgttgttcatcaaaacaagcagttagagagctgcaatggtgaaaagcctccttgtctggagattctaacaaatgggtttgcagtgttggaaactgtaaatcctcagggaacagatgatctggacaatgtagctgattcaaagggacggaagcctcttagcactcatagcactgagtataatttagactctgtacctagtcctgctgaggaatttgcagattttgccacattttccaaaaaggaaaggatacaattagaagaaatagaatgtgcagttttaaatgatagagaagcactaaccattcgggaaaacaataaaattaatagagtcaatgaactgaattctgtaaaagaagtggctttgggtagaagcttggataacaaaggagacactgatggagaggatcaggtttgtgtttcagaaataagcatagtgactaacagaggtttcagtgttgaaaaacaaggccttccaacactgcaacaggatgaatttttacagtcaggtgttcagtcaaaggcttggagtttggtagactcagctgataattcagaagccattaggagagaacaatgtaaaactgaagaaaaacttgacttacttacttctaaatgtgctcacctatgcatggattctgttaaaacttctgatgatgaagttggttctcccaaagaagaaagtagaaagtttactaatttccaaagcccaaacattgaccccacagaagaaaatgatttggatgattctttaagtgtaaaaaatggtgatagtagtaatgactttgtgacttgcaatgatatcaatgaagatgattttggtgattttggtgactttggctctgccagtggctcaactccaccttttgttactggtactcaagattcaatgagtgatgccacttttgaagagtcttcagagcactttccacattttagtgaaccaggtgatgactttggagaatttggggatataaatgctgtttcttgccaagaggagacaatattaacaaagtcagacctaaaacagacttctgataatttatcagaagaatgtcaattggcaagaaaatctagtggaacaggcactgaacctgttgcaaaacttaaaaatgggcaagaaggtgagattggacattttgattctgtgccaaatattcaggatgactgcaatggttttcaagactctgatgattttgcagacttcagttcagctggtcctagccaagttgtagattggaatgcttttgaggatgaacaaaaagatagttgttcttgggctgcttttggagaccagcaggctactgaatctcatcatcgaaaggaagcctggcagtcacataggacagatgaaaatattgatactccaggaacccccaaaacgcacagtgtaccttcagcaacttccaaaggagcagttgctagtggccatttacaggaatcagccacttcagttcagacagctttattaaaccgcctggagcgaattttcgaagcatgttttccttccatacttgtccctgatgctgaagaggaagttacttccctgaagcacttgctggaaacaagcactttgccaataaaaacgagagaggccttacctgaaagtggggaattgctagatgtgtggactgagctacaggatatccatgatgcacatggcttgagataccagtggggcggctcccatagcaacaagaagcttttgtcctccttgggaatagacacccgaaacattctcttcacgggcaataagaagcagcctgttatagtgcccatgtatgcagcaggattgggtatgttagagcccaccaaggaaccactgaaaccactttctgctgcagaaaaaatagcttccatcggtcagacagccaccatgtcaccagatatgaacacatgtacatctgatcagttccaggagtctctaccacccgtccagtttgactggagtagcagtggccttactaaccctttagatggtgtggatccggagttgtatgagttaacaacttctaagctggaaatctccacctcaagcctcaaagtgactgatgcatttgcaagactcatgtctacagtagagaagacaagcacatctaccagtaggaaaccgaaaagagaagagcacctaagtgaagaagctatcaaggtgatcgctggccttcctgacttaacattcatgcatgccaaggtgttgatgttcccagccacgttaacaccttccacaagctctcaagaaaaagcagacggataactgatgtgaattggacagtttctattgcttttccttttttccatcccttccctaccatcaaaagcatacctgctctaattaaaaaaaaaaaaaaaaaaaattcaagttcagctgatttgttggtaagccgcactagaaaggtatacatagtaatgtatatttatttacatactgaagtcctaaatttatattagaaaaatgtaaataatcgggggtaaacatttttgaagatttattctttttgtgttgctggggtgtatacatttatgtctttgtgaaatacactggtggtgtccttcttacaaaacttttgaaataaaaaaaaaactcaaatcttcactgtctgtgaaatccccttcagtcttttcagattgcattgactgtcctcttgatttttcatattacatgtcaaattacttttgctatcataaataagctccaaagtcccccatttaatttttttttaattttgtgtatgatgggtttcagatctggcttttgttaacattttggggcttttttaatcttttcaatctggcgtattgctgtttgaccttttgcaaggtacttaattgctcttttgttatagggtatggatcattgtcagaacttgattggaggggtttaaagagattgtgtctgtttaaaatcagtatgattcagagaaggaccaaattatatgaatgtcttacaatggaatttacttgttactgatttttttgttctattgtaccactattttttgaggattttgcacagtgtaaaatgacataatcatagattgctatggtttaggctgtatatacagtgaaaactatgggttttaaatgtttggggaaattcctatggaaaaaagagagacatgtagaagaacctctaacaaggttaatgtgcatgcccaaggtcttttgaaatttcagtgtgtaaatttccttttagcttatacaaaaataaaataatttaaaagaaaaaaaaaaaaaaaaa

SEQ ID NO: 30275 - DNA, 8429 bp, Homo Sapiens
actacaaaggatgtctgtgatgacagtggccatcccatttgatcctcgttattcttcttttatcgaaggaaactgagagtcaccttcttttctaggcagttaggtaactgaagccgaaaggtattgtgacagatccactgggctgtaaaaggcagcgtgtggaggtggagcccagagtttctgcctccacagttaaaagctcagacagggctttgggagcagggcctgcaaatcaaagatgaaagaacaacctgtcttggagcgcttgcagtcccagaaatcctggattaaaggagtatttgacaagagagaatgtagcacaatcatacccagctcaaaaaatcctcacagatgtactccagtatgccaagtctgccagaatttaatcaggtgttactgtggccgactgattggagaccatgctgggatagattattcctggaccatctcagctgccaagggtaaagaaagtgaacaatggtctgttgaaaagcacacaacgaaaagcccaacagatacttttggcacgattaatttccaagatggagagcacacccatcatgccaagtatattagaacttcttatgatacaaaactggatcatctgttacatttaatgttgaaagagtggaaaatggaactgcccaagcttgtgatctcagtccatgggggcatccagaactttactatgccctctaaatttaaagagattttcagccaaggtttggttaaagctgcagagacaacaggagcgtggataataactgaaggcatcaatacaggagtgtccaagcatgttggggatgccttgaaatcccattcctctcattccttgagaaaaatctggacagttggaatccctccttggggtgtcattgagaaccagagagaccttattggaaaagatgtggtgtgcctgtaccagactctggataaccccctcagcaagctcacaacactcaacagcatgcactcgcacttcatcctgtctgatgatgggaccgtgggcaagtatggaaatgaaatgaagctcagaaggaacctggagaagtacctctctctgcagaaaatacactgccgctcaagacaaggcgtgccggtcgtggggctggtggtggaaggcggtcccaacgtcatcctgtcagtgtgggagactgtcaaggacaaggacccagtggtggtgtgtgagggcacaggtagggcggctgacctcctggccttcacacacaaacacctggcagatgaagggatgctgcgacctcaggtgaaagaggagatcatctgcatgattcagaacactttcaactttagtcttaaacagtccaagcaccttttccaaattctaatggagtgtatggttcacagggattgtattaccatatttgatgctgactctgaagagcagcaagacctggacttagcaatcctaacagctttgctgaagggcacaaatttatcagcgtcagagcaattaaatctggcaatggcttgggacagggtggacattgccaagaaacatatcctaatttatgaacaacactggaagcctgatgccctggaacaagcaatgtcagatgctttagtgatggatcgggtggattttgtgaagctcttaatagaatatggagtgaacctccatcgctttcttaccatccctcgactggaagagctctacaatacaaaacaaggacctactaatacactcttgcatcatctcgtccaagatgtgaaacagcatacccttctttcaggctaccgaataaccttgattgacattggattagtagtagaatacctcattggtagagcatatcgcagcaactacactagaaaacatttcagagccctctacaacaacctctacagaaaatacaagcaccagagacactcctcaggaaatagaaatgagtctgcagaaagtacgctgcactcccagttcattagaactgcacagccatacaaattcaaggaaaagtctatagtccttcataaatcaaggaagaagtcaaaagaacaaaatgtatcagatgaccctgagtctactggctttctttacccttacaatgacctgctggtttgggctgtgctgatgaaaaggcagaagatggctatgttcttctggcagcatggagaggaggccacggttaaagccgtgattgcgtgtatcctctaccgggcaatggcccatgaagctaaggagagtcacatggtggatgatgcctcagaagagttgaagaattactcaaaacagtttggccagctggctctggacttgttggagaaggcattcaagcagaatgagcgcatggccatgacgctgttgacgtatgaactcaggaactggagcaattcgacctgccttaaactggccgtgtcgggaggattacgaccctttgtttcacatacttgtacccagatgctactgacagacatgtggatggggaggctgaaaatgaggaaaaactcttggttaaagattattataagcattattttaccacccaccattttgacactggaatttaaaagcaaagctgagatgtcacatgttccccagtcccaggacttccaatttatgtggtattacagtgaccagaacgccagcagttccaaagaaagtgcttctgtgaaagagtatgatttggaaaggggccatgatgagaaactggatgaaaatcagcattttggtttggaaagtgggcaccaacaccttccgtggaccaggaaagtctatgagttctacagtgctccaattgtcaagttttggttttatacgatggcgtatttggcattcctcatgctgttcacttacaccgtgttggtggagatgcagccccagcccagcgtgcaggagtggcttgttagcatttacatcttcaccaatgctattgaggtggtcagggagatctgtatttcagaacctgggaagtttacccaaaaggtgaaggtatggattagtgagtactggaacttaacagaaactgtggccattggcctgttttcagctggcttcgtccttcgatggggtgaccctccttttcacacagcgggaagactgatctactgcatagacatcatattctggttctcacggctcctggacttctttgctgtgaatcaacatgcaggtccatatgtgaccatgattgcaaaaatgacagcaaacatgttctatattgtgatcatcatggccatagtcctgctgagctttggagtggcacgcaaggccatcctttcgccaaaagagccaccatcttggagtctagctcgagatattgtatttgagccatactggatgatatacggagaagtctatgctggagaaatagatgtttgttcaagccagccatcctgccctcctggttcttttcttactccattcttgcaagctgtctacctcttcgtgcaatatatcatcatggtgaacctgttgattgctttcttcaacaacgtttacttagatatggaatccatttcaaataacctgtggaaatacaaccgctatcgctacatcatgacctaccacgagaagccctggctgcccccacctctcatcctgctgagccacgtgggccttctcctccgccgcctgtgctgtcatcgagctcctcacgaccaagaagagggtgacgttggattaaaactctacctcagtaaggaggatctgaaaaaacttcatgattttgaggagcagtgcgtggaaaaatacttccatgagaagatggaagatgtgaattgtagttgtgaggaacgaatccgagtgacatcagaaagggttacagagatgtacttccagctgaaagaaatgaatgaaaaggtgtcttttataaaggactccttactgtctttggacagccaggtgggacacctgcaggatctctctgccctgactgtggataccctgaaagtcctttctgctgttgacactttgcaagaggatgaggctctcctggccaagagaaagcattctacttgcaaaaaacttccccacagctggagcaatgtcatctgtgcagaggttctaggcagcatggagatcgctggagagaagaaataccagtattatagcatgccctcttctttgctgaggagcctggctggaggccggcatcccccaagagtgcagaggggggcacttcttgagattacaaacagtaaaagagaggctacaaatgtaagaaatgaccaggaaaggcaagaaacacaaagtagtatagtggtttctggggtgtctcctaacaggcaagcacactcaaagtatggccagtttcttctggtcccctctaatctaaagcgagttcctttttcagcagaaactgtcttgcctctgtccagaccctctgtgccagatgtgctggcaactgaacaggacatccagactgaggttcttgttcatctgactgggcagaccccagttgtctctgactgggcatcagtggatgaacccaaggaaaagcacgagcctattgctcacttactggatggacaagacaaggcagagcaagtgctacccactttgagttgcacacctgaacccatgacaatgagctcccctctttcccaagccaagatcatgcaaactggaggtggatatgtaaactgggcattttcagaaggtgatgaaactggtgtgtttagcatcaagaaaaagtggcaaacctgcttgccctccacttgtgacagtgattcctctcggagtgaacagcaccagaagcaggcccaggacagctccctatctgataactcaacaagatcggcccagagtagtgaatgctcagaggtgggaccatggcttcagccaaacacatccttttggatcaatcctctccgcagatacaggcccttcgctaggagtcatagttttagattccataaggaggagaaattgatgaagatctgtaagattaaaaatctttcaggctcttcagaaatagggcagggagcatgggtcaaagcgaaaatgctaaccaaagacaggagactgtcaaagaaaaagaagaatactcaaggactccaggtgccaatcataacagtcaatgcctgctctcagagtgaccagttgaatccagagccaggagaaaacagcatctctgaagaggagtacagcaagaactggttcacagtgtccaaatttagtcacacaggtgtagaaccttacatacatcagaaaatgaaaactaaagaaattggacaatgtgctatacaaatcagtgattacctaaagcagtctcaagaggatctcagcaaaaactctttgtggaattccaggagcaccaacctcaataggaactccctgctgaaaagttcaattggagttgacaagatctcagcctccttaaaaagccctcaagagcctcaccatcattattcagccattgaaaggaataatttaatgaggctttctcagaccataccatttacaccagtccaactgtttgcaggagaagaaataactgtctacaggttggaggagagttcccctttaaaccttgataaaagcatgtcctcttggtctcagcgtgggagagcggcaatgatccaggtattgtcccgagaggagatggatgggggcctccgtaaagctatgagagtcgtcagcacttggtctgaggatgacattctcaagccgggacaagttttcattgtcaagtcctttcttcctgaggttgtgcggacatggcataaaatcttccaggagagcactgtgcttcatctttgcctcagggaaattcaacaacaaagagctgctcaaaaattgatctataccttcaaccaagtgaaaccacaaaccataccctacacaccaaggttcctggaagttttcttaatctactgccattcagccaaccagtggttgaccattgagaagtatatgacaggggagttccggaagtataacaacaacaatggtgatgaaatcacccccaccaacaccctggaggagctgatgttggctttctctcactggacctatgagtacactcggggagagctgctggttttagatttgcaaggtgttggagaaaatttgacagatccatctgttataaaacctgaagtcaaacaatcaagaggaatggtgtttggaccggccaatttgggggaagatgcaattagaaacttcattgcaaaacatcattgtaactcctgctgccggaagctcaaactcccggatttaaaaagaaatgactattcccctgaaaggataaattccacctttggacttgagataaaaatagaatcagctgaggagcctccagcaagggagacgggtagaaattccccagaagatgatatgcaactataaaaagggaggagcaagaagatcccagtgcttgccctgcctgccaggaactctgtgataacatagattgatcaacgtgatgttgattacatcagcgtctccttgggacacgccttctgagcctcacatctccttctgttcaaaggcctcattggtatatgatcaatgggttctcctagacactgacctctgtccagggcactttgcagctccatcctcaagttccacacgaagatgcttggatgagtcagctgggaatattgttcttgtgtacctcattgctttagctggtcacttggaactttggagcagaatcctgcacattaaaggatggggttgggggggatacatttattttattttctcactatgtatgcagactggaccccctactactatttgtcacctcacccacagattgtatttatgtctatatatatgttcataaaaagttatgtgatttcctcctctgtcttttccacaacataggactttgaatagcaatgataggaaaaacaatggaacaagggtgggtttgcacagattggagcacattcctgcacaaactaccaagtatactggtgaaatctcgatgggtttcagatattgtcagtgaatcatatgatgcctggatatttcaggtttctgtaaaagaaagggaaacctaaaacaaatacccttccatatataatatatatggaatatgtatattatatatatttttatatatataatatatatggaatatatatattatatatataaaatacatatggaatatatatattttatatatatatatatatttttatttttgagatggagtttcactctttttacccaggctggagtgcaatgatgcgatctcactgcaacctctgcctcccgggcttgagcgattcttgtgtctcagtcttccgggtagctgggactacaggtgtgcaccactatgcctggctaattttgtatttttagtagagatggggtttcaccatgttggccaggctggtctcaaactcctgacctcagatgatccacctgccttggcttcccaaagtgctgggattacaggcgtgagccactgcgcctggcctttttttttttttttttaaacgagaacaagaatatgaagaactggaaatcattaagaaagggtttcccttccttaaagctcaggggtactattagttaggagttgactaactcaacctgtaaaacaccactcctccttccaaagttgtatatataatattgcaggttaaattactttatgtcaggtcctatgaagaaagatacggtttcagactgaaaacatgtttcacaggtgtttgcttccttccagagcagagttccctattcccctggcataaagaatgtatatatattttgaaatatggctgagaacatgtcattggtttgtgaggcctaaggtgaagcactcctggcagccacactgtgtagtgtatttgagggatcagtcatccctcttgtatgctgggcctggttgccctacctcgaacaagcaccagcttttcacacaaggagagatgtggggctgggagtcctctccccatcctattgcatctcctttcttattataagctgttccagttcacaggcagcaaacctcctgggtttgaaaaattccaacttatttttatctttaatcctgacattagctgacttgctagtgagcttgctttaaaaatctacactcttgcattcttaggcatacaggggaaatgttgaaaaggaaggtggaaaaccaagaatttagtttgccaatgattgcctctgattcttgtaagtttgagttccacaagggctaatttattccccttttacttgggttttggggtggtggaaagcgggaaatttgggtgatttgttgattggcaatgaggataaaatgttaatacttttttggggacttaacaactttatcctattctacaagtcagtaaaggaacaattggtactcacctcagtgctgcactcaactatggaaagaggcagagtttgcttgcccaattgccaaactaaagacatcagttcattggtcaaatatttgttacctggaatggaacttgaaagcaaatacatttggatttcaaatttcaaaaaa

SEQ ID NO: 30276 - DNA, 2136 bp, Homo Sapiens
accgcgctaagatggcgactcccatgcatcggctaatagcccggagacaagctgaagcgaataagcaacatgtaagatgtcagaaatgcttggaatttggacattggacttatgaatgcacaggaaaaagaaaatacctacataggccctcaaggacagcagaactaaagaaagctttaaaagaaaaagaaaacagattattattgcaacaaagcattggagaaaccaatgtagaaagaaaggccaagaaaaaaaggtctaagagtgtaaccagttccagtagcagtagcagtgacagttctgccagtgattcttcatcagagagtgaagaaacatctacctcttcctcctcagaggacagtgacactgatgaaagctcctctagttcctcatcctcagcctcctccacaacctcttcctcctcctctgattcagactcagattccagctcttccagtagcagtagcaccagcacagatagcagctctgacgatgaaccaccaaagaagaagaaaaagaaatagagttgctccattcatattggactgatggactgaaaacattgatgtgattcttgaaagggaatttagaatatgttaaggccaagtaggttaactggtgaacatttctagaattcaaaagtttctaaatgttttacattgtaagagcatagagaatattaataatggcttatagagagagacttttatttgaagggtgaatcttgttttttttatctttaaaatatatctctagaacttaaagctgaaatctgcaaatctgtttgtgtgatgaaactatcttttctctctgtgaaataaatgccatactttgttatatatgttagtggtatgtatcagacatattttcaggatggtgcgtcaggatatctggcagtggatttctaatgcttttggctgtatgttatgtaagatttaatatgttgttactgtaagcttaggagttttcctactattaataaatgtgctctatttttacatttatgttcagaaagttatctgactttttgtcctaagtggtatgttcaaggagcctattaatatatttatagtttttgaatgctgtaagtttcaaattgctgtgttacgtcattcattttcttctggttccttaagtttttcaagttatccttttctgaggaaaattattctagaggaacctaaaaagggacaaaaaaattgaaacttcttaggagtctaatcttggtgccttctgttaaaagtcagtgtatcagaaaagaaagcagccatgtaagaggctaacttaaatagaagtgctagaaatatctttgtgtattaacatgcaataaaaggtaccattcaaagcagggggaaaggtaggaagaagaggtaatttttactgaaaattagggcaatgttggtcgccttttattaaaagctttttttaagctttcataaagattgctttttgctatttttgaaaatatggtattatagtttgtatggtaactggtcatatatgacagtctactgcatatatatgaatgactaggattaatctggtgtgtttacataggatatacatagttgaaatctagcatgaaaggttaaaaaggagatactgcacaatatttcttaaaagtaaaatgctgttattgtgatgagtctttggtttaacatcacagtattctgtgatgtctttttaactttttggaaagaggtatcatttgtagaaaaaatttgatttgggttaaatataggtttttaaaactataaatgttgtcttttttatatttttatgaaaaagcagtagaaaattacttttgaagaaaacaggctatttaaatattgaaatatatgtatgttgtgagtttaaggagcctgtaattgtcagttttacaaaaccatctgtgttcaatggttgtaaataaattctcaaaacatcatttcaaaggctgcctacagaatattatcacttgacagatagagttaataaattaccaatcaggcacattttataatgtttgtctctgtaaaggtaatattagcagttaaagaacacggatgagaaaagaatgtgttacataggttgcatcacttgcagttaaataaaactcacaatttgtgctcacaagcttaaaaaaaaaaaaaaaaa

SEQ ID NO: 30277 - DNA, 1997 bp, Homo Sapiens
agccgcctctgccgccgccgccgcgttggcctcgccgcccctgctcggacaccatgccacaaggagagtgatctcttcccctgttttcacaatggaggactccggaaagactttcagctccgaggaggaagaagctaactattggaaagatctggcgatgacctacaaacagagggcagaaaatacgcaagaggaactccgagaattccaggagggaagccgagaatatgaagctgaattggagacgcagctgcaacaaattgaaaccaggaacagagacctcctgtccgaaaataaccgccttcgcatggagctggaaaccatcaaggagaagtttgaagtgcagcactctgaaggctaccggcagatctcagccttggaggatgacctcgcgcagaccaaagccattaaagaccaattgcagaaatacatcagagagctggagcaagcaaatgacgacctggaaagagccaagcgcgccacgatcatgtctctcgaagactttgagcagcgcttgaatcaggccatcgaaagaaatgccttcctggaaagtgaacttgatgaaaaagagaatctcctggaatctgttcagagactgaaggatgaagccagagatttgcggcaggaactggccgtgcagcagaagcaggagaaacccaggacccccatgcccagctcagtggaagctgagaggacagacacagctgtgcaggccacgggctccgtgccgtccacgcccattgctcaccgaggacccagctcaagtttaaacacacctgggagcttcagacgtggcctggacgactccaccggggggacccccctcacacctgcggcccggatatcagccctcaacattgtgggagacctactgcggaaagtcggggcactggagtccaaactcgcttcctgccggaacctcgtgtacgatcagtccccaaaccgaacaggtggcccagcctctgggcggagcagcaagaacagagatggcggggagagacggccaagcagcaccagcgtgcctttgggtgataaggggttggacacgagttgccgctggttgtccaaatcaacaaccaggtcgtccagctcctgctgaagcctgttcttggtcttttccagtttatcatacgcggccgccttctcctcgtactgctgggtgaggttctcgatctccttctggaacctcttcttcccctcttccagagcttccacggtgctggcaaagtcctgcagcttcttcttcgagtcggagagctacaaggacagcgtccagggtagggtgagagggggaccatgaatggcccctgtccctggccccacagactctgagaagcgaagaccatgtctcctcgttggagaaacccaatagcaggggaagctggggggtcaagcaccatcgcaccaacactccaccgcgatctgcctgcgggggatctcagcgcagagaagttgagaggacccatgaaggaagcaaggacacggggcaggcacctggatgttgagagtggagatgtggcgctccaggttctgcttggcctccatctcctcgtccagctggtcttgcaggctgttccgctcctcctccagctggcgcagcttcgtagacacgttgagcttctgccgggtttcttcttgaagcagctcctgcaaaagggatgcaaagaggtcccagggacctgccccgaggaaggccaccccccaggtcccctggatgatgtggcaggacactcacctgggtgtcctggagctgggaactgagggacgccacgtccttggccagcttaatggccttcccctcggcctcgttaagcatccctgtgacgctctcaacttcattctaagggtgccaagagactggttagtcaaagcctctagaaggggatcctcgttgaaaggagccctttttactcaaaacacatgggctagtacttgaggtgttcactgattgagaaaatacccgtgaggtatgggactctgaaaaaaaaaaaaaaaaa

SEQ ID NO: 30278 - DNA, 7226 bp, Homo Sapiens; identical to SEQ ID NO: 23630

SEQ ID NO: 30279 - DNA, 3770 bp, Homo Sapiens
cgggggcggtgagtaggtagtgcggatgcgggcgcagaactacgtttcccagcaggcatacagttggtggggcggggtgtgtgtgtgtgttgggaggcgggggtccctctcctttggcttggggctccggagttgccactgccgccggcgctggtaagcttttcaggatgtccagcaaagaatcctgtgggaaaaaagagacatctcagaggaaagacaccaccacctcatcacccaattttggtgaaaaagacaagaaagagagaaaaaccccagcaagttctactagttcgtcttctataagatcagtttcatcagaaaagagaaaactgaaatcagatcatacagatgttctgtactataatataaaaagaagacaaggactgaaaagattgagtgtagaaattgacactctcagaaggagaccaaaaatcggttcttcatcccaaagacctattaaactcaaagaagcatcatattcaaatgataatcaaattattttgcagagtccttcttcaaatggaactaaaaaagacatacataaatgtgtagactttaaacctaaagatatcaaattgacaaatgctgggagcaagcttgaccatggagttaaaagccttagtagtcctaagattgccagtgatgtgaaacctaaagccgaaggccaggcaagtgaaaataaatggtctcatttacttgttcagagagagaagatgaaagaactcaagaaaggaagaaacagtaaatttagagacaattctgaaaaatgtgtcttagagaaatggaagagaaatcaattttctcaggattataactccaacaagataattaaggaacccttgggatctaggagacagaagatcagtttcaaaatccctataaaatcccgtgacaccctccagaaacttgtagaagaaaatgtcttcaacatagattctaataattcgaagactaagcaggaagaaagagaatacctggaaagctcccaggtttcattaaatgtgactaggcagaaaactgaacatttactttcagattttacatataagcggactgttcatgagtggaaacgaaaacatcattatgaccatcaagaaagtaatgattcacattctagggaaaacctaacccagagttttgaagcaccatgttgttccgtgtcatctgaaagtatccaggatgcagatcaagagatgcagatagtagaagagcttcatgctgcacgtgtgggaaaaagtgtggatttacctggagagttaatgagtatggaaattgacttagaagatgatgtacattcctcctctgcaaataatacttcagacagaaagcttctaattgttattgacacaaatattctgatgaatcatctcaaatttgttagaattttgaagacaacagaagtaccaggttttgacaaacttgtgttaataattccctgggtcgttatgcaagagctagatcgtatgaaggaaggaaaactactaaaacgtgcccagcacaaagctatacctgcagttcatttcatcaacgacagtctcaaaaatcaagatagaaagctatggggtcagtcaatacaacttgcatcccaaaaacattatggattgagtgatgagaacaatgatgatcgagtactaaaatgctgtctccagcaccaggaattattcccttgttcttttgttattctgtgcacggatgatagaaacttaagaaacaaaggcctgataagtggtgtgaagtcactcagtaaagaagaattgagtgcagagttattacgcttatctctgaacacagatgtgtgtcatcagccttgtattcctaagcaacagttgaaagcagaaacaacacccttgaaagagagctataaggaggaatctacaagttctggactgtccattctgcttgagagcattgtatctgatcttgaaaaatctcttggaacaggtttatcttcaatattagaaacagaaatgaaaattgcttttggaaacctttggatggagatcctgtacctgaaaccaccatggactctactacatttactacagtgctttaaaaaacattggttggctgtatttggattagttatggaaaagaacttgcttttaactattgagagcctatacaaaaatctccgtaaagctaataaggcagtggattttacaacagtcaaattcttgcttcaggattctagaagtttgttacatgctttcagtacaaggtcaaattatgatggtattcttccacagacctttgctcaagtaaacaacctccttcagacatttgcagaggtcaagacaaaacttaagccaaattcttcagaaaacacagtgactaaaaagcaggaaggtacttcattgaagaattctcataatcaagaaatcactgttttctcgagttctcatcttccccaacccagcaggcatcaagaaatctggtctatcctagagagtgtttggattacaatatatcagaacagcacggatgtatttcaaagattgggctcaaattcagctctgactacttcaaatatagcatcatttgaagaagcatttatatgtcttcaaaagttaatggcagctgtgagggatattcttgaaggaattcaaaggattttggccccaaacagtgattatcaagatgttgagaccctctataacttcctaatcaagtatgaggtaaataaaaatgtcaaatttactgcccaggaaatttatgattgtgtttctcagactgagtatagggaaaagttaaccattggatgccgccagctggttgagatggaatataccatgcagcagtgcaatgcatctgtttatatggaggccaaaaacaggggatggtgtgaagacatgctcaactataggatataagtactgatttgtaactttaaaggaattgcatttgtccttaagaataacagagtagttttcaatctggtcactcttttgggccaaacccaagagaattttaagaaatgtttcataggtataaaaaggtgatcgcctattactgacagtctcattgtagctctaaaaagcctaatgtatccactgtggaataaactccataggctcaactcttctggagttcacaatgcctccatacctctattcttgatagtgagccagtatctctaaggaaaggagagccgtatttttagtcatcctagggcaggagccactgtggcatctgaggaagacccagggtacagtattagcatttctttcaaccctaagtatgggcatgtgaccagagacactgccaaaccctaagaaatcattagggcatgatcatgctcaccatatttcacaaatgaaatcttaatgtgggctgttttttatgatcaaactgtcatccatgttgacctgatgaaaataacaccctccttcacctccctcagggtaatgaaagtagaaatttgactgaagctcctacttccttatacagcctttccttctgtgggcttgtcacttttcagtacatttctagtggggaagagcagggcgacccctctgctgggtttctccttaaatgtgaagcaaaataaatttatataatggaatttggtggcagtgactgatgtttgtctctagctaaaaccaactgtttagttgactttttagttataggataagttggaagtccttgtttactggaatatattatgcttttgttaacacattagattaaatagaatttggtattctattataaatgtttattttttaaagcaataaataacttatttttggtaaaaaaaaaaaaaaaaa

SEQ ID NO: 30280 - DNA, 1745 bp, Homo Sapiens
ttccgcttccggcagcgcgagataaatcacgagaggaagcttaaatctgtcgtttgaatttaggaccacctcggttcacaatggtccgtagtggaaaaaatggggaccttcatcttaaacagattgcatattacaaacgaactggtgaatatcattcaactacactgccaagtgagagaagtggcataagaagagcagcaaaaaaatttgtcttcaaagaaaaaaagctgttttatgttggaaaagacagaaaacaaaatcgtttggtaattgtttcagaagaggaaaaaaagaaagtcttaagagaatgccatgaaaatgacagtggagctcatcatggtatatccaggaccctcactctggtagaatccaattattattggacatctgtgaccaatgatgccaaacagtgggtatatgcttgtcagcattgccaagtggcaaaaaatacagttattgtagcaccgaaacagcaccttctcaaggtggaaaatccatggagtttagttactgttgatctgatggggccttttcatacaagcaacagaagtcatgtatatgctataatcatgacagatttgttcaccaaatggattgtgattttgcctctatgtgatgtttcagcatcagaagtttctaaagctattatcaatatatttttcttatatggacctcctcagaaaataataatggaccaaagagatgaattcattcaacagatcaatattgaactgtacagattgtttggcataaagcaaattgtaatttctcacacctctggaactgttaacccaatggaaagtacacctaacacaatcaaagcatttctctccaaacactgtgctgaccacccaaacaattgggatgatcacctatcagctgtttcatttgccttcaatgtaactcacttggaacctactaaaaatacaccatattttcaaatgtttagtcgaaatccttatatgcctgagacttcagatagtcttcatgaagtggatggtgataatacaagtatgtttgccaaaattctagatgcaattaaagaagctgataaaataatggagaataagacaacttcactgggccagatggagaacaacaatttggatgaactaaataaaagcaagatcattgttaaaaagaaacccaaacaattaaatccatttcatttaaaagtgggtcatgaagttttaagacaaaggaaaattggtggaaggatggtcgttttcagtctgaatgggttggtccttgtgtcatagactatattacagaaagtggatgtgctgtcctgagagacaacactggggttagactgaaaagacctatcaaaatgtcccaccttaagccctacataagagaatccagtgaacaagaaagtctttatctcttgcaaggttcagtagtggcagatcatgactacattggattgcctgaaattccgattggagcatatcaagcaaatattctggtggaagatgcaactattggtatagtcgataatgaattactgacatcaagcaaggatcgtgaactattagaatatagaaatacgaaaatctctccattgatagacgatcatagttctcttgaaaagcagactttcagtctgttggactcttcaaaccaggttcttgaatacttaagttagtaaataccaaaatttatttaaagtgcttgtttagaatataaattcttaatgatatcttattcattaaaaacgttgtatagaaaaaaaaaaaaaaaaa

SEQ ID NO: 30281 - DNA, 1704 bp, Homo Sapiens
atccatgctaaaggtaaacaaactgcaacttatatctgcaatttattttggtatagacaagaggtatgccagtagcacactggtggcttcagaagaaattctcaacacctagctcgccagagagtctatgtatgggattgaacaatctgtaaactaaaggatcctaatcatgaaaataagtatgataaattataagtcactattggcactgttgtttatattagcctcctggatcatttttacagttttccagaactccacaaaggtttggtctgctctaaacttatccatctccctccattactggaacaactccacaaagtccttattccctaaaacaccactgatatcattaaagccactaacagagactgaactcagaataaaggaaatcatagagaaactagatcagcagatcccacccagacctttcacccacgtgaacaccaccaccagcgccacacatagcacagccaccatcctcaaccctcgagatacgtactgcaggggagaccagctgcacatcctactggaggtcaaatgtgggtgtagagattatggaaaaattcaatacaattagtgcctccaaatgcaacaaagaaacagttgcaatgaaagagaaatgcaagtttggaatgacatccacaatccccagtgggcatgtctggagaaacacatggaatcctgtctcctgtagtttggctacagtcaaaatgaaggaatgcctgagaggaaaactcatatacctaatgggagattccacgatccgccagtggatggaatacttcaaagccagtatcaacacactgaagtcagtggatctgcatgaatctggaaaattgcaacaccagcttgctgtggatttggataggaacatcaacatccagtggcaaaaatattgttatcccttgataggatcaatgacctattcagtcaaagagatggagtacctcacccgggccattgacagaactggaggagaaaaaaaatactgtcattgttatttccctgggccagcatttcagaccctttcccattgatgtttttatccgaagggccctcaatgtccacaaagccattcagcatcttcttctgagaagcccagacactatggttatcatcaaaacagaaaacatcagggagatgtacaatgatgcagaaagatttagtgactttcatggttacattcaatatctcatcataaaggacattttccaggatctcagtgtgagtatcattgatgcctgggatataacaattgcatatggcacaaataatgtacacccacctcaacatgtagtcggaaatcagattaatatattattaaactatatttgttaaataacacaaaagtctgaaattcattcacttaagtaaaaaaatttattgactgtctactagcaggccagatgctgtgtttggctctgaattcccaactagcaagagcagagaatctacattatggctgatccataagccaccaattcagctaaatgagatgtttctaatctgggcttccacttaaaaataaaactaaaaatactcatgaaaagagcctacccttcttgatcagagccatacccctcttcaccaatgggaagtcaagacacctatgggtaaaagttctctctgatgcatgaaaactcagagtgataaagtaattttaaaataaaaatttggagaaagcaaaaaaaaaaaaaaaaa

SEQ ID NO: 30282 - DNA, 4669 bp, Homo Sapiens
tttttattattgctgttattgaggttgagggagaagagatcggtctaaattctggctgggtaagtggggggattctcggcgatgagaaacgggggacttagaagccggaggaaaatcagcagccccacatctccacttctccagtccgccctactctccacccgtgacctccagtggagaccccaggcggcagcatcagtatttgatcggcccttcgtcagcacgctgccagccctggccggctgggttcgccaggcatcacccgctcggctctgaagcggacgcctggccctgcaccgggctttggaaggaccctctctgcgctcgccccctccccagggtggctccgctttcgagcccgggcgcggcgcccaccatgcgcggctgcctgcggctcgcgctgctctgcgcgctgccctggctcctgctggcggcgtcgcccgggcacccggcgaaatcccccaggcagcccccggcaccgcgccgcgaccccttcgacgctgccaggggcgccgatttcgatcatgtctacagcggggtggtgaacctcagcaccgagaacatctactctttcaactacaccagccagcccgaccaggtgacagccgtgagggtgtatgtgaacagttcctctgagaatctcaactacccggtccttgttgtggttcgccagcagaaagaggtgctgtcctggcaggttcctctgctcttccaaggactataccagaggagctacaattatcaagaagtgagccgcaccttatgtccctcagaagcaaccaatgagacgggacccttgcagcaactgatatttgtagatgtcgcatccatggcacccctgggtgctcagtacaaactgctagttaccaagctgaagcacttccagctccggacaaatgttgcctttcactttactgccagcccctctcaacctcagtattttctatacaagtttcccaaagacgtggactcagttatcattaaagtggtgtctgaaatggcttatccatgttctgttgtctcagtccagaatatcatgtgcccggtgtatgatctcgaccacaatgtggaatttaatggtgtctatcagtccatgaccaagaaagctgccatcacgctacagaagaaggattttccaggcgagcagttcttcgtggtatttgtgataaagcctgaagattatgcctgtggaggatctttcttcatccaggaaaaggaaaaccagacctggaatctacagcgaaaaaagaaccttgaagtgaccattgtcccttccattaaagaatctgtttatgtgaaatccagtcttttcagtgtcttcatcttcctgtccttctacttgggatgccttcttgttgggtttgttcattatctgaggtttcagagaaaatccattgatggaagctttgggtccaatgatggctctggaaatatggtggcatctcatcccattgctgccagcacacccgaagggagcaattatgggacaatagatgagtcaagctccagtcctggaaggcagatgtcctcctccgatggtgggccaccgggccagtcagacacagacagctccgtggaggagagcgacttcgacaccatgccagacattgagagtgataaaaacatcatccggaccaagatgttcctttacctgtcagatttgtccaggaaggaccggagaattgtcagcaaaaaatataaaatttatttttggaacatcatcaccattgctgtgttttacgcgctgcccgtgatccagctggtcattacctatcagacagtggtaaatgtcactggcaaccaggacatctgttactacaacttcctctgtgctcaccccttgggcgtcctgagtgccttcaacaacattctcagcaatctgggccacgtgcttctgggcttcctcttcctgctgatagtcttgcgccgcgacatcctccatcggagagccctggaagccaaggacatctttgctgtggagtacgggattcccaaacactttggtctcttctacgctatgggcattgcattgatgatggaaggggtgctcagtgcttgctaccatgtctgccctaattattccaacttccgattcgacacctccttcatgtacatgatcgctggcctgtgcatgctgaagctctatcagacccgccacccagacatcaatgccagcgcctactctgcctatgcctcctttgctgtggtcatcatggtcaccgtccttggagtggtgtttggaaaaaatgacgtatggttctgggtcatcttctctgcaatccacgttctggcctcgctagccctcagcacccagatatattatatgggtcgtttcaagatagatttgggaattttccggcgggctgccatggtgttctacacagactgtatccagcagtgtagccgacctctatatatggatagaatggtgttgctggttgtggggaatctggttaactggtccttcgccctctttggattgatataccgccccagggactttgcttcctacatgctgggcatcttcatctgtaaccttttgctgtacctggccttttacatcatcatgaagctccgcagctctgaaaaggtcctcccagtcccgctcttctgcatcgtggccaccgctgtgatgtgggctgccgccctatattttttcttccagaatctcagcagctgggagggaactccggccgaatcccgggagaagaaccgcgagtgcattctgctggatttcttcgatgaccatgacatctggcacttcctctctgctactgctctgtttttctcattcttggttttgttaactttggatgatgaccttgatgtggttcggagagaccagatccctgtcttctgaacctccaacattaagagaggggagggagcgatcaatcttggtgctgtttcacaaaaattacagtgaccacagcaaagtaaccactgccagatgctccactcaccctctgtagagccaactctgcattcacacaggaaggagaggggctgcgggagatttaaacctgcaagaaaggaggcagaaggggagccatgttttgaggacagacgcaaacctgaggagctgagaaacacttgctccttccatctgcagctttgggagtgcaacagggataggcactgcatccaagtcaactcaccatcttggggtccctcccaccctcacggagacttgccagcaatggcagaatgctgctgcacacttccctccagttgtcaccctgcccagaaaggccagcagcttggacttcctgcccagaaactgtgttggcccccttcacacctctgcaacacctgctgctccagcaagaggatgtgattctttagaatatggcggggaggtgaccccaggccctgccctactgggatagatgttttaatggcaccagctagtcacctcccagaagaaactctgtacatttcccccaggtttctgatgccatcagaagggctcaggagtggggtttgtcacacattcctcttaacaagtaactgtcactgggaccgagtcctgggtgcttacatattccttcgtgtcttcatctcactgacctgtgtggacctcatcactctgactctgccttcttggaaaggccctgtcactccacagatgtctggccagcttcaaggcagaaggaaaaacaggaaaagctcttttaacagcagcaggaacaagagaaatgactaaccatactaaaagactggtaacagcagcagcagccagacaggcctcaccttaaggacttgggctgccagagcaaattcagcagagcttatttggcctcccattcacacagctcagttctgtgcccacatcacctttggggaagaaatcagcattctaatcagggacactacttcaggagtcctccacagcgagtccgtcatctgtcactttatgtagatcagggttctagacttcttccctgaggttctcagaagcagctctcaggatgaacgtattgtcctcttcccctcttcttgcaaagtgcacagctaatctaatgttgtctctcggttgcacctgacattctctccccagtaaggtgttggcaagctcagcatctgggttccactctcacactgtctggcagctctgtgtctgagaagttctacattgaccaggcccccttgttgcctggagtatgacgtaatcagaaaatagacgtataaatgtgcacatgcgtatgtatttgcttgtgaaattaaagtcacctcttgcctctgctttcctgatcattcgttagagaaatggatcaggcatttttttaaattattattctttctctaaactatttgcattgtgttcaaaaacccattttagaagtttgaacagcaagcttttcctgattttaaaaacacaaagttgctttcaatgaaatattttgtgatttttttaaagtccccaaatgtgtacttagccttctgttattccttattctttaagcagtgttggcttccattgaccatatgaaggccaccaattaaatggttgtgttaatccaacatgtaaaaaactttttggcagggcacagtggctcacgcctgtaatcccaaagtgctggaatttacaggtaggaccaccacacttggtccacttacttataataaacattgatttggtcgttaaaaaaaaaaaaaaaaaaaaaaa

SEQ ID NO: 30283 - DNA, 1453 bp, Homo Sapiens
agtcacagccaggtaaccctggagtgaagcggtttagttagaagggagcagataaactcgtcactctagtagctttaaccctcaccctgaggcaccttagcaatcagccattgcctgcaagcctccaaagcttgtctttgcctaatatggagcccaaagaagccactgggaaagaaaacatggtcaccaagaaaaagaatctggccttcttgaggtctagactctatatgctggagagaaggaagactgacactgtggttgagagcagtgtttctggggaccactctggcaccttgaggaggagccaatctgacaggaccgaatacaaccagaaattacaagaaaagatgactccacagggtgagtgttctgtagctgagaccttaaccccagaggaagagcatcatatgaagaggatgatggcaaagcgggaaaagatcattaaggagctgatacagacagaaaaggattatctcaatgatctagagctgtgtgttagggaagtggttcagcccctgagaaataaaaagactgataggctggatgtggatagcttgtttagcaacattgagtccgtgcatcagatatcagccaagctgctgtcattgttggaagaggccacaacagacgtggaaccggccatgcaagtaattggagaagtattcttgcagattaaagggccactggaagatatttataaaatctactgctatcaccatgatgaagcacatagtatactggagtcctatgaaaaggaagaagagctgaaggaacatttgagccactgtatccagtccttaaagtaaggccttttcaaatgatgattcccatctcctctcagttgcctagcagggaacattttaaatggatgtagatgaaaggtctcacataaatcctatgttttatgagacttgctgggagctctgctttgcattccctttataaaaagctgacatgccagaagccctgattgactttttttccccctgcgagaatgactaaaaataacatggaagaagatttagagctctgcagcgattgaaaaatgcaatatcaaaatataaaatgtggaagaaaagcctcttcttaaagctattgtaacttgcctggccccacgtagttcaaggattatgtgagataacacgtggccccatgaccactggagcacatgggttaatggagttaggggaatggcctacaactctgcatggccgtcttctttccccaaactcactgtggggagatgggtgaagacaagtcaggccttgttaaagttagtttcagaacaattactcatgccttcctttctcatccctaaaacattggtgggggagctacacaatgtactttttcttttctagaggaagtatctattcactgtgaaaatctgaaaaatataacaaagtatgtgtaagataaaaaccccttgctatttcaaaaaaaaaaaaaaaaa

SEQ ID NO: 30284 - DNA, 1924 bp, Homo Sapiens
agacgaacccggaagtgagatgcaaggcggcgattttcccttctgtcagatcttgatgaacaaagcagtcataattcatctctagaaagatttatatcctggcatttgaaatgctttttatttagaatagtagtaaaaaatggaaaaagaaaaaggaaatgatgatggaataccagaccaagagaattccttggatttttctgaacactttaaccaacttgaattgttggaaacacatggacaccttattcctactggtactcaaagtctttgggtaggcaattctgatgaagatgaggagcaagatgacaaaaatgaagagtggtatcgattgcaagaaaaaaaaatggaaaaagacccaagcagattgcttctttgggctgctgaaaaaaatcggcttaccacagtgcggagactcctttctgaaaaggccactcacgtgaacactagggatgaagatgagtatacccctcttcatcgagcagcctacagtggacacttagatattgttcaggagctcattgcacagggggccgatgttcatgcagtgactgtggatggctggacgcccctgcacagtgcttgtaagtggaataataccagagtggcttctttcttactgcagcatgatgcagatatcaatgcccaaacaaaaggcctcttgacccccttgcatcttgctgctgggaacagagacagcaaggataccctagaactcctcctgatgaaccgttacgtcaaaccagggctgaaaaacaacttggaagaaactgcatttgatattgccaggaggacaagtatctatcactacctctttgaaattgtggaaggctgtacaaattcttcacctcagtcttaacaattctagtaattttcctaagtttctaaataccagtgcctcctgtgtgtgagatgtattcccataatcaaagttgacgtcaaacatcttactacaaaaattcagtgacattcattataacattcttccaagtgaattgcctgactttgatgtcaaaatgtatttgaaagtaatttgcatatatctttaattatttctgtggagtttgtgatttttttatcagaaataattttaatgtgtgtatacttaaaaacttgacacgggttgtacagaaactggtatttttggtgctgatacaagagaaatgtatttttaaatatcccacatcctggatctttgttgggtatttagtatattgacatatatttttataaggtgaggtaactcagaacttaatttaaaagtcttaaatattctgatacaattcagctgtcttctctaccttaccatagccagttgctttcattttaaaccagagcaagtaacatattagtgacttgaatcttcataagttaaagtaaaaaacagcaaaaaacctagatctttgtcttttagaacacagaccattttcaggaaagcagttagctaagtgtttaattcatgaatattgtatactgcatcccctaccacaatttacacaatcctgtggatagtcctacctcaccctggtcaacctacatgatccttaagctaatggcgaatcacgatgaccttgtagacatgcacacaactatacctttgtccaacagatcataatatatctgctatccaactggttttacctgcctaatcctactgatttgggcactgcttgtatagtctctcaagttcacaggaaatgttgattttctaaggtcctcatttttacagagtatacaggcaaagtgacaggggaaaaggaattagtctaagagtaaggggatgattattatattgaggctaaaaccacaaagtggctcaggctttaaaaaaaaaacactgtggataatgacaaaaagcataagtaaaaatatttgagaaaaataaagtacaagttttgaacaacaaaaaaaaaaaaaaaaaaaa

SEQ ID NO: 30285 - DNA, 1950 bp, Homo Sapiens
tgtcagaacagtgttgcaggggctgctgcagggagccatttggacatctgcagggcccccccggaggcctcggatggccacgtagggtctgcctatcaggagaacccccagatgatcacagtcccccagagacagccagacccccggggacccagcctctcacagtcagtcctcccacccgagtgaccccgatggcggcctcccggctggcggcgctggaaggagtggactccggtcccagggtgcccggggccagccccggcttcctatattccgagggccagcggctggcactggaggctctgttgagcaagggcgcggaggcgttccagacctgcgtgcagcgcgaggagctgtggcccttcctcagtgcggatgaggttcagggcttggcagcggcagctgaagactggacagtggccaagcaggagcccagcgggatggcagagggagccaccaccgccgatgtggacgcgggcagcctgagctactggcctgggcagtcggagcagccggcgcccgtcctgcggctgggctggccagtggactctgcgtggaaaggcatcacccgggcgcagctgtacacccagcctcctggagagggtcagccgcccctcaaggagctggtgcggctggagatccaggctgcccacaagctagtggccgtggtcatggacgtcttcactgacccagacctgcttttggacttggtggatgctgccacgcgccgctgggtacctgtctacctgctcctggaccgccagcagctgcctgccttcctggaactggcccagcagctgggggtgaacccctggaacacggagaacgtggatgtccgtgtcgtgcggggctgcagcttccagagccgctggcgacggcaggtgagcggcaccgtgcgggagaagtttgtgctgctggacggcgagagggtcatctcaggatcctacagcttcacgtggagtgacgcacgcctgcaccgaggcctggtgaccctgctgactggtgaaattgttgacgccttcagccttgagttccggacgctgtacgcggcctcctgcccgctcccacctgcgcccccccagaaaccctcggtcataggtggcctgcagcggggccgcagcctgcaccgcgtgtcccgccgccgctccgtggcccccgcgtcgcctccgccgcctgacggcccgctggcccaccgcctggccgcctgccgcgtctcccctgctaccccggggccggcactcagtgacattctaaggagtgtgcagcgcgcccggacccccagcggccccccggcccggcccagccgctccatgtgggacctaagccgcctgtcccagctgtctggctccagtgatggggacaacgagctcaagaaatcctggggctccaaggacactccagccaaggctctgatgaggcagcggggcactggaggaggcccctggggggaagtggactcccgatctccgtggggcggtgccctgcccctgccccccgcccaccgcctccgctatctgtccccagcccgaaggcggttcggtggggatgctacattcaaacttcaagagcccagaggcatcaggccgtcagactgggccccccgggcaggacttggggggcaaccctgaacaggagcccaagccaaatctgctggcccacccaaggagcagtgccggacaactgtcggctcagagccctctgcctcaatgccctgccttggacaaggcttctggcctcggcgtctgtcaagcagaagggatgtttgtcacttgttctgcaacttgggctgggagtggtggctcatgcctgtaatccctgcactttgggaggctaaggtgggagggttgcttaaggcgaggagttggagaccagcctgggcaacatagtgagaccccatctctacaattaaaaaaacaaattagttgggaataaaaaaaaaaaaaaaaaaaa

SEQ ID NO: 30286 - DNA, 5695 bp, Homo Sapiens
gcggctcaggggcggggacgggggcgtggtcccgccgtataagaacggagggggcggcggcgggacggctcactcggtgccgctgcctaggggctgtagaggtcgcgccgctcctgctggggcctgcccacgccaaggacctgcctctgtcgcctcctcttctattgcccagtttccccagccagaacatcccctgaagatggcagaggagagcagctgtaccagggattgcatgtccttcagcgtgctcaactgggatcaggttagccggctgcatgaggtcctcactgaagttgtacctatccacggacgaggcaactttccaaccttggagataactctgaaggacatcgtccagaccgtccgcagtcggctggaggaggcaggcatcaaagtgcacgacgtccggctgaatggctccgcagctggccacgttttggtcaaagacaatggcttgggctgcaaagacctggacctaatcttccatgtggctcttccaacagaggcagaatttcagctggttagagatgtggttctgtgttcccttctgaacttcctgccagagggtgtgaacaagctcaaaatcagtccagtcactctgaaggaggcatatgtgcagaagctagtgaaggtttgcacggacactgaccgctggagcctgatctccctctccaacaagaacgggaagaacgtggagctgaagtttgtcgactccattcggcgtcagtttgagttcagtgtggactctttccaaatcatcctggattctttgcttttcttctatgactgttccaataatcccatctctgagcacttccaccccaccgtgattggggagagcatgtacggggactttgaggaagcttttgaccatctgcagaacagactgatcgccaccaagaacccagaagaaatcagaggcgggggacttctcaagtacagcaaccttcttgtgcgggacttcaggcccacagaccaggaagaaatcaaaactctagagcgctacatgtgctccaggttcttcatcgacttcccggacatccttgaacagcagaggaagttggagacttaccttcaaaaccacttcgctgaagaagagagaagcaagtacgactacctcatgatccttcgcagggtggtgaacgagagcaccgtgtgtctcatggggcatgaacgcaggcagactctgaacctcatctccctcctggccttgcgtgtgctggcggaacaaaacatcatccccagtgccaccaacgtcacctgttactaccagccggccccttacgtcagtgatggcaacttcagcaactactacgttgcccatcctccagtcacctacagccagccttaccctacctggctgccctgtaactaaccttgagacctgagggtttccacagtgggaaccccaatagggctagggctctcaggtaggggagcctccttctagatgtaggcatttggcttttaaaggggaactcagctctgattctgcttttttttttttttttcctttgtgtacccattggaatgggtctacagtgtatcatgagccaaccctcaaaggacccgtattacagtgccacgttggaaaacgctacaggaagcatgacctatccacatctttccaagatagacactaacatgtcatgtcccaaacattagcacgtgggggttgagctctgtgcagtaatcgagattgggagaatttgggcagcgcgtgagaagtgctaagctacttgttttctcacttgagcccgggtaggctgtgttggccctcacttgggattctcagcagttacatgaaagttgtgctgataatctcttctcttgtaccaattttagtcaggcagaaaatggtaaacatgagggtgctcttgtgacttaatttttgttcaagggactaaattgcttatgtttattccctgtcagcggagtggagaatgtcattcatcaataaaccaaagccaatagctggagaattgagatctggttgaaagtggtttatggtttacatgctgtactatcctgaggaattgcgagatattgctgaggggaaaaaaaaatgaccttttcttgaaatgtaacttgaaaacaaaataaaatgtggaacataatgtttaattagaattgtggtggtggtagtggaaggggataattgtaaataggaaacatgaatgttcatttttttctttaaagaattcttattaaatggctccctgccttttttttcttttttcctcatcagctctttcatggctgaattttgttttattcttcctaagactgaggattgtgctgagtccagagtcattgtggtaactgacatgagggtcttcccatgttttaactggaaacccactttggtcacattccaagtatgacacagctgttcttctggagtactttagctattttttgtttttgttcttttcgttttttttttttccaaaaatagtgacttccttctccaggtgtgtttgacagcaactcaattcaggaatttcggtagaactgagtgacctgtggaactgctttagaatctaacctgctgtcttcgtgctctgtgtgaaggggaagctggggggttagcatgaagtctggccttgtgtgcattggagcttccaaggcactttgaaatcattccagtatatttgggaagaattgagtgaatgagaatgctcttccttattctggtagatttgacttgtttataattctgcactttagaagaaaaacagtgttaatctgtagttgaaagaaagcttagtagatgagagagttctaggctactgtggctttttccagtagatttagatgagattatgtgttttgaaatgttttgtgggatcccttagaaagcatcacttcagggcagagacactcaatattgccagccagcttgggttctaaagtgatttaatcaaattcatgctcctgatcttttttttcccccttcctttggctatgaaaacccaaagcccggagtgattgttttctccttgctttaagcagtgaagttatcctaatgcaaaagagcttagtagaaaatgagtggtttacctttttttctaaaagtatattttcaagtttattctggaatgtgatgtcttggtcctcttaaaagcagatcagccatgactgaaactcaaggcttagctggtatctatgttgtgctacattaggtgactagaagccacttcttagtgtaatcagctcctgtttccctgtgagccttagttatattttaattcagtggctttgagtcaaggccggttctaattgaggggacccagtgtgcttcagtgttaagagtggggcaatgaagagtgaaccccaatgaagagtgatcccaactttggaaactatctggtcattcatgaccttaaaaagctgccatggtggtcaaatggcatgtgtttgcacaaaaatgaccgatgtgtttaaccaaagctttgaaatgtgatgaagccaccaacataagcacttgcctaacagaaatcagtatttcttctacttagaaggcttggggcccagggtaatgaggcaccagatgaagataagatctgcatcaaggaattaaatttccagtttgtccttggggttctttctgcttatgttttttcccccccatctggtaatagtcctcttctgagaatgaaaggaggcacagaagttgcgagaaagacccagtccccagtctttgccaccattgcaccatggttgtctcggagtcccttcacctgacctttttagtcagctcagatctttttgtagtttgagaatagacctattcaagagctatcagggttaaaagctgcactgaccaaagctgtacttttaaaacacaacccctgggctagtgatgtctctacttgctctatgagccttttgccagcctcagaataggcgaggtaaccttgaatttcagggccctggaaactctagctgaaacctgcctttcctaatgctcacacaagcaccaggtaccctgagcttatactgagtccagtggttcctattttatgtgtgtgtgtatgtgtgtgtgttgagtaacatgaaacttggcagtagcagagagcactgaagttcacatgcaagttctaatctaaagttaagcagtctcttatttgtttcgggactctgatttgactctttttctgatgctttcggcatgtctgcagcctgttctcctagcctgctgcttggagtcaggttgagcatcagtgagatgaagacagtaccttttcctctcacattggcagaatagcacgcactagatgcctgaccttgagctctagtctcccctttaaatcttaccttggcagtaacacattattcctcattcaataatttcaatgctgaaactgaactctattactaatgccttccaatcagagttcctgatggggatgcctgtgggatggcccacacctgggggacctggcagatggggtgagttgggtaaggaagatgatgcttagttcctgatagatgctacagatgtagtttggcatttcagtttttgtccagtttgattttcactggggtttgagtcacagcaagctgtgtatgaacttgtgttttgtggtgacacattaataatcaaattgctaaaaccctgaatctgcttattcttcagcttcacctctgcactaaccccttacccttatggtacgtcaggattttaactagtactgctttgttgactttgggaaatggtgccactcaaaagcaacttcctaacttgaggaataactcctttgtagtttactttctggtactggttggtgccttgtattgggatacagctatattcttagctcaaatgtcctctttttgagagcaaagtagttatccaatggtgagacgagaccctgacgctcatagaggccattccttcctgggtgtcggaccagggctctgtgtcagggaaaaccttctgggtggactttgtaagaatccagtttccaaggttagattcacatccttaatcttgcagagactagaatttcacagctcgctttggaacatattccaattcaaccagttaaaatcagaggaccaagtcgtgggggaggggggcggtgttgaggagaggtatttttaaagatctggcaacttttcaggattatttgtggagaactctaaggttaagatcaggaaataaaagactgtgtgtgtgtgtgtgtgtgcgtgtgtgtgttcaagtgcctaaatcttgtttacctatcactttaaaaaaataattgaagtgtaagctaaataaaatgcttggagttttgcctgggctagtgagagttggtgcaaattcttgtgtgtgtttgcataggaaggtgagatgaccatctactaaagaggaagtagctaaatacagatctgtgggtgtttttaaaaaaactcaacctatctggtgttttattttaatggataaaaatgtaatttttctaaggtagcaacttatttccaaattaatatagatgaaaaatagataccaattagactaaattgaaagctttttgttctatatttgcatagcctttgaaatatttcttagtgcctaggaggtctggggattcctctttcgtggtggtcactaaccttacttgatgcagataaaatcacttgtcaatgcaaaatgtgttagaacttgataaagctttgagtttgagaaataaaggtatatttaaaattt

SEQ ID NO: 30287 - DNA, 2239 bp, Homo Sapiens
agtcgcaacagaagcaggtccgaggcacagcccgatcccgccatggagcagccgaggaaggcggtggtagtgacgggatttggcccttttggggaacacaccgtgaacgccagttggattgcagttcaggagctagaaaagctaggccttggcgacagcgtggacctgcatgtgtacgagattccggttgagtaccaaacagtccagagactcatccccgccctgtgggagaagcacagtccacagctggtggtgcatgtgggggtgtcaggcatggcgaccacagtcacactggagaaatgtggacacaacaagggctacaaggggctggacaactgccgcttttgccccggctcccagtgctgcgtggaggacgggcctgaaagcattgactccatcatcgacatggatgctgtgtgcaagcgagtcaccacgttgggcctggatgtgtcggtgaccatctcgcaggatgccggcagatatctctgcgactttacctactacacctctttgtaccagagtcacggtcgatcagccttcgtccacgtgcccccactggggaagccgtacaacgcggaccagctgggcagggcactgagagccatcattgaggagatgttggacctcctggagcagtcagagggcaaaatcaactattgccacaaacactgagggacgctcaggtctcctaagacctcatcctgctggggaccccacgaggggacatccaccctctggggtgtggccaggaaaagacaagctcttcagcttggggatccgatctggaagagagattctgatctgcccacctcctcttccttcttctctacaaaagctccggttgattcgagggaagtggtgaaaatttttttttctcccattttcctccctgcatctggggacacagctgccgtgaccagggaggccagcctgggaggtccagatgcccagggagaatcttggtctggtgaatccatgagctgagataccacggctggggccatatgttcacctgctttcctgtccgttggtgaaggaatttcagaattcattttatatccaagactggcttttaccaaatttaaaagcctctcaatgcgtcctcgaccttgaactgtgctcaacagcctggccctttctggggccaccctgggatatggctggctggctggctggctttctttctttctttctttctttctttctttctttctttctttctttctttctttcttgctttctttcttgctttctttcttgctttctttctttcttgctttctttcttctctctctctcttttttttttttttaaatagtgctagtttgggcacagagtaatttatattccctttggttaaaatgcaggctttttagccaacaacaaaagtgttttccccccacccccactcgcccaccagggtgatgccacttttgcctcctgccctgaaaattggacttaagatgccatgtcttggctgggattacaggcatgagccactgcacccagcccagttctttcttaaaacagctgagagttttgttttcttcagcgttcaccttccttgtctccagttccgatgctggcagtggttcctacctctgttgggtttctagatagtttgggaacggggttgatgggtttctgtgaaacacattttccaagtcttgggctttctctggaggggaaggtggatgctggcgggtgacttgcagtgggcgcctggcagtgggtgtggactgtaactgacaggtggaaatgagtaggggcactattgttccctccatgccagctttttttttgctggaaatgccccctccacacccctggtagctctgtgtcctgagaaatccagagtgtgggagacatcactgcatctgtccccccagcttctgtgaagggaagctgtggcctcttttgaatgtggggaacaactgaagactcaggggtcacccagaggtctggtggaaagcaacttcaggtttcatcttgctctattcctcaaaggtctggtctgtgggcctctgaggagaaaacaggtctagccaagacagggacaaaatggggaagggggtgtgccaggcctgaactgagctaagcacctgccccgggctccacacttccatctttcttttgtcttcatttcacctctgtgtttaaagcactgtgtgacatagctccttagagatataacctattgtctgctcattgtcaaaaaaaaaaaaaaaaaaaaaaaaaa

SEQ ID NO: 30288 - DNA, 2347 bp, Homo Sapiens
gctgaagcggggtaattcctctcctgcaattacttttggatggaagtatgcccctttctcagtagaagatggtaatcttggagaatgaccatggagaaggggatgagttctggagaagggctgccttccagatcatctcaggtttcggctggtaaaataacagccaaagagttggaaacaaagcagtcctataaagagaaacgaggaggctttgtgttggtgcatgcaggtgcaggttatcattctgaatccaaagccaaggagtataaacatgtatgcaaacgagcttgtcagaaggcaattgaaaagctgcaggccggtgctcttgcaactgacgcagtcactgcagcactggtggaacttgaggattctccttttacaaatgcaggaatgggatctaatctaaatctgttaggtgaaattgagtgtgatgccagcataatggatggaaaatccttaaattttggagcagttggagcactgagtggaatcaagaacccggtctcggttgccaacagactcttatgtgaagggcagaagggcaagctctcggctggcagaattcctccctgctttttagttggagaaggagcctacagatgggcagtagatcatggaataccctcttgccctcctaacatcatgaccacaagattcagtttagctgcatttaaaagaaacaagaggaaactagagctggcagaaagggtggacacagattttatgcaactaaagaaaagaagacaatcaagtgagaaggaaaatgactcaggcactttggacacggtaggcgctgtggttgtggaccacgaagggaatgttgctgctgctgtctccagtggaggcttggccttgaaacatccggggagagttgggcaggctgctctttatggatgtggctgctgggctgaaaatactggagctcataacccctactccacagctgtgagtacctcaggatgtggagagcatcttgtgcgcaccatactggctagagaatgttcacatgctttacaagctgaggatgctcaccaagccctgttggagactatgcaaaacaagtttatcagttcacctttccttgccagtgaagatggcgtgcttggcggagtgattgtcctccgttcatgcagatgttctgccgagcctgacttctcccaaaataagcagacacttctagtggaatttctgtggagccacacgacggagagcatgtgtgtcggatatatgtcagcccaggatgggaaagccaagactcacatttcaagacttcctcctggtgcggtggcaggacagtctgtggcaatcgaaggtggggtgtgccgcctggagagcccagtgaactgacccttcaggctgagtgtgaagcgtctcagaggcatttcagaacctgagcttttgggggtttttaactgaagttggttgttttatctttcttgttttataattcctattgcaacctcgtgcactgctcgagacacaagtgctgctgtagttagcgcttagtgacacgcgggcctttggtgggtgagcgggactgtgtgtgagtgtgtgcgcgtatgtgcgcacatatgtgtatgtgtggagtatgtgtgtttgcttctccgtggatgaaatagaaactcctcattgtgtgaccaggaatggttaaatcatctttacaaaatgtgtgctttaactgtttacaagtaaaacctaaagttgcaggaaacattttttatttcgtaaagaggtaccaactgtcgctgatgtgatatgtcagaactgaagagtaaatctacttgtttaaatgacttgacagtggtagtgctccatttaataacagtaataagtaataaagtgtttttatttgttaaccagtttaagtggatcctgtggtaacttaaactgttgttctcatcccttatatggggcatttttctttaacaaagaatggtttcagtgaaacaatctagcagagaattaatgtcagaacctttttaaataatagtctgattgatacagtttgtacttatttcatcaagcttttctaagcttaaatattgcatagcttcgagctgtatggactatattatgaaagaatatgtaaagagaacatacagtaatgcacagtccttaatttgtgtataatggaaagttatttacaatataacactgtaaataagaaagcaaagtttatgggaaaattcaatattatctttgtttttgtttaaatatatttttaagataaaggcacaaaaataaaagaagcgtattactgggtatagtatgtgactcctcttctcagactaataaattatcttttgaatccttggaaaaaaaaaaaaaaaaaaaaaaaaaaaaaaaa

SEQ ID NO: 30289 - DNA, 4096 bp, Homo Sapiens
atggatttcctgcttggagtctcaggccccagcgtctggcacaggcaggggcctgcggagctgagggcagtggaccagctgcagggagggcgacctgtatgcggagcgccgttcctgcgacatggaccgcggccagcccagcctggagcctgctgccgcggccccccgagcctcgggccggtgcgtgatcgcgcccgtgcgcgctgtgctccgcctgcgccgccgggtgtgtgtcctacgcaaacggcgcctcctgcagccgggtggggggcccgacgtcgggaccggggcgcccaggccgggctgcagcccccgggcaccgcgcgcggacctggaccagccaaagttcttcaccttcgacagccccgcggagctaccctccaggacgccacgcaagaagcgccggcgcagccgcctggtgctttacccggagacctcgcgcaagtatcggccgcgcgtggagcacaggagccgcgcgcagcgctgccttctgctgctagtcgccatcgtgggcttccaagttctcaacgctatcgagaacctggacgataacgcgcagcgctatgacctcgacgggctggagaaagcgctgcagcgcgcggtgttcggccagcccgctgccgtatcgcgcatcgtggcgctgatgcgggactacctggccacgcatgtgcacagtcgtccgctcctcctggcgctgcacgggcccagtggcgtgggcaagagccacgtgggccgcctgctggcgcgccacttccgctcggtgctggaggacagcgcgctcgtgctgcaataccatgcgcggcaccactgccccgaggcgcgcgccgcacaggactgccgcgaggagctggcgcggcgcgtggccgacgtggtggcgcgggccgaagcggaggagaagaccccactcttggtgctggacgacgtggagctcatgccgcggccgctgctggacgagctgcacggcttcctgcagccgcagcgctcccaccacttccacaacgccatctacgtgctcctcagtggcgcgggtggcgccgaggtcacgcgcttcgtgctgcagaacgcgtcccgcgcgctgcccctgcgccccgacggcttccgcagtgccgaggccgcagcggcgcaggcggaagaagacctgcgcgccagcctgctggctgtgctgtcccgggagcatccgctgtggcgggccgcggccatcgtgccgtttctgctgctggacaagcgggatgtggtcagctgcttccgggacgagatggcgggtgagggcttctttcctgaccaggcccgcgcggagaacctggccgcgcagctcagcttctaccgcgtggctggccgcgagtttgccgtcaccggctgcaagcaggtggtggccacggtgaacctcctgtagtggaggcgcaggacgggacgtttgggttgatggcggcagtaggagggcgaccagggaccttgtgggctggtgcaggcccctgaggtttctagtgaatttgtggctgcccggctggtgggtgcggatcagcttggagctctgcttccaggtccacacccgcctcagagtccggagtctgtccctgggggcggcaggacagcagccacctccctcccaaacttgcccattgccctgctgggcgtcccaggcatggtctggtgcgttctccctgtggccccaagaggtgggttcccatggtacaaggatgatctcagggccaacaattcccggggtcacacagctgggacgtgaccccgcctcttgggggtggtcgcgtgttgctcagtgctgaagtggggttctcattccggcccccctggagatgaccccggaggaggccacagccaaccatgacagtgctggggctctggctgccttctccacccaccccacccctcactcaggtcgtgttttcaggagctcaaggctggagtgtcttgacagtaaggggaggggagcggaggcggaggcgcctcaggcagcctctccccctccttcctggaccccccaaccccgggcccgccagccctggcttgggcttactgggtgaccgagagcccgcggggcaagcgggaggtgcctaggcctctccccatccccctcttctccgcacgtgggacccttagcccgtggccagtcccctggtcaccacgattgcgcgacctccctttccctggggccttttgtgccccgagttccgcccacccgcaccctctgcgcagagcgccctccccacgccagtcgaccccacaccccacactccccacgcgccgcctcccggaagccctcctggacgcctcccgtggatgggcccaccgcgcccacgggggctttaggggaaggtgctttgggcgttttttgcgccatgtctcctcggggccggcggttgcctcgggacggttctcgcctcctcccacagccccggtgtctgggacgcacccggcagccccgctgctgccgccttgtggcgcgcccggcccagccggtggcttctgtggtcgccgggggctgagcgcgcggctgggccctgagtcccccaggccgccccgatcctctgtccccgccgccggccccgctgcagtcccaacccgggcctgcccgggaggagcgcaggggcggcgatgaccagtcccgaaaggggctcagagggcagcgaggaggtttcacgccggtgcggggcgccgtcgaggtgggggcaccgcgaaggtggaggcggggccgcgccggaagccccgagtcgagcgcacacggcgggcgcccctggcaagtgggtctcctccggccccgaggcctgaactcagcccggagaccgcgcccaccagcgccggtgtccccggaggggccccgctagttccctgagcagaggtcctgcggcttcccggagggtgtcctgttctctcccccgcctcgcatccattctcgccctggtggttggtgtctgtggtcgggggcgagggccgtctagtggagacggggattcaggccgcttgaaagtctgggatctctgggcggatggcagcggctccgcggagctcgagctcggcgcgcaggtcctgggcccagggcgggagcgctagcgagagggctgccccgtcctgcccagagggtcctgaggactcccgctgctcctggagtcttggggaggggtccggctccacggggtcggggtgggggctaccaggaaacctttgcctcctggggctgtgcaggaccggctagccagcgctgggaaccagggctgagttcagcccagctctgtccaccccaaccccagggctaggggaaggagctgggagaaggagccccacctctcccaggcgagtatctgtcccaggagcccacacagagggacacccagctctggtctggccttcgtgttggcttcaaggtggtaacagagagagctgcagagtgggggtgtgtttgccagtccctgcatgggtgaatgttggggtgcccactgctccccaggcaggcccccaggactgtcagctccccttcccacagagcacccacctggaggtgtcacctgccggcaagcgtgggccattcatccacctgtcagtcaacaacacccgctgagcatcggcttgtatcaaaaggtccagacctaaggggaaattttatctctttctttctttctttcttttttttttgacacagagttttgctcttgttgcccaggctggagtgcaatgacacgatctcggttcactgcaacctctgcctcctgggttcaagcgattctcctgcctcagcctcccgagtagctgggattacaggcgcccgccatcacgcccgggtaatttttttgtattgttggtagagacggtgattcactatgttggccaggctagtcacgaactcctgacctcgtgatccgcccacctcggcctcccaaagtgctgggattacaggtgtgagccaccgtgcccggcctctttttatttattcctaaaatattaccttgaggccaaattctgcgcttaaggagaatgtgcaccaagtgctggggtgggggctggttataaacgaggccacaaatcatgcttgttaataaattgtgtggttcaaatctgaaaaaaaaaaaaaaaaaaaaaaaaa

SEQ ID NO: 30290 - DNA, 2945 bp, Homo Sapiens
ggaagccagaccagagagcgtgcgtgtttttcccagggtgccccgcgctgctgttatggccgcctccttgaggtagtatccgcacatggaattctagggccgcaggtgtatttacggtaactgtcgccactagatttcagcgcctttggactctcctgttttcactttcttttgttgactcccgtgtggccctcgtgggagcctgttttggctgcagcggtgtctggggtgatgtggaccccggagctggcaattctgaggggattccccactgaggctgagcggcagcaatggaaacaggagggggtcgtcggttcagagagtggatctttcctacaattgctgctggaagggaactatgaagccatattcttaaattcaatgactcaaaatatttttaattcaacaacaaccgctgaagaaaagattgatagctacctggagaagcaggtagtaacattcctggattactcaacagatttggacacaacggaaagacaacagttgatatttctacttggtgtgagcagtttgcaactttttgttcagagcaactggacggggccccctgttgacttacaccctcaggactttttgtcatctgttttgttccagcaattcagtgaggttaaaggactggatgcatttgttctgagcctgctcactctagatggtgaatcaatctacagcctgacctcgaagcctatactactgttattagcacgcattatcctagtgaatgtaagacataaactgacagctattcagagcttgccatggtggactttgagatgtgtgaatattcatcagcatttgcttgaggaacgctcacctctgctttttactcttgccgaaaactgtattgatcaagtgatgaaactacagaatctgtttgtagatgattcaggtcgatatttggctattcaattccatctggaatgtgcatatgtgtttttatattattatgagtacagaaaagcaaaagatcagttggatattgctaaggacatcagccaattacaaattgatttgacaggtgctttgggaaaaagaacacggttccaggaaaattatgtggcacaactgattctagatgtaagaagggaaggggatgtcctttcaaattgtgaattcactccagcacccactcctcaggaacatttaaccaagaatcttgagctcaatgatgacaccattctgaatgacataaagttagcagattgtgaacagttccagatgccggatctgtgtgctgaagagatcgctattattcttggaatctgcactaattttcaaaagaataacccagtgcacacattaactgaagtggagcttctggcatttacatcatgtttgctttcacaaccaaagttctgggccattcagacatcagccttgatcctccggacaaaacttgagaaaggaagtactcgccgagtggaacgggcaatgaggcagacacaggctcttgcagaccaatttgaagataaaactacatctgtattggaacgcctgaagattttctattgctgtcaagtaccacctcactgggccattcagcgccaacttgcaagtttgctctttgagttgggatgtaccagttcagcccttcagatatttgaaaagctagaaatgtgggaagatgttgtcatttgttatgaaagagccgggcagcacggaaaggcagaagaaatccttagacaagagctggagaaaaaagaaacgcctagtttatactgcttgcttggagatgtcctcggagaccattcttgctatgacaaggcctgggagttgtcccggtaccgcagtgctcgtgctcagcgctccaaagccctccttcatcttcggaataaggagtttcaagagtgtgtagagtgcttcgaacgctcggttaagattaatcccatgcagctcggggtgtggttttctctcggttgtgcctatttggccttggaagactatcaaggttcagcaaaggcatttcagcgctgtgtgactctagaacccgataatgctgaagcttggaacaatttgtcaacttcctatatccgattaaaacaaaaagtaaaagcttttagaactttacaagaagctctcaagtgtaactatgaacactggcagatttgggaaaactacatcctcaccagcactgacgttggggaattttcagaagccattaaagcttatcaccggctcttggacttacgtgacaaatacaaagatgttcaggtccttaaaattctagtcagggcagtgattgatgggatgactgatcgaagtggagatgttgcaactggcctcaaaggaaagctgcaggagttatttggcagagtgacttcaagagtgacaaatgatggagaaatctggaggctgtatgcccacgtatatggaaatgggcagagtgaaaagcctgatgaaaatgaaaaggcattccagtgcctctcaaaggcatacaagtgtgacacccagtccaattgttgggagaaagatattacatcatttaaggaagttgttcaaagagccttaggacttgcacatgtggccataaaatgcagtaaaaacaaatccagttcccaagaagctgtacaaatgctttcttctgttcgactcaatttacggggcttgttatctaaagcaaagcaactttttacagatgtggcaactggagaaatgtccagggaattagctgatgacataacagctatggacaccttagtgacagagctccaagacctaagcaaccagtttcgaaatcagtattgattctgctggaagcagattctggaaaaggtgctttcacctgctgttaaaagatacatctgtatatctgaaatgcaagatattgatttttaaaataaatttgttttatgacttaaaaaaaaaaaaaaaaaaaaaaaaaaaaaaaaaaaaaaaaaaaaaaaaaaaaaaaaaaaaaaaaaaaaaaa

SEQ ID NO: 30291 - DNA, 2589 bp, Homo Sapiens
cggaagtagtgtcggcgcgggagctgagcggagtggccttgccaccggaggggaagggctgctggcgttaggcctggctgggtcgtgcggctgagcgtgaggctagaaagaaaaagcgatcctccaagagtgagaacgggagatctgccgaggataacaacctcccttgtggccgaagggcgggggatccccacacgagggctccgcttcgagagacggcgacaaaggaaagttcgtagcgcgttccggaggcccggccacctctgagaagggagacgacgctgctgggtccgctgagcggggcgacccgagcttatatagaattggtgataggatcacaacttctgaggtcccagcaagagtcctaacatctagcagctctaccaccaggacaggccccctaaaactaattccaacaagcacctctgaagtcttctcattcacaggttaaggctacctttccagataatccaacagctaaatcaccagtttccaagggcatttgcatcacctatggaaagcatcggatccttatacaccagatgttcttgacagctcatcccgtcattcccccctgcacaaaagttgctataccagcggacaagcaagacaactactgagcttcttttgattgtcaagtagatataatatcactgccagcaaaacagcacaaaaagtgtctcttcacagtatcactaccagttgggactatgctaagtaaatcagcttgcctagatgaggaccccttctattcttgggtagccaggatttgaaggagatactctgacctgtgccagtggtaagtgactaatacttttacacactgaactggtcctggaaactgagatgtcttctttgtaagtgaagaatatacaacataatcttgaagaacggcacagtggtatgggccacaagcatactttatgtgtgtaacggactgaaagacaaattaatcttggtgaaaggatttttcatctcttatttctatttgccagtgttagtcagtgttctgctggcttagattattacctttttctggttccttactgtgttttattctgatgggtcctagaaatccctctcctgaccacttgtcagaatcagaaagtgaggaagaagaaaatattagttacctaaatgagagttctggggaagagtgggattcctctgaagaagaggactctatggtgcccaacttatcgcctcttgagagtcttgcctggcaggttaagtgccttttaaaatattccacaacttggaaacctttaaatcctaattcctggttgtatcatgctaaactgttggatccaagcacaccagtccatatacttcgagagataggtctaagactctcccattgttcccattgtgtccccaaactggaaccaattcctgaatggccccctctggcctcttgtggagtcccaccttttcaaaagcctcttacaagtcccagccggctctctagagatcatgccactctaaatggagcactgcaatttgccaccaaacagctaagccgaacattgagtagagccactcccatacctgaatacctaaaacagatccctaattcatgtgtttctgggtgttgctgtggccggctgactaaaacagttaaggaaacaactcgtactgaacccatcaacaccacttattcttacactgacttccaaaaggcagttaacaaactcctaactgcatcactgtaaagatctaccatttgctctgatatctctgatgttgctaattgagaaagtggtacaaagttagtcattacacagcccactaatgccttctcagtcaaactctcttatgccctggcaagccaatgaggataccctttgacaaaccctgtggataaaatgataatatcaaagtgctgggattgaacccttctaattttaaagaaccttgttattagaaaatctcagcctaatacaatctgaagttaagagttttagcagcattgtttttctaagtagatttagctatagattttcttctggccaaacaaggaagagtatatgcccttgtaaatgagtcttgttttgtttatttaaatagtcagtcaaaacgtagaaatcagtatacgtaaaataaaatgcatgagactattaaatcttttcatataccctacaaataaaatgaaatctgtgtgtggtcctggttgactgggcatctaaagggaatcagaaaagagattgtgaaaagttatatatatatcctcttccttattttagttttgctttttcctattttccataattaagtgccgtttacaaagtggcatcaaaaaattgaagcaggccaggcatggtggctcatgcctgtaatcccagcagtttgggaggctgagggcaggtggatcacttgagatcgggagttcgtgaccagcctggccggcatggtgaaagcccgtctctactgaaaatgtaaaaattagccgggcgtggtggcatgtgcctgtagtcgcagctacttgggaggctaagacaggagaattgcttgaacctgggaggtggaggttgcagtgagctgagatcgcgccactgcactccagcctgggcaacagtgagacaccgtctc

SEQ ID NO: 30292 - DNA, 8196 bp, Homo Sapiens
agtggcgctgctgggacgggggaaaggagacgcttcttcctcttgctgctcttctcgttcccgagatcagcggcggcggtgaccgcgagtgggtcggcaccgtctccggctccgggtgcgaacaatgctgactgatagcggaggcggcggcacctcctttgaggaggacctggactctgtggctccgcgatccgccccagctggggcctcggagccgcctccgccgggaggggtcggtctggggatccgcaccgtgaggctctttggggaggccgggccagcgtcgggagtcggcagcagcggcggcggcggcagcggcagcggtacgggcggaggggacgcggcgctggatttcaagttggcggctgccgtgctgaggaccgggggtggaggtggtgcctctggcagtgacgaggacgaagtgtccgaggttgaatcatttattttggaccaagaagatctggataacccagtgcttaaaacaacatcagagatattcttatcaagtactgcagaaggagcagacttacgcactgtggatccagagacacaggcacgactagaagcattgctagaagcagcaggaattggcaaattgtcaactgctgatggtaaagcttttgcagatcctgaggtactccggagactgacatcctcagttagttgtgcactggatgaagctgctgctgcactgacacggatgaaagcagaaaacagccacaatgcaggacaagtggacactcgcagtctagcagaagcttgttcagatggggatgttaatgctgttcgtaaattgctagatgaaggcagaagtgtaaatgaacatacagaagaaggagaaagcctgctgtgtttggcttgttcagcagggtattatgaattagcacaagtattgcttgctatgcatgctaatgttgaagatcgagggaataaaggagacataactcccctgatggcagcttccagtggaggttacttagatattgtgaaattattacttcttcatgatgctgatgtcaactcccagtctgcaacaggaaacactgcgctaacttatgcatgtgctggaggatttgttgacattgttaaagtgctccttaatgaaggtgcaaatatagaagatcataatgaaaatggacatactcccttaatggaagcagccagtgcaggtcatgtggaagttgcaagagttcttttagatcatggtgcaggcatcaacactcattctaatgaattcaaagaaagtgctctaacacttgcttgctacaaaggccatttggatatggttcgctttctacttgaagctggtgcagatcaagagcacaaaacagatgagatgcacactgccttaatggaggcctgcatggatggacatgtagaggtggcacgtttgcttttggatagtggtgctcaagtgaacatgcctgcagattcatttgaatctccattgacgctagctgcctgtggaggacatgttgaattggcagctctacttattgaaaggggagcaaatcttgaagaagttaatgatgaaggatacactcccttgatggaagctgcccgggaaggacatgaagaaatggtggcactactcttagcacaaggagcaaatataaatgcccagacagaagaaactcaagaaactgctcttactttggcttgctgtggaggattttctgaagttgcagactttcttattaaggcaggggctgatatagaacttggctgctccacacctctgatggaggcatctcaggagggacacctggaattggttaaatatttgctggcttctggcgctaatgtgcatgctacaacagcaacaggagacacagccttaacctatgcttgtgaaaatggacatacggatgttgcagatgttttacttcaagcaggggctgatttagaacatgaatctgaaggtggaagaacacctttgatgaaagctgcaagagctggtcatttgtgcactgtgcagtttcttattagcaaaggtgccaatgttaacagggctacagccaataatgatcatacagtagtgtcgctggcatgtgcaggaggccacctggcagttgttgagcttctcttggctcatggggctgaccctactcatcgactcaaggatggttcaacaatgctcattgaagctgcaaagggtggccatactaatgtagtttcttatctgttggattatccaaataatgttctgtcagttcccaccacagatgtgtctcagctccctccaccttctcaagatcagtctcaggtgccacgtgtgccaacgcatacacttgccatggttgtacctccccaggaacctgacagaacttcacaggagaactctcctgcccttttaggagtgcaaaaaggtacatccaagcagaagtccagttccctccaggtagcagatcaggacctactgccatcttttcacccataccagcctttggagtgcatagtagaggagactgaaggcaagctgaatgaactgggacaaagaattagtgctattgaaaaagcacagcttaagtcactggagttaattcaaggtgaacctctgaacaaagataagatagaagaacttaaaaagaacagagaagagcaagtccagaagaagaagaaaatattgaaagaactgcagaaagtggaaaggcagttgcagatgaaaacacagcagcaatttaccaaagaatacttggaaaccaaaggtcagaaagacacagtgtctctacaccaacagtgctctcatagaggagtcttcccagaaggggaaggagatggtagtctcccagaggatcacttttcagagttacctcaggttgacacaatcttatttaaagataatgatgttgatgatgagcaacagtctccaccatcggcagaacagattgattttgtcccagtccagcctttatcatctccacagtgtaacttttccagtgacttaggttctaatgggacaaattctcttgaacttcagaaagtatcaggtaatcagcagattgtaggacagcctcagattgctattactggacatgatcaggggctgttagttcaagaaccagatggactaatggttgcaactccagctcagacgcttaccgacactcttgatgacctgatagcagctgtgagtaccagagtgcccactggttccaacagttcttctcagaccacagagtgtcttacacctgaatcctgttcgcagactacaagcaatgtggcttcccaatcgatgcctcctgtgtatccttcagttgacattgatgcacatactgagagcaatcatgacacagcattaacactagcttgtgcaggtggtcatgaagaacttgtatctgtgctcattgcacgggatgccaaaattgaacacagagacaaaaaaggtttcacaccactaatcctggcagcaacagcagggcatgttggagttgttgaaatccttttggataaaggtggagatatagaagcacagtctgaacgaactaaggatactccgctttcattggcatgttctggtggacgtcaggaggtggtagacttgctgctggctcgaggtgcaaataaagaacataggaacgtatctgattatacaccactgagtctagctgcgtctggaggatatgttaatatcattaagattctgcttaatgctggggcagaaattaattcaaggactgggagtaaactaggtatttctcccctgatgttggctgcaatgaatggacatgttcctgcagtaaaattgctgctcgatatgggttcagacattaatgcccaaatagagaccaatcggaacacggctctcaccctggcctgtttccagggccgagcagaagtagtgagtttgcttctggaccgaaaagccaatgttgaacatagggcaaagacgggtcttacccccttgatggaagcagcttctggagggtatgcagaggttggaagagttcttcttgataaaggagcagatgttaatgctccccctgtgccttcctcaagagatactgctttaacaatagcagcagacaaaggtcactacaaattttgtgaactcctgattcataggggagcccacattgatgttcgtaacaaaaagggaaatacgccactttggctggcatccaatggaggtcattttgatgttgtgcagttgctagtgcaagcaggtgctgatgtggatgcagcagataaccggaaaatcacacctcttatgtcagcatttcgcaagggtcatgtaaaagttgttcaatatttggtaaaggaagtaaatcagttcccttctgatatagaatgcatgagatacatagcaacaattacagataaggaactgttgaaaaaatgtcatcaatgtgtcgaaaccattgtgaaggctaaagaccagcaagctgcagaagcaaataagaatgcgagtattcttttaaaggaacttgatctggaaaagtcaagagaagagagcagaaagcaggctcttgctgctaaaagagaaaaaagaaaagaaaagagaaaaaagaaaaaagaggaacagaaaaggaaacaggaagaagatgaagaaaacaaacctaaggagaattcggaactaccagaggatgaagatgaagaggagaatgatgaagatgtggagcaagaagttcccatagaacctcctagtgcaaccaccaccactacgattggaatctctgcaacatctgcaacattcacaaatgtgtttgggaaaaaaagggccaatgtggtgacaactcccagcaccaatcggaaaaataagaagaacaaaacaaaagaaacccctcctacagcacatttaattttaccagaacaacatatgtctttagcccaacaaaaggcagataaaaataaaataaatggagaacctagaggtggtggtgcaggtgggaatagtgattcagataacttggacagcacagactgcaacagtgagagtagcagtggtggtaaaagccaagagttaaattttgtgatggatgtgaattcctctaaatacccctcactgctccttcattcccaagaagaaaagacaagtactgctacttccaaaactcagacacgacttgaaggtgaagtgactcctaattccttgtcaaccagctacaagacagtgtcattgccattaagctctccaaacataaagctgaatctcactagccctaaaaggggtcagaaaagagaagaagggtggaaagaagttgtacgaaggtcaaagaaattgtctgttccagcctcagtggtgtcgaggataatgggaagaggaggatgcaacatcactgcaatacaggatgttactggtgcccatattgatgtggataaacaaaaagataagaatggcgagagaatgatcacaataaggggtggcacagaatcaacaagatatgcagttcaactaatcaatgcactcattcaagatcctgctaaggaactggaagacttgattcctaaaaatcatatcagaacacctgccagcaccaaatcaattcatgctaacttctcatctggagtaggtaccacagcagcttccagtaaaaatgcatttcctttgggtgctccaactcttgtaacttcacaggcaacaacgttatctacgttccagcccgctaataaacttaataagaatgttccaacaaatgtacgttcttctttcccagtttctctacccttagcttatcctcaccctcattttgccctgctggctgctcaaactatgcaacagattcggcatcctcgcttacccatggcccagtttggaggaaccttctcaccttctcctaacacatggggaccattcccagtgagacctgtgaatcctggcaacacaaatagctctccaaagcataataacacaagccgtctacctaaccagaacgggactgttttaccctcagagtctgctggactagctactgccagttgtcctatcactgtctcttctgtagttgctgccagtcagcaactgtgtgtcactaatacccggactccttcatcagtcagaaagcagttgtttgcctgtgtgcctaagacaagtcctccagcaacagtgatttcttctgtgacaagcacttgtagttccctgccttctgtctcctctgcacctatcactagcgggcaagctcccaccacatttctacctgcaagtacttctcaagcacagctttcttcacaaaagatggagtctttctctgctgtgccacccaccaaagagaaagtgtccacacaggaccagcccatggcaaacctatgtaccccatcttcaactgcaaacagttgcagtagctctgccagcaacaccccgggagctccagaaactcacccatccagtagtcccactcctacttccagtaacacacaagaggaggcacagccatccagtgtgtctgatttaagtcctatgtcaatgccttttgcatctaactcagaacctgctccattgactttgacatcacccagaatggttgctgctgataatcaggacaccagtaatttacctcagttagctgtaccagcacctcgagtttctcatcgaatgcagcccagaggttctttttactccatggtaccaaatgcaactattcaccaggatccccagtctatttttgttacgaatccagttactttaacaccacctcaaggcccaccagctgcagtgcagctttcttcagctgtgaacattatgaatggttctcagatgcacataaacccagcaaataagtctttgccacctacatttggcccagccacacttttcaatcacttcagcagtctttttgatagtagtcaggtgccagctaaccagggctggggagatggtccactgtcctcacgagttgctacagatgcctctttcactgttcagtcagcgttcctgggtaactcagtgcttggacacttggaaaacatgcaccctgataactcaaaggcacctggcttcagaccaccttcccagcgagtttctactagtccagttgggttaccatccattgacccatcaggcagctccccatcttcctcttctgctcctctggcaagtttttccggcataccaggaacaagggttttcctgcaagggccagctcctgttgggactcctagtttcaacagacaacatttttctccccatccttggacaagcgcctcaaactcatccacttctgccccaccaacgttgggccaaccaaaaggagtcagtgccagtcaagatcgaaagatacctcccccaattggaacagagagactggcccgaattcggcaaggagggtctgttgcacaagccccggcggggaccagttttgtcgctcccgttggacacagtggaatctggtcatttggtgtcaatgctgtgtcagaaggcttatcaggttggtcgcaatctgtgatggggaaccatccaatgcatcaacaattatcagacccaagcacattctcccaacatcagccaatggagagagatgattctggaatggtagccccctctaacatttttcatcagcctatggcaagtggttttgtggatttttctaaaggtctgccaatttccatgtatggaggcaccataataccctctcatcctcagcttgctgatgttccaggaggccctctgtttaatggacttcacaatccagatcctgcttggaaccctatgataaaagttatccaaaattcaactgaatgcactgatgcccagcagatttggcctggcacgtgggcacctcatattggaaacatgcatctcaaatatgtcaactaagttagaaggtctttactctttagccttgtttaagaaacctatgaccttggaagaaccatggggatttttttttaatgtgcctaagaaattttctctgaggctttagcaatggaaatttgattgcccattgtataagaacaaattgatttcctatccacctgattatgttctctggttagtttagccattttgaacttaagatcatatgaccttagtgcttttggctaaacatacagaatactacttgtatgcagaagagaattagttgattacatgtttcaaccttttagggtgataaatacatgtataattgtttacatacttaaaaggaaaaagttgagtaaatttcttgtcatatagtggctctacgtaatgtagcctgtattaatgtgaaatatttaccagaatattcaataaaaagatgaacagtctttagaaaaaaa

SEQ ID NO: 30293 - DNA, 2347 bp, Homo Sapiens
ccggaagtgacctctagagcggtggtgaaactggcagttgacggctcctgggactagatcccgcgaggtagcccccgaactatttctctacgttttctcttgatcctcccgaaatcttccagatccgcgtagtgaggaatcgtctccaccgtcatggggggcggagacctgaatctgaagaagagctggcacccgcagaccctcaggaatgtggagaaagtgtggaaggccgagcagaagcatgaggctgagcggaagaagattgaggagcttcagcgggagctgcgagaagagagagcccgggaagagatgcagcgctatgcggaggatgttggggccgtcaagaaaaaagaagaaaagttggactggatgtaccagggtcctggtgggatggtgaaccgtgacgagtacctgctggggcgccccattgacaaatatgtttttgagaagatggaggagaaggaggcaggctgctcttctgaaacaggacttctcccaggctctatctttgccccatcaggtgccaattcccttcttgacatggccagcaagatccgggaggacccactcttcatcatcaggaagaaggaggaggagaaaaaacgagaggtattaaataatccagtgaaaatgaagaaaatcaaagaattgttgcaaatgagtctggaaaaaaaggagaagaagaaaaagaaggagaagaaaaagaagcacaagaaacataagcacagaagctcgagtagtgatcgttccagcagcgaggatgagcacagtgcagggagatcacagaagaagatggcaaattcctcccctgttttgtccaaagtccctggatatggcttacaggtccggaactctgaccgtaaccagggtcttcagggtcctctgacagcagagcaaaagagagggcatgggatgaagaaccattccagatccagaagctcctcccactcacccccaagacatgccagcaagaagagcaccagggaagcagggtcccgggacaggaggtctcgatccctgggcagaaggtcacggtccccaagacccagcaaactgcacaactctaaggtgaacaggagagagacaggccaaactaggagcccatcacctaaaaaagaggtctaccaaaggcgacatgctcccggatacaccagaaaactctctgcagaggaattagagcgaaaacggcaagagatgatggaaaacgccaaatggagggaggaggagagactgaacatcctcaagaggcatgctaaggatgaggaacgggagcagaggctagagaagctggactcccgggatgggaagttcatccaccgcatgaagctggagagtgcatctacttcctccctggaggatcgggtgaagcggaatatctactctttacagagaacttcggtagctctggagaagaactttatgaaaagatgaaaactgtcccctctcttattggttttcctgcattttccagggaagctgctgaccccttaattctctttataagagttcaaatgacttctttcacagatgtcaaaccaccagtgttcaaagtgaccctgcttcattgagtcctgaaacagctcacttcctttgagagctagtgtgacttgctttgtgggacactcagtaactttgggttttgactctttaacgggtgggcactggaccatctcggtgggagtgcttgtgccactctggaaggctgttccctggggttgtgatgtttatcatgccacttccttcttacctgtgccaacagacctatttcactgcctcagcgtacaccagacccttcagaaacctctctggtgtcacccagatagattgtgcttactgagacaaatgaacgtttacttgatttagaagataatgtgacagaatgatgtcaggttaggtcaaagccaagggagtgacagaatctggaaaatcaaacaatacaaaaagccctaaatgaactgttaactatttgatctttggatgtaaaattgtaatgcgtatatgtacaaatgtacaatttttacatgcttttaaaaaaggttagctttgtgaaaataccttgtttggtcaatgactttactgggtaatagaaccacattgaaccttgatggcaagtaatacaataaggcaggccagctcgtttttctctctgaatctggctggtttaggaggagcctgggtttatcgacgagatctggagtatctattcttttccactgcttgcagtctccaatgtaggcagtgtaaaggtatagtaaaatgattttaggagtcagaaccaaattgccaatatgctccatggctcctaaaggaaaataaaatggaagtttttaaaaaaaaaaaaaaaaaa

SEQ ID NO: 30294 - DNA, 5726 bp, Homo Sapiens
acgtgggagagaagggagggttgggggaagtgtggaaaacctgaacctgagctgctgtcgcctgaggaagatttggtgggaggagaagcagaggggaagagacgggttgagagtgaggtgaggagggcatctaggtcactgctcccggggggcacaaagttcgcgatgtggctgaagcctgaggaagtgcttctgaaaaatgcgctgaagctgtggctgatggaaaggtccaacgactacttcgtgctgcagcggcgtcggggctacggggaggaaggcggaggggggctcacagggcttctggttgggactcttgattcagtcttggactctactgctaaagtagctccatttcgcatcctacaccagacaccagattctcaagtttacttgtcaattgcatgtggagccaacagagaagaaataaccaagcattgggattggttggaacaaaatattatgaagaccttatctgtatttgattcaaatgaagatattactaattttgtacaaggaaaaataagaggattaattgctgaagagggaaaacattgttttgcaaaagaagatgatcctgagaaatttcgagaagcccttttgaaatttgaaaaatgttttggtttaccagagaaggagaagttagtgacctattattcatgcagttattggaaaggacgggttccttgtcagggttggctttatcttagcaccaactttctgagcttctattcttttttgttgggatcagaaataaaactcattatctcctgggatgaagtctcaaaacttgaaaagacttcaaatgtcatactgacagagagtattcacgtgtgttcccaaggagagaatcactacttttcaatgtttttgcacattaaccaaacataccttcttatggaacagctggcaaactatgccattagaagactttttgataaggaaacatttgataatgacccagtcctttataatcctctacagatcaccaaaagaggtctggaaaatagagcccacagtgagcaatttaatgccttttttaggctgcccaaaggagagagtttgaaagaagtacatgaatgtttcttatgggtaccattcagccacttcaatactcatgggaaaatgtgcatctcagaaaattatatctgctttgctagccaagatggcaatcagtgtagtgtaatcattccactacgagaggtcttagctatagataagacaaatgattccagcaaatctgtcatcattagcatcaaaggaaaaacagcttttcgcttccatgaagttaaagactttgaacaactggtagcaaaactcaggctcagatgcggagcagcttcaactcaatatcatgatattagcacagagcttgctattagttctgagtctacagagccatctgataattttgaggtgcaatctttgacaagtcagagggaatgcagtaaaactgtgaacactgaagccttaatgacagtatttcaccctcagaatttggagactcttaattctaaaatgttgaaagaaaaaatgaaggaacagtcatggaaaatactgtttgcagaatgtggacgtggtgttagtatgtttcgaaccaaaaagactcgagatcttgttgtaagagggattccagaaacattaagaggagaactctggatgcttttttcaggtgctgttaatgacatggctactaatcctgactattatactgaagtggttgagcagtccttagggacctgcaacttggctactgaagaaattgaacgtgatttacgtcgctctctgcctgagcacccagcctttcagagtgatactggcatatctgctctgagaagggtactcacagcttatgcatacaggaatcccaaaattggatactgccaggcaatgaatattttgacttcagtgctgcttctatatgcaaaagaggaagaagctttttggcttctggttgctgtatgtgaacgaatgttgcctgattattttaatcgtcgaattattggtgccttggtggatcaggcagtctttgaagaacttatcagggatcaccttcctcagctgacagaacacatgactgatatgacattcttttcctcagtttctctctcttggtttctcacactttttattagtgtgctacctattgaaagtgcagtgaatgtggtggactgtttcttctatgatggaataaaggccattttgcaactgggattggcaatacttgactataatttagacaaactgctgacttgtaaagatgatgctgaagctgtgacagccttaaacaggttctttgacaatgtcactaataaggatagtccattgccttcaaatgttcagcaaggttcaaatgtgagtgatgaaaaaaccagtcatactagagtggatattacagatttgattagagaatcaaatgagaaatatggtaatattcgctatgaagatatacatagtatgcgctgtcgaaataggttgtatgtgatacagaccctagaggaaacaacaaaacagaatgtgttgcgtgttgtatcacaagatgtgaaattgagccttcaagaattggatgaactttatgtcatctttaagaaagagctgtttttatcttgttattggtgtttgggttgcccagtattgaagcatcatgaccccagtctgccatatttggaacagtatcagattgactgccagcagttcagagcgttgtatcacttgttgagtccctgggctcattctgcaaataaagactcactagctttatggacattcagattgttagatgaaaactctgattgccttataaacttcaaagaattctcctctgcaattgacataatgtacaatggaagttttactgagaagcttaagctgctttttaagctacatattcctccagcttacactgaagtgaaatctaaggatgcttcaaaaggagatgaactttccaaggaagaattactttatttcagtcagctgcatgtttccaagcctgcaaatgagaaggaagcagaatcagcaaaacacagccctgaaaaaggcaaagggaaaattgatattcaagcatatctaagtcaatggcaagatgagcttttcaaaaaagaagaaaacattaaggatttaccaagaatgaatcagtctcagtttattcagttttcaaagaccctctataacttatttcatgaggaccctgaagaagaatcattatatcaagccattgctgttgtaaccagccttttactcaggatggaagaagttggaaggaaactacatagccctacatcatcagccaaaggattctctggtactgtctgtggttctggaggacccagtgaggaaaaaacagggagccacttggagaaagatccttgttcctttagggaggaacctcagtggtcatttgcatttgaacagattcttgcatcgctgttgaatgaaccagcattggtgaggttttttgagaaacccatagatgtaaaagccaagctggaaaatgcaagaatttctcagttaaggtctagaaccaagatgtaaatccctaggaattgcctatcatagacaagtttactaacattcctgtagctgtcagtttgattcctgtgagtagggctcagggatttatcttgttaccaatgtgtctgaaggccaaaatatatatccagaagcacaatgcatcattcctttgttgttgataatgggctttgttagcactttttaaaacaaacaaacaaacaaaacaaaaaagcaaaccacatttgttatctcaaattttgatgatattctcaaatacaaatatacttttttatatttcacaatatatgcaatatcaggggaatatgctaaatgttaccaccagagggcacaagcatatcacttttagtaaggaaattactagcttgtgttgctatttacatatgaattactgattattttgaaaagacggtgttatgcttgggtgttagtgaggctgatatgtcatgtcaatcgataaaccctactttccaaattatctaaaagattaccatttggggcccttgttttcaagttatctaactgaaatattattaatttttttaagttaatctcattcagtcttctagtaataaatgcttttttaagtaccttctacagtcttcctacctgaggggttcagaggctgctgactcacactgctaactctgttactgacaaaagcaaatcaataactctaaattctgggctgatataaagaaaaaaacaatattggatttggatttaatctgggtaaaatcagccttctgagaagggctaagaaacagttcaattaactgtataggtctttcattagaccgagacatcactagaaattctgggcactgctgtttgtggtatttgtctcagagtagcttatgactgttttggttctagctttagattttggattttcaccagtcatgtgttaatttacattagatagtaaagaatggctacactaagactgaattatcttattagtctggcaagcatataaagtatacttgtatgtaatgattgccaaggtaacagaattgctgacatctgtctaaaaagttttgactatccaatttagatgtgtaatttctatatactttatgctgtttatatttcagtcattacaccaagtccatttagagataatgggctttgttagcactttcaaaaaaaaaaaaagcaaaccatacttgtccactgtcctgtgctattcctaccaaggacaatttattaatcaattgacttagaaaatagggggagaaatcattcattggagcttctttctttagaaaagactttggttataagccttttgacttttctagatgtgaaaccatgaaagggcagacctccttcagagtgactcaagaggtctccctttcttggagggagttggtacagtcagcctttgggaagaatccactgtgaacaaagcttaacacatggggcttcatcgctcatagaatatgttattttcaaagaagttcaagaattttcaagttgagcctttgaaaatcccataaattggttttagctaaacacttactagtagtgtctttaaattatttaatcaaccttgtcttttcaaggaaattaccacttaaagagatagttggtaaataaacatctatgccttttctcagaaatgatttgctgaactatgtccatattttacagcttagataatagtttatatggaaactattatacatctgctattgtgcaatgattgttaaattatactgaagtagctctagaaagacacatgtatacaaggcactattgtacacactttgctgaatattttgtcagttgtatttacaaagaaaggtactttcttaagagcatatatgttattaatatttgatatgattttaaagtcagaatagtacagattgctgagtattatactttaggctagattaattaaaattgaatactgaaagagattttttgagttgcaaaaagtttataaatgcaaagcaaaaagaaaacatttattttctgagtctgcaggagaaacaaactaaacattatagttttatagctgctatcttgttaaccaaacaggttgttcataatattaaaaatcttacgtagttgtgttaaactgaaccagttcattataccttatgcattaaattaaatatgttataaggtggctttacttgtctttataaaaataaatatatctactaaacatgaaaaaaaaaaaaaaaaaa

SEQ ID NO: 30295 - DNA, 2662 bp, Homo Sapiens
agaagctgggccctggcggcggatctggacgtggcggcccgcgccgggctgagtcaccaggagggagctgtggccgaggacgccgaggcctggagtgggtggtagccccgagctgggacgctcctccctccacaatctccccaggtctgcagggaccgagggcctacactgcctcctcccacgccgtgcttaggaacccttgctggcctcagaacaccagcgccctccctccggtgcagccctgcctggccgggggcccctcctccacagccatggtctggaagaaactgggctcccgcaacttctccagctgccccagtggctccatccagtggatatgggatgtgttagggtgaatgtgcccaggacggctgggacgaggccagcgtgggcctgggcttgatctccattctctgctttgctgcatctaccttcccccagttcatcaaagcctacaagacgggcaacatggaccaggcgctgtccctgtggttcctcctgggctggattggcggagactcctgcaacctcatcggctccttccttgctgaccagctgcccctgcagacctacacggctgtgtattatgtcttggcagacctggtgatgctgacgctgtacttttactacaagttcaggacacgcccctctctgttgtctgcccccatcaactccgtgctgttgttcctcatggggatggcgtgcgccacaccgctgctgagtgctgctgggcccgtggctgcccctagggaagccttccgggggcgggcgctcctgtccgtggagtcgggcagcaagcccttcacccggcaggaagtcattggcttcgtcatcggctccatctccagcgtgttgtacctgctttcccggctgcctcagatccgcaccaacttcctccggaagtccacccaggggatctcctactctctgttcgcgctggtgatgctggggaacacgctgtatgggctgagcgtgctgctcaaaaaccccgaggagggccagagcgagggcagctacctgctgcaccacctgccctggcttgtgggcagcctgggcgtgctgctgctcgacaccatcatctccatccagttcctggtgtacaggcgcagcaccgccgcctcggagcttgagcccctcctccccagctgaccagaaccaggctgagcgcaggaggacaggcaccaccggatgccacaccaggcaggaggaggtgtggacagtgatggtacggcggccctgcatcagcctgcgggtggcctctggatcctccgtggaccgaaccgtccccccaggaacacaccttcaggtagaccccgaagcctcaaggccggggctggagcggagaccccagggcctctcaggagacagtgaggctgcccctcctaccacctacctcattctgcctactcaccccaggggccacagccacagcctgctggtctcgaactccttacctcaggtgatctgcttgcctcagcctctcaaagtgctgggattacaggtgtgccaccgcgcccggccaagatgggagtatttttatgaccattttacagatgggagaacagtctcagcacaattgagcagcttgcccagctaggagcagcagcaacacgagaccctccagctttgggagccaccccacacctggccaacgctggcggcccgtgtccccttcctccatccttgctgggggcccatggcttgtggcagttcagcttcaccctcaggagtggcccgaaccctgctggacccaggctcccttctcaccatcctgaatagcgactttgctgagcctctggccctgccgagatttcaggataagttacccccaggcccgaagccccagcttgccctggcctgtgcctgcctcaggtgccagctagatgtctcgctccacctgggtctgggacctggctccacaccagttacctgggaccagtaggtgcccttccagcctgaagatctgggggcacagtatagccacatgagccccaagtgtggtcctgaactggggccgggtggggaagagtgagatgggataacatagcccctgcttggaggcccttctctgatggggtgacataatcccttcctcctgggaaacaccagcttttggggtgatagcactttcaggcaggagctatggttccttcctcaggaggcctccaatctgatggggaagacatggcccctccccctggggagtgccctgtgtgatggaggcgatacagcccctaccttcagagagcacctggcctgcagctcatccaaacctgagtctcctctcccttggaggcctcattccagcgccccaaggaggattcaaactgttggggctggaagaacttggtggcctgggtccctggagccctgttgaaggagctggtgacattctgatgctggaggcaggtgacggggagcacagactttgtgtcctgcacactgagctccaagtgtgccccagccactgagccttgtgacttgagcagatgtccgaagccgtttcttcatcccatgagaccagtaatactgtctgcctcagaacatagccgtgatcaagatgagcacggaggctcgtgtcccagcacctggcacacagtaagtgcctggtaaataaacaatggctatatttgcttgtcaaaaaaaaaaaaaaaaaaaaaaa

SEQ ID NO: 30296 - DNA, 2847 bp, Homo Sapiens
acctttaagcgtcacgggtggggctgcagcttctggacctaggactttgaacatgtcgcgcctgaagcggatagcggggcaggatctccgcgctggtttcaaagcaggtggaagagactgcggtacctcggtaccccaagggctgttgaaggcagcgaggaagagcggccagttaaacctgtcgggtagaaacctcagtgaagtgccgcagtgtgtctggagaataaatgtggatatccctgaggaagctaatcagaatctttcgtttggtgctactgaaagatggtgggagcagacagatttgaccaaactaataatatcaaacaataaacttcagtcacttacagatgacctgcgactcttgcctgcactgactgttcttgatatacatgataatcagttgacatcccttccttctgctataagagagctagaaaatcttcagaaacttaatgtcagccataataaactgaaaatactccctgaagaaattacaaacctaagaaacctgaagtgcctgtatctccagcataatgaattaacctgcatatcagagggatttgaacaactttccaatttagaagatttagatctttcaaacaatcatcttacaactgttcctgctagtttttcttctctgtccagtctggtgcgactcaatctttctagtaatgaactgaagagtttgccagcagaaataaatagaatgaaaaggttgaagcatttggattgtaattcaaatctcttggaaactatacctcctgaattggctggcatggaatcactagaattgctttatttgcggaggaataaattacgttttctaccagaatttccttcttgtagtctattgaaggaattgcacgtaggtgaaaaccagattgaaatgttagaggcagaacatcttaaacatctgaattcaattcttgtgctagacctgagggataacaagttaaaatctgttccagatgaaattatactactacggtccttggaaaggcttgacctaagcaacaatgatattagtagtcttccctattcattggggaaccttcatttgaaatttttggcattagaaggaaatcctttgagaacaattcgaagagaaattataagtaaaggaacacaagaagtcctaaaatatctacgaagcaagatcaaagatgatggacctagccaaagtgagtctgctactgagactgccatgacactaccaagtgaatccagagtcaatatacatgccatcattacattaaaaatattagactatagtgataaacaagcaactttgattcctgatgaggtgtttgatgcagtaaaaagcaacatcgtcacttctattaacttcagtaagaatcaactatgtgaaattccaaaaaggatggtagaactgaaggaaatggtttctgatgtcgatctcagttttaataaactttcctttatatccttggagttatgtgtgcttcagaaattgacttttttagatctcaggaacaattttttaaattctttgccagaagaaatggaatcactggtaagactgcaaacgatcaatctttcctttaataggtttaaaatgctacctgaagttctatatcgtatcttcacacttgaaacaattctgattagtaataatcaggttggatctgtggaccctcagaaaatgaagatgatggaaaatctgaccacgttggaccttcaaaataatgacctcttacaaattccaccagagctcggtaattgtgtaaacttaagaacattactattggatggaaatccattccgagttcctcgagcagccatattaatgaaaggaacagctgctatacttgaatatttgagagaccgaattcctacttaacatggagttgctttataacccttgtcatgtattattaaccctggttaattctaaggaggatgtaacatttgttttagtatcatcttaaaaggtgattattgtaattgatcttgtagtttcccagtatcacctacccgttggtataattagcctgggccatattcactgccagtaaatatttttacatttttatttaagatttttgtaaggtgttgtgtacatttgtaatggtgataaccacaatgtgttcatacatttgttctaaatgttttgcttatgatttatcctgctaactttcattttcttatagcaagcagttttttcaaaaatgaatttttatttaatgtggttcagtattataataacaaagcatttttgtagaactggttttttttctcatttatttttgtattccatacaatgtgaccaattgacttgaatatgactagccagtttctatgtttttgttagatataaaattaaatcgaattttgttgaatactgttctttggcatttaaaaaataagaccttcttatcttgggccacatgtcaaaagaaaaaggaaacaaaaatatattaaaaataagacttttcattacccatgataggacttttgtgatatggctaatctcagtacacatttcaacttaaaacctttttatttacagcaccataattttaaaatttacttgcaatcttggtaagactaaacttgcagtgtttttctaaaagggaatttgataggtaaacttgatttaataaaaattaaatatcatttttgtttacaccaaaattatcagaagtaggttgattagtcattataacacttaccatatgattctattaagaagtcaattcagtagcatgtatatcaatttatatagataggtagatagcttttggatgattgaggcatgcttatattatgaaaaaaattgctaataaagataaatactacatgttcagaataaaagttacatttttc

SEQ ID NO: 30297 - DNA, 5534 bp, Homo Sapiens
gtgggccgttgaatgtggctgctcgcggtcggcgtgccccgacgtacagcgggccgggaaaagtggcactgaggctctggaacttctgcccagctctccttgtaaaatgaatgaaagtaaacctggtgactcacagaaccttgcttgtgttttctgtcgaaaacatgatgactgtcctaataaatacggagaaaagaaaactaaggagaaatggaatctcactgtacattactactgtttgttgatgtcaagtggaatttggcagagaggcaaagaagaagaaggagtttatggttttctaatagaagatatcaggaaggaagtgaatagagcttctaaactgaaatgctgtgtttgcaagaaaaatggtgcttcaattggatgtgttgcaccccgatgtaaacgaagttatcatttcccatgtggacttcagagagaatgtattttccagtttactggcaattttgcgtcattttgttgggaccatcgacctgttcaaataattacatctaataattatagagagtccttaccatgcaccatttgcttggaatttattgagcctattccaagttataacatattacgaagtccttgttgtaagaacgcttggtttcatagagactgtttacaggttcaagcaataaatgcgggagtgtttttctttaggtgtacaatatgcaataatagtgacatctttcagaaagagatgttgagaatgggaattcatattcctgaaaaagatgcttcctgggaattagaggaaaacgcttatcaagagcttctgcagcactatgagcgttgtgatgttcgaagatgtcgttgcaaagaagggcgagactataatgcacctgatagcaaatgggaaataaagcgctgtcagtgttgtggttccagtggcacacatttagcctgctcctcattacggtcatgggagcaaaattgggagtgtttggaatgtaggggtattatctacaattcaggagagttccaaaaagccaaaaaacatgtattacccaattctaataatgtggggattacagattgtttgttggaagagtcatcacctaaattacccagacagtcacctggatcccagagtaaagatctactgaggcaaggcagcaaatttagaagaaatgtatcaacactattaatagagttaggattccaaattaaaaaaaaaactaaaagattgtatatcaacaaagccaatatctggaatagtgccttagatgcattcagaaatcgaaactttaatccttcatatgcaattgaagtagcatatgttattgaaaatgataattttggaagtgagcatcctggatcaaagcaagaatttctgagtctcttaatgcaacatcttgagaactcatcattgtttgaagggtccttgtcaaagaacttgtctctaaattctcaagctctgaaagagaatctttactatgaagctggcaaaatgcttgccatttctttagttcacggtggtccttcacctggtttcttttctaaaaccttgtttaactgccttgtttatggaccagaaaatacccagccaattttagatgatgtttcagactttgatgtggcacagattataatcaggataaatactgcaacaactgtagctgacttaaagtcaataataaatgaatgctataactaccttgagttaattggatgtctcagacttataacgacattaagtgataaatatatgttagtaaaagacatacttggctaccatgtaattcagagagtccacacaccctttgaaagttttaagcagggtctgaaaacccttggtgttttggagaaaattcaggcttatccagaagcattttgtagcatcctgtgtcataaacctgagagtctttctgcaaaaatccttagtgagctttttacagtacacacattacctgatgtgaaagctttggggttttggaacagttacttacaggctgttgaagatggtaaatctacaacaacaatggaagacattcttatttttgcaactggttgcagttccattcctccagctggatttaaacccactccttcaattgagtgtctgcatgtggattttcctgttggaaacaagtgtaataactgtttagcaattcccatcaccaatacatataaagagtttcaagaaaatatggacttcaccataagaaacactctaagactagaaaaggaagaaagttctcattacattggacattaaaatgtttccttgaacaaagagaagcttctttaaaagctgctattgataactctcttttatttcactaaccttttcatcatcactttgaacaaactagttagcttcttgacctaataaaatttatgatatgaatataaaggaatattatagccacttaggctaaaaaaaggttttttttgttaaagcatactagtcaaaattggtgataatttctcattttcttgatatagatacttcataaacctcaatataaatactctcaaaatggttgtatggattttatttaggtatggtagcatggttaataaaagtaaaaactgttttactcacattttttgtaaattaggattacatatagaatgccacaatttctctaggtttattcaattttcaaattattcctcattttattttaaagcattaaatagaaaagctaattggttaaattttgttatataaatcagagtcatatattctgggatttgtgttactatgcatacttttctaggatgtcaccaaattagttgtttaaaatgtttttagattactgatttatattaagatgacccacactgcaattagattatgcctagtgggaagtattatataaaaagcagaattaagctgggcacatgtgcttgtaatctcagttataagggaggctgaggtgggagaatcgagatactcagccagcctggcaatgtagcaaagactccatctcaaaaaaaaaaaacagaattgcacaaattttctggaatctatggacattccatgagcttaaacacttttgaggtggataacatttagttgaaaatacctaagaaagtgtgtcttctttaaagccttggctttaatcatgggaaattgttgttgttgttgttgttgtttgtatcctatgtttggtattctgtatgtctgatccataatcattttagatatttgaatgatctctgtggattggtaggtttggccatttgaccattatttattatcaagttggttgtatgctaaggtaagttgacgccatagcattatacagttatcttcattgctcttgaatgatatctgttatataagcaatgtataaataaagtaaaaaggatagaatgaaaaacccattctaatgtcaccactcagagataagtaccgtatttctgtgtatccttctataaactctttacttctgtttcctttattttttaactttaataatgctactaaaagacaatacctaaaagtaactgtactaacaaagtgctaacaatgtgaaaatatatagtcccatagtcatgtccccatatttatactcccacagaagaaaaaattggaaaacaaagtctgatgtccttaatctattaacatatttaaatgatataatggttcagttttccatgaaagtaaatcattatgggaagtaaaatgttttaaccatatttttcttaatacacaaagcaggtgtcagctgttgtattctcacccttcttaagaaaaatcattacattattgatattttttaagtaacagaatagatttgaaagagataatatatctcttaataccaaaggaaaactaaaacataattctagtgtacttttctttgttccctcatgtctttttcaatctgtacactaacatacctagcaaatttgttttactttaacttgaaatatttaagaacattaaacaagacatttctttggctttggttgaatttttttgtctcaccaatagtaattgaaagatcaattatcaaagagtttgaatagctaatataaaccccaaagtcaccatacagtttttattccaaatatgttgataaaaagatatttgtttctttatccaccttatttttattacagctaaaaaccaatacaaaccaataaaacctagttaaagctattttctggtttttagttgcaattaatttcccctagggtagaaattaaagctgattaagtcacacacacatactttgttggggtgggggtggcaggtggagaggcagtgtacttgggttagctacaattaaaaacagtatttcaattcctcatttgacttattttatatatagacagggccttagtgataagatggtgtaaataatttaggatattcatgttttaaagtgaagcataaatatttattttgcaaaatgttttctagtttgaaggatgttccattattaccatttttagattaatctgtatggtcaaggaatatcagagaaacctgtaggttatttattttctgcagtgtcattttgtcaaatggttggtattataattgttcttttcttattaattttataaccagtgcataattcttacattagattttaaaaaagaattatgctataaatctttataaatgtgtacatatatttcttaaatattgcaattgcctaaatgttgtatattttaaggctgttttctcttgctcttaatgttgaggaaaactataaattgatctataatgcatctactgttaatggttttggttagtttgatattcattgtttttaaacactttccaatatggaaactttaacaccttttatacaattctctactattcaagatattctttaaaatatctcaccagaaacttacaattttatactttgtaatttttagtttctgtaatttgaggaagtgactttttttgtttgggttaagtaaaaagcctttgattgattaccagcatgagaattcaccttggtttctattttatgcatttgtaaatttttcccctaattatatggaagctattggaacttttgtattcagtgctaaatactaagtcaaggggagtatattaggtaagttttttcagtgactgtgcctttagcattcagtcattataagaaaatgatcagaacaaaatcattacattataaacatgtaattcttttatatagtgattatcatgtactgcattgttactttaaaataagctattaaactagtttttatggttcaagtaatgcaatacaaagtttcatgcttcaagtaatgcaatacaaaacataacccatttaatgatgaattacttgaatgtatattatctgtggtttaggaaaatttggattgtcttgaagagacttagttttcaagttctgattttgaccattatctcttctaattcataaacatatcccagtacctacactatgccaggtattatgctaggtgatcgtttatatgtcagcctatttcccccccttttaaagactgccagattaaccaaaaagcgtgacatttataacaatgttttataaataaataaatgtgtttatgccactaaaggt

SEQ ID NO: 30298 - DNA, 2050 bp, Homo Sapiens
gtgttgacagcggcggcggtggaaccgggcgggcggcgggagtcggcgcctcgggttcctacctcgcgtccctaggcggcggcggccgggcgtcccgggatggccttcatggagaagccgccagccggcaaggtgctgctggacgacacggtgccgctgacagcagccatcgaggcgagccagagcctgcagtcccacacggaatatattattcgagtgcaaagaggaatttctgtggaaaacagctggcagattgttagaagatacagtgactttgatttgcttaacaacagcttacagattgcaggcctaagtctacctcttcctcccaaaaaattgattggtaacatggatcgtgaattcatagctgaaaggcagaaaggtcttcagaactatctcaacgtgatcacaacaaatcatatcttgtctaattgtgagctggttaagaagtttttagatccaaacaactattccgcaaactatactgagattgccttgcaacaggtttccatgttcttccgatcagaaccaaagtgggaggtggtggaacctttgaaagacataggttggagaataaggaagaaatatttcttgatgaagattaaaaatcagccaaaggaacggctagtgttaagctgggctgaccttggcccagacaagtatttgtcagataaagattttcagtgtctaatcaaacttctgccttcttgtttgcacccttacatctatcgggttacctttgccacagctaatgaatcctcagcgttgctaattaggatgtttaacgaaaagggaacattgaaggatctgatctacaaggcaaaaccaaaagacccatttctaaagaagtactgcaaccctaagaagattcagggcctggaactccagcaaataaaaacatatggacggcaaatattagaggtactgaagtttcttcatgacaagggattcccttatgggcatcttcacgcctccaatgtgatgctcgatggggacacttgccggctgctggaccttgagaattccttattgggcctgccttccttctaccgatcttatttttcacaattcaggaaaatcaatacattggaaagtgtggatgtccactgctttggccacttactgtatgaaatgacttatggacgaccgccagactcggtgcctgtggactccttccctcctgccccgtccatggctgtggtggccgtgttggagtctacgctgtcttgtgaagcctgtaaaaatggcatgcctaccatctcccggctcttacagatgccattattcagcgatgttttactaaccacttctgaaaaaccacagtttaagatccctacaaagttaaaagaggcattgagaattgccaaagaatgtatagagaagagactaattgaggaacagaaacagattcaccagcatcgaagactgacaagagctcagtcccaccatggatctgaggaggaaagaaaaaaaagaaagattttagctcgaaagaagtcaaaacgatctgctcttgaaaatagtgaagagcattcagcgaagtacagcaactccaataattcagcaggatctggggccagctcacctctcacgtccccgtcatcgccaactccaccctctacatcagggatatctgcattacctccacctcctccacctccaccaccaccagcagctcccttgcctcctgcgagcaccgaggcacctgcccagctctcgtctcaggctgtgaatggcatgagccgaggggccttgctcagctccatccagaatttccaaaaaggaactttgaggaaagccaaaacctgtgatcacagtgctccgaagatcggctgaagcttcctgtttacacttggagggaaaagttcttttttattcctactcacccctaccccccaaactaccctcttcctgggaaagtaattgctgagccagtacagccacaaacagtactattttgcagatgctcatgtaagcagcttttcgagagaaataattctttaagcagaataaagttaggctggcatgcaaaaaaaaaaaaaaaaaaaaa

SEQ ID NO: 30299 - DNA, 2642 bp, Homo Sapiens
gcgggttgattttctcactttggactggtttttacttcccgacttctggactcatctttcaagaggactttagactaattgcagataattaaggtggtagagaatatgccttctgcatcctgtgatacactactggatgacatcgaagatatcgtgtctcaggaagattcaaaaccacaagataggcattttgtaagaaaggatgttgtcccgaaggtacgaaggcgaaatacccaaaaatatttgcaagaggaagaaaacagtccaccaagtgacagcactattccaggcatacagaaaatttggatacgaacatggggttgttctcataataattcagatggagaatatatggctggacagctagctgcttatggctataaaattacagaaaatgcatccgatgcagatttatggctcctgaacagttgcactgtaaaaaacccagctgaagaccactttagaaactcaattaaaaaagctcaagaggagaacaagaaaatcgtactggctggatgcgttcctcaagcccagcctcgccaggactaccttaagggactgagtatcattggggttcagcagatagatcgtgtggtagaagttgtggaggagacaattaaaggtcactctgtgagactgctgggtcagaaaaaggataatggaaggcggcttgggggagcacgattggatttgccgaagattaggaagaatccactgatagaaatcatttccatcagtaccgggtgtctcaatgcttgtacctactgcaaaactaaacacgccagaggaaatttggccagttatccaattgatgaactagtagatagagccaaacaatcttttcaagagggtgtttgtgagatatggttgaccagtgaagacacgggggcttatggcagagatattggcaccaatctccccacactcctgtggaaactggttgaagtgattcctgagggagcaatgctgaggcttggcatgacaaatccgccctatattttagagcatctggaggaaatggcaaaaatccttaatcaccccagagtctacgcttttctgcacataccagtccagtctgcctccgacagcgtactcatggaaatgaaaagagaatactgtgtggctgacttcaaaagagtagtggattttctgaaagagaaagttcctggaataactattgctacagatattatctgtggttttcctggagaaacagatcaggattttcaagaaacagtgaaacttgttgaagagtacaaattcccaagcctgtttattaaccaattttacccaagaccaggaactcctgctgcaaaaatggaacaagttccagcacaagtgaaaaagcaaaggacaaaagatctttctcgggtgtttcattcttacagtccatatgatcacaagattggtgaaagacaacaagtgttagtaacagaagaatcttttgattccaagttttatgttgcacacaatcaattctatgagcaggttttagtgccaaagaaccctgcgttcatggggaagatggttgaagtggacatctatgaatcaggcaaacattttatgaaagggcagccagtatctgatgccaaagtgtacacgccctccatcagcaaaccgctagcaaagggagaagtctcaggtttgacaaaggacttcagaaatgggcttgggaaccagctgagttcaggatcccacacctctgctgcatctcagtgtgactcagcgagttccagaatggtgctgcccatgccaaggctacatcaagactgtgcgctgaggatgtccgtgggcttggctctgctgggtcttctttttgctttttttgtcaaggtctataattagaatacaactaatggaaacatctataaagaagaatacatttctaattaaaatcttcaatgaacaggaaagcgacatctccattctccaagggcaataatttgtactggtcatgctgcctccttctcagccactcttcttaatgaggctccccctgtctcacattgagttgggcccattggttatttgacctaaaacctaatcaccgctaccatagcacatccttcaaattaaactgcttttggtttacttttagcaagaaatgcaagcggttgcattttttctgtttgtttcaatctctaatctttaagtcagaacctaattgtacagtggctctggccatcttttcctcatgtggaagaattttctatctttaataaactttttctttgttttttttttccagatggagtttcgctcttgtcccccaggctggagtggtgcagtggcacgatctcaggtcactgcaacctctgcctcctgggttcaaacgattctcctacctcagcctccctaatagccaggggctacaggcatataccaccatgcccaactaattttttaattttttgtagagatgagtgtcactatgttgcccaggcttgcctggaactcctagcctcaagcagtcttcttgcctcagcctcccaaagtgctgggattacaggcgtgagccactccacccagcccagattaaatgtttttatttctacctgccatcattggtctttactaagtgaagtgacttctttctttaacaataaatggaattggtatactaagcaaaaaaaaaaaaaaaa

SEQ ID NO: 30300 - DNA, 2308 bp, Homo Sapiens
gttttcaggctcttggcggtgaaggtcagagtgcagacctgagaccactgctcaccgacttcagactccagtttatctgtgccccagcttcctcacttagtctcagaagacttaggctgaggcctcagaaggagatctccatcctttgtccagagcagaacaggatggccatgtcccaggaatcattgaccttcaaggacgtgtttgtggacttcaccctggaggagtggcagcaactggactctgcccagaagaacctctacagggatgtcatgcttgagaactacagccacctggtgtccgtggggtatctagttgcgaagcctgatgtgatcttcaggttgggaccaggtggagagtcctggatggcagatggggggaccccggtacggacctgtgcagaagtctggcaagttgatgagcagatagatcactacaaggaaagccaagacaaacttccttggcaagctgcattcataggcaaggaaacactgaaggatgaaagcggtcaagaatccagaacatgtagaaaaagcatttatctgagcacagaatttgattctgtaaggcaaagactccctaaatattattcgtgggaaaaggcattcaaaacatcatttaaactttcttggtcaaaatggaagctatgtaagaaagaaagatgatggatgtaaagcatattggaaagtatgcttccattataatcttcataaagctcaacctgcagagagattttttgaccctaatcaacgagggaaagccctccaccaaaagcaagcccttagaaaaagtcagagaagtcaaactggggagaaactctacaaatgtactgaatgtggaaaagtgtttatccagaaagcaaacttagttgtacatcaaagaactcacaccggagagaaaccttatgaatgctgcgaatgtgcaaaagccttcagccagaagtcaaccctcatagcacaccagagaactcacacaggggagaagccctatgaatgcagtgaatgtggaaaaacctttatccagaagtcaactctgattaaacataagaaaattcatatggagagagaccctataaatgcagtgtctgtgagaaagccttcagtaggaagtcaactctcattaaacatcagataattcatatgggagaaaccttatgaatgtaataaatgtgggaaatcttttagtgttaaatcaactctcattgtatgtcacagaacataaatgcataagttgcatgctattgtgaatagtgtgatgaaattttgcactgtcctgctctttcctgctcaggatgcaaatcagtgaatctttttttttttttttttttgagacagagtcttgctctgtcatccaaactggagtgcagtggcacaatcttggctcactgcaacctccgcctcttgggttcaaccgattctcctgcctcaacctcccaaatagttgggattacaggcacatgccaccatacgcagctaatttgtatttttagtagagacagggtttcaccatgttggccagcctggtcttgaactcctgacctcaagtgatccgcctgcctcagcctcccaaagtgctgggattacaggcatgagccactgcacccggcttgaatcatccttttgtccagtattatatccatgctgtatatgctacccgcccactagtcccttagctgtctcagttgtcagattgactgtcatgggattgcagtgcttgcattaaagctacccttattgtataatgaccccaaagtgcaagagtagtgatgttggcaatttgcatacaccaaaaataagttataaagtgcttccttaaagtgaaatggttaaagttcttgacttaataaagaaaaaaaatgtatgctgaggttgttaagatttacagtaagaatgaatcttctatccagaaattgtgaaggaggaaaaagaaacttgtgctagttttgctgtcacatctgaaactgcaaaagttgtggccacagtgcatcataagtgctaagacgaaaaagacattaaatttgcggatggaaggcgtgaatagaaatgggttctgacagcaatcaggttcggtactattcacagtttcaggcatccgctagggatcttggaacatatcccccatggataagggaggggtactgtaccttgtcatattgtgcattaaagaattcattgagtgtaatcatgtaagtctaacacacatttaaaaagctctcagatatcatttcgccttcggttgatgtaagaaaattcaaagctactcaaatcattcaataaatgataaaattatttaaaaaaaaaaaaaaaaa

SEQ ID NO: 30301 - DNA, 3537 bp, Homo Sapiens
gcgagcgcgggcaggcggcgacgcgggggcaggggtggacggcggtcagagccgaacgcgagggcggcgcccggggactggagctgcgcgcaataggacagctggcctgaagctcagagccggggcgtgcgccatggccccacactgggctgtctggctgctggcagcaaggctgtggggcctgggcattggggctgaggtgtggtggaaccttgtgccgcgtaagacagtgtcttctggggagctggccacggtagtacggcggttctcccagaccggcatccaggacttcctgacactgacgctgacggagcccactgggcttctgtacgtgggcgcccgagaggccctgtttgccttcagcatggaggccctggagctgcaaggagcgatctcctgggaggcccccgtggagaagaagactgagtgtatccagaaagggaagaacaaccagaccgagtgcttcaacttcatccgcttcctgcagccctacaatgcctcccacctgtacgtctgtggcacctacgccttccagcccaagtgcacctacgtcaacatgctcaccttcactttggagcatggagagtttgaagatgggaagggcaagtgtccctatgacccagctaagggccatgctggccttcttgtggatggtgagctgtactcggccacactcaacaacttcctgggcacggaacccattatcctgcgtaacatggggccccaccactccatgaagacagagtacctggccttttggctcaacgaacctcactttgtaggctctgcctatgtacctgagagtgtgggcagcttcacgggggacgacgacaaggtctacttcttcttcagggagcgggcagtggagtccgactgctatgccgagcaggtggtggctcgtgtggcccgtgtctgcaagggcgatatggggggcgcacggaccctgcagaggaagtggaccacgttcctgaaggcgcggctggcatgctctgccccgaactggcagctctacttcaaccagctgcaggcgatgcacaccctgcaggacacctcctggcacaacaccaccttctttggggtttttcaagcacagtggggtgacatgtacctgtcggccatctgtgagtaccagttggaagagatccagcgggtgtttgagggcccctataaggagtaccatgaggaagcccagaagtgggaccgctacactgaccctgtacccagccctcggcctggctcgtgcattaacaactggcatcggcgccacggctacaccagctccctggagctacccgacaacatcctcaacttcgtcaagaagcacccgctgatggaggagcaggtggggcctcggtggagccgccccctgctcgtgaagaagggcaccaacttcacccacctggtggccgaccgggttacaggacttgatggagccacctatacagtgctgttcattggcacaggagacggctggctgctcaaggctgtgagcctggggccctgggttcacctgattgaggagctgcagctgtttgaccaggagcccatgagaagcctggtgctatctcagagcaagaagctgctctttgccggctcccgctctcagctggtgcagctgcccgtggccgactgcatgaagtatcgctcctgtgcagactgtgtcctcgcccgggacccctattgcgcctggagcgtcaacaccagccgctgtgtggccgtgggtggccactctggatctctactgatccagcatgtgatgacctcggacacttcaggcatctgcaacctccgtggcagtaagaaagtcaggcccactcccaaaaacatcacggtggtggcgggcacagacctggtgctgccctgccacctctcctccaacttggcccatgcccgctggacctttgggggccgggacctgcctgcggaacagcccgggaccttcctctacgatgcccggctccaggccctggttgtgatggctgcccagccccgccatgccggggcctaccactgcttttcagaggagcagggggcgcggctggctgctgaaggctaccttgtggctgtcgtggcaggcccgtcggtgaccttggaggcccgggcccccctggaaaacctggggctggtgtggctggcggtggtggccctgggggctgtgtgcctggtgctgctgctgctggtgctgtcattgcgccggcggctgcgggaagagctggagaaaggggccaaggctactgagaggaccttggtgtaccccctggagctgcccaaggagcccaccagtccccccttccggccctgtcctgaaccagatgagaaactttgggatcctgtcggttactactattcagatggctcccttaagatagtacctgggcatgcccggtgccagcccggtggggggcccccttcgccacctccaggcatcccaggccagcctctgccttctccaactcggcttcacctggggggtgggcggaactcaaatgccaatggttacgtgcgcttacaactaggaggggaggaccggggagggctcgggcaccccctgcctgagctcgcggatgaactgagacgcaaactgcagcaacgccagccactgcccgactccaaccccgaggagtcatcagtatgaggggaacccccaccgcgtcggcgggaagcgtgggaggtgtagctcctacttttgcacaggcaccagctacctcagggacatggcacgggcacctgctctgtctgggacagatactgcccagcacccacccggccatgaggacctgctctgctcagcacgggcactgccacttggtgtggctcaccagggcaccagcctcgcagaaggcatcttcctcctctctgtgaatcacagacacgcgggaccccagccgccaaaacttttcaaggcagaagtttcaagatgtgtgtttgtctgtatttgcacatgtgtttgtgtgtgtgtgtatgtgtgtgtgcacgcgcgtgcgcgcttgtggcatagccttcctgtttctgtcaagtcttcccttggcctgggtcctcctggtgagtcattggagctatgaaggggaaggggtcgtatcactttgtctctcctacccccactgccccgagtgtcgggcagcgatgtacatatggaggtggggtggacagggtgctgtgccccttcagagggagtgcagggcttggggtgggcctagtcctgctcctagggctgtgaatgttttcagggtggggggagggagatggagcctcctgtgtgtttggggggaagggtgggtggggcctcccacttggccccggggttcagtggtattttatacttgccttcttcctgtacagggctgggaaaggctgtgtgaggggagagaagggagagggtgggcctgctgtggacaatggcatactctcttccagccctaggaggagggctcctaacagtgtaacttattgtgtccccgcgtatttatttgttgtaaatatttgagtatttttatattgacaaataaaatggagaaaatgaaaaaaaaaaaaaaaaaa

SEQ ID NO: 30302 - DNA, 6117 bp, Homo Sapiens; identical to SEQ ID NO: 24878

SEQ ID NO: 30303 - DNA, 2438 bp, Homo Sapiens
ggaagtcggaccagccggccggcggaagaacctagagcgcgctgcctggcgagtcaggcgcgcggggcggcgttggtggtcttcgcggcgcaactcggcctttcctgggagggagtgatggggcgcaccggggccggggagcgggcgccagtgtagcccgcgcggcgcctggcccggagcgcggcggctgcggcggcggcggcggcgggcgctggaggcctgtgagagccgcagcccggagcgcccggcttcccacgccatggcccccatgggcatccgcctttccccactgggggtggcagtgttttgcctgctggggctcggcgtgctctaccacctctactcgggcttcttggccggccgcttcagcctcttcggcctgggcggcgagcctggcggcggcgcggcggagcccgcggccgcggccgatgggggcaccgtggacttgcgcgagatgctggctgtgtcagtgctggccgcagtccgcggcggcgacgaggtgaggcgcgtccgcgagagcaacgtcctccacgagaagtccaaggggaagacgcgcgagggagccgaggacaagatgaccagcggcgacgtgctgtccaaccgcaagatgttctacctgctcaaggccgccttccccagcgtccagattaatactgaggaacacgtggatgcagctgatcaggaggttatcttgtgggatcataagattcctgaggatatcctagaggaagtaactactcctaaagaggtaccagcagaaagtgttactgtctggattgacccacttgatgctacacaggaatatacagaggatcttcgaaagtacgtcactactatggtgtgtgtggctgtaaatggtaaacccatgctaggagttatacataagccattttccgaatatacagcttgggcaatggtagatggtggttcaaatgtgaaagcccgctcttcctacaatgagaagaccccaaggatcgttgtgtctcgttcccattcagggatggtcaaacaggtcgctcttcagacttttggaaaccagactacaattatcccagctggtggtgctggttataaagttttagcacttttggatgtgcctgataagagtcaagaaaaagctgatttatacatccatgtgacatacatcaaaaagtgggatatatgtgctggtaatgccatcttaaaagccctaggggggcatatgactaccctgagtggtgaagaaatcagttacactggttcagacggcattgaagggggactccttgctagcatcagaatgaaccaccaggccctggtcagaaaactcccagatctagaaaagacaggacataaatgagcataactgattacagggtacagttcttcacagctgaaatggttagcctgagatgctggaagcttcaaaggattggtggagactatgcatggttaaggccatcccgaactttttaaagtatttatgaagcgtcagagacttattttccctgtaatagaatgcaaaatcagggaaaatgggttgctttgtgtctcaagtattgtctttatttttgagactattttcatacagttgtcatacacaaggcgcatatatatatttgtgaattaaaatctgtagctgagtctacattgttatgagtcaccattttcacacaacatcatgaatcttcactgttagtactttcatatagaattcggttgaaggaaagattgatttttgtgtagatgtttaatataactttacaactatatctcattgaaaataaagtcattggggatttttacctctaatttggatggaaagcacaagaagccacacattcattaatatgcaacaaatgttgtatttatgttactgaatatttctatggattaaaatagaaaaagtttaattgattttttcttttaaattttaataacaggttcaccagctggtagaaaatagagacacatgatgatttgcattgtaataatttctgtgtgtatgtgtgtgtgttgttttgtttttataaagaaaagtgtgtttgtacccatgagttcagcatttctgccatcttgctattttcattttccctgtggaagatgcatggttgcatccttttccttctgaccaacacttagtctttaactttgtaaggttcggtttaaggtttcagggttagcactatagttttggttcattttctcattaacgataaaatatgctgtaaggcactataagaatataaatgattctattacaattgaaagttacttgacattacatgaattgaactgcctttcattatcttcagacactttgttttagtatttttttttaatttgctaggtttgtatatagaagatcctttcattatcaagaatgagtatggttgcttttgccatggttgcttttactattaataaatgtatctagcctacccaaaaaaaaaaaaaaa

SEQ ID NO: 30304 - DNA, 1246 bp, Homo Sapiens
ggaaaggccttggaaagcagtcgttgcgccagacagcccagggaagagcggcagcctgaggacctagggccacctgctgttccctgggattcatgtccttctggggaggagggaggacccaggacaatggctgctgttcatgatctggagatggagagcatgaatctgaatatggggagagagatgaaagaagagctggaggaagaggagaaaatgagagaggatgggggaggtaaagatcgggccaagagtaaaaaggtccacaggattgtctcaaaatggatgctgcccgaaaagtcccgaggaacatacttggagagagctaactgcttcccgcctcccgtgttcatcatctccatcagcctggccgagctggcagtgtttatttactatgctgtgtggaagcctcagaaacagtggatcacgttggacacaggcatcttggagagtccctttatctacagtcctgagaagagggaggaagcctggaggtttatctcatacatgctggtacatgctggagttcagcacatcttggggaatctttgtatgcagcttgttttgggtattcccttggaaatggtccacaaaggcctccgtgtggggctggtgtacctggcaggagtgattgcagggtcccttgccagctccatctttgacccactcagatatcttgtgggagcttcaggaggagtctatgctctgatgggaggctattttatgaatgttctggtgaattttcaagaaatgattcctgcctttggaattttcagactgctgatcatcatcctgataattgtgttggacatgggatttgctctctatagaaggttctttgttcctgaagatgggtctccggtgtcttttgcagctcacattgcaggtggatttgctggaatgtccattggctacacggtgtttagctgctttgataaagcactgctgaaagatccaaggttttggatagcaattgctgcatatttagcttgtgtcttatttgctgtgtttttcaacattttcctatctccagcaaactgacctgcccctattgtaagtcaattaataaaaagagccatctggaggaaataaaaaaaaaaggaagactctatgaagaaacagagaagtctcagaaaaggctaacaattttatatagaggacaaaacagcattaaactcatcagttgcaaagattgcctataaaaggaccttaggatttaaggaaggggcttcttaatgtagaaagggaa

SEQ ID NO: 30305 - DNA, 2067 bp, Homo Sapiens
tgaagaggcgggacacagacgacgattgggcgacgaaggactctatcgcggtcaactttcctcaggatctgattggctcgtcacggtcaggttcgctgccttgcaattggtctaaacgcggagtgggcgggacgaagtgccgccttgtccccggtccaagatggctgcgtccatggcgcggcgcttgtggcctttgctgactcgtcgggggttccggccccggggaggctgcatctccaacgatagtccaaggagaagtttcactacagagaaacgaaaccggaacctcctgtacgagtatgcgcgcgagggctacagcgcactccctcagctggacatagagcggttctgcgcatgcccagaagaggccgcacacgccctggagctccgcaagggggagctgcgctcggcggacctgcccgcgatcatctcgacatggcaggagctgaggcagctgcaggagcagatccggagcctggaggaagagaaggcagctgtgactgaggcagtgcgggccctgctggcaaaccaggacagtggtgaagtgcagcaggaccccaagtaccagggtctgcgggcacgtggccgggagatccggaaggagcttgttcacctgtaccccagggaggcccagcttgaggagcagttctacctgcaggcgctgaagctgcccaaccagacccacccagacgtgcccgtcggggatgagagccaggctcgagtgctccacatggtcggagacaagccagttttctccttccaacctcggggccacctggaaattggcgagaaactcgacatcatccgtcagaagcgcctgtcccacgtgtctggccaccggtcctattacctgcgcggggctggagccctcctgcagcacggcctggtcaacttcacattcaacaagcttctccgccggggcttcacccccatgacggtgccagaccttctccgcggagcagtgtttgaaggctgtgggatgacaccaaatgccaacccatcccaaatttacaacatcgaccctgcccgcttcaaagatctcaacctggctggaacagcggaggtggggcttgcaggctacttcatggaccacaccgtggccttcagggacctgccagtcaggatggtttgctccagcacctgctaccgggcagagacaaacacgggacaggaaccccgggggctgtatcgagtacaccacttcaccaaggtggagatgtttggggtgacaggccctgggctggagcagagctcacagctgctggaggagttcctgtcccttcagatggagatcttgacagagctgggcttgcacttccgggtcctggatatgcccacccaagaactgggcctccccgcctaccgcaagtttgacattgaggcctggatgccaggccgaggccgctttggagaggtcaccagtgcttccaactgcacagacttccagagccgccgcctccacatcatgttccagaccgaggctggggagctgcagtttgcccacacggtgaacgccaccgcctgtgctgtcccccgccttctcatcgcgctcctggagagtaaccagcagaaggacggctcagtgctcgtgccccctgccctccagtcctacctcggcactgatcggatcacagcccctacccacgtgcctctccagtacatcggccccaaccagccccggaagcctgggctgcctggccagcctgctgtaagctaagaacccacccacagcagccctcgggggtgtcactgcttcctggagttcaggagaccccggacacctgggacctgtgttgctgagcccgtcctgacatctgtgttcttcctgtcagctccacgcccgggcccctggaccacggggtccacctctcctctgtccttgctgcctcagagtcagtcactgaccctgttatcattgagggtcccagtgggaagcaggacgtctgggctttacggttctagggacaggagaagcagaggaagaggcttccatccctccttccttctttcctcctacagtgctgagcaaaaagtccccaataaatggtcaggacaaaaaaaaaaaaa

SEQ ID NO: 30306 - DNA, 1950 bp, Homo Sapiens
gctctggcggctcccgcggctccggctggcggcttcgggccctgcacctgtgactctcggccgcgctcgccctcggcccgcccggcgccgcagccccatggccccgtccaggctgcagctcggcctccgcgccgcctactccggcatcagctccgtggccggcttctccatcttcctcgtctggacggtggtctaccgacagccggggaccgcggccatgggagggctcgcaggggtgctggcactgtgggtcctggtgacgcacgtgatgtacatgcaagattattggaggacctggctcaaggggctgcgcggcttcttcttcgtgggggtcctcttctcggccgtctccatcgctgccttctgcaccttcctcgtgctggccatcacccggcatcagagcctcacagaccccaccagctactacctctccagcgtctggagcttcatttccttcaagtgggccttcctgctcagcctctatgcccaccgctaccgggctgactttgctgacatcagcatcctcagcgatttctgacccagggggtgaggtctctgcaccctgggggggccttaggacctggactcagcctctgagatgttgggagaggctactcccaccccctggtgaccccagaactgtggcagaaaatacacagcaggacgagtgtggtctcccaggaagctgtcctgcccgtcccctttcgaggaaacctgagtgtggtagagaggggatcctgccatgttgctcctcatcagcctggccagagggcagctttagaccttttcaaatgaatctgttttcttttctttcttttttttttcttttttttttttttttgagatggagtcttactctgtcacccaggctggagtgcagtagtgcgatctcagctcactgcaacctccgcctcccaggttcaagcaattctcctgccttggcctctcaagtagctgggattacaggcatctgccaccatgcccggcaaatttttgtgtttttagtagagacagggttttgccatgttggccaggctggtctcgaactcctgatctcaggtgattcacccgcctcagccttccaaagtgctgggattataggtgtgagccaccgtgcccggcctggatctgttttcttagcacgcagtgaggaatctttgtacttaaggccagggcaacaaagtcaagaggtcaaggtgtagggccatgaggcctggacctatgctgcaggcaagggtttccatccccgctgccctaggcactctcttcccaaggccaggttgggcacctggggaggtcagttcagaaatatctagcagagacctcttaaacccccatcccagcaccccatcctgttgttcccagagctggtctcccatgagtgtgctagagccagatagccgtggccccccacccatctcactcacacacacaggcatccatacaccccagaagacttcccaaatgaggccagactcagggtcacggggaatgtgcttctgcccctgtaagggctttggggaagggggcaacatagtagaggctggaaagagcccccaaacctgtgcccatgcccctccagccctgcgtttccattctgccttctcagagtgcccttgctgcacccagaccaccggccaggagagaccttctctcccactccagcccctctcactgcccttcaactagagctttcacctttttacatttcccttctgaaggacacaaatctgcttttctgcccatacactggcccaagggctcacctaacttgggagggaaggggctgttggtacaaggatgattttctgttaggctgccattttgcacggtctccccctccccatctgatgtgtcctgcccctcagctctttgccttatctgtgtcactgtcactttagcaaaaatacagcggccatttgtatcaaaaaaaaaaaaaaaaaaaaaaaa

SEQ ID NO: 30307 - DNA, 2540 bp, Homo Sapiens
attgggctgttgagcgggggccgaccgacggccaggagtttcttttctgcgcttgtgcgttttctgttcggtttccttcccgctagcggggccacgagggttgctaggcaacagcccctgggtgacttggtcttagggtcctgtccggcttggggctgatgaaaggagctgtccgcgcccgggctcttccgagaagtggttgctgacagccacaaagtgaaagggagtgaggcggcgtggacgagtaaggagtgacagtgaggattcacatttgggttatttcaagatgagcttcctactgcccaagctgactagcaaaaaggaagtagaccaggcgataaaaagtactgctgagaaggtgttggttctcaggtttgggagagatgaagatcctgtctgtctgcagctagatgatattctttctaagacctcttctgacttaagtaaaatggctgctatatacctggtggatgtggaccaaactgcagtttatacacagtattttgacatcagttatattccatctactgtctttttcttcaatgggcagcatatgaaagtggattatggatctccagatcacactaagtttgtgggaagcttcaaaaccaaacaagacttcatagatttgattgaagtaatctatcgaggagcaatgagggggaagcttattgtccaaagtcctattgatcccaagaatattcccaaatatgaccttctctatcaagacatttagtacattaattgctgtcaaagatgaagaagaaggcacatcttgacacagtacctgaatccagctgtgctgtgtttctggagtcctttggaaacatgtgtcccagaggagaagaggtttgacttgcgtgtagaaaacccggcccctgaggaaaagaccccactggttctctgatgacctgggatgcctaactgtctactccctgcaagcctcagagcagccaagtcattggtgttcattttccccacagtgatttttgtaacttctctttctaatgtttttctttatccctttaatacagaaccctcccaaacattggctagtacaacttgatttcatcatgttcatttgatacacaagtgaactggaaagtcacttcccatagaagcaaaagtacttattttctaccctagctgggtgcatgtgtgtgcacacacacacacacacacacccccacacccctttgccggttcctcgactcatacatccctcgtgctttcccatctccagtctgtattactgtaggttctcttcaaataattaattgagcagacaagtttgttttattttggagcctttttggctctggcttttaaacattgtcctggttggctcatttaattttttttttttttttgagaccgagtcactcttgtcacccaggctggagtgcagtggcgcgatctcggctcactgcaagctccacctcctgggttcatgccattctcctgcttcagcctcctgagtagctgggactacaggcgcccgccaccatgcccagctaattttttgtatttttatagaggcgcagtttcaccgtgttagccaagatggtctcgatctcctgacctcgtgatctgccctcctcagcctcccaggtgctgggattataggcgtgagccaccgcgcgcaccccatttaattattttttatgttataaaatttaatatggaaagtgagaatttgaaccttcaccatccaccactctattcaggtaaaacaatgaatgagccaccttagcaggagcagatttttcccagaagctgctgcctcttcctgaggcagaaaattggattactaaggctcaaaactaaaagagatgtcagcattgttggatagaaatgtcacctatatgggatttgcctgttttaataactttgtaaggaattcttgctcttctaggggtgcctggcgcaaccgtgggcaagttactgctcctctttaaacctcgtggtggttattgaaacagatttattagaaggagagggtaggtgcagagctggagagccatgggtgaggcagcttgtgacctgcctagcagccgctgaccacctctccaacagaagcctagtcctgttcagagcagcactgtcactgcaagtccagccccctttgccaggggctccattccacccctttcctgcagggaggggtgccatgagtcttgcttttggctcatacaggagagagggaaggctgccaggcactgcttgtatccctgctgataagaggagggagtcactccaggaataagacaaaaggagaggaggaggccatcacctctggcctcttccatcgtacacttcctgtctctggtttaatcatgatgcatggagctacaacagccatcttaggtccccgaggtgcccagcatcacgtaaaacatcgatatgctaagaagaacaaaaagagcccaatctctgatgttattgagctcctgcatgaactctggacctgcctgcctcagacttctgtgaaagaataaaatttctttttgcctaaaaaaaaaaaaaaaaaaaaaaaaaaa

SEQ ID NO: 30308 - DNA, 2050 bp, Homo Sapiens
gcgggtgggaagccgtgtctcgcagtcgtggactcgtgcagctggggcgtccgcagccgctcgtcacccgcgtgatgctgtttctggcgttgggcagcccgtgggcggtcgaactgcctctctgcggaaggaggactgcattgtgtgcggccgccgcgctccgaggtccccgggcctctgtctcccgggcgtcctccagcagcgggccttcggggccggtagccggctggagtacggggccttcgggagccgcgcgccttctccggcgtccgggtcgagcgcagatccctgtttattgggaaggatatgttcgattcttaaatacgccatctgacaaatcagaagatggaaggctaatttatactggcaatatggcccgagcagtgtttggtgtgaaatgtttctcttattctacgagtctgattggccttacatttctgccatacatttttacacaaaataatgctatttctgaaagtgtgcctctgcctattcaaatcatattctatggcatcatgggaagctttacggtgatcaccccagtgctgcttcactttattacaaaaggctatgtcattcgattgtaccatgaggccacaacagacacttataaagccattacctacaatgctatgcttgcagaaacgagtacagtgtttcaccagaatgatgtgaagattccagatgctaaacatgtatttaccacattttatgctaaaacaaaatcactgttagttaatccagtgctctttccaaaccgtgaagactatatccatctaatgggttatgacaaagaagaatttattttgtatatggaagaaaccagtgaagagaaacggcataaagatgacaaatgagcctatttgttagtgttcgtgctcaaatgtgatttacgttttaatgtataataataaaattgccttttgcattccgttagtgactgattgttaaaaataatttgaaattatcaaagcttttaatttccagagaatgatgtttgtttataataaaacaagctatgtttgaaaaccaaaatgtagtatctaccattcgtgttttagaaaggtatgtgaataaatatgttcatgctagtataagagttctgtgttactgtggttgactctaaactggggatctgatgtcagtagcaaatgggagagttgctttattctttgtgtatggatttttctaagtgtataaatattttccgacattaaaagacattttctctttgaggaagacacagtcataggtggtgcggagctgtggtccacctgctcctgctcctgactcactgctctttgctgttgcctgaggaccaagtctgtcaggaagctggctaggaagccttgcagcagccatggcttttaaacataccagaaaaacacccgtggagtcagaggtggcaattcaccgaattcatatcactctaacgagttgcaacgtaaaatccctggataaggtgtgtgctgacttgatctgaggagcaaaggaaaagaatcagtgaaaggaccagtttgaatgcctaccaagactttgagaatcactacaagaaaaacttacggtgaaggttctaaggcatgggatcgtttccagatgagaatccacaagcgactcattgacttgcgcagtcctcagatagttaagcagattacttccatcagtattgagccaggagttgagatggaagtcaccattgcaaatgcttaagtcaactgttttcataaattgattaccagttgttaaaaaattttcaaaaaaccgcaaaatttcaagaaattcacaaattatgggagcagttttaagtcttctttggttcagaacacaggtttttgcctaacccctggcatgattgcccataagaacatacatgtacagttgaactggtggttagctatacgggaaatggtaagtagtgttgtcttcagtatcttaatttgtttctgcaactgtgcactcctcccttggtggcaccctatgggtgtaggaaaaccactgttattaaacaggtgaaaaataaaaaatttttcaaaaaaaaaaaaaaaaaaaa

SEQ ID NO: 30309 - DNA, 2585 bp, Homo Sapiens; identical to SEQ ID NO: 26795

SEQ ID NO: 30310 - DNA, 3486 bp, Homo Sapiens
attgtctgggaattgcagccgcggggcgggcggcggcggcggcggcggcggccgggacccagcgggccaggtggggacggcgcggagcgggtgcgggagatgccgtgcgggactggggccacctgagccgcccgcctcgtccccgccttctgtgggaaggatgtgcgcgcggatggccggtcgcacaacagcggcccctcgggggccctacggcccctggctctgcctcctggtggccctcgccctggacgtcgtgagagtggactgtggccaggctcccctggaccctgtctacctgccggcagccctggagctcctagacgcccctgaacacttccgtgtgcagcaggtgggccactacccacctgccaactcctctctgagctcccgatctgagacctttctgctcctacagccctggcccagggcccagccacttctccgggcctcctacccaccttttgccactcagcaggtggtcccccctcgagtcactgagccccaccaacggccagtcccatgggacgtgcgggccgtttcagtggaagcggctgtgactccagcagagccctacgcccgggttctcttccacctcaaagggcaggattggccaccagggtctggcagcctgccctgtgcccggctccatgccacacaccctgcaggcactgctcaccaagcctgccgcttccagccatccctgggcgcctgcgtggtggagctggagcttccctcgcactggttctcacaggcctccaccacacgggccgagctggcctacacgcttgagcctgcagctgagggccctgggggctgtggctccggcgaggagaacgaccctggggagcaggccctcccagtggggggtgtggagctgcgcccagcagaccccccgcagtaccaggaggtacctctggacgaggctgtgactctgcgggtgcctgacatgccagtgcggcccggccagctctttagtgctaccctcctgcttcggcacaacttcacagccagcctcctgaccctgcggatcaaggtgaagaaggggctgcatgtgacagccgcccgcccagcccagcccacactctggactgccaagctagaccgcttcaagggctccaggcaccacaccaccctcatcacctgccaccgtgctgggctcacagagccagattccagcagtccccttgaactgtctgagttcctatgggtggactttgtggtggagaatagcactggtgggggcgtagcggtcactcgccccgtcacgtggcagctggagtacccaggccaggcccctgaagcagagaaggacaaaatggtgtgggaaatcctggtgtctgagcgggacatcagagcccttatcccactggccaaggctgaggagctggtgaatacagcaccactgactggagtgccccagcatgtccccgtgcgccttgtcactgtggacggcgggggggccttggtggaggtgacagagcatgtcggctgcgagtctgccaacacacaggtcctgcaggtgtctgaggcctgtgatgccgtgttcgtggctggcaaggagagccggggcgcccggggggtgcgagtggacttctggtggcgccggctccgcgcctcgctgcggctgaccgtgtgggcccccctgctaccgctgcgtatcgagctcaccgacaccaccctcgagcaggtccgcggctggagggtacctggccctgctgaagggcctgcggaacccgctgcagaggcgtcggatgaggccgagcggcgcgcccgtggctgccacctgcagtaccagcgggccggtgtgcgcttcctcgcccccttcgcggcccacccgctggacggcggccgccgcctcacgcacctgcttggccccgactggctgctagacgtgtcccacctcgtggcgccacacgcccgcgtgctggactcgcgtgtagcctctctggagggtggccgtgtcgtggtgggccgggagcccggtgtcacctccattgaggtgcgttccccactgtctgactccatcctgggggagcaggcgctggctgtgacggacgacaaggtctcagtgctggagctgagggtgcagccagtgatgggcatctcgctgaccttgagccggggcactgcccaccccggggaggtcacagctacgtgctgggcacagtcagcccttcccgccccaaagcaggaggtggccctctccctatggctgtccttctctgatcacactgtggccccagctgagctctacgaccgccgtgacctgggactgtccgtctcagccgaggagcctggtgccatcctgccagctgaggagcagggtgcccagctcggggtggtggtgagtggggcaggcgccgaggggctgccgctgcatgtggctctgcacccgcccgagccctgccgccggggccgccaccgtgtgcctctggcctctggcaccgcctggctggggctgccccctgcctccactccagcccctgctctcccatccagccctgcttggagcccaccagccacagaagccaccatgggtggtaaacggcaggtggcaggcagtgtcgggggcaacacaggtgtgaggggcaagtttgagcgggcagaggaggaggccaggaaggaggagaccgaagccagggaggaggaggaggaagaggaggaggagatggtccctgcccctcagcatgtcactgagctagagctgggcatgtacgccctgctgggagtcttctgcgtggccatcttcatcttcttggtcaatggtgtggtcttcgtcctgcgctatcagcgcaaagaacctcccgacagtgccactgaccccacctccccccagccccacaactgggtctggctgggcactgaccaggaggaactgagccgccagctggaccggcagtcccctggcccgcccaagggggaggggagctgcccctgtgagagtgggggaggaggggaggcccctaccctggcccctggccctcctgggggcaccaccagctcctcaagcaccctggcccgaaaggaggctggggggcggcggaagcgagtagagtttgtgacatttgcgccagcccctccagcccagtcacctgaggagcctgtaggggcccctgctgtgcagtccatccttgtggcaggcgaggaggacatccgctgggtgtgtgaggacatggggctgaaggaccctgaggagcttcgcaactacatggagaggatccggggcagctcctgaccctccacagccacctggtcagccaccagctggggcaacgagggtggaggtcccactgagcctctcgcctgcccccgccactcgtctggtgcttgttgatccaagtcccctgcctggtcccccacaaggactcccatccaggccccctctgccctgccccttgtcatggaccatggtcgtgaggaagggctcatgccccttatttatgggaaccatttcattctaacagaataaaccgagaaggaaaccag

SEQ ID NO: 30311 - DNA, 2263 bp, Homo Sapiens
agaatgtggggcgcctgtaaagttaaggttcacgattccttggccaccatttccatcactctgagacggtacctgagattgggggcgaccatggcaaaaagcaagttcgagtacgtgagggacttcgaggctgacgacacctgcctggcacactgctgggtggtagtgcggctggacggccggaatttccatcggtttgctgagaagcacaactttgcaaaacccaatgacagccgtgctctccagctgatgaccaaatgtgcgcagactgtgatggaagaactagaggatattgtgatcgcgtatggacagagtgatgagtacagctttgtgttcaagcggaaaaccaattggtttaaaagaagagccagtaagttcatgactcacgtggcctcccagtttgcctccagctatgtgttttattggcgggattactttgaggaccagccccttctgtatcccccaggctttgacggaagagtcgtggtgtatcccagcaaccagactttaaaggactacctcagctggcgacaagcagattgtcacatcaataatctttataatacagttttctgggcacttatacaacaatctggactaacaccagtacaagcccaagggagattacagggaactcttgcagcagacaagaatgagattttgttttctgaattcaacatcaactataataatgagccgccgatgtataggaaagggactgtgttgatatggcagaaggtggatgaagtgatgacaaaagaaattaagctgccaacagaaatggaaggaaaaaagatggcagtgacccggaccaggacaaagccagtgcccttgcactgcgatatcatcggggatgctttctggaaggaacatccagagattctagatgaagacagctgacccttttgcgcttcagttctggtgtgcttaaccatgcaagccctcccacctcccagggctccttgccttaggtggctgtagcatccctaccacccaggacactggtgtgaatgacacaacaaaaaagttgggaggggaacagggaaggaagggatggatgggggtggtgtatcttactctgtttaagcagaacaccttgtttgcggtgttggaacatggttcctttggcagaagtgctttttttttaatcgcagtactatttttataaagcaagaactattccatgccttggagaatgaatcatttttagattgtgacataaatcttgtaaaaacctgtcagttattttcatctatgagagaagaggagcccaaactctcgcccacctgttcttaaccagaaaacccactgactttggaaatctcacctctgccacccatctacttgcattcgtctttggcagacctcaagataaatatgggttaatgcctgcatgatgcctctgaattcaggaattgcagggaaaactcggggctttgtgccagtctctaagttggcaactttggctgaacaaatgagtagtggcttcagtgtccttgcgtacacattctgtggattgatttaatggagttgtcagcatgatcatcatcttctagccaggggcatagttgccaaggccatttacctctttctaagaagaaacatttaccccatgtactcaagacatttcagttttaaaagtcactttcctattagacttcttgaaaaagattctcacatagcctctatgtaatcagacaaatgacatttgatttcaagagcagaggggtaaacatcctctgctaatcgacaggtagcaggtgtcagaggaggcataatattaatagcgccaccttctgttgggtcagtggagatgggtgaggagcagcacagagcagcagggatcatcacatgcagccaaacttggcctctgaagggggaaggtagtgggaataggtggtgagagaactcacatttttctcttgtcctggttttatatttcggagggaaaggattatttggccccattaagaattaagaggctgggtgcggtggctcacgtctgtaatcccagcaccttgggaggcccaggcaggcagatcacctgaggtcgggagttcgagaccagcgtgaccaacgtggagaaacccccgtctctactaaaaatacaaaaaattagctgggcatggtggtgcatgcctgtgattccagctacttgggaggttgaggcaggagaatcatttgaactcaggaggcggaagttgcggtgagccaagattgtgccattgcactccagcctgggcaacgagcgaaactacatctc

SEQ ID NO: 30312 - DNA, 3214 bp, Homo Sapiens
gtacgaaagagaaacccggagggcgccggggactgggccggggtctgcagggctcagctgagcccatgagctcccagagctaacccctgaacacccaggcgggcaaagggctgatgtcggtagtccccatcctggaggggcaggctctgcgcatctgctcctggcatggcgctgcggcacctcgccctcctggctggccttctcgtgggagtcgccagcaagtccatggagaacacggacactgatgtcccagccccagaggtgctgaccaggtccactgctggtgtcagaggggcctgtgcctcgcagaggggagccctccgctgcctgctgggtgagcgcctgctcaggaatggctgggtcaggcggggcccccacggtgaggcatcctggcccgcaatgggagcacctctgccagcggtgacagcacagcgtgccgcgcatcgctatcggggagtgtagctgcggcggctccagactcccaggcggagcgggtggagggtggggacccctcactgtcctggctggggcgtttgagggaccggacctgggcccctccctggcggtgtggattctatcccgcactccgcagtcacccctggacgccctcaccgttcactgcattcaggtcacgagaaacagcacagctgtgatcaacacacaagctgagggtaccctgagccccccaggcctgtccagtctgcctgtggtcagggaatgggccctcacacacaccgtaagtgccagcacccagcgcacctgtgcagtacctgggcacctgggcgtgaattcgtcccctgaaatgccagccaggcccgggcacttcctctgtggggtcaagcggaaacccctgatggagagcctccggagacttgcagagaatgtcggtggcgctgccatggcctgcgggtgccgcctcctgggggtggtttactcttccaggcccagcttttccttggagaccgcccacccagggtcccacagggatgtgcactgtggctgtgaggcccctccttgctcccaggcccacaggggacagagggccacccgatgctgactccagaagaggccggagctgcggacattgagatgtgctcccacggcacccctcagccgctgctgctctgggcgtgagcctgcctggcaggcgcgtcctggagtttcactgccgtgtcccctccaggcccagctgcccgagtgctgtgtggatgtggtgggcgtcaacgccagctgcccaggcgcaagtctgtgtggtccaggctgttacaggcgctggaacgcggacgggagcgccagctgcgtccgctgtgggaacggaaccctcccagcctacaacggctccgagtgtagaagctttgctggcccgggtgcgccattccccatgaacagaagctcagggacccccgggcggccacatcctggggctccgcgcgtggccgcctccctcttcctgggcacgttcttcattagctccggcctcatcctctccgtagctgggttcttctacctcaagcgctccagtaaactccccagggcctgctacagaagaaacaaagctccggccctgcagcctggcgaagccgctgcaatgatccccccgccacagtcctcaggtaacagcagctgtcgcatccccctgtggggtttcccatctctgggccagtcccagggtgctctgtgggtttgtccccaaacgggtttgcctggctctggatctcggccacccctgcccgggtccccaggagacccacccacaaggcagggccagggccggatttggctggtgccccctgctctggatctcagctggatttggccggcgccccctgcccgcccccctttaatccccgtgacttccatgctctttcctgttcccgagacgtggggtctgcaggaaaggaggacccaccacgacagggcagacccccaatacctgctcctccttgaagtccagctccacccgaggacagacgcagccggcctccgccaggccctcctgagcagccatcgcttcagtggtgctgggtcaggcggacccaagagtcagcccgtacggaagccgcgctacgtcaggcgggagcggcccctggacagggccacggatcccgctgccttcccgggggaggcccgtatcagcaatgtctgacctggaggccgagaccacgccacgcacttggcggcagggacccggaggccgaccccttggcgggaaccagcacaaagtgttggcatcgcccggcgcccgggacagtcctgggcacagcctcggctctgggtccctccgcctcccagcgacggacgccaaagggtcccgggccgcctgaggctcctccccaccacagccatctcgtttatcggaccaggagcaggcatccatgagacctcagagcttcagatcgaggccttggggggtccgggcccccccaggaaacacggtgaggccccagcgcctgcagccaaagctggcacgatctatggggcaggtgccgctctgcctagaaaagccaggggctctgctgccgtgccctccagagcccacagcgggcaggactcctccagcaccaccacacccagtggcccgagacccctctgagaacagtgaggctggtcctcgtgccgttccagccggtgcccggccagtggggaggacacagcctaggaaccagctgcctgagaccagggtgcctctgggctgtcctcccgcgtggcggagaccccaagcacgcagccacccatttccggagctgcaggatagagcttcctcttgatctctgtttttaagcagaaattcattgtgcagaaaagtcctccagagctctgtggccccgctcggatccgctggacccccatgcctggctgatccctgcccacgtggggcaggcccacatctaacccccacaagtcactgcctcactgcacctgccaaggctgccctggcgctgagtcctggggtccctcccggagttcctgggagaaaggcgccgtcgtggccgcctcccgcacgccaggcccgggctccaccgtgggtctcagacgccctgcggcaccggcaccgtctgctttagcatgggacccccatctgaggggtggcctggccttcggggtccccacgctcctttgcgaagtccactgtgggtgccatcatggtctccgggacctgggccagcgggaacgtgggggcactgggtgtgctgatataaagtcggcattactc

SEQ ID NO: 30313 - DNA, 4400 bp, Homo Sapiens
aaaacggacctcagaaaaccaggactagctctactgtcgggggcagggtgaccccatcagtaacctacaacccctctagaacttcacaactccctctcaccatggagtttgcatttgatgcagaaaggcatgtgatccctccctccttctgacctcttagctggggattccatggccacacaaccctgtgactccatgtccccccgattccaggaccccccatggccccatgattccttgactcctatgaccttatgacccctgaccttccaagtgacttccttggactttgacccctgtgactgtgcttcccattccccgcccccacaacctgtgactctggctccctttgggggtcttgttagtctgggcctccccaggaagatgtgggggaggctctggcccctcctcctcagcatcctcacagcaactgcagtcccaggaccctcactgcggagaccgtctagagaactagatgccacccctcggatgaccataccctatgaagagctctctgggacccggcacttcaagggccaagcccagaactactcaacactgctgctggaggaggcctcagcaaggctgctggtgggagcccgaggtgccctgttctctctcagtgccaacgacataggagatggggctcacaaagagatccactgggaagcctccccagagatgcaaagcaaatgtcatcaaaaagggaaaaacaaccagacggagtgctttaaccatgtgcggttcctgcagcggctcaattctacccacctctatgcatgtgggactcacgccttccagcccctctgtgcagccattgatgctgaggccttcaccttgccaaccagcttcgaggaggggaaggagaagtgtccttatgacccagcccgtggcttcacaggcctcatcattgatggaggcctctacacagccactaggtatgaattccggagcattcctgacatccgccggagccgccacccacactccctgagaactgaggagacaccaatgcattggctcaatgatgcggagtttgtgttctccgtcctcgtgcgggagagcaaggccagtgcagtgggtgatgatgacaaggtgtactacttcttcacggagcgtgccactgaggagggctctggcagcttcactcagagccgcagcagtcaccgtgtggcccgtgtggctcgtgtctgcaagggagacctgggagggaagaagatcctgcagaagaagtggacttccttcctgaaagcccgtctcatctgccacattccactgtatgagacactgcgtggggtctgcagcctggatgctgaaacctcaagccgtacacacttctatgcagccttcacgctgagcacacagtggaagaccctggaggcctcagccatctgccgctatgacctggcagagatccaggctgtctttgcaggaccctatatggaataccaggatggttcccggcgctggggtcgctatgagggtggggtgcctgagccccggcctggctcgtgtatcacagattcattgcgcagccaaggctacaattcatcccaagacttgccatccctggtcctggactttgtaaagttgcacccactgatggctcggcccgttgtgcccacacgtggacggcccctgctgctcaagcgcaacatacgctacacacaccttacagggacacctgtcaccacgcctgctggacctacctatgacctgctctttctgggcacagctgatggctggatccacaaggccgtagtcctgggctctgggatgcacattattgaagagacacaagtgttcagggagtcccagtctgtggaaaatctagtcatctctctattgcagcacagcctctatgtgggggctcctagcggagtcatccagctaccactctccagctgctcccgctaccgatcctgctatgactgcatcttggcccgagacccctactgtggctgggaccctggcacccatgcctgcgcagcagccaccaccatagccaacaggtcccagggaagcaggacagcactgatacaggacatagagagaggaaatcgaggctgtgagagcagcagggatacagggccaccaccaccactgaagacccgctctgtgctccggggtgatgatgtcctcctgccctgtgaccagccatccaacctggcccgggccttgtggctactcaatgggagcatgggcctgagcgatgggcagggtggctaccgtgtgggcgtggacgggctgctggttacagatgcacagcctgagcacagtggcaactatggctgctatgccgaggaaaatggcctccgcaccctgctggcctcctatagtctcacagtccggccagccactcctgccccagctccaaaagcccctgccacacctggggcacagctggcacctgatgtgagactgctctatgtgctagccattgccgcgcttggtggcctctgcctcatcctggcctcctccctcctctatgtggcctgtctgcgggaaggcagacgagggcgccgacggaaatactcactgggtcgggccagccgggcaggaggatctgcggtgcaactgcagacagtctcaggccagtgtcctggagaggaagatgagggtgatgatgagggggctgggggcctggagggcagctgtctccagatcatccctggggagggagccccagccccaccacccccaccgcccccaccgccaccggctgagctgaccaatggcttggtggcactgcccagccggctgcggaggatgaatggcaatagctatgtgcttctgaggcagagcaacaatggagtaccagcagggccctgctccttcgccgaggaactcagccgcatcctggaaaaaaggaagcacacgcagctcgtggagcagctagatgagagctctgtctgagcccagcctcccagaacaaatgctcttccaagccagcctatctgtcccaggctgggccactgcctccctaacacagccaccctcccttcattacccccactccatacccttctcccaactttttgatgtccctgtagggctggccagtcaggcccagccaaagccccctcctcagtctccacagacccacatgtgagcagcccaggcccatcggtgctcctcagaggtaggtgctccctcaggatcaggtgccctgcagacccagagccagttcctatcccctaacctaaacacttataggtgaggactccatcctcctgttccattcatctgcccaaaccctttctctttctcccaggcagggctctgcaggtccatatgggctcaatgtcaccaccctctgcatggccctgtgtgctggatggtcctgaaaccagacaagacctctgccagccacctaagccctgcgtacattcacatgcacacatggaagaatgtttatcggctgggctgcagtgcccccaccctcaccttctcctggtgcattcttgtttcatccctgcttctggacttggggtaccctcccaattgccacatcctatctggtcctcttccccagccccatgtggtgacctctttgtcaagagcttgggaacgggccagcctggggaggtaagactgcatcactcccctcctctcccttcctgtgtggcccttgtgaatcagcctccccactctccttggtcattctcaagagtatgagagacagagctccaggcatgtcccatccccatgcacatgtggtaacacacacctgtatcacacatgtgcttacatttccactcacatgcacctctgagcctcccttgctgtcttggacctgtctgttgggtttagtccgtggacatttcagagggagatccccctcccatttaactgtcctcacaggcccttgcctaggatggatgaccaacactgcactcaatgagccagcctctcttttgggggaatcaagcatttgcttcctctagactacagcagggaaagggaggagaaatctgatgtctcaactggcacatgaagcccattcttggaactatgcaaagggcagaggctgggagtttggacgcttagctcctacccctgtcctacctcaccggggcactttcaggggccaggggcctctgaagtctctaggcctatatgggacaatcaattctgactgagctcccccattcccctcgggtgaggatgactgttatttttgtagctgagaacgtggaatcccacgggtttttactgcccttcacccaacctctcccacctccaccccacaatgaatgtatttattgtgagaatggctacacttctttaggaatgcccccacttacaaccaggtgggtggaacaggcatgtgacagagtggggagcctgggctcagctcctccccctgccgttggttaataaacaccctttttccccac

SEQ ID NO: 30314 - DNA, 4440 bp, Homo Sapiens
ccctcccgctccccgcccccgcccccgcccccgcctccgccgcggcccccacctctgcctccttctactcgggcgccccggcggccgccacctctccccagcccaggagaggctgcggagccgcagccgcccagaccgcgcagcgcgggaggcaggttccgcacgaaataaatcagaatgagttatgcagaaaaacccgatgaaatcacgaaagatgagtggatggaaaagctcaataacttgcatgtccagagagcagacatgaaccgcctcatcatgaactacctggtcacagagggctttaaggaagcagcggagaagtttcgaatggaatctggaatcgaacctagtgtggatctggaaacacttgatgaacgaatcaagatccgggagatgatactgaaaggtcagattcaggaggccatcgccttgatcaacagcctccacccagagctcttggacacaaaccggtatctttacttccatttgcagcaacagcatttgatcgagctgatccgccagcgggagacagaggcggcgctggagtttgcacagactcagctggcggagcagggcgaggagagccgagagtgcctcacagagatggagcgtaccctggcactgctggcctttgacagtcccgaggagtcgcccttcggagacctcctccacaccatgcagaggcagaaggtgtggagtgaagttaaccaagctgtgctagattatgaaaatcgcgagtcaacacccaaactggcaaaattactgaaactactactttgggctcagaacgagctggaccagaagaaagtaaaatatcccaaaatgacagacctcagcaagggtgtgattgaggagcccaagtagcgcctgcgcttgcgtggtggatccaacaccagccctgcgtcgtgggacttgcctcagatcagcctgcgactgcaagattcttactgcagtagagaactctttttctcccttgtacttttttttgacctggcatctttttatagggaaaaatggcctttgtaggcagtggaaaacttgcaaggaaagctgccgtctctttggcagtctgatgcagagcctgcactctggcactcgctgaagaatctggaaggttgcggtttgctcttccagtgttcgggggcctctggctgctgaaggattcggtctaccacggagggctgtgctgttaggctgcatcccactcaaaatacaggaaaagcacgaatcatgattctgctttctgttagcttaggcagacattgggccttcacctacaagtttttccttacccctgtggtttttgtgtttttttttttttctttttccataggaaagaatatataaatttgtaaatcctaattcaaagatggctcatgtgtgagggcattgagtttgatttgttttccctttggtctgggttgtgtggcttttgggggatgcgtgtgagggggctatgtgttttttaattttttaaatatatattttggtgctgtgtgtggtaagagacttgttcctagtggatcaatgaaccatctcttctgggcagttttgttgaaaataaaggtttctctttgatttcaagaatgaccaaaatggcctctaaaagatgttaatcatctcaaatgaccttttgtctttggggcgttcttccccctgtgatagcggcagtggctttttctggtacctgcagctggaaaggccacttggccctgtgctgagtgagcggccttcattagagcgaggcagcccttggccggtggggacgcagagccccagcaggtggtgcacgactgttggcggaaggaacgcgtgttcatcctcagtgatctgccctccagcatctcggcagcatctcatcctccatcgtcagctggctctgccgatgtcctgcttctgttcactcacagaactgtcccctgctccgtggtgggcaggagggaagtggtgcagggctgcgtgcattgcctgcgagtcgggacagttgatgggcacatggccttgtagctctgggcacagatgtgtttggattcattgcagcggaccaccgggcactgttgaccccactgagcagtgctaagtgttggtttagtggatgttcgtggaattgctgacccatccaagggcgtcctttggagccagtggagcctgccggcgcatctgaggggcagaatgctgctagcacttgaatctgggatctcgccttattctcaagtagcaaggcatctcgacaagcatggtctaggtctggtggccagcttgccagtacctgagccggtcgggtcatctgcctctgagggaccgtcctcaccgagctcctgcatcccttgagtgttgatcaggaggcgtccacagcattgttctcgcctctgaatgatgcttctttctgtgttggagcctggcgaagttgtgttttcaagccctctacttctctttccagtgggtaggagcttttggcagtgtttactttacctagatggcttatataatccagtaagagatgcaaagataaaattgctgcggttgttacagaagcatggcggcctccagactgacccattggttgccctttagattttgtaaggatgcggtgctggggaggtggtgcttccctaccccctagaaatgctgccttccaactaccactctcccagatgtgacccttgcgattatttcctctgaggtttgaggatgaagataagttggagggaaagagagtaactaataggggatgaaatatagcagaagctagaagaaagcggtgaggtgagagagatgcatctgcacgttttcttcaacagcaccaggtgattcagcatattcctaattacctttcactattcgtgtatataagatcgtttacttgcataatatatcatcaatttgacatattcttaaaactagagggtgtgagaagcacagcaataggaagtctctccacaaactaggggaacacaaatggggtcattcacgtgcctggactgtcactatgtggctgtcacgtgaagtgctggtgttgatttccatttcagccagtgggtagctgataagccagtgccagcatccagcatgagcagatgtcggggagactgggaagtctccagcgttactgctctccttcccttcatgataagccagtgccagcatccagcgtgagcagacgtcggggagactgggaagtctccgatgttactgcctgccttcctttcgtgtgaggggctgcacttgcttttcttgtgatctgttagtggacgaggtcttccaaggaagtgctttgcacactttctttgctcctttttacagtctttgtctttgcagcaagcaaatgaaattaagccactttgggataatgaacattcagtataattctactttgtctcattttggatctcactgttgtctttataaaaatggcacattttacaaagtagtttattcttattatactttctgctggagagtgccttgaaataaaatgtgagagtattctggtactctgtgttccagatgcatgaaattgggtgaggaataacccctagtctggaatctttgtgaagcatagggttattgcaaggcaaatgggaactaacacatcttgccatttgaatcagggtctccagtttctagaaaaggcagacactggttgggaccaaagtctccatggcacatgactgaagactggtggtcgtgtgtgtgcggagtccacggaagcctcggggaggtggagctgctccttccattccgtcaggacgtgatctgaaaacatgtagagaagatgagttgaggacagcttttctaaggcaatgtgatgtctttgctttcttatttctctttctctgcgttgttagttttgaagagtggaggagctaggggctccagaaagaatcttacacatgtgttgaagacattgatgtcatagggagcggggagctgcattcccttctgggctgttactgctaaatctcagtatgaacagaccaggcggaaagcttggtggccaagcagtctgtgtgcttccccgctgatggagaacgttgcgttgttcacaatagggcctcatgggtgtagccgcatggcagacccatggctggcgcagctgcctgttgccgtctgtcttcagtaactgctgctctgttaactgttctattctgatactacgcgtgttgttttttacaacaggtatgtttttgtttcagaaatatgtattgcttttctcatattttttgcaaattgtattgtcaacatgggtcatttaaagtcctgtatgaaccataacctgctgtggtacctttgtacatgtttgattctgtattctttattccagtgtggcatatgtgcccctctgtatcttttgagaagtgcggaataggttgcttctaccacctgttcttaatgtaacagtaaaagttttcacatttttctcagaaaaaaaaaaaaaaa

SEQ ID NO: 30315 - DNA, 794 bp, Homo Sapiens
aagtgcccgagggcggccgcagaacggtcaatttgagccgcgtcgagctcccctgggacctgtggccgccgcccacagaccatgctcctggggcgcctgacttcccagctgttgagggccgttccttgggcaggcggccgcccgccttggcccgtctctggagtgctgggcagccgggtctgcgggcccctttacagcacatcgccggccggcccaggtagggcggcctctctccctcgcaagggggcccagctggagctggaggagatgctggtccccaggaagatgtccgtcagccccctggagagctggctcacggcccgctgcttcctgcccagactggataccgggaccgcagggactgtggctccaccgcaatcctaccagtgtccgcccagccagataggggaaggggccgagcagggggatgaaggcgtcgcggatgcgcctcaaattcagtgcaaaaacgtgctgaagatccgccggcggaagatgaaccaccacaagtaccggaagctggtgaagaagacgcggttcctgcggaggaaggtccaggagggacgcctgagacgcaagcagatcaagttcgagaaagacctgaggcgcatctggctgaaggcggggctaaaggaagcccccgaaggctggcagacccccaagatctacctgcggggcaaatgagtctggcgccgcccttcccgcccgttgctgctgtgatccgtagtaataaattctcagaggactcagcctttaaaaaaaaaaaaaaaaaaaaaaaaaaaaaaaaaaaaaaaaaa

SEQ ID NO: 30316 - DNA, 2179 bp, Homo Sapiens
acaagggtgaggccaggggagcagagggagcagtcatggcggagctggaggctgtggccgacgatctagacgccctcatcgacgacctggactacctcccgggccactttcacctggagatgcagttgaacttcgagccgcgctcgccggccccacagcgcgcccgggacctgaagctgcagcgggagggtctgcggcaggagctccagctggcggccgccccgcagcgccccgctgtgcgtcacctcctgggcgctttcgcattctacctggaggagctggacgaggcccgcgagtgcttcctcgaggtggcccacgagcacccgggcaacctcaatgcctgggccaatctggcacacgtgtacgggcggctgggccaggaagaagaggaggaggcgtgcgccgcacggctggccgacctcatgggcctggcagaggagcccgaggccgccggggacccccagctccgcgccgctcgctgcctggccgagcagggctacgcgcatggcttcgacgtcggctgcgccagcccagaggagcgtgcgcgggggctggcggcaggcatcgcgctctacgacaaggcgctaggctacgggcagcagatcccgatggaggagaaaaggggctggtatttcaccatggcaacactctacatcaggctagatggcatcttcctggagctgggcagtgaggagcagaagagactgcctgccttcaaccacacgctggccctactccggcaagtgctgaagtccgaggacccccgccaccgagccctggcctggtgctacctcgggatgctgctggagcggaaggacaccttctccaccacccccatgggcgtccatgactgcgggtactcagggaccgaccctctagactgcttcggcaaggccattgagattgccaagaaccaacctcccatcctgaatcgcctggcaaaaatcttctacttcctgggaaagcaggatatggccattggaacctgcaacatggccctggatgccctacgagatccagagctcaactggcaggcgtactgcacaagggccaagagacgaggtctcactatgttgcccagactcgtctcaaactcctgggctcaagcagtcctcccacctcgacctcccaaagtgctggaattccaggtgtgagccactacacccagccctgtaaggtttttgagtgaaagaatgcaggagcctccactcactgcaggaatcccttctacaattcctgctcagtgagcccccagcctcttctggattggcacgggtggaatcagactgaccagagttgaaatctggcttctccgccttgtggaacttgcagcaagccacttacccccacaaacttcagttcccaaatctgtaagatataaataacaacactttccttaaaatgttgtcaacagacacagtgaggtagcatctaaagcacagtgccttggacatagggggtgcttttctgaaagccagtagaggtcatttaatatagtggatcagagctctggctctgaacacagacagccttggttcaaatcccacaacaccacgtgctacgggacctttggcaaaatactcttgcccagattctgagcctcaatttctttatctgtagactggagttgttatgagaattacattagattttgtacgtaaaactcagcatcaagcacacagtaagatttcataagagactgactgctactaatttaatattaggcatatttttgaattatctcactgtctcttgatgcagtccactgcatagtcattcagctctgcaagttacacacttaggtgagttctgcctcctgctagcttcccgcactggtcccagacctgcctcctagagcccacacagagcccatgtgcttgaggaagccgactcggagctcccagtttacttcactgcaagccgaagagtcctcccatcccctcatcttctccactactatccacatgacctagtggcaaatctactcccagtcttggtctcagtggcttaattactttgccagcaggtacgaggcaggagtgaaattccttcactgtcgtggatgtggttattattctagataataatgacattaaccataatagtaaataataaaatatctctataaaattctgcatttcatcaagcaaaaaaaaaaaaaaaaaaaaaaaaaaaaaaa

SEQ ID NO: 30317 - DNA, 1554 bp, Homo Sapiens
aattatatatttttactctatgtttctctacatgtttttttctttccgttgctggcggaagaggcacgtgcgctgctgaatggagctggtcgctggttgctacgagcaggtcctctttgggttcgctgtacacccggagcccaaggcttgcggcgaccacgagcaatggactcttgtggctgacttcactcaccatgctcacactgcctccttgtcagcagtagctgtaaatagtcgttttgtggtcactgggagcaaagatgaaacaattcacatttatgacatgaaaaagaagattgagcatggggctctagtgcatcacagtggtacaataacttgcctgaaattctatggcaacaggcatttaatcagtggagcggaagatggactcatctgtatctgggatgcaaagaaatgggaatgcctgaagtcaattaaagctcacaaaggacaggtgaccttcctttctattcacccatctggcaagttggccctgtcggttggtacagataaaactttaagaacgtggaatcttgtagaaggaagatcagcattcataaaaaatataaaacaaaatgctcacatagtagaatggtccccaagaggagagcagtatgtagttatcatacagaataaaatagacatctatcagcttgacactgcatccattagtggcaccatcacaaatgaaaagagaatttcctctgttaaatttctttcagagtctgtccttgcagtggctggagatgaagaagttataaggttttttgactgtgattcactagtgtgcctctgcgaatttaaagctcatgaaaacagggtaaaggacatgttcagttttgaaattccagagcatcatgttattgtttcagcatcgagtgatggtttcatcaaaatgtggaagcttaagcaggataagaaagttcccccatctttactctgtgaaataaacactaatgccaggctgacgtgtcttggagtgtggctagacaaagtggcagacatgaaaagccttcctccagctgcagagccttctcctgtaagtaaagaacagtccaaaattggcaaaaaggagcctggtgacacagtgcacaaagaagaaaagcggtcaaaacctaacacaaagaaacgcggtttaacaggtgacagtaagaaagcaacaaaagaaagtggcctgatatcaaccaagaagaggaaaatggtagaaatgttggaaaagaagaggaaaaagaagaaaataaaaacaatgcagtgaatcacagatgtctcctgaaagaactcttttagatgaaatcattctactcaaatgtaccttaatttttttttttccctgagtaaaagcaagaaatttcttcctttggaaaaaatatatatattaaaaaaccacttttagatggttttttttaaaaaaaaaaaaaaaactggtaaaattacttttggcagacagtgttttatgaattatgtatcatgttgatatataatatgttaatgtgtcatgtaatttttactttgtacaaagcaaataaagatctttctcaaaaaaaaaaaaaaaaa

SEQ ID NO: 30318 - DNA, 1542 bp, Homo Sapiens
gggcttctggctcggcgcagcaggttccattcacgccaagtctgttggcagtggcagttgtagggccaagggcggttgtaggacccggagcagccggacatggaacaaccgtggccgcctccgggaccctggagcctccctcgggccgggggtgaggctgaggaagagagtgacttcgacgtgttccccagttctccccgctgcccgcagctgccaggcggcggcgcccagatgtatagccatggaattgaattggcttgccaaaagcagaaagagtttgtgaagagctctgtggcgtgcaaatggaatcttgctgaagctcaacagaaacttggtagcttagcactgcataattctgagtccttggatcaggagcatgccaaagcacaaacagcagtatcagaactgaggcaacgggaagaagagtggcgacagaaagaagaagctctagtacaaagagagaagatgtgtctgtggagcacggatgccattagcaaggatgtttttaataagagttttattaatcaagataaaagaaaagacacagaagatgaagataaatcagaatcatttatgcaaaaatatgagcaaaaaatcagacattttggtatgttgagtcgatgggatgatagccagagatttttgtctgaccatccataccttgtatgtgaagaaactgctaaatatcttattttatggtgttttcacctggaagctgagaagaaaggggctttaatggaacaaatagcacatcaagctgttgtaatgcagtttattatggaaatggccaaaaactgtaatgtggatccaagagggtgttttcgtttatttttccagaaagccaaagcagaggaagaaggttattttgaagcattcaaaaatgaacttgaagctttcaagtcaagagtaagactttattctcaatcacaaagttttcaacctatgacagttcagaatcatgttccccattctggtgttggatctataggtttattagaatccttaccacagagtccagattatcttcagtattctatcagtacagctctctgcagcttaaactcggtggtacataaagaagatgatgaacccaaaatgatggacactgtataatttggttaagactgctgaggccaagtgctattttgttacaagaaaggaagaacttggctattttcttgacacttttatgggtgctgcactttatttttgtttggtttttgatgggagggaaagagtactgaaatgttttgtaaattttttttaatgtgctgctaggttttttgttttgttttgttctgaagagaagagtggtaccatatgttgcaggaagtcaaactggactttttgtggctactaaatttgcctttaatcttattgttctcaattttggaatcaagtatgaaaatctgcacaaatgcaatgtttacaagaactggttgattctgggaggcatctgctacagtctctttttatatggatatgtacatgtcctattctacaaaaaaaaaaaaaaaaaaaaaaaaaaaaaaaaaaaaaaaa

SEQ ID NO: 30319 - DNA, 1843 bp, Homo Sapiens; identical to SEQ ID NO: 24894

SEQ ID NO: 30320 - DNA, 3179 bp, Homo Sapiens
ctggaccaggcggccgtggcgcgggtggcggctgctgtgctggctgtggggacggaggcggtgaagtgccatcttcggctaggtcgtcacaggctccggctcatggcatcaagtggcatccatcataagatcgttaactgaagacaatatgcaaaattctcacatggatgaatacagaaattctagtaatggcagcacaggcaacagttcagaggtagtggtagaacatcctactgatttcagtactgagattatgaacgttacagaaatggaacagtcacctgatgactctcccaatgtgaatgcatctacagaagaaactgaaatggcaagtgctgtggaccttccagtgacgctgacagaaacagaagcaaatttccctccagaatatgaaaaattttggaaaactgtagaaaataatcctcaggattttacaggctgggtatatttgcttcaatatgtagaacaggagaatcacttgatggctgccaggaaggcatttgacagatttttcatacactatccgtattgctatggttactggaaaaagtatgcagaccttgaaaagcggcacgacaacattaaaccatcagatgaggtgcgttaaacctctacagtttgtcaagctttgcagtgcaagcctctgtattacactgcagcttaacaagtagggcagggcttttctctcacttacatttatttctcattttccaaacaatatagttggtttgctagtcacatttgctacgtcttattgcatttttggtcagacgctgtcattgatgctctaatgggtctgtgccctatggtctgtaacccaaagcctgcccacacaacccggtcagaatgcagggactgctgcgctttgaagatcaagactctgcacgtggggatcagaacattgccatgttctatccaacctccacccaaatggtttatcggcgggggcttcaggcaatacctcttagtgttgacctttggatacattatataaacttcttaaaagaaacattggaccctggtgatcctgagacaaacaatacaataagaggaacttttgagcatgctgttctagctgcaggaacagatttccgttctgacagactgtgggaaatgtatataaactgggaaaatgagcagggaaacctgagagaagttacagctatatatgatcgtattcttggtattccaacacagctgtatagtcatcattttcagagatttaaagaacatgtacagaataatttgcctagagatcttttaactggtgaacagtttattcagttgcgaagggaattagcttctgtaaatggtcatagtggtgatgatggtcctcctggtgatgatctaccatcgggaattgaagacataaccgatcctgcaaagctaattacagaaatagaaaacatgagacatagaatcattgagattcatcaagaaatgtttaattataatgagcatgaagttagtaaaaggtggacatttgaagaaggtattaaaagaccttactttcatgtgaaacctttggaaaaggcacaactaaaaaactggaaagaatacttagaatttgaaattgaaaatgggactcatgaacgagttgtggttctctttgaaagatgtgtcatatcatgtgccctctatgaggagttttggattaagtatgccaagtacatggaaaaccatagcattgaaggagtgaggcatgtcttcagcagagcttgtactatacatctcccaaagaaacccatggtgcatatgctttgggcagcttttgaggaacagcagggtaatattaatgaagccaggaatatcttgaaaacatttgaagaatgtgttctaggattggcaatggttcgtttacgaagagtaagtttagaacgacggcatggaaatctggaagaagctgaacatttgcttcaggatgccattaagaatgccaaatcaaataatgaatcttcattttatgctgtcaaactagcccggcatcttttcaaaatacagaaaaaccttccaaaatcaagaaaggtgcttttggaagcaatcgaaagagacaaagagaacacaaagttatacctcaatttacttgaaatggaatatagtggtgacctcaaacaaaatgaagaaaatatcctaaattgttttgacaaagctgtacatggttcattacctattaaaatgagaattacattttctcagagaaaagtggaatttcttgaagattttggttccgatgttaataagcttctgaatgcttatgatgaacatcaaacactcctgaaagaacaggattctttaaaaaggaaagcagaaaatggatcagaagaaccagaggaaaagaaagcacatacagaagatacaacttcatcatctacacagatgattgatggtgatttacaggcaaaccaagctgtatataattatagtgcgtggtatcaatacaattatcagaatccttggaattatggacaatattatcctccccctccaacctgatgggaaaaatgtaaatttcaaatgcagtgtgtgaaaagtatgaaattattattttttttaatgagggatgtaaacagtataagcttgttgtatttgataacctgtcttccttgtttctgtgtaacatgatttgtttagtaatagggggaaaatgtcaattagtagcttaccacagatactgtttcctaccatttataaaatttactttttattgaaaaactattttttgatttttgcattaagtggtctagaattcttttgcaatgcatttgcaacagaattttgtagccttaaggggtaggaagaaaaacctgactgcaaatcatgtcagtgtagtacaaaattctgaaaacacataagggctggttatttacctccttttttttttttttttttaaagaaaaaaggacttttaacctttgctgacaaggttttgtctgtttcagttatacttgtgaattgtgatctaactgcagaaaggatacattattaaaatactttgccttggaatagattataaatgagaaaatggaatgtttgcatccctttaaaaatgaaaatcatatcaaaagtatgttgtttcaggagactttgtatttagaatattcatgtaaaacttgtgaacaagctttcattttgatcaaactgatcttcatttttgtaataaaacggaagactcatccagt

SEQ ID NO: 30321 - DNA, 3400 bp, Homo Sapiens
agtgaccgccctttgccactccccctgcctcctctccgcctttaacttctcgggaagatgaggcagtttggcatctgtggccgagttgctgttgccgggtgatagttggagcggagacttagcataatggcagaacctgtttctccactgaagcactttgtgctggctaagaaggcgattactgcaatctttgaccagttactggagtttgttactgaaggatcacattttgttgaagcaacatataagaatccggaacttgatcgaatagccactgaagatgatctggtagaaatgcaaggatataaagacaagctttccatcattggtgaggtgctatctcggagacacatgaaggtggcattttttggcaggacaagcagtgggaagagctctgttatcaatgcaatgttgtgggataaagttctccctagtgggattggccatataaccaattgcttcctaagtgttgaaggaactgatggagataaagcctatcttatgacagaaggatcagatgaaaaaaagagtgtgaagacagttaatcaactggcccatgcccttcacatggacaaagatttgaaagctggctgtcttgtacgtgtgttttggccaaaagcaaaatgtgccctcttgagagatgacctggtgttagtagacagtccaggcacagatgtcactacagagctggatagctggattgataagttttgcctagatgctgatgtctttgttttggtcgcaaactctgaatcaacactaatgaatacggaaaaacacttttttcacaaggtgaatgagcggctttccaagcctaatattttcattctcaataatcgttgggatgcctctgcatcagagccagaatatatggaagacgtacgcagacagcacatggaaagatgcctgcatttcttggtggaggagctcaaagttgtaaatgctttagaagcacagaatcgtatcttctttgtttcagcaaaggaagttcttagtgctagaaagcaaaaagcacaggggatgccagaaagtggtgtggcacttgctgaaggatttcatgcaagattacaggaatttcagaattttgaacaaatctttgaggagtgtatctcgcagtcagcagtgaaaacaaagttcgaacagcacactatcagagctaaacagatactagctactgtgaaaaacataatggattcagtaaacctggcagctgaagataaaaggtttcatgtgcaatgacagatgaaatttgtcgactgtctgttttggttgatgaattttgttcagagtttcatcctaatccagatgtattaaaaatatataaaagtgaattaaataagcacatagaggatggtatgggaagaaatttggctgatcgatgcaccgatgaagtaaacgccttagtgcttcagacccagcaagaaattattgaaaatttgaagccattacttccagctggtatacaggataaactacatacactgatcccttgcaagaaatttgatctcagttataatctaaattaccacaagttatgttcagattttcaagaggatattgtatttcgtttttccctgggctggtcttcccttgtacatcgatttttgggccctagaaatgctcaaagggtgctcctaggattatcagagcctatctttcagctccctagatctttagcttctactcccactgctcctaccactccagcaacgccagataatgcatcacaggaagaactcatgattacattagtaacaggattggcgtccgttacatctagaacttctatgggcatcattattgttggaggagtgatttggaaaactataggctggaaactcctatctgtttcattaactatgtatggagctttgtatctttatgaaagactgagctggaccacccatgccaaggagcgagcctttaaacagcagtttgtaaactatgcaactgaaaaactgaggatgattgttagctccacgagtgcaaactgcagtcaccaagtaaaacaacaaatagctaccacttttgctcgcctgtgccaacaagttgatattactcaaaaacagctggaagaagaaattgctagattacccaaagaaatagatcagttggagaaaatacaaaacaattcaaagctcttaagaaataaagctgttcaacttgaaaatgagctggagaattttactaagcagtttctaccttcaagcaatgaagaatcctaacaatagagattgctttggtgaccatgataggaggaaacgaaacttgtaagattggaacagttgttatttttatgaaattactttaaatatgaattgtactaactgtacctaaatagcaaagccctgtgtagattctggtaatgatctgtctcagggtatgtgtatttttgaagagtgttatgtccttagttttaattttgagtaaagaaaaggctaaaatcatgaattagttacaagcaacagtaccaacttatgtgacccctgaggggtggggctgtgagctcttaatttgtttttgattctgaaaaactctgcttcctggcatccaggagttagagattgagcctttcatcttctttctcaaaactagtttttgatgctttctttcatgggaatagtcacttttttatttagtaaatcgcattgctggaaccaccaaggagtgtggaatgtccttgagtgtattatttatgcaagtcacagtcacgttgccatcatggcagctatgtgaaacactaataaatgtgtttttactttttattcccgttaaaactgatgtaaaacaggataaaggcttgttatagtcacttataagtatctgggtctaagtaatttccttagatgtttctaaagaaacattttcagctttgctcccattatgattccaataaggaacgctttcctagtgcaattttaggagtaaagtttgaagagataaaaatagccaaagataggagacgtctgaattttgaatgataaacagtgatgttttaaaaaagctgttgttcttcaggaggcatttgcctaggatattgctggattataccccattggaggcttttaattttatttgtatgaattttccaggatttcattaaaaattattattgtattttttaccttaatgaaagattttgggttcaaatatctttctatattaaaagctgattgagtctgtacatatgtaaattatgcctagtggaggttctgttgactttcttccccactgtggaagaggccagttttgcctccatttgcacattcatttcagttatttctgatccataaatataacatttacaaaattcttccttgagctggtggaaatgcctcaccagtttcctctttaatgaatcaaataaaatctttaactgatgttaaaaaaaaaaaaaaaa

SEQ ID NO: 30322 - DNA, 2778 bp, Homo Sapiens
ctcattttgatgtctagaatcaggggatccaggatcatcaccaaggtcattttcccaggtatggaggggtctttctgcttctttcttgtcatgcacagctgctgaggaaggggctgggagtaaagacagtgaaatggggaggaggagtccattcaaaccgagaaacaaagtgtttggtttttcttacccctggtgtagaagctaccaaccttttccaagaaagagggcctggcccccttctcgggtctggctgggtgcctgctgtgcctctctggcctcccctccgaagggcaccattccctcgggtgagtactaccggcctgcaccgtcttccagtggggacagcctgagaagagagtctggggccttacttcagtaccttccttcactggcctcaccctgtgcaaatcatgccacacgctgcagcctccttttccctatctataaaataaaaatgaccctgctctatctcactgggctggcaagaacacactgttgttgccttgcagacagatgtgctgaggctgtagaaagtgctttttatttggttgggagcttgtgcataaatgcgagaggggctgcacatctgacggactagaggtgactcatggctgaaccggaacaggacatcggggagaagccagcagccatgctgaactctccacagggccctgtgaaaagctcttcacctcctctgccctctggatctagtgaagcctattcatccttcagatgtcagctcaaataatcaaccttcatggaggcctcccttgacccctaacatgctttcaaagtactgtgtatttcacattcatcatgccccgacaactgtgatttcccatttattaatatctgtctcttctgctggcctgcaaactccaggagcacagagacatctttgggatttttgaacatgatttccccagggcttagcccagtgcctggtgcaaagcaggctttcaacatgttcagtggatattgtaagaaagaaagaaatacacaaaaggcctggcatatgcaaagcactctaaatattcactcctttcccttccctctgggtgagaaaatttctccttataaagacaccctcctaactgtatctctgctagagaactgaagacataaagcactctgtgccaaaaatatttaagtaaaaacttgagctaagcacagagattataaatatttcttccccagattacgcaccatttaaaaatactgtctcagctccttttcatgatttgggtggtgattaaagaaaattactcttcaagactgaaagtcattactgcccttttcctgacttgccttttcccttgagaaggggaggataagctgcagggcaggaagtggaagtggggcatccttgtcctttgtctggcagacagccaactggtcaggtactgctccttctcaactctttcctgattcccaggtgaatataaacaagaaggcacaaatccacacttgccaacaacggacccaagtgataacaagaaacccagtgacacctgtctaggtgaagactcagcccctatgtgaccaggttgcaaagccaaactgaccatctgctttccatttggacttttagttcatactgtatcttctcaggacagttaagttggaatacaatgccactgtcctgaaagatggtagaattatcctatttctggaggagtgggggtggtgggtaggaatctcaagagcgatttgctcctctgcacaatagcttctttaaggacaccagggcccccagggctatacatttccctgaagctttccagataagcaacaaggtatgagcacctgctatgtattgcccaagggtgatgtgtttaaatatccattgcatattttaaatccttggctggcttaaagctgcaagctttctgtcttcagtggatataatgggggcatacatcccagagcttgcccaacactccaagaaaagaaccctcagctaatgcaaagtgtgtatgtgcccatgaaagctccatgtctacttaacattcagtttttaggattatttatgctgtaataatagatatgaaaatctctgacaggtattttgtttcctttacaaactgtatttgaatttatgggtgatttagagcttgtgtttaaagtcagaattcagaaccccaaagaaaatgacttcattgaaattgaactgaagagacaagaactgagttaccaaaacctactaaacgtgagttgctgtgaactggggattaaaccagaacgagtggagaagatcagaaagctaccaaacacactgctcagaaaggacaaagacattcgaagactgcgggactttcaggaagtggaactcattttaatgaaaaatggaagctccagattgacagaatatgtgccatctctgacagaaaggccctgctatgatagcaaagctgcaaaaatgacttattaaatactcccaggaatggccgcgcatggtggctcaccccctgtaatcccagcactttgggaagccaaggtgggcggatcacctgaggtcaggagttctagaccagcctggccaacatatagtgaaacccagtctctactaaaaaaaatacaaaaattagctaggtgtggtggcgcacacctgtagtagtcccagctacatgggaagctgaggcaggagaatcacctgaacccaggaggcagaggttgcagtgagctgagattgcgccactgcactccagcctggcgacagagcaagactctgtctctcaaaataaataaataaataaataaataaataaataaataatc

SEQ ID NO: 30323 - DNA, 2745 bp, Homo Sapiens
aggacagccggcgcgcggccgtgcccacaagttgccggcagctgagcgccgcgcctcctcctgctcgcagccccctacgcccacccggcggcggtggccagcgccaggacgcacatcccgcggacaccgaccccagatgtaaagcgggaccccagcccctcgccccccggcgcgatcgacagtctcgccagcgtctcctctgccaaaacccagggctggaagatgtggcagccggccacggagcgcctgcaggagagatttgcagacacagaagcggcacagagaaggccattgtgaagatcaaggcagaaaccggagttatggcatcataagccaaggaatgccaaggattgctggcaaccacctgatgttagaagagtcgaggacatgttcttctccagagcttttggatggtgtgtggccctgccaacctttacattttggacttccagcctccgaaatgcactttcagaccatgctgaagtctaaattgaatgtcttaacactgaaaaaggaacctctcccagcggtcatcttccatgagccggaggccattgagctgtgcacgaccacaccgctgatgaagacaaggactcacagtggctgcaaggttacctacctgggcaaagtctccaccactggcatgcagtttttgtcaggctgcacagaaaagccagtcattgagctctggaagaagcacacgctagcccgagaggatgtctttccggccaatgccctcctggaaatccggccattccaagtttggctccatcatctcgaccacaaaggggaggccacagtgcacatggataccttccaggtggcccgcatcgcctactgcaccgccgaccacaacgtgagccccaacatcttcgcctgggtctacagggagatcaatgatgacctgtcctaccagatggactgccacgccgtggagtgcgagagcaagctcgaggccaagaaactggcccacgccatgatggaggccttcaggaagactttccacagtatgaagagcgacgggcggatccacagcaacagctcctccgaagaggtttcccaggaattggaatccgatgatggctgaatgaacttgagacgcttcagcaaaggcagcattggtcacggagttcaagggaatagatgagtaagcaacgtttcaaatttgggatgaaaagactgccaaactattggctgaccaaggtttttaaattcagaagagcaattctaaatctaaagaaatgtatcattaaagtaattacgttacattgaaacctgctgctgctgtgactgtgaggagggtgggagtgtggatggggaggaaggttctaggctctcttatttttctcatttcccaatgcctctctgtgggagagctccatgccagttttcaccacgctcaggcaaatactctgcagctgttattggatgggccattccgatctgccttatgaaattccacaagaatgttaggggcacctatgggatctctagtggggtgggcagggtgctgatggggacgctggccgcagggaggaaggaacatctcgggagggccctctgttcctctcccacggcagatgccctcctctgtatgcaaatcagcacagcctttattgagctttacaactaacaacctgatagttggcagttaattcacagttacagataatgcttttatttacataaatataccaagtagtaccctcttattgtattcacttcatctattttcttagaatacttgcaattactaatgaccccttccctttccctcctgctgccctgtccaccctctttccccttctaacatccttagagggatgaaatctcagcatatgttgcaggacaccaaaaggaagaaaacaatcaagcaaataaaataaacagtcaaacaaaccaggagtttaaaacaacaaccccaacaacagaagccttggcaaagaggaataagtgatcagcaagtgaacacactctatgtcaactctccttttatccagctgagatttatggtaacttatttaattaatggtcctgtctgatgcatccttgatggcaagcttcaaatctgatttgctatcaccgaggaaaccttgcccccatcactcagcattgcacttagatacagaatgagttagataaacttggcttgtctagagacccatgtcatcttaacctaaagggaaatcttattgcgttatcataaaattgatgatatcttagggtcagaattgccctttttttttattttgaatgggaagttctcactaaaacaatcctgagatttcttaatttcatggttctttaaatattataaacacagagtcaacatagaatgaaattgtatttgttaaaatacacacattggaggacaagagcagatgactacttttcgaagtaatgctgctccttcctaaaagtctgttttcaatcctggtaatattaggggcactgcggcacctaagaagccttaaatgagagctaatccaatctagagagcgatggtgtcagcatttcggtctgcatatctgtgtgtccgtatctgcgtttgtgtgcgtgtacgtgtgcccctgtgtgtgggcccagttttcaggcatgtagaataagcatggagtcatattgaggaggactcacttcttgaagatatgcttgttgctttacaacatatgtaagctattctttagcataaatgcattcattctttaataaaaatatgtttgcattaataaagctgaggagtttcat

SEQ ID NO: 30324 - DNA, 2658 bp, Homo Sapiens
gcgcacggcttgcccatgtgtgctgcagccgtcagccggcccagctgagcagcagcaacggaccttgttaacggcgcggcagcctccaccgcctgctgttgccctcctctctcggtggtctgtccgcccagcgcacgtcaccatgggcaagagccggacgaagcgcttcaagcgacctcagttctcccctacgggcgactgtcaggccgaggcggctgcggcggcgaatgggaccggaggcgaggaggacgacgggccggcggcggagctgctggaaaagaaatcccagtgcttgtggaggttttgaagtttgtgatgacatggtgactaaggatatcatgacccctctggttgcgctgctaaaagagtgtagtgctggactggattcaaatgagatgtctctgcaggagaaaaaagatcagaacagaaattctattgagaacatagccaatgagactgtgaacgtgctgtggaatatatgtgaatgcagtagtagagcagtgtctatattcaacaaagaagggtgtttggagattgtgttaaagtatttaagtaggttccctaccaatgttgacctggctatttcagtagcatattgtttgcagacagtgactgaggataacccagagctgctgaagtctttcagtgctacagcattgaacatgctggaatcagcactgctttctcccgtcagttccatggaatctcttctattgaagacattggtagcaggcacaatttggaatctaaaggacattattccatgcaagagtcaagcagaaatcataaatgccttactaaagatcttatctgaagttttgggaatggatgctggtgaaatggttattcaaatgaaagaggctgaaacgcaaaggttaaaaactgctgcagaggctgaggaaatattagagaacactaatggggatgatttgattgaagatgatgaaatggaaggaatttctcataaaagaagagtcagaaggaaaactttcgtttcagatttacttccgcccactgacaaggaactgagagagactatagcattgctgacagcccaacagactgctctggaaattattgtcaacatgtgctgcaatgaagatccctctgatgacgaatgggaagagctttctagcagtgatgaaagtgacgcatttatggagaattccttcagtgagtgcgggggacagctgttttctcccctctgcctctcccatgaagttcacacggctctcaccaactacctcatcccaaagaagatttttgagaaaactgcctttccaaacagcattgcagttgacctatgttctaggaaccctacttggaaacctttgattagaaaaatgaacactattcagtgcagagccctcttctgtctccagagtcttgtgtccctcctggatgtggagcacctgggaggagccgcagcccttcagacgcttgcacagcatctgtcacagctgcttttttctcaaccagattttgctaaacatgttgactttctagaagccataagtagtgctttgagggcccttttgcaaacaatggcctccaagaacatttcccagtgcatgactcctgatcagctgatgacattatgcaaagcaggcattcatagtagtaatgtcggggttagagtgaatgtcgttagcattttaggaatcactggcagcgtccttgccaaagaagatggtacacttgaaactcttaagaacattgggtgctttctgcttgaagttaccaccaaagatccttcccttgtggtagcaggagaagctttggatgccctctttgatgtttttgcagatggtaaagaagccgaaagagcctcgattcaaattaaattattatctgctctgaaagaattccagccggtctttaaaatgaagatacgtaaagaagggagaggtaactatagcacagatcagctgtgtgttcttgacaatgtgaaaatgaatttgcgaagatttattgcttatcaagaaactgttgagaaaagactgacttcttaaacaatccaaaaaagaaaccagttcttcccccaaagtattcaatgcttagaatactaaaaggttttctttgaatgtatatgtttctgaaagtcattttttaatgattacaggcgtgagccaccgtgcctggccagaaactcttttttaagcgatgagatctgtgtggcatttctagcgctctctaaattatgtctctggcatattttaatcactggaaactcaaagagtggaagagtggaagtgcgaaggaatctcaggtagctcttaactaattcgccagcagtgaagaaacttcaaccaatcatgttttccttgaattttgcaaagaaagaaaatccaaagcattgcttggatgttcttttaaggcattttatatcagttgaaccttaaactgaaatatgaagacaagctttataaactagttttttgatatgaagtatatcaattatgtttgccttttgtgaagaagtaaatgagttgaatttgtatttcacttactagattatactaatgagctaatggggtcattgccatcctccctactcatgactttgatgagttattgctgtaacatcacttcttgatttaatttgatatggaatcagaattgggagaaggtatttttaaataaacaactttttaatgg

SEQ ID NO: 30325 - DNA, 2248 bp, Homo Sapiens
aacaatgtgccacgtcttctaagaagggggagtcctgaacttgtctgaagcccttgtccgtaagccttgaactacgttcttaaatctatgaagtcgagggacctttcgctgcttttgtagggacttctttccttgcttcagcaacatgaggcttttcttgtggaacgcggtcttgactctgttcgtcacttctttgattggggctttgatccctgaaccagaagtgaaaattgaagttctccagaagccattcatctgccatcgcaagaccaaaggaggggatttgatgttggtccactatgaaggctacttagaaaaggacggctccttatttcactccactcacaaacataacaatggtcagcccatttggtttaccctgggcatcctggaggctctcaaaggttgggaccagggcttgaaaggaatgtgtgtaggagagaagagaaagctcatcattcctcctgctctgggctatggaaaagaaggaaaaggtaaaattcccccagaaagtacactgatatttaatattgatctcctggagattcgaaatggaccaagatcccatgaatcattccaagaaatggatcttaatgatgactggaaactctctaaagatgaggttaaagcatatttaaagaaggagtttgaaaaacatggtgcggtggtgaatgaaagtcatcatgatgctttggtggaggatatttttgataaagaagatgaagacaaagatgggtttatatctgccagagaatttacatataaacacgatgagttatagagatacatctacccttttaatatagcactcatctttcaagagagggcagtcatctttaaagaacattttatttttatacaatgttctttcttgctttgttttttatttttatatattttttctgactcctatttaaagaaccccttaggtttctaagtacccatttctttctgataagttattgggaagaaaaagctaattggtctttgaatagaagacttctggacaatttttcactttcacagatatgaagctttgttttactttctcacttataaatttaaaatgttgcaactgggaatataccacgacatgagaccaggttatagcacaaattagcaccctatatttctgcttccctctattttctccaagttagaggtcaacatttgaaaagccttttgcaatagcccaaggcttgctattttcatgttataatgaaatagtttatgtgtaactggctctgagtctctgcttgaggaccagaggaaaatggttgttggacctgacttgttaatggctactgctttactaaggagatgtgcaatgctgaagttagaaacaaggttaatagccaggcatggtggctcatgcctgtaatcccagcactttgggaggctgaggcgggcggatcacctgaggttgggagttcgagaccagcctgaccaacacggagaaaccctatctctactaaaaatacaaaagtagccgggcgtggtgatgcgtgcctgtaatcccagctacccaggaaggctgaggcggcagaatcacttgaacccggaggcggaggttgcggtaagccgagatcacctccagcctggacactctgtctcgaaaaaaagaaaagaaacacggttaataacatataaatatgtatgcattgagacatgctacctaggacttaagctgatgaagcttggctcctagtgattggtggcctattatgataaataggacaaatcatttatgtgtgagtttctttgtaataaaatgtatcaatatgttatagatgaggtagaaagttatatttatattcaatatttacttcttaaggctagcggaatatccttcctggttctttaatgggtagtctatagtatattatactacaataacattgtatcataagataaagtagtaaaccagtctacattttcccatttctgtctcatcaaaaactgaagttagctgggtgtggtggctcatgcctgtaatcccagcactttgggggccaaggagggtggatcacttgagatcaggagttcaagaccagcctggccaacatggtgaaaccttgtctctactaaaaatacaaaaattagccaggcgtggtggtgcacacctgtagtcccagctactcgggaggctgagacaggagatttgcttgaacccgggaggcggaggttgcagtgagccaagattgtgccactgcactccagcctgggtgacagagcaagactccatctc

SEQ ID NO: 30326 - DNA, 2729 bp, Homo Sapiens
ctggatggactagccggggccatggccggcgcggcggcggagtcagggcgggagctgtggaccttcgcgggttcccgggacccgagcgcaccgcggctagcctacggctacggcccgggcagcctgcgcgagctgcgggcgcgcgagttcagccgcctggcaggaactgtctatcttgaccatgcaggtgccaccttgttctcccagagccagctcgaaagcttcactagtgatctcatggaaaacacttatggtaatcctcacagccagaacatcagcagcaagctcacccatgacactgtggagcaggtgcgctacagaatcctggcgcacttccacaccaccgcagaagactacactgtgatcttcactgccgggagcacggctgctctcaaactggtggcagaggcctttccatgggtgtcccagggcccagagagcagtgggagtcgcttctgttacctcaccgacagccacacctccgtagtgggtatgaggaacgtgaccatggctataaatgtcatatccatcccggtcaggccagaggacctgtggtctgcagaggaacgtggtgcttcagccagcaacccagactgccagctgccgcatctcttctgctacccagctcagagtaacttttctggagtcagataccccctgtcctggatagaagaggtcaagtctgggcggttgcgccctgtgagcacgcctgggaagtggtttgtgctgctggatgcagcctcctacgtgagcacctcgcctttggacctgtcagctcaccaggccgactttgtccccatctccttctataagatcttcgggtttcctacaggcctgggcgctctgctggtccataatcgtgcggctcctctactgaggaagacctactttggaggagggacagcctctgcgtacctagcaggagaagacttctacatcccgaggcagtcggtagctcagaggtttgaagatggcaccatctcattccttgatgttatcgcgctaaaacatggatttgacaccctagagcgcctcacaggtggaatggagaatataaagcagcacaccttcaccttggctcagtatacctacatggccctgtcctctctccagtaccccaatggagcccctgtggtgcggatttacagcgattctgagttcagcagccctgaggttcagggcccgatcatcaattttaatgtgctggatgacaaagggaacatcattggttactcccaggtggacaaaatggccagtctttacaacatccacctgcgaactggctgcttctgtaacactggggcctgccagaggcacctgggcataagcaacgagatggtcaggaagcattttcaggctggtcatgtctgtggggacaatatggacctcatagatgggcagcccacaggatctgtgaggatttcatttggatacatgtcgacgctggatgatgtccaggcctttcttaggttcatcatagacactcgcctgcactcatcaggggactggcctgtccctcaggcccatgctgacaccggggagactggagccccatcagcagacagccaggctgatgttatacctgctgtcatgggcagacgtagcctctcgcctcaggaagatgccctcacaggctccagggtttggaacaactcgtctactgtgaatgctgtgcctgtggccccacctgtgtgtgatgtcgccagaacccagccgactccttcagagaaagctgcaggagtcctggagggggcccttgggccacatgttgtcactaacctttatctctatccaatcaaatcctgtgctgcatttgaggtgaccaggtggcctgtaggaaaccaagggctgctatatgaccggagctggatggttgtgaatcacaatggtgtttgcctgagtcagaagcaggaaccccggctctgcctgatccagcccttcatcgacttgcggcaaaggatcatggtcatcaaagccaaagggatggagcctatagaggtgcctcttgaggaaaatagtgaacggactcagattcgccaaagcagggtctgtgctgacagagtaagtacttatgattgtggagaaaaaatttcaagctggttgtcaacattttttggccgtccttgtaatttgatcaaacaaagttcaaactctcaaaggaatgcaaagaagaaacatggaaaagatcaacttcctggtacaatggccaccctttctctggtgaatgaggcacagtatctgctgatcaacacatccagtattttggaacttcaccggcaactaaacaccagtgatgagaatggaaaggaggaattattctcactgaaggatctcagcttgcgttttcgtgccaatattattatcaatggaaaaagggcttttgaagaagagaaatgggatgagatttcaattggctctttgcgtttccaggttttggggccttgtcacagatgccagatgatttgcatcgaccagcaaactgggcaacgaaaccagcatgttttccaaaaactttctgagagtcgtgaaacaaaggtgaactttggcatgtacctgatgcatgcatcattggatttatcctccccatgtttcctgtctgtaggatctcaggtgctccctgtgttgaaagagaatgtggaaggtcatgatttacctgcatctgagaaacaccaggatgttacctcctaaaaaaaatttttagcatacattaaagtttctcttttacagtg

SEQ ID NO: 30327 - DNA, 2193 bp, Homo Sapiens
aagtgtggccacttcctcttgcctgtcctgactcaccctggctgctgcccattgtggctgccatggaaatacaactcgaggagaacccagaccaggacagggaggccatgttctgggtggcagtggagcctggcaaggtgccctcctggcctgggactgctgtggcagaggaagcatgaggtggggcctggcctgcccagctcagagctgaggtgcccccttggttttttacctccctgctccctggctggcccactgcacccacgcactcaacgcagtggcttcgctcctcctccaggatggctggaggtgggaccattgccaggatggcctcaagtgcccagccctcctggaagactcagtttccctctttgtcccatgcagaggtgcagagattcattattgtgggaccatccgtgaaaccggtgccaggatgcaccgggggtgtggatgaccggccgcccagccccagcacggcccggtcccgcatgccaccgccccgcgaggaccgctctccaagggctgcctggggccccgcgcccgtactctcctaacccggagctcttggcagcccattgctgcctggctacccggggaggaggaggcgcaggagtgagctgcccgagaccgcagggcaagtaagcggctgacggcggaaagaccctggggaaggggctttgcggccggctagaaacattttccccaagcggctccgcaaaatgaccagcctgttccgccggagcagcagcggcagcggcgggggtggcaccgccggggcacgcgggggcgggggaggcacggccgccccccaggagctcaacaacagccggcctgcccgccaggtgcgccgcctggagttcaaccaggccatggacgacttcaagaccatgttccccaacatggattacgacatcatcgaatgcgtgctgcgcgccaacagcggcgctgtggacgccaccatcgaccagctgctgcagatgaacctggagggcggtggcagcagcggcggcgtctatgaggacagctccgactcggaggacagcatccccccggagatcttggaaaggactttggaacctgatagctcggatgaagagcccccacctgtgtactccccgccagcctaccacatgcacgtgttcgaccgaccctaccctctggctcccccgactccgcctccccgtatcgacgcgctgggctctggagcccctacaagccagagacgctatcggaactggaacccaccactgctgggcaaccttccggatgactttctccgcatcctgccccagcagctggacagcatacagggtaacgctgggggccccaagcctgggagtggagagggatgtccacctgccatggctgggccagggcccggagaccaggagagccgctggaagcagtacctggaggacgagaggatcgcgcttttcctgcagaacgaggagttcatgaaggaactgcaacggaaccgcgacttcctcctcgctctggagagagatcgattgaaatacgaatcccagaaatctaaatccagcagcgtggctgtcggaaacgactttggcttttcctctcctgtcccaggaactggcgacgccaaccccgctgtgtctgaagatgccttattcagggacaagctgaaacacatgggaaagtccacccggaggaaactgtttgaacttgcccgagccttctcagagaagaccaaaatgaggaagtcaaagaggaaacacttgttgaagcatcagtcgctgggggctgccgcgtcaacagccaacctcctggatgatgtggagggccacgcgtgtgatgaagacttccggggcaggcgtcaggaggcacccaaggtggaggaaggcctgcgagaaggacagtaagagatgccagcagctcttccttgccagagatgatctgacccggtgggggcagctggaaagcaacactggcccccagctgaagggcccagctgcagccagacagatggtgcttgagaaccgaggcccggtgatcctccagccacagtccagcccaaccactgccactttccatgggacttagaacttcggagttgctgccttgcaattggaggaaggacctggggcccctataggcagcagccaattacagccccttttgtagccgggcgttcctatggtcaaagagtggaaatgcaggaaccaacctcccttt

SEQ ID NO: 30328 - DNA, 6708 bp, Homo Sapiens
gctttcccaacatgctctgcagagaaatcaaagatggcggttgtatctgctgttcgctggctgggcctccgcagcaggcttggccagccgctgacgggtcggcgggcgggtttgtgtgaacaggcacgcagctgcagattttattctggtagtgcaaccctctcaaaggttgaaggaactgatgtaacagggattgaagaagtagtaattccaaaaaagaaaacttgggataaagtagccgttcttcaggcacttgcatccacagtaaacagggataccacagctgtgccttatgtgtttcaagatgatccttaccttatgccagcatcatctttggaatctcgttcatttttactggcaaagaaatccggggagaatgtggccaagtttattattaattcataccccaaatattttcagaaggacatagctgaacctcatataccgtgtttaatgcctgagtactttgaacctcagatcaaagacataagtgaagccgccctgaaggaacgaattgagctcagaaaagtcaaagcctctgtggacatgtttgatcagcttttgcaagcaggaaccactgtgtctcttgaaacaacaaatagtctcttggatttattgtgttactatggtgaccaggagccctcaactgattaccattttcaacaaactggacagtcagaagcattggaagaggaaaatgatgagacatctaggaggaaagctggtcatcagtttggagttacatggcgagcaaaaaacaacgctgagagaatcttttctctaatgccagagaaaaatgaacattcctattgcacaatgatccgaggaatggtgaagcaccgagcttatgagcaggcattaaacttgtacactgagttactaaacaacagactccatgctgatgtatacacatttaatgcattgattgaagcaacagtatgtgcgataaatgagaaatttgaggaaaaatggagtaaaatactggagctgctaagacacatggttgcacagaaggtgaaaccaaatcttcagacttttaataccattctgaaatgtctccgaagatttcatgtgtttgcaagatcgccagccttacaggttttacgtgaaatgaaagccattggaatagaaccctcgcttgcaacatatcaccatattattcgcctgtttgatcaacctggagaccctttaaagagatcatccttcatcatttatgatataatgaatgaattaatgggaaagagattttctccaaaggacccggatgatgataagttttttcagtcagccatgagcatatgctcatctctcagagatctagaacttgcctaccaagtacatggccttttaaaaaccggagacaactggaaattcattggacctgatcaacatcgtaatttctattattccaagttcttcgatttgatttgtctaatggaacaaattgatgttaccttgaagtggtatgaggacctgataccttcagcctactttccccactcccaaacaatgatacatcttctccaagcattggatgtggccaatcggctagaagtgattcctaaaatttggaaagatagtaaagaatatggtcatactttccgcagtgacctgagagaagagatcctgatgctcatggcaagggacaagcacccaccagagcttcaggtggcatttgctgactgtgctgctgatatcaaatctgcgtatgaaagccaacccatcagacagactgctcaggattggccagccacctctctcaactgtatagctatcctctttttaagggctgggagaactcaggaagcctggaaaatgttggggcttttcaggaagcataataagattcctagaagtgagttgctgaatgagcttatggacagtgcaaaagtgtctaacagcccttcccaggccattgaagtagtagagctggcaagtgccttcagcttacctatttgtgagggcctcacccagagagtaatgagtgattttgcaatcaaccaggaacaaaaggaagccctaagtaatctaactgcattgaccagtgacagtgatactgacagcagcagtgacagcgacagtgacaccagtgaaggcaaatgaaagtggagattcaggagcagcaatggtctcaccatagctgctggaatcacacctgagaactgagatataccaatatttaacattgttacaaagaagaaaagatacagatttggtgaatttgttactgtgaggtacagtcagtacacagctgacttatgtagatttaagctgctaatatgctacttaaccatctattaatgcaccattaaaggcttagcatttaagtagcaacattgcggttttcagacacatggtgaggtccatggctcttgtcatcaggataagcctgcacacctagagtgtcggtgagctgacctcacgatgctgtcctcgtgcgattgccctctcctgctgctggacttctgcctttgttggcctgatgtgctgctgtgatgctggtccttcatcttaggtgttcatgcagttctaacacagttggggttgggtcaatagtttcccaatttcaggatatttcgatgtcagaaataacgcatcttaggaatgactaaacaagataatggcagtttaggctgcacaactggtaaaatgactgtagataaatgttgtaattagtgtacacgtttgtatttttgttaatatagccgctgccatagttttctaacttgaacagccatgaatgtttcatgtctccctttttttttgtctatagctgttacctattttagtggttgaaatgagagctagtgatgacagaaggatgtggaatgtcttcttgacatcattgtgtattgctggtaatcaagttggtaacgactacttctagcagctcttaccactatgacttaagtggtcctggaaggcagtaagtggaggtttgcagcattcctgccttcatgagggcttctaccactgaccactttgcacgtacctggctcccagatttacttaggtaccccacgagttgtccacataagcagcttcatctttaccttgccagagttgacaattatgggatactctagtctacttatacttgtgttcccatctgtctgccatcctctgaaggccgggacccagtcatacatccttagaaaccaaagtatggtttttgttttctcttggaatgtcaggtcttaaggcatttaattgagggacaaaaaaaaaaaaagccgatatagtagctagctacttaagcatccatgggtattgctccatatcaaagcagatttgcaggacagagagagtaaattagccttcagtcttggtttacagcttccaaggagagccttggccacctgaaatgttaactcggtcccttcctgtctctagttcatcagcacctgcagatgcctgactcttgttagccttactattcaatacagtccttagattcacggtatgcctcttcctatccaggcacctattctgaatcaccatgttgctctgcagctagagttgataggagaaaatccatttgggtagatggcctatgaatttgtagtagactttcaaaatgagtgatttgttagcttggtacttttaagtttgtggtacagatcctccaaacccatactctgagcaattaactgccttgaacatagagaaaaattaaggcctcacaggatgagtctccattctctgtaaatgcttattttatcatagtctttagcctctactatgagtaaaatgttctcttcggccgggtgtggtgactcacacctgtaacctcagcactttgggaggcagaggtgggaggatcacttaggtccaggagttcgagactagcctgggcaacatagtgagacaccggatctacaaaaaaataaaaagccagactggtggtatgtatctgtgtcccagctaattgggagggtgagttgggaggattgtttgagcctaggagagggaggttgcagtgagccgtgattgcaccactgcactccagcctgggcaacagagcaagaccctgtcttggagaaaccagaattttggaagagcaaatggggctgagtgcagtggctcatgcctgtaatcccagcacttagggtgccaatgtggattacctgagcccaggagtttgagaccagcctgggtaacagtgagacccccctccctacaaaagattttaataattagttgggcgtagtggtgcatgcctgtaatcccagctactctggagacaggtggaggggattgcttgagcctgggaagctgaggctgcagtagccatgactgcaccactgcattccagcctggttgacagagtgacccttgtctccaagaaaaaaaaaaagcaaatgggattaaggactcatggaatgggaaggggaaggggagtcttactatatgtggaataaacttgctcagtgttgccacagagttacattaccaatgtgtagaagtcagaaactagacttctagtttggttcaacatttgagggttgttttatagccatcaaagtattcaagaggttggatggcactcaaaagattctacatgtctagaatcaaactcaaatctggcacgtaggtgcttcttagtaaatgcttaatgaatgccaccaactctgcaaagtattcattgattttgagaccttagtcatgttgctactaaaagtagggcatatgaccgcctaagaaacagaacttcgagaagtcctaacgtaaccacagtaaagcagactcccctttcagcaacctcaaagcaaaaaaaaaaaaaaaaaaaccagttagctgctatataaacactataccaagcactaggcttagaggaaaagatgtcagattgtactgtcactggctatgtacccatattctctaagacagggtagcatttgtctttcaaactgcagggtttgaaatcagtttttgtgggtgattgcaattttttaatgaaatgcattagaacatctaagcacgtcacctacagttttgtgatggtgcatttttgcattgcagtatagatctgtgcatagatatatgcattaagtgtagcaaatcgtgatgtaaattttttactgctggtcatggtcaaaaagtaagatacgctaggaaattgagtcactaggagcatggatgtataaggcaggttttatagaaccatttagattcaacattaatggtagagtggcattttaccaaaaaaatgggtgtatttgatttgggtgctgtaaggcaatttgctaggacatgggataatcagattacacaaaatctaggcagtgaacaagtcttcatcctggcccaggaaatagcctattaaaaaatgctgtccaggccaggcacagtggctcacacctgtaatcccaggacttcgggaggctgaggctggaggattgcttgagttcaagaccagcctgagcaacacagtgaaaacccatctcaaaaaaaaaaaaaaaaaaccaaaaaaactgtccagctgtggactttcaggattcaggactgctggggatcaagcccaaggatgtttttcagagctctgtgatttaagatgctcgaaaagagtgtccaagaggagtaaaggtcatgacagaatttactcccaggacaatctaagttctgccacaagtacccgtggtgtctgttcccacaacaatggccctttcacaagctcttgcctcacaacccctgcagaagtccttcaacaaaactaataatagactagtgaaacctactcctcacatgggtaagagttgcagtgggcaggtgaccctcctccctgcccccatcctttgcttcctcaagctccctgccaacctctggatacatcaatgggaaggaaaccagggaagcatagacctatagtacaacaggggtgtagtgaccactggacctgatgaagcgaatctgcctgaaatttaatacgcctttttatttcccttctgtgttaaatcaaatgatctgttctgcactgagccaagcaagttacttttaaaactggtggcaccactcatttgggacttggagactgcttttatccagaacctgttaagagaacaggggatttaaatacaaaggaatatgaaggtggtgtgccttaaagacagtctaaaattaggttttagtttgttacattattttgaaatattaaacatgaaaatgttaaatcaggatgtgtgagttttaagatgttgaacactgtcctacatcagtgaggagggaggcaataaagtaatttcagagtaaaacagattgaggatgaaaccaagacagaagtgatgatttggctttttatgatttttgctgtggaaatggcagtcgtgtgacttttcacttgcagtttaaatgaaagggtgaagagaagcctacctgccctaatggctcagggctatatccacctcccggataaccctggcccttgggactccatcatctccttgaagtagcactgagaatccaagaagaggctccgctgctttttgcacatgttactgagttacatctcaggaagatttttaagcacgaggaaggaaaatacaggcctggccaagcagggtccccttttcggtatcatctttgttcctaataagcaatcaagggggtgggtgtgttggctggtaaaggaactactaagattcagaagcttgtagtcttcattattttgttttacaggttaaaataaaccacttgactgggaaaaaaaaa

SEQ ID NO: 30329 - DNA, 2450 bp, Homo Sapiens
agaacggcttccggcgggagctgtgcagctccttatcatggggacaattcatctctttcgaaaaccacaaagatccttttttggcaagttgttacgggaatttagacttgtagcagctgaccgaaggtcctggaagatactgctctttggtgtaataaacttgatatgtactggcttcctgcttatgtggtgcagttctactaatagtatagctttaactgcctatacttacctgaccatttttgatctttttagtttaatgacatgtttaataagttactgggtaacattgaggaaacctagccctgtctattcatttgggtttgaaagattagaagtcctggctgtatttgcctccacagtcttggcacagttgggagctctctttatattaaaagaaagtgcagaacgctttttggaacagcccgagatacacacgggaagattattagttggtacttttgtggctctttgtttcaacctgttcacgatgctttctattcggaataaaccttttgcttatgtctcagaagctgctagtacgagctggcttcaagagcatgttgcagatcttagtcgaagcttgtgtggaattattccgggacttagcagtatcttccttccccgaatgaatccatttgttttgattgatcttgctggagcatttgctctttgtattacatatatgctcattgaaattaataattattttgccgtagacactgcctctgctatagctattgccttgatgacatttggcactatgtatcccatgagtgtgtacagtgggaaagtcttactccagacaacaccaccccatgttattggtcagttggacaaactcatcagagaggtatctaccttagatggagttttagaagtccgaaatgaacatttttggaccctaggttttggctcattggctggatcagtgcatgtaagaattcgacgagatgccaatgaacaaatggttcttgctcatgtgaccaacaggctgtacactctagtgtctactctaactgttcaaattttcaaggatgactggattaggcctgccttattgtctgggcctgttgcagccaatgtcctaaacttttcagatcatcacgtaatcccaatgcctcttttaaagggtactgatgatttgaacccagttacatcaactccagctaaacctagtagtccacctccagaattttcatttaacactcctgggaaaaatgtgaacccagttattcttctaaacacacaaacaaggccttatggttttggtctcaatcatggacacacaccttacagcagcatgcttaatcaaggacttggagttccaggaattggagcaactcaaggattgaggactggttttacaaatataccaagtagatatggaactaataatagaattggacaaccaagaccatgatagactctaacttatttttataaggaatattgactccttggcttccaatttatttagtaatccaactttgcattgactgtttaatcatttactctaaatgttagataatagtagtcttgttcacatttcatgaaacctatgaaactatatttttgtaaaatgtatttgtgacagtgaaatcctcgtaaatgttaaaggctttaaataggcttcctttagaaaatgtgtttctttaaatttggattttggtatctttggttttgtagttgactgcagtgtgatgtgaccttacctttataagagccacttgatggagtagatctgtcacattactaagatacgatatttctttttttttccgagacggagtcttgctctgccactgtgcccggccaatacattattattaacttaaggctgtactttattaaggcttccttagtttttgttttgttttgttttttgagatggagtctcactctgtcgcccaggctggaatgcagtggcatgatctcagctcactgcaacctctgcctcctgagttcaaatgattctcctgcctcagcctcccgagtagctgggattacaggcacctgccaccacgcccagctaatttttgtatttttagtaaagacgggggatttcaccatgttggccaggctggtcttgaactcctgacctcatgatccacccaccttagcctcccaaagtgctgggattaggtgtgagccaccgcacctggccgatattttctttaatgaaatttataaatatgcttcttgaataatacacattttgggaaagggaaaaatgtctgttcaaaaagtaaaggtctcttttatagcttttccaaacttaattgctaaatttttctttgaggttctcctgaattatgtcttacaaactaaaagcaaaaatttttagcagaaattttggaatacattctatctagcacaatttgaatttttaattatcaagatttttgttaaagtttctctcctttaaaaattttagtacatttgtaaat

SEQ ID NO: 30330 - DNA, 3824 bp, Homo Sapiens
atagagaagaacggaggtacggcctgtggtcatggcgctgttcccagcctttgcggggcttagtgaggctcccgatggcgggagctccaggaaagagttagactggctgagcaacccaagcttttgtgttggatccataacgtccctgagccaacaaactgaagcagctccagcccatgtttctgaagggttaccgctgacaaggagtcatctgaaatcagagtcttcagatgaaagtgacactaacaaaaagctcaaacaaacaagtagaaaaaagaagaaagagaaaaagaaaaaaaggaagcatcagcatcataagaaaacaaagaggaagcatgggccgtcgagtagcagcaggtctgagacagacaccgattctgaaaaggacaaaccttccagaggcgttggaggcagtaaaaaggaatctgaggaaccgaatcaaggaaataatgctgcagctgatactggacatcgctttgtttggcttgaggacattcaggctgtgacgggagaaaccttcagaacagataagaaaccagatcctgcgaactgggagtacaagtctctctaccgaggggatatagcaagatacaagaggaaaggagactcctgccttggcattaaccctaagaagcagtgcatatcttgggaagggacttccacagagaagaagcattcacgcaagcaggttgaacgctattttactaagaagagtgtgggattaatgaacatcgatggagttgccattagcagtaaaactgaacctccctcatctgagcccatctcctttataccagtgaaggacttggaagatgcggctcctgttacaacctggttgaatcctctggggatttatgatcagtcaaccacacattggctacaaggacagggtcctccagagcaggaatcaaagcagccagacgcacagccagacagcgagagtgcggctctcaaggccaaggtggaggagtttaacaggagggtgcgggagaatcctcgggatacgcagctgtggatggcatttgttgcttttcaggacgaggtcatgaaaagtcctggcctgtatgccatcgaggaaggagagcaggaaaagcgaaagaggtccctgaagctcattctggagaagaagctggccattctggagcgggccattgagagcaaccagagcagtgtggatctgaaactggccaagctgaagctctgcacagagttctgggagccctccactctggtcaaagagtggcagaaactgatatttttgcatcccaataatacagccctttggcagaaataccttttattttgccagagccagtttagtaccttttcgatatcaaaaattcacagtctttatggaaaatgcttgagcactttgtctgctgttaaggacggcagcatcttatctcaccctgcgttgcctggcacggaagaggccatgtttgcactctttcttcagcagtgccactttctgcggcaggctggccactctgagaaggccatctcattgttccaggccatggtggacttcaccttcttcaaacccgacagcgtgaaagatctgcctaccaaaggacaggtggaattctttgaacccttttgggacagtggagagccccgggctggggagaagggagcccgaggctggaaggcgtggatgcaccagcaggaacgaggtggctgggtggtcatcaacccagatgaggatgacgatgaaccagaagaggatgaccaggaaataaaagataagactctgcccaggtggcagatctggcttgctgctgagcgttcccgtgaccagaggcactggcggccctggcgccctgataagaccaagaagcaaaccgaggaagactgtgaggatcccgagagacaggtgttgtttgatgatattgggcaatctttgatcagactttccagccatgatcttcagttccagctggtggaggccttcctgcagttcttgggtgtgccttctggctttactcctccagcctcctgtctttatctggccatggatgagaacagcatctttgataatggactttatgatgaaaagcccttgacttttttcaaccctttgttttctggggctagctgtgttggccgcatggataggttgggctatcctcgctggaccaggggtcagaaccgagagggcgaggagttcatccgcaatgtcttccaccttgtcatgcctttattttcaggcaaagagaagtcccagctctgcttctcctggttacagtatgagattgcaaaggtcatttggtgcctgcacactaaaaacaagaagagattaaagtctcaagggaagaactgcaaaaaactagccaagaatctccttaaggagccagaaaactgcaacaacttttgcctgtggaagcagtatgcacatctggagtggttgcttggcaacacggaggatgccagaaaagtttttgacacagcacttggcatggcaggaagcagagaactgaaagactctgacctctgtgagctcagtctgctctatgctgagctggaggtggagctgtcgccagaagtgagaagggctgccacagctcgagctgttcacatattaaccaagctgactgagagcagcccctatgggccctacactggacaggtgttggctgttcacattttgaaagcgcgaaaggcttatgagcacgcactgcaggactgtttgggtgacagctgtgtctccaatccagctcccaccgattcctgtagccgcctaattagcctggctaaatgcttcatgctcttccagtatttgaccatagggattgatgctgctgtgcagatatacgaacaggtgtttgcaaaactgaacagttctgttttcccagaaggctctggcgagggggacagtgccagctcccagagttggaccagtgttctcgaagccatcacactgatgcacacgagcctgctgagattccacatgaaagtgagtgtttacccgctggcccctctgcgagaggcactctcacaggctttaaagttgtatccaggcaaccaggttctttggaggtcctatgtacagattcagaataagtcccacagtgccagcaaaaccaggagattttttgacacaatcaccaggtctgccaaacccttggagccttggttgtttgcaattgaagctgagaaactgaggaagagactggtggaaactgtccagaggttagacggtagagagatccacgccacaattcctgagaccggcttaatgcatcggatccaagccctgtttgaaaatgccatgcgcagcgacagtggcagccagtgccccttgctgtggaggatgtatttgaactttctggtttccttaggaaataaagaaagaagcaaaggtgtattctacaaagcacttcagaattgcccttgggcaaaggtgttgtacctggacgccgtggagtatttccccgatgagatgcaggagatcctggacctgatgactgagaaggagctccgggtgcgcctgccgctggaggagctggagctgctgctggaggattagagagcagcgggaaaacgggctgtgcctgcgaggccaagttgcccaccctgcggagctaggaggcgcgagcagagaacgtgtgtgttaggagaactcggcttttgaaatgttctttctcgatagtaataatgtgggctgccagcctctcacatcttgcacactttttgggtgtgtaaatgacacaaaagttatttacatattatatatgtgaatatgtgtatatatgtacatagccagagagtcatgccacgtggtcattaaaccgatgatgattgaggcgtgaaaaaaaaaaaaaaaa

SEQ ID NO: 30331 - DNA, 2357 bp, Homo Sapiens; identical to SEQ ID NO: 24330

SEQ ID NO: 30332 - DNA, 7999 bp, Homo Sapiens
cagtgatgagttctagaaggaaagaaaaggctgatgtgacagtgaggaagggatgagtggagacttctctgagacttcagtgattcctcttcctctgagctgagccaagctgagaagctgagaagagtaagatagggccgggaactcaggtccgttagtccgtcctccgaggtggggcgggccagcagaatggatttccgatctactctgtgagagcctcgcccaagaaagcccagagccacttccaagatccgcgctcccacggcgatgagaagcgttttcccccgggactgcttggcttaggactggggacccactggctttggagtaagccctggcacgggcctcgagggaagaaagaactcccgcgctccccacactccacagggcctgcgatcatctcagatgttccggttccacgtgcagaaaccccgccggtccgaggccccggttctaaaacggccctaagagtcaaggcttccacagctcgcctctgagggtggcaaagaggccgcgggggcggtgcctcgcgagacccaaacaagcccacgtggcaggggcggggctccgcgaaggcgtcacggcgcgctcgtgcgctgctgaggtcacgcgccggcagtacccttgcccgggggccgtaaagcgcggaaggtcgcggtctcggcttccccggaactttttgctcgcttcgccccgcccccttcccatccccgaaccccgctttccggcccgcggcgaccccaggcaactgttgtggctgccgcattgctcccgccgggctgtagctgagcgcggagcccgtggggaccggtgagatggaactgttttcccgcgttgagacgtgcggtccgcttgtgcttttagaactaaagactgctgcagagtccggaggaagaagtcacctagaaaaatctgggacagggcatttgagttcctgagatctagttggtgagagacatgatgttctaccggttgctgtcgattgttggaagacaaagagccagcccaggatggcagaactggtcctctgcaagaaacagcacgtcagctgccgaggcgcgttccatggccctgcccacccaggcacaggtggtcatctgtggaggtggaatcacgggcacttctgtggcctatcacctctccaaaatggggtggaaggatattgtccttttggagcagggcaggctggctgctggctctaccaggttctgtgctggcatcctgagcactgccaggcacttgaccattgagcagaagatggcagactactcaaacaaactctactatcagttagagcaagaaacagggatccaaacaggttacacaaggacaggctcaatctttctggcccaaactcaggaccgactgatctccctgaagcgcatcaacgcagggctgaatgttataggtatcccttctgagatcatctcccccaagaaagtggccgagcttcaccatctcctcaacgtgcacgacctggtgggggccatgcatgttcccgaggatgcagtggtgtcttccgctgacgtggctcttgccctggcaagtgctgcctcccaaaatggtgttcagatctatgaccggacatctgttcttcatgtaatggtcaaaaaaggtcaagttactggagtggagaccgataaaggacagattgaatgccagtattttgtcaactgtgctggccagtgggcatacgagctgggtctgtccaacgaggagccggttagtatcccgctacatgcctgcgaacacttctacctcctgactcgccccttggagacccctctgcagagcagcacaccaactattgtggatgctgatggaagaatttatattcggaactggcagggtggcatcctgtctgggggctttgagaagaacccgaaaccaattttcactgagggcaagaaccagctggagattcagaatctacaggaagactgggatcactttgagcctctgttgagttcccttctgaggaggatgccagaattagagactctggagatcatgaagttggtgaactgcccagagaccttcacaccagacatgaggtgcatcatgggcgagtctcctgcagtgcagggctactttgtcctggcaggaatgaactctgctggcctttcatttggtggaggagccggaaagtaccttgccgaatggatggtacatggttatccctcagaaaacgtttgggaattggacctgaaacgttttggagccctccagagcagccgcacctttctgcgccaccgggtcatggaagtcatgcctttgatgtatgatctgaaggttccccgctgggacttccagaccggtaggcagttacgcacctctcctctctacgaccggctggatgcacagggagccaggtggatggagaaacatggatttgagaggccaaagtactttgttccccccgacaaggacctcctggcattggagcagagcaagactttctataagccagattggtttgacatcgtggagtctgaagtcaagtgctgtaaggaagctgtgtgtgtcattgacatgtcctctttcacaaagtttgagataacatccactggggatcaggcattagaagttctacagtacctcttctccaatgacctggatgtgcctgtgggccacattgtgcatactggcatgctcaacgagggtggagggtatgaaaatgactgcagcatagcacgactgaacaagcgcagtttcttcatgatctctccaaccgaccagcaggtccactgttgggcctggcttaagaaacacatgccgaaagacagcaacctgctcctggaggacgtcacctggaagtacacagccctcaatctgattggccctcgagctgtggatgtgctgtctgagttgtcctatgcccctatgactccagaccacttcccaagcctcttttgcaaggagatgagtgtgggctatgcaaatgggatccgggtgatgagcatgacgcacacaggagagccaggattcatgctctacatccccatagagtacgccctgcatgtatacaatgaagtgatgagtgttggccagaaatacggaatccggaatgctgggtattacgctcttcgcagtctccgaattgagaagttttttgccttctggggtcaggatataaataacctcaccacgcccctggaatgtggacgagagtctcgggtgaaattagagaagggcatggatttcattggtcgcgacgccctcctgcagcagaagcagaatggagtgtataaacgcctcaccatgttcatcctggacgaccatgattcagacctagacctttggccttggtggggagagcccatttaccggaatgggcagtatgttggcaagaccaccagcagtgcctacagctacagcctggagcgccacgtttgcctgggctttgtgcacaatttttctgaggacacgggggaagagcaagtggtgacagcagatttcatcaaccggggagagtatgagattgacatcgcgggataccgcttccaggccaaggccaagctctaccctgtcgcctccctcttcacccagaagcgccgaaaggatgacatggagctgagtgacttacatgggaagtgatgccaccagggcagcctcacctcctccccatcatcttgtcctagagtgggcgtcaccttggagcttctcttccttccgcctctgttcctcttctggagcctttgcctcccatctcttatctccttgatataattttgaacttgacctactttaaacttttttgctctgcagccttccttgcccttccacctcctcctcctaatattcactctgggctcttcttcccttcccacccctcactcagcttctcgtggtggcaggaggtatgtctgacaggacagaagcaagctccactgtggacatgagtgatggtgacagctgctttcaaattctgcatctcaaggcagggcaagccggggtggtgcaggtctcagggcacgagtccctctcccttgggttccattttcttggagcagcctattagttctggtggggttgccgtgtgtcggatgcagccctgaggggcagctcgtgcctgcagcccggcagctcgttctcctgttctgctgtgctgtgggctggcactcgatacctctggcaagaggatgattatctacctcactgataagaggcatcgcatggacgttctctggtctgtagtggagacaagcagttaacctagcaccatcctcatcctccctgcagaagccattagcagacctttgggccagggcagcctccctataattttcttcatctcttgctaatctctataataaggttgctttttctttcttagttgagtaaacaagtaagccacagtgtttgaaagggaaaaaccatattgccttgtgtgttgcttttcccagtcaaaagggtctgaccttagaaagtccccaccagtgatgctgagtgttctgctatggaaacaatgctgcttttctctcagctgtccaaagttcagccgttcctccttccccttctcccagtgcgtttgactttgtcaggtcagcctcacttgtccctttcacagttggcccataaagtcatgtttctctccctttagaatagggaggggaagggatcaggtgtgttgtcctgggcctttcaaccttgcgggctgtgctgagttccagagagctgccggaattccaggtttgactctccagcacagagcagagctacacagaggtgacccacgttagtccactgagagttctgagtccaaagggtgtacgttgcataaggctagagaccgcttttcctcctttccccccaggctctttgtttccctccacccacccttccatatcctctggagcaggagacaatgtgggtgcccagaagtgccctgcgctttcaggcagtgtctctgttttcccaaggtgaaacttagatatcatggactgttgtccagcctcaatgcttcattttccccttgcatatcaactgccctaatctgactttttttaagtgcaaataaactgctataagacattttggttagtaaaactctagcctttggcgtgttggtatcttggaagcattagctctgataggtctataagtgtattaagggacatccttccatttcattagagcagcttaaaatgctcaggtgtctgccttctctggtgtttctttgggatctctgtttacccacttacgctggctccttctagacatttcttgccacttccccaactagaccactcctagtgattactgactttagtgcctaaacctttttggaaggttctggttggcttgttagaggagcatatgattagaattctgtttgggggtctagttgtcttggagcaagtatgtacttaactagccgagagatgctgcctctaggcagagaggaggagaggtgttgccggctggagggccaaccagtgaacaccagctgtgaaggccttgggagaggaggaacaggcccttgggcagatgcaggcattaccagcagggagcagacttacctccgaagatggagacaggtgactgagagctgcaggcctcctctgctcttccaaacacgtagcatttgcacccctccaaagccatctttgtaaaggaaaacgtatttgtaattgaatccagaagaatttagttacacatagacataactcttcaaccttaactatggcaatacatttgtgctttaactgttacatagcagtatcaccacttaccaggatccaaatcgaaataataaaagctgtctccatagtttaaaatcgaatagtgccatcatcacagtatattagtcaaatagaagcttcatcagaaatgtatcccacatagagttttaagacttggattctcttctgcccttgttaatctccaactaattactacagattgacacgtttttaattagctgtcctttgtaagaagtcaggaaatctgatgctgtgtccaaaattatgcactgtttgttgaagtagaaccagaaatcctgacctcctgttaaatgacatcagtttccccctctgagcaacagactgcttgtcttgctaggagaggaggatggggggctgagcactcaggctgtccattgaaaccccttgtccatgaatagggtcatactcctaagactgatggggtgttgatcttctaggacatcacttgtttattcagtgccccaaacacagatttctcttctagcactttagagttgatccttgaagtctctcctggttcattcaaatacaagctgtgtgagtctggtggttttctgtgattggtctaatgtgagctctttgaacagacagatctgacagtgaatgactctcccctgcttctggcataactgctttgcctctgtctagtgtccaagcatcttagctgttcaagaggagagggcagcataacttcctgaccaccggtgtcagatatcagagcattctggactcctgagaggcagtggcctcttgagtgaacaggggaggccagtagatgccccagatccagagccgtggctgcaaatccagcaggaataaggagggacaaccacagcctcctcatccatgtgtcatttccaagggtttgccttgtgtctcagctcattctgggcagcacgtttgtcttctgtccctagagatttgaaggattttggactcttgtgaatgggtgactggacttggctttacagagttgggtgcttttttctctctgcaattacctgtcatagcattttgtgctcaccacgaaggatggtctctgccttctcttgtcggtgtatgccatctgaacctaggaacacaaagtatattggcctcaaacggagacccagggttgccagttttccgtgggccttcccctcccttgaaatgtctttaattacctccccttcatcgtcaggccacgtgtgacttctgttcttagcactgccagggtcattgacttccatctaagcttgcatcaggaagatgttccttctgtgatcattggtactgaagccagaaaagctctcattcaggaactctgaagagcaaaaagggacaaacactaactgctgagctgggccatttgatctcctttcaccttgcattgctgtcacagcaccttgtatgatggcaggacaggctccagcagagagaactgcacagtgaccactgtatttttcacgctcttccagggatccctgtcccccgacattgaagagatctcattcaggccagagacacagagaccacatagcccagtgattaaaccccggtttcactctggccccaggagtggagcctggccactcctgtttggttctcactgggaggcccactggccttggatcatctcctcatgcacacccggagttttacctgcttgcttgctttcctggactgctgtttgcaagaaagtaactaaaacatgaaaagtaaacctccagcttccacagtatattacctgccgttgcatgcatttgaaagttagcctcctcccttgccaccgtcttggtggcagtagcgatgcaagaatgatgggagctttccgagagcgttcagtgtttcactgaagacaggacccatagccttcatttctggctctgtgtctcctctggcatatggacacatttcctggcatttgcctgagtctacaccactttttgagaacctgaaatagaagggaatcttctgtggcccacagtctccatattggcactagaagactggcctggcggaggaatttgcgttggcttgctttcaggggttagctacaagattcagctttatatctctgttgcttcttggccagtgtagtcaataagggtcttctttaacatctaagatagaggtttggttggccgggcgtggtcgcttactcctgtaatcccagcactttgggaggcccagtgaggtgggagaattgcttgaacccaggaggcagaggttgcagtgagctgagattgcaccactgcactccagcctgggtaacagagtgagactcttgtctc

SEQ ID NO: 30333 - DNA, 1534 bp, Homo Sapiens
tttgcgctcggggaattaaaagaggggaaaaaaagcccgaagaaaactcacgccccaaacaaaacgcaaggagaggagggcgcgcggcctgcagccctcgcccgcgtccccggccgcggcgtgatgcgcgcggaccagcccgcgacgcccgggctgccgctgtccccgcacctggacgctggcgcggtggccgcgccccagcctcgatcgctcgccgcggcgactcggccccaggcttccggcgccggtgggggccctcgctctccatggggctgagggactggctgagaaccgtgtgctgctgctgccggtgcgagtgcttggaggagcgcgccctgcctgagaaggagcccctcgtcagtgataacaatccatattcctcatttggagcaactctggtgagggatgatgagaagaatttatggagtatgccccatgatgtgtcccacacagaggcagacgacgacagaaccctgtacaatttgatagtcattcgtaatcagcaggccaaagactcagaggagtggcagaagctcaactatgatatccataccctgcggcaggttcgaagggaagtaagaaacagatggaagtgcatcttagaagatttaggttttcaaaaggaagctgactctttgttgtcagtgactaaactcagcaccatcagtgattctaaaaacacaaggaaagctcgagagatgttgttaaaactggctgaagaaaccagtattttcccaacaagttgggagctctcagagagatatctctttgttgtggaccgtctcattgcacttgatgctgcagaagagttctttaagcttgctcgtcgaacttaccccaagaagcctggggttccatgcctggcagatggccagaaagaactgcacctgtggggggacctctcatgcagacttgcacatatgcagggagtattgcactgaagatctttgctggaccttcttctcttcagaagataattttcaaaagggagcaatgctgtgaatgcagcttgcttctctctacagattgagaagtccagcttcaaaagttacttgccacttaagcaaggaacttgtcaagagatcatggttcatgttactgaaaagactttaaggatttgtaaggttaatccatagattgctgagaacaatggaaatatttttatttttacagattttgcacttctgaattcaggttaaaaactaacttgtatttagtctgcttagaggactgtgacttgaaaatttttatataccaatgagctttttggtagcgtccacaatgtttaaaatatttcataggcgagatccgtgttctccatttattaatgcattgtagaccaatttaactgctgtgtttcaggaaaattcttcctagtttaataagcaagctaaaagttttattttttatatttagtgcttaatctttgcctcatgttatgtaaaattagcctgcagatattttctctcaattctgtagactctcgcaagataaacattcaaacagtgaaacaaacaataaaataaataaacct

SEQ ID NO: 30334 - DNA, 6816 bp, Homo Sapiens; identical to SEQ ID NO: 22471

SEQ ID NO: 30335 - DNA, 2127 bp, Homo Sapiens
atttttcatgtcacataattttggagtatgtcatggacatttgaatattttgttacaaaactggatgctgttaaaatcctctggaaaatatttttggttttttggtttcactttagcgggcagttaacctggttaggttcagactgcctctgtgggctgtggatccagtttgaacttacttttcaaaaccttcgtattgctgttcaggtcccaggtgtgccatccatgccattgtgcagttctcagcgcctttcctctgccgccttgggtcagttcacacatgggcatgttggtggtaaacttgagattgtatacacaaatttagaggacgtttcttctctccgtgacttcccttgtacacaagctcccaagagtttcttttcgtggttctttggtgagaaaactggaattttagcttctttgtgcttttcatacgttttctgtagaggggctcatttcctgaacaaaatggagagagagaaaagttagagaaaaaaataaaatgaattccctcttccatactcttccgatcatcgtctttttcctagttcttttgtcagaagaactctcttttagagtttaggagacagctaccagccacaggtgtgcagactcaggattggggcttgctttgaggcagagctgagagagaagaaaaattaccagatatccacccctccccattgtccctctcccattcatcatcttttctagttctctagccagaaggagtttctcttggaacttttctctgtcttcactcactgcacagttaatgagatttgggctgtcctcaagtctaagctgacatatgtgggagaaaaaaaccaggaaactcactactgttttgagttttgatttctctcgccagtctgcttgcttcaaattacttttcagagtccttgtatatttgctttatgtattctttccaggatttttagtaataatcaatggacaagatagggtggagtgtgctttctccatcttagctagaactgggaccccgtcccccactcgtaaaatataaataatgacttagcatggcacattaggtgggcattagagacaccagggaagcgattacaaatataaatgcccaggttgtatctccagataattaaaaatctttcaggagtaggatccagaaaactatatttaaaagttctctaggttcttgatatactatgtaggttgtggtctgaggaccactacatggggatcatttggaaacttgttagaaatgtagactcaggttccattccagacctgctgaattggaacaagatccccagatggtgcctacgcacagtaaaatttgagcagcactgccctagcatgattctagtgtgcagtcaatgttgaggaccactgtcttagaggattgcgtaaaagcaaatgacgtgtatataaatttagattgtaatattctctgagtataaactcattaggtgcaagctgagctcaccctccatgttttctgtgttcctggttaaagtaagttacctttgatgaaaaccacaggttcatctttgacttcaaatcagatttgttgctattgaagctaattggatcccagctcagctttgtggcttggattcacaccatataaaatcttcaacagacattcattcctttgttcagaacacacaaccttctaacgtgaacctccaattttctaaattcattctttttctacttcacctgaaaccacagatccatggcacttagtttctctgtaacagcagctctaccatggtgtccagaaattttagcccctactatcaagaacaaaacatccttgtacatgtttatacatctttttgagtaggagttttccaccagttgcagggattccctgagtctagagtaatgccacaatgctgctcccttttactcctttctaagcatttctgtcagggagaagacttagattcagttgttcactttaacattttccttagatactctcttagaaaagttgtattctgcgcacttctgttatgaagggagtaagggattgctgagatttgttaagttaccaaactagtcttgatagatgtataattattacatatccaccatcacttcatttagctgggcaacaagggcaaaactctgtctcaaggg

SEQ ID NO: 30336 - DNA, 2430 bp, Homo Sapiens
tttgtaacttcacttcagcctcccattgatcgctttctgcaaccattcagactgatctcgggctcctatttcatttacattgtgtgcacaccaagtaacaagtgggaaaactttagagggtacttaaaccccagaaaattctgaaaccgggctcttgagccgctatcctcgggcctgctcccaccctgtggagtgcactttcgttttcaataaatctctgcttttgttgcttcattctttccttgctttgtttgtgtgtttgtccagttctttgttcaacacgccaagaacctggacactcttcactggtaacatattttggcaagccaaccaggagaaaagaatttctgcttggacactgcatagctgctgggaaaatgaacatcagtgttgatttggaaacgaattatgccgagttggttctagatgtgggaagagtcactcttggagagaacagtaggaaaaaaatgaaggattgtaaactgagaaaaaagcagaatgaaagggtctcacgagctatgtgtgctctgctcaattctggagggggagtgatcaaggctgaaattgagaatgaagactatagttatacaaaagatggaataggactagatttggaaaattcttttagtaacattctgttatttgttcctgagtacttagacttcatgcagaatggtaactactttctgatttttgtgaagtcatggagcttgaacacctctggtctgcggattaccaccttgagctccaatttgtacaaaagagatataacatctgcaaaagtcatgaatgccactgctgcactggagttcctcaaagacatgaaaaagactagagggagattgtatttaagaccagaattgctggcaaagaggccccgtgttgatatacaagaagaaaataacatgaaggccttggccggggttttttttgatagaacagaacttgatcggaaagaaaaattgacctttactgaatccacacatgttgaaattaaaaacttctcgacagaaaagttgttacaacgaattaaagagattctccctcaatatgtttctgcatttgcaaatactgatggaggatatttgttcattggtttaaatgaagataaagaaataattggctttaaagcagagatgagtgacctcgatgacttagaaagagaaatcgaaaagtccattaggaagatgcctgtgcatcacttctgtatggagaagaagaagataaattattcatgcaaattccttggagtatatgataaaggaagtctttgtggatatgtctgtgcactcagagtggagcgcttctgctgtgcagtgtttgctaaagagcctgattcctggcatgtgaaagataaccgtgtgatgcagttgaccaggaaggaatggatccagttcatggtggaggctgaaccaaaattttccagttcatatgaagaggtgatctctcaaataaatacgtcattacctgctccccacagttggcctcttttggaatggcaacggcagagacatcactgtccagggctatcaggaaggataacgtatactccagaaaacctttgcagaaaactgttcttacaacatgaaggacttaagcaattaatatgtgaagaaatggactctgtcagaaagggctcactgatcttctctaggagctggtctgtggatctgggcttgcaagagaaccacaaagtcctctgtgatgctcttctgatttcccaggacagtcctccagtcctatacaccttccacatggtacaggatgaggagtttaaaggctattctacacaaactgccctaaccttaaagcagaagctggcaaaaattggtggttacactaaaaaagtgtgtgtcatgacaaagatcttctacttgagccctgaaggcatgacaagctgccagtatgatttaaggtcgcaagtaatttaccctgaatcctactattttacaagaaggaaatacttgctgaaagccctttttaaagccttaaagagactcaagtctctgagagaccagttttcctttgcagaaaatctataccagataatcggtatagattgctttcagaagaatgataaaaagatgtttaaatcttgtcgaaggctcacctgatggaaaatggactgggctactgagatatttttcattatatatttgataacattctctaattctgtgaaaatatttctttgaaaactttgcaagttaagcaacttaatgtgatgttggataattgggttttgtctattttcacttctccctaaataatcttcacagatattgtttgagggatattaggaaaattaatttgttaactcgtctgtgcacagtattatttactctgtctgtagttcctgaataaattttcttccatgcttgaaaaaaaaaaaaaaaaaaaaaaaaaaaaaaaaaaaaaaaaaaaaaaaaa

SEQ ID NO: 30337 - DNA, 4480 bp, Homo Sapiens
gttgtttccggctcaactggggagctgctggagctcttctggcctctggttttccgactgcttatccgacgctcctccctctgtctctgtagctggagaaggtagtttccaggaaagttttccggtttgcaggccgcgcacatcgggcaggggccatcctcggtccccttgctcgttgctcgcagccccgttcggctacaagtgagtttcagggcgtcatggccaggggccaccgcggccagccgggtgtgaggctgcctttcgctgcccgcgcgctccagtggtctctgggtccgccggcgtccgtttcggcctgaacgcagcccctccgcggcgacgagcagtctcgcgccggagctcatggcctcggaggcgccgtccccgccgcggtcgccgccgccgcccacctcccccgagcctgagctggcccagctaaggcggaaggtggagaagttggaacgtgaactgcggagctgcaagcggcaggtgcgggagatcgagaagctgctgcatcacacagaacggctgtaccagaacgcagaaagcaacaaccaggagctccgcacgcaggtggaagaactcagtaaaatactccaacgtgggagaaatgaagataataaaaagtctgatgtagaagtacaaacagagaaccatgctccttggtcaatctcagattatttttatcagacgtactacaatgacgttagtcttccaaataaagtgactgaactgtcagatcaacaagatcaagctatcgaaacttctattttgaattctaaagaccatttacaagtagaaaatgatgcttaccctggtaccgatagaacagaaaatgttaaatatagacaagtggaccattttgcctcaaattcacaggagccagcatctgcattagcaacagaagatacctccttagaaggctcatcattagctgaaagtttgagagctgcagcagaagcggctgtatcacagactggatttagttatgatgaaaatactggactgtattttgaccacagcactggtttctattatgattctgaaaatcaactctattatgatccttccactggaatttattactattgtgatgtggaaagtggtcgttatcagtttcattctcgagtagatttgcaaccttatccgacttctagcacaaaacaaagtaaagataaaaaattgaagaagaaaagaaaagatccagattcttctgcaacaaatgaggaaaaggatttgaactcagaggatcaaaaagccttcagtgttgaacatacaagctgcaatgaggaagaaaatttcgcaaatatgaaaaagaaggccaaaataggcattcatcacaaaaatagtccccccaaagtcactgttccaactagtggaaatactatagagtctcctcttcatgaaaacatctctaattcaacatcatttaaagatgagaaaatcatggagactgatagtgaaccagaggaaggtgaaattacagactctcagactgaggatagttatgacgaagccattaccagtgaaggcaatgtaactgcagaagatagtgaggatgaagatgaagacaaaatttggcccccatgtattagagtaattgtcattagatcacctgtgttgcagataggatcactctttatcattactgctgtaaaccctgctacaattggaagagaaaaggatatggaacatactctccgaatccctgaagttggtgtcagtaagtttcatgcagaaatttattttgaccatgacttacaaagttatgtccttgtggatcaaggcagtcaaaatggcacaattgttaatggaaaacagattcttcagccgaaaactaaatgtgacccttacgtacttgagcatggagatgaagtcaaaattggagaaactgtcttatcctttcacattcatcctggcagtgatacctgtgatggctgtgaaccagggcaggttagagcccaccttcgccttgataagaaagatgaatcttttgttggtccaacactaagtaaggaggaaaaagagttggaaagaagaaaagaattaaagaaaatacgagtaaaatatggtttacagaatacagaatacgaagatgaaaagacattgaagaatccaaaatataaagatagagctggaaaacgtagggagcaggttggaagtgaaggaactttccaaagagatgatgctcctgcatctgttcattctgaaattactgatagcaacaaaggtcggaagatgttggagaagatgggttggaagaaaggagagggcctggggaaggatggtggaggaatgaaaacgccgatccagcttcagcttcggcgaacacatgcaggcttggggacaggcaaaccatcctcatttgaagatgttcaccttctccaaaacaagaacaaaaaaaactgggacaaagcacgagagcggtttactgaaaacttcccagaaactaagcctcaaaaagatgacccagggaccatgccttgggtaaaagggactttagagtgaaggctaatcatagaaaaaaaacctctagtttttttaaaaatagaatttggaaacttattttttctccccaaaagaatcagcagcacaggggaactatgtcacagtttacctcttcctgattcagaaatgtgtatggtttgcagcttttaaaaaccatttttttaaaactaataaatagtgactgaaccaatttatgcagtaaatagactaaagttcacagggcacggatgagtttatcaaacttcgttattttatcttgtcatttacaacatccatataagcaactagccatataagcaaaattcatagaactactaatgacttaagtgtacatctgttcttgtctccatatattcatgtaagatgcacaacaaaagaaacatcagaagtttataaaaataaatctgactatatgcatcctcatttattccctttagaacctaggtaaaaaatgttgcgaaaacatgggtagtggcgcatacattttgttatccttgaaatagcctaagtaatgttattgaagaactaatgaacaggtaacatattgtagaaaattagtctttcattgttttcttctgtgaagaatctgttgctatgtactgtatattcagcatttatatttggtttgtttcatagctaatgaggtatttagatatgaacaactgaatacatattgaaatagtgtgctggcttttgtagttttgataaagaccattgcaggcaatggaattgtgccagagaaatctgatttctagtacaaaaggaatacttagccagggcctcaagctcaagatacttattgaaaacatcctcaattgcaataaaaacattataacatgaaaaagagtgattttttgaaccggtgatttaaatgtattgatctgctttgaattttcaagcagccagaattttctagtttaaattggcagagttataacaaaggagagcctcaaatattagacaattgcagtgcggctttctgggcacaggtgtcactgctctgccacctatcactattctttttctgttcagtttttctctcaggtgtttgctgggaaattaacactggaactgacccttttctggcagtgaatgtaagctctagctcccccatctactataaagaaatgtcttcgagatgtagaaataaggaatattctgaaaataaaaattatacagtagtaaagataattcagaaagaaaaagctacctgttagaatttccagtctaaatggcacagggtagttacggagaaaaggggatggagaaggagaaactatgactaaagatgagaggtatgaacgagttgtcaggttcctatgggcttaagctaggacaatcaggccctaaactccaaatttggataaaatatctctttgcattcttcttggccacctgcatagtctgacacatacgtatgtacagttagacttgcaggctgcaggagtgccctgcattgttttcttttaattagaaataaaaagtattagtctaaatgtggttctggtgctggtgccctgtatatatgtaacaatataggacccctccaaataggttttgcttctggtgaatcttggtcattgggttagtatatgactgtctataatattttccatttgtattattatattggggaaaacattttttatcattttctattaagaaaatggaaaacttaaatatggtgttaaaaatggaaatatatgtgatatttgcattattaaacccctttgcagatctaaagtctcagggttccactattagtggttaaagtactgaataatgtctgggtctatttccatctgtaaaataagaatatttgtctcacgtgtctgtcatgaatagcaaatgagaaaatgtatataaaagcactttgtaaattgtaaaagtagtacagatgtgagcttctatttgtttagaagcataaatgtgaattatatacagtttgaattttgcataaaaaaaaaaaaaaaaa

SEQ ID NO: 30338 - DNA, 2297 bp, Homo Sapiens
aaccacaaaacccgccaggccggtgcgggagctgcggagcatccgctgcggtcctcgccgagacccccgcgcggattcgccggtccttcccgcgggcgcgacagagctgtcctcgcacctggatggcagcaggggcgccggggtcctctcgacgccagagagaaatctcatcatctgtgcagccttcttaaagcaaactaagaccagagggaggattatccttgacctttgaagaccaaaactaaactgaaatttaaaatgttcttcgggggagaagggagcttgacttacactttggtaataatttgcttcctgacactaaggctgtctgctagtcagaattgcctcaaaaagagtctagaagatgttgtcattgacatccagtcatctctttctaagggaatcagaggcaatgagcccgtatatacttcaactcaagaagactgcattaattcttgctgttcaacaaaaaacatatcaggggacaaagcatgtaacttgatgatcttcgacactcgaaaaacagctagacaacccaactgctacctatttttctgtcccaacgaggaagcctgtccattgaaaccagcaaaaggacttatgagttacaggataattacagattttccatctttgaccagaaatttgccaagccaagagttaccccaggaagattctctcttacatggccaattttcacaagcagtcactcccctagcccatcatcacacagattattcaaagcccaccgatatctcatggagagacacactttctcagaagtttggatcctcagatcacttggagaaactatttaagatggatgaagcaagtgcccagctccttgcttataaggaaaaaggccattctcagagttcacaattttcctctgatcaagaaatagctcatctgctgcctgaaaatgtgagtgcgctcccagctacggtggcagttgcttctccacataccacctcggctactccaaagcccgccacccttctacccaccaatgcttcagtgacaccttctgggacttcccagccacagctggccaccacagctccacctgtaaccactgtcacttctcagcctcccacgaccctcatttctacagtttttacacgggctgcggctacactccaagcaatggctacaacagcagttctgactaccacctttcaggcacctacggactcgaaaggcagcttagaaaccataccgtttacagaaatctccaacctaactttgaacacagggaatgtgtataaccctactgcactttctatgtcaaatgtggagtcttccactatgaataaaactgcttcctgggaaggtagggaggccagtccaggcagttcctcccagggcagtgttccagaaaatcagtacggccttccatttgaaaaatggcttcttatcgggtccctgctctttggtgtcctgttcctggtgataggcctcgtcctcctgggtagaatcctctcggaatcactccgcaggaaacgttactcaagactggattatttgatcaatgggatctatgtggacatctaaggatggaactcggtgtctcttaattcatttagtaaccagaagcccaaatgcaatgagtttctgctgacttgctagtcttagcaggaggttgtattttgaagacaggaaaatgcccccttctgctttccttttttttttttggagacagagtcttgctttgttgcccaggctggagtgcagtagcacgatctcggctctcaccgcaacctccgtctcctgggttcaagcgattctcctgcctcagcctcctaagtatctgggattacaggcatgtgccaccacacctgggtgatttttgtatttttagtagagacggggtttcaccatgttggtcaggctggtctcaaactcctgacctagtgatccaccctcctcggcctcccaaagtgctgggattacaggcatgagccaccacagctggcccccttctgttttatgtttggtttttgagaaggaatgaagtgggaaccaaattaggtaattttgggtaatctgtctctaaaatattagctaaaaacaaagctctatgtaaagtaataaagtataattgccatataaatttcaaaattcaactggcttttatgcaaagaaacaggttaggacatctaggttccaattcattcacattcttggttccagataaaatcaactgtttatatcaatttctaatggatttgcttttctttttatatggattcctttaaaacttattccagatgtagttccttccaattaaatatttg

SEQ ID NO: 30339 - DNA, 5956 bp, Homo Sapiens
cagccaacggcgagtgggagcagcgcgggaacgtggcggcgcggcgggttgtgccggaggtcacggcctccccacatcctttggctgaagcccacagtcctcatccatgaagcctcacccaccatgttttatgggacgcacttcatcatgtccccgcccaccaagagcaaactgaagcggcagagccagctgttgtccagcatgctgtcccggacgctgagctacaagtaccgggacctggactccaccttctccagcctgggcgccagcgatgaccccgccgagctctccacccagctgtcggcccctggtgtcctgaaggtgtttggggacagtgtctgcacaggaacccactacaagagcgtcctggccaccggcacctccagcgcccgtgagctggtgaaggaggcgctggagcggtacgccctggaccccaggcaggccggccagtacgtgctgtgtgacgtggtgggccaagccggcgatgctgggcagcggtggcaggcccggtgctttcgggtgtttggggacagtgagaagcccctcttgatccaggaattatggaaaccccgagaaggtttatcccggaggtttgagctgaggaagaggtcggacgtggaggagctggcagccaaggaggtggacaccatcacggcagggataaacgcccaggcccggaggctgcagcggagtcgcgcgaagggaaccccgaccccggccctgggggatgcccggagctctcctccaccccggttgcgccgcacagtcagtgagaccagcctgagcccagtgaacgccctgcccgctgccgcccagggccccgaggagcccggccccaacgccatgcggtactcgctgtaccagtccccgcatctgctccttctgcagggctacagccagcagcaccctggtgtatgtgctcaaccgggaccggcacacggtgggccagcggacccctccagcaagcccagcatcagcctctcagcccccgacatcctgcctctacactgcaccatccgccggcaaccgctcccggacagcggccaggccgcggggaggctggtcctggagcccatccccggggcgcacatctccgtcaacttctccgaggtggggcacaggaccgtggtgctgcaccacggggacctgctctccctggggctctactacctgctgctattcaaggaccccgcgcaggcccagcccctgcccgcccgggccttggcgcgcctccgggctgtgccgcagagctgccggctgtgcggggccgcgctcggggcccggggagccgcctcccctactcaggccgccctgccccggcgccagcagctgctcctggagtttgagcccgacctggaggacacgctgctgcagaggatcatgacgttgatcgagccggggggcgacgaccacaagctgacccccgccttcctcctgtgcctctgcatccagcactcggccacccacttccagccgggcacattcgggcagctcctgctcaagatagccaggctgatccgcgagactgtctgggagaaaaccaaagaactagcagagaagcaggcgcaactccaggagcccatctcgctggccagctgcgccatggctgatctggttccagacttgcagcccattcttttctggatgtctaactccatcgagctcctgtactttatccagcagaaatgcccactctacatgcagagcatggaggagcagctggacatcacaggctcgaaggaatcgctgttctcctgcacgctgacggccagcgaggaggccatggcggtgctggaggaggtggtgctgtacgccttccagcagtgcgtctactatgtctccaagtccctgtacatctgcctcccggcactcctggagtgcccgccattccagacggagcgccgtgagagctggtcctcggcccccgaactgcccgaggagctgcgccgcgtggtgtctgtgtaccaggcagccctggacctcctgcggcagctgcaggtgcaccccgaggtggcctcgcagatgctcgcctacctcttcttcttctccgggacactgcttctcaaccagctcctcgacaggggcccctccctgagctgcttccactggcccagaggtgtccaggcctgcgcccgcctgcagcagctcctggagtggatgcggagcgccggcttcggggcggctggagagcacttcttccagaagctctcctgcaccctcaacctgctggccacacccagggcccagctcatccagatgagctggacagccctgcgggctgcgttccccgcactgagcccagcacagctgcaccggctgctgactcactaccagctggcctcggccatgggccccatgagcacctgggagccaggggcccaggacagccccgaggccttcaggtcagaggatgttctggagtcctacgaaaaccccccacccatcgtcctgcccagcgacggcttccaggtggacttggaagccaactgcctggacgacagcatctaccagcacctgctctacgtccgccactttctgtggggtctgcggagcagagccagccccggcagccctggcaggcctggcagtggggcctcccagccagtgtgccccgagggtatgcaccacgtggtccttgacgggcacctggaggccccgagctgccccctggctcccagggaccctggcccagcagcccgggaagtggccccggagcgtactcttcccttgaggggggctccctgggcacaggccccccctggaaggcaacccggccgtgggggctcccaggctggccccccgcacacggactcgtcctgcttgctcacgcctcccagcactccacttggccctgagcctggggaccccgactggccagagtccggcggcccctgtggaaaagcgctcccagagaggcagaggaacggactcagcggcctccggggtgcagctccggaaggagactctgcagcccttgcggaggagtcccctccagccccgtccagccgcagctccagcaccgaggacttctgctacgtcttcacggtggagctggaacgaggcccctccgggctggggatgggcctgatcgacgggatgcacacgcacctgggcgcccccgggctctacatccagaccctgctcccgggcagccccgcagcggccgacgggcgcctgtcgctgggggaccgtatcctggaggtgaatggcagcagcctcctgggccttggctacctgagagctgtggacctgatccgtcatggcgggaagaagatgcggttcctggtcgcgaagtccgacgtggaaacagccaagaagatccatttccgcacgccccctctctaggggggctgcgaggacacccccacaggcccggcacccggtcccacctggtgacactgggcttcctcccgccttcgtccctgttttgtaactgaccaagttgggtcccgggtggggagcctcaccctggggacatgcctgttgataacatgcatctcagtgtaggttctatttatatggcagatgacgtgaaattgtgatgtttgttacagagcttttatgtttaaagacttcaatggagaagtacggttcaataaactatttttcccgttcttagagggtgccctgctggggtctcaactcgggcagcaggcgtgggctgctcggaggggccgcaggggctccccatggcctctgcctgccaccggcacgggagaatgcagtgacagctgtcatcaggggatcatctgaactgactctccctgcccccgtcccacccagacacagggcactgcaggaagcagctccaacagcccctcccagctgaagcagggccagacctggcagaggatgctggacttctgatcccgctgctcagcacaggccccagagaaaggtctagacacccaggcgttggaaagtggaccggcctgatggtctctgaggcgccgagcccaccctgggccctgcttcctctcccaggactcctgctccctcctgagttcctctcccctactaaagccaccagcgtggccctgataccaggctggcggccccaggcccttaatcctcaccagcgtccccctggccaccggccctaacccgggcaggaggccagcgtccctctccaccagctggctgaccatgcgcaggaccagggcagggcacttgctgcctcggggtgacagcgtgggtcgctgggcatcctcagcagctccaccaactgggtgtgggtggcttccgcgccctcctggctgtggtggaactggtggcccagggtcatctttgatagcaacagagaaaccctggggaagagggtcccggcatcagttgcagatgcacctctcactgggacagaggtctgtgcggggtccccagatcggtgtcctgggtctgtcccaggccctgggcctcgtgcagctccacgctgccccctggtgtgcgctacggcgaggtgcagcgcgtccgccccgcgccctctgccgacccgcagttctgtgtgcggctccgcattgcgcctggctcgaaacggcgaccactgccaggttcccaaaatactggataaaatatatatatatatatagtgtttgtatatatatttaagatatgtaaaatatatgaatatatataaatatataattatatatgaatatattacatattcatgtatacgtaatatattcgtatattttataaacattttttatattttattatataaaatataaatatttaatttttttttatgagacggagtctcgctctgtgacccaggctggagtgcagtggtgcaatctcagctcactgcaacctccacctcccaggttcaagcaattctcctcagtctcctgagtagctgggattacaggcgcctgccaccacgcttggctaatttagtacttttagtagagacagggtttcaccacgttggccaggctgatttcaaactgacatcaagtgatctgcccgccttgccctcccaaagtgctgggattacaggcgtgggattaccatgcctggccttgttctgtttcttttcctaggagtcccacaacgtgtgtgttagcactgccgagaatgtctcacagctctggacggtctgcatttctggacctggtgcagatcccaggatcctggactctgatttgatgccttaacggtggaagggggttgagtatattttttatgtgggaggggtgtggactgtggccagaggaaagacagtggcaaggcatttccaaaggtggccaccaacagttcctcccacaaagagaagggggcttatctcttcttccctgcaatattctccggccttctgacttgctccgaacaacaggatgcagcataagtgatattctgggaccttccaagccagactgaagggcctttggtttctattttcatgctcctggaactcagcatccatggaaagaagctcttggcatcaccccaaggaagggaggccccgtggagtcggggaggcccagctagcctctggccgctgaagcacctagctgaggtgcgggactggtgagggctgccactggctgttctggtcttgctgagcttccaggcgaatgcagtcccaccagtgatcccggggacaccacgtggagcagaacgacttcccagccaggccccagacaatctacaacactgtgaaaggagtgtctttgggacccgcatcttgaacctgtaccttgtgctgacctcctgtctcatcccgtgactaagaatgcctgtcctcctgggaatgcagccccgcaggtctcagcctcgtttttacccagcccctatttaagacgcggttgctgtggctcccacgcctctgacctgagtcatgcagtatgtggccttgggtctggattcttttgtgtccggaattggtgggttcttggtctcactgacctcaagaatgaagtcgcggaccctcgcggtgagtgttacagttctt

SEQ ID NO: 30340 - DNA, 3979 bp, Homo Sapiens
gggtaaagctcctcggcctcggcgtgctgcgcctccgcggctgccctgcgccagaattcggttccctcaaaattataaaggcaggaaagctcaagacaaagaaatccaacaaggctagtgatttcagtgatatggagaattggccaacaccaagtgaattagtgaacactggatttcagagcgtcctcagccaaggaaataaaaagccacaaaatagaaaagaaaaagaagagaaggttgaaaagagaagtaacagtgacagcaaagaaaaccgggaaacaaaattaaatggtcctggtgaaaacgtcagtgaggatgaggctcagtcaagtaatcaacgtaagagagctaataagcacaagtgggtaccactccacttagatgttgtaagatcagagagtcaagaaagacctggatcccggaacagctcaagatgtcaacctgaagcaaataaaccaacacataacaataggagaaatgatacacgaagttggaagcgagatagagaaaaaagggatgatcaagatgacgtttccagtgtgagaagtgagggtggtaatatccgaggttcctttagaggtcgaggaagaggccgaggacggggaagaggacgaggcagaggaaatcctcgattgaactttgattattcatatggttatcaagaacatggtgaaaggactgatcaaccatttcaaacagaacttaataccagtatgatgtattactatgatgatggtacaggtgtacaggtgtatcctgtggaagaagcattgcttaaagagtatattaagcgtcaaattgaatattacttcagtgtagaaaatttggaacgagacttctttcttcggggaaagatggatgaacaaggtttcttgcctatttccctgattgctggttttcagcgtgttcaggctctcactacaaaccttaatctcatcttagaggcactgaaggatagcacagaagtagaaattgtggatgagaaaatgagaaaaaagatagaaccagaaaaatggccaattccaggccctcctccacgcagtgtgccaccaacagacttctctcaactgattgattgtccagagtttgtaccaggccaagccttttgctcacatacagagtctgccccaaattctccaagaattggaagcccattgagcccaaagaaaaacagtgaaacaagtattcttcaagcaatgtctagaggtttgtctaccagtttgcctgacttggactcagaaccttggatagaagttaaaaaaagacatcagccagccccagtgaaattgagggaatcagtgtctgtccctgaagggtcattaaatcagctatgttcttcagaagaaccagaacaagaagaacttgattttttgtttgatgaagagattgaacaaataggacgaaaaaacacatttactgattggtctgataatgattcagattatgaaattgatgaccaagacttaaacaagattttgattgtaactcagacaccaccttatgtgaaaaaacatcctggaggagatcgaacaggcacccacatgtctcgggcaaaaatcacatctgaacttgctaaagttatcaatgatggcttatactattatgaacaggatctatggatggaagaagatgaaaacaaacacacagccataaagcaagaagttgagaactttaagaagctaaatctcattagtaaagagcagtttgaaaacctaacacctgaacttccttttgagccaaaccaagaagttcctgtagcaccttcacagtccaggcaaggaggtgttcaaggagtgcttcacattcccaagaaagatttgactgatgaattagctcagaagttatttgatgtttcagaaataacttcagcagcaatggttcattcgttgcctacagcagttccagaatctcctagaattcatcctacaagaacacccaaaacacctcgaacacctaggttacaagatcctaacaaaacaccaagattttatcctgttgttaaagaaccaaaagccattgatgtaaagagtccaagaaagagaaaaacaaggcatagcacaaatccccctctagagtgtcatgttggttgggtaatggattccagagaccgtgggccaggaacatcctctgtcagcacttcaaatgcttcaccttcagaaggcgcaccactagcaggaagttatggatgtactcctcattcattcccaaagttccagcatccttctcatgaacttttgaaggaaaatggctttacccaacaagtgtaccacaagtatcgtcgaagatgcctaagtgagagaaaacgcttgggaattggtcagtcccaagaaatgaataccctctttcgtttctggtcctttttcctcagagatcacttcaataaaaaaatgtatgaggaatttagacaacttgcttgggaagatgcaaaagaaaattacaggtatgggttagaatgtctgttcaggttttatagttatggactggaaaaaaaattcaggcgagaaatttttcaggatttccaagaagaaaccaaaaaagactacgaatctggtcagctgtatggactagaaaagttttgggcttatttgaaatattctcaatctaagacacagtctattgacccaaaacttcaggaatacctctgtagttttaagaggttagaagacttccgtgttgatccccctattagtgatgaatttggaagaaaaagacattcctctacttctggtgaggagagtaatcgtcatagacttccacctaattcctctacaaagccaccaaatgctgctaaacctacatctaccagtgagcttcaggtaccaataaactctcccagaaggaatatttcaccggagtccagtgacaattcacattaaacagtgctgcctgtgtcctgtggtctcaagaaatggtgaaatgcctgagaaatagactcttatgaaagttctttgtccttgaagtcaacatttacatcagtatttatttggggaaaatcttctggtgtttaattgtgataataagaaagaagaaaaagaaagaaaagtggtagcattttttctaacaagataaattctaaaaatgttttccctgatttcacaaacaaggatagtcttggtgaccttttatagagatcttctagtaatgtattttgatctcagatttctttttcaaagccatggttttacaaaaacagcattccttaaatatatttaaaaaacaatacaaggaatgcctaacatttcagctcatacttcttaaagaagatatagtatgttgtattctcttcttagagctttcttaaagaatccacaatccaattaccccactgtcaattcatatttgaacttaccaaaacaaaggaggattacgtatatgttttttaaattcaaaaaagaatatgaaattatacctttagtatccctttgagacatatagtttaaagaaaactttttttaaaacaaaagtaggaatatatagtaagattgtagttacaatgagtatatgcacttttgatgctaggttttgcttttctccccccagtcatatctcatgatttccacagttgttgtattggtgtggagttttctgaattggctataagctgattacatattagaggtttatttttatgattctatataaacgtgcacgagtaatttaaaacctgcattgggattgattggaatattgtcctaaattaattaaatcttgcactgttttgaatgcatctgctatttatacatctgcaagtgggtatgtcataaggagtcagattatctttaatttaaaatgaatacttagttttacctttttgtttattttttgtttaattttgtttttataaatgttttcaagagttatagcaaattgatttctaatttttattgctattacaactgatgtaaatggtagtttcagtttttgtgagatttaaaaaaataaagcacttattctgaaaaaaaaaaaaaaaaaaaaaaaa

SEQ ID NO: 30341 - DNA, 3663 bp, Homo Sapiens
gtggcactcacggaatctcgggtcttctgacgtgccgggcgggaagatgtcatcattgccaagaagagcgaaagtacaggtccaggatgtggtactgaaagatgaattttcttcattctctgagttatcatctgcctctgaagaagatgacaaggaagatagtgcctgggagccccaaaagaaagttcccagaagccgtaaacagccccctcccaaggaatccaaaccaaagaggatgcctcgggtgaagaagaatgccccacagatcagtgatggctcagaagtcgttgttgttaaggaggagctgaatagctctgtggctattgctgatactgctttagaagacagaaaaaataaattggatactgtacagactctgaaaacagccaagacaaaacagaaatgtgcagcgcagccacatacagttcgaaggactaaaaagctgaaagttgaagaagaaaccagcaaagccagcaacttagagggtgagagtaatagttcagagacaccatccacaagcactgtgtggggaggtacatgcaagaaggaagagaatgacgatgactttacatttggtcagtccgctttaaagaaaatcaagactgagacatatcctcaggggcagcctgtcaagtttccagcaaatgccaatagtactaaagaggaggtggaaatgaattgggacatggtacaggttttatctgagagaactaatattgaaccttgggtttgtgccaacatcattcgtctctttaatgatgataacacaattcccttcattatacgttatagaaaagagctcattaataaccttgatgctgattccttgagagaagttcagcaaaccctagaagagctacgggctgttgcaaagaaagttcatagtacaatccagaaaattaagaaggaagggaagatgtctgagtgcttgttaaaagccatgctgaattgtaaaacttttgaagaactagaacacgtgtctgctccatataaaactggaagcaaagggactaaagcccagagagcaagacagttgggcttagaaggagcagccagggcactgcttgagaaaccaggggagctcagtctgctatcgtacattaggcctgacgttaaagggctttcaacgcttcaggatattgaaataggagtgcagcatattttagcagatatgattgctaaagacaaagacacgcttgacttcattcggaacttgtgccagaagagacatgtttgtatccagtcatctctggcaaaagtatcctcaaaaaaggtaaatgagaaagatgttgataagtttctgctctaccagcatttttcctgcaacataagaaacattcaccatcatcagattctggcaattaaccgtggagaaaatttgaaggtactgacggttaaggtcaatatttctgatggagtgaaggatgaattctgtaggtggtgcatccaaaacaggtggagaccacgtagctttgcaaggccagagttaatgaagatcttatataattcactgaatgattcctttaaacgccttatttatcctcttctctgtagagaattcagagccaaactaacatcagatgcagagaaggaatcagtaatgatgtttggacggaaccttcgtcagctccttttaacaagccctgttccagggcgcaccttaatgggagtggatcctggttataaacatggttgcaaattagctataatttctcctactagtcagatacttcatactgatgtggtttacttgcattgtggacaaggcttccgagaggcggagaaaataaagacacttttgctgaatttcaactgcagcacagtagtgattggaaatggaactgcctgcagggaaacagaagcttactttgctgacctgataatgaagaattattttgcaccactggatgttgtttactgtatcgtcagtgaagcaggagcatcaatctacagtgtcggccctgaagctaacaaagagatgccagggctggaccctaatttgagaagtgcagtttccatagcaaggcgtgtacaagatccattagctgagctagtgaaaattgagccaaagcacattggagttggaatgtatcagcatgacgtatcccagactttactcaaggcaacactggacagtgttgtagaagaatgtgtcagctttgtgggagtggatattaacatctgttcagaagttttgttaaggcatattgcaggactcaatgccaacagggccaaaaatattattgaatggcgagagaaaaatggaccctttatcaaccgagaacagctgaagaaagtgaaagggctgggcccaaaatccttccaacagtgtgctggcttcatcagaatcaaccaggattatatccgaacgttttgcagtcagcaaactgaaacttcaggccaaattcaaggagttgctgtgacatcttcagcagacgttgaggtcacaaatgagaagcagggcaaaaagaagagcaaaactgcagtgaatgttttactgaagccaaatcctttggaccaaacttgtattcatccagaatcatatgacatagcaatgaggtttttgtcatccattggagggacactgtatgaggttggaaagcctgaaatgcaacaaaaaataaattcattccttgaaaaggaaggaatggagaaaattgcagaaagattgcaaacaacagtacacaccttacaggtcatcatagatggtctcagccagcctgaaagctttgactttcgaacagattttgataaacctgatttcaagagaagcatagtatgcctggaagatctgcagattgggacagttcttacaggcaaagttgagaatgccactctctttggaatttttgtggatataggagtggggaaatctgggctgattcccatacgaaatgtaacagaagcaaaactttcaaaaacaaagaagagaagaagccttggactgggccccggagaaagagtggaagtccaagtactcaacattgacatcccccgatctaggattactctggacctcattcgggtgttatgagtatcccacgaaggccagacgctgattttattttctcatttccacagattgacaaggataagtcagttgtttgtaaactctaggtagcagatgagaaataattcacttaatatcagaaatattttccaaacactttcctttattttttcttctgaataaatagaaaaccaacagtttgatttccttttcccttaaaggaaacaactaatacacattcttatatggctttatgtagtaatagttttctgactaaaattttgttttttattttttgtaatttatctttaactccttttgcattttgtataacagattgcttaacttctacttgccaacatctgccttgctggacttgtatgggattgtctccttgatttgaattgtaccgtctttgttgacacagtagggctgggcagtgtttaatccttccattttatagatttttttttaatcaggccttttggactttattcataattttgcaataatctcttttcccttgtcatgcaagccaaaaatataccagtaaaacagattctgacgtgtttgtagttatcaaatgaatggctcgaaacacttctcaaaaggatatacgtattgaccccaacaataaatgtttgtggctagtg

SEQ ID NO: 30342 - DNA, 1834 bp, Homo Sapiens
agtgctttcaaaagaattggcgtccgctgttcgcctctcctcccgggagtcttctgcctactcccagaagaggagggaagcacaggtgggtttctttagctctgcgtcggatccctgagaacttcgaagccatcctggctgaggctaatctccgctgtgcttcctctgcagtatgaagactttggagactcaaccgttagctccggactgctgtccttcagaccaggacccagttccagcccatccttctccccacgcttccccgatgaataaaaatgcggactctgaactgatgccaccgcctcccgaaaggggggatccgccccggttgtccccagatcctgtggctggctcagctgtgtcccaggagctacgggagggggacccagtttctctctccactcccctggaaacagagtttggttcccctagtgagttgagtcctcgaatcgaggagcaagaactttctgaaaatacaagccttcctgcagaagaagcaaacgggagcctttctgaagaagaagcgaacgggccagagttggggtctggaaaagccatggaagatacctctggggaacccgctgcagaggacgagggagacaccgcttggaactacagcttctcccagctgcctcgatttctcagtggttcctggtcagagttcagcacccaacctgagaacttcttgaaaggctgtaagtgggctcctgacggttcctgcatcttgaccaatagtgctgataacatcttgcgaatttataacctgcccccagagctgtaccatgagggggagcaggtggaatatgcagaaatggtccctgtccttcgaatggtggaaggtgataccatctatgattactgctggtattctctgatgtcctcagcccagccagacacctcctacgtggccagcagcagccgggagaacccgattcatatctgggacgcattcactggagagctccgggcttcctttcgcgcctacaaccacctggatgagctgacggcagcccattcgctctgcttctccccggatggctcccagctcttctgtggcttcaaccggactgtgcgtgttttttccacggcccggcctggccgagactgcgaggtccgagccacatttgcaaaaaagcagggccagagcggcatcatctcctgcatagccttcagcccagcccagcccctctatgcctgtggctcctacggccgctccctgggtctgtatgcctgggatgatggctcccctctcgccttgctgggagggcaccaagggggcatcacccacctctgctttcatcccgatggcaaccgcttcttctcaggagcccgcaaggatgctgagctcctgtgctgggatctccggcagtctggttatccactgtggtccctgggtcgagaggtgaccaccaatcagcgcatctacttcgatctggacccgaccgggcagttcctagtgagtggcagcacgagcggggctgtctctgtgtgggacacggacgggcctggcaatgatgggaagccggagcccgtgttgagttttctgccccagaaggactgcaccaatggcgtgagcctgcaccctagcctgcctctcctggccactgcctccggtcagcgtgtgtttcctgagcccacagagagtggggacgaaggagaggagctgggccttcccttgctctccacgcgccacgtccaccttgaatgtcggcttcagctctggtggtgtgggggggcgccagactccagcatccctgatgatcaccagggcgagaaagggcagggaggaacggagggaggtgtgggtgagctgatataaaaaggtttttatgat

SEQ ID NO: 30343 - DNA, 3095 bp, Homo Sapiens
gcagaaatgaggcagaagcggaaaggagatctcagccctgctgagctgatgatgctgactataggagatgttattaaacaactgattgaagcccacgagcaggggaaagacatcgatctaaataaggtgaaaaccaagacagctgccaaatatggcctttctgcccagccccgcctggtggatatcattgctgccgtccctcctcagtatcgcaaggtcttgatgcccaagttaaaggcgaaacccatcagaactgctagtgggattgctgtcgtggctgtgatgtgcaaaccccacagatgtccacacatcagttttacaggaaatatatgtgtatactgccctggtggacctgattctgattttgagtattccacccagtcttacactggctatgagccaacctccatgagagctatccgtgccagatatgaccctttcctacagacaagacaccgaatagaacagttaaaacaacttggtcatagtgtggataaagtggagtttattgtgatgggtggaacgtttatggcccttccagaagaatacagagattattttattcgaaatttacatgatgccttatcaggacatacttccaacaatatttacgaggcagtcaagtattctgagagaagcctcacaaagtgtattggaattactattgaaaccagaccagattactgcatgaagcgacatttaagtgacatgttgacctatggctgcacaaggctggagattggggtgcagagtgtttatgaagatgtggctagagacaccaacaggggccacactgtgaaggcagtgtgtgagtcatttcacctggccaaagattccggttttaaagtggtggcccatatgatgcctgacctgccaaacgtgggactagaaagagacattgaacagttcacagagttttttgagaaccctgcttttcgtcccgatgggctgaaactctatcctaccctggtgattcgtgggaccgggctttatgagctttggaaatcaggaagatataagagttactctcctagtgacctggttgaattggtggctcggatcctagccctcgtgcctccatggactcgagtgtaccgagtacagagggatattccaatgcctttagttagctcaggagtagagcatggtaacctgagagagctggcacttgcaagaatgaaagacctcggaatacagtgtcgagatgtgagaaccagagaagttggaatccaagaaattcatcacaaagtacggccataccaggttgaattggtaaggagagattatgttgcaaatggtggctgggaaacattcttgtcatacgaagacccagatcaagacattttgattggcctcctacgattacgcaagtgttcagaagaaactttccgtttcgaattgggtggaggtgtctccatagtacgagagctgcatgtgtatgggagtgtggtccctgtgagcagccgggatcctactaaatttcagcatcagggatttggcatgctgctgatggaggaagcagaaagaatagctagagaagaacatgggtctgggaaaatcgctgtgatatcaggggtcggcaccaggaattattatagaaagatcggctacagattacaaggcccgtacatggtgaagatgctgaaataatggccacaccagtccactcttctgcagtatcctccctggcagaacacggagaatcaggatttcttaaatactcaacagagaggctgagcagagcaaatggggggcttcaccctcatcccgcagctgcagagactggaaactgccttcaaggccacggctggtcatctgctgaccacaccccagatccgccctctcctgcgtgcaccccaaaaaatcacttgcgtttttgaggcttaaatcatctatccagtttctacattttgcatgaggcctgcaggtggcctattttgactcagacggtgaaaaaagcaaattaactcatttggacaccataactcatgcaataaaactgattgtcattcgaggagcaaacttaagagtagtttatttatataccctggggacagaaagtcaggttgaaacaggaaaaccaccagactctaatctcagccctttaacgacatacgcattggagcgcaagttaggaaaatgagcttttgttttcatggaaatcattctgattacagtgctgatgtttagaaataaatagcagtgtgactgggaaagaggaattgcagttgtgggggtgtgagcctggcagcagccagccagcagcctctcccaggcgggagtctaccatccgagacggcgatgacaaagagcttcattccacattctttgttatctctacttcccaccctcttggcaactacagagcagtgtgggcagccccaagtgtggtccccagagagcgtttggctttcctgtctgtctatcctgagcgggtggagtctcaggttgtgtgcccctaaatcaagatttgcttccacagaagccattacttgcaatttttttttttttttctgagaaagtctcgctgtgtcacccaggctggagtgcagtggcgcaatctcactgcatcctccgcctcccgggttcaagcgattctcccgcctcagcctcctgagtagctgggattacaggcacccgccgctgctaatttttgtatttttagtagagatgggggtttcaccatattggtcaggctggtctcgaactcctgacctcaggtgatcaacccaccttggcctccctaaatgccgggattacaggcatgagccaccgctcccagcctttgattttttaaggtggattttggttgttataaatggagaaaggtaagagttcaagttcaacccgtgtgtgaaagcaaaacaatggaaaacaggattggcttcttcaaaggctcctcttgtagaactgcctctttgaaatttcgaggtaatctactttggagactctgcctggagagggtcagttcctaagttaaaagcatcgcttaaccttggctcctgtggcattttacaaaggtttaaaggaattgattcctctgaaagggcctgaaaataaaaagtctttaacatataaaaaaaaaaaaaaaaaaa

SEQ ID NO: 30344 - DNA, 3916 bp, Homo Sapiens
agagtgctgatttagaagaatacaaatcatggctgaaaatagtgtattaacatccactactgggaggactagcttggcagactcttccatttttgattctaaagttactgagatttccaaggaaaacttacttattggatctacttcatatgtagaagaagagatgcctcagattgaaacaagagtgatattggttcaagaagctggaaaacaagaagaacttataaaagccttaaaggacattaaagtgggctttgtaaagatggagtcagtggaagaatttgaaggtttggattctccggaatttgaaaatgtatttgtagtcacggactttcaggattctgtctttaatgacctctacaaggctgattgtagagttattggaccaccagttgtattaaattgttcacaaaaaggagagcctttgccattttcatgtcgcccgttgtattgtacaagtatgatgaatctagtactatgctttactggatttaggaaaaaagaagaactagtcaggttggtgacattggtccatcacatgggtggagttattcgaaaagactttaattcaaaagttacacatttggtggcaaattgtacacaaggagaaaaattcagggttgctgtgagtctaggtactccaattatgaagccagaatggatttataaagcttgggaaaggcggaatgaacaggatttctatgcagcagttgatgactttagaaatgaatttaaagttcctccatttcaagattgtattttaagtttcctgggattttcagatgaagagaaaaccaatatggaagaaatgactgaaatgcaaggaggtaaatatttaccgcttggagatgaaagatgcactcaccttgtagttgaagagaatatagtaaaagatcttccctttgaaccttcaaagaaactttatgttgtcaagcaagagtggttctggggaagcattcaaatggatgcccgagctggagaaactatgtatttatatgaaaaggcaaatactcctgagctcaagaaatcagtgtcaatgctttctctaaatacccctaacagcaatcgcaaacgacgtcgtttaaaagaaacacttgctcagctttcaagagagacagacgtgtcaccatttccaccccgtaagcgcccatcagctgagcattccctttccatagggtcactcctagatatctccaacacaccagagtctagcattaactatggagacaccccaaagtcttgtactaagtcttctaaaagctccactccagttccttcaaagcagtcagcaaggtggcaagttgcaaaagagctttatcaaactgaaagtaattatgttaatatattggcaacaattattcagttatttcaagtaccattggaagaggaaggacaacgtggtggacctatccttgcaccagaggagattaagactatttttggtagcatcccagatatctttgatgtacacactaagataaaggatgatcttgaagaccttatagttaattgggatgagagcaaaagcattggtgacatttttctgaaatattcaaaagatttggtaaaaacctaccctccctttgtaaacttctttgaaatgagcaaggaaacaattattaaatgtgaaaaacagaaaccaagatttcatgcttttctcaagataaaccaagcaaaaccagaatgtggacggcagagccttgttgaacttcttatccgaccagtacagaggttacccagtgttgcattacttttaaatgatcttaagaagcatacagctgatgaaaatccagacaaaagcactttagaaaaagctattggatcactgaaggaagtaatgacgcatattaatgaggataagagaaaaacagaagctcaaaagcaaatttttgatgttgtttatgaagtagatggatgcccagctaatcttttatcttctcaccgaagcttagtacagcgggttgaaacaatttctctaggtgagcacccctgtgacagaggagaacaagtaactctcttcctcttcaatgattgcctagagatagcaagaaaacggcacaaggttattggcacttttaggagtcctcatggccaaacccgacccccagcttctcttaagcatattcacctaatgcctctttctcagattaagaaggtattggacataagagagacagaagattgccataatgcttttgccttgcttgtgaggccaccaacagagcaggcaaatgtgctactcagtttccagatgacatcagatgaacttccaaaagaaaactggctaaagatgctgtgtcgacatgtagctaacaccatttgtaaagcagatgctgagaatcttatttatactgctgatccagaatcctttgaagtaaatacaaaagatatggacagtacattgagtagagcatcaagagcaataaaaaagacttcaaaaaaggttacaagagcattctctttctccaaaactccaaaaagagctcttcgaagggctcttatgacatcccacggctcagtggagggaagaagtccttccagcaatgataagcatgtaatgagtcgtctttctagcacatcatcattagcaggtatcccttctccctcccttgtcagccttccttccttctttgaaaggagaagtcatacgttaagtagatctacaactcatttgatatgaagcgttaccaaaatcttaaattatagaaatgtatagacacctcatactcaaataagaaactgacttaaatggtacttgtaattagcacttggtgaaagctggaaggaagataaataacactaaactatgctatttgatttttcttcttgaaagagtaaggtttacctgttacattttcaagttaattcatgtaaaaaatgatagtgattttgatgtaatttatctcttgtttgaatctgtcattcaaaggccaataatttaagttgctatcagctgatattagtagctttgcaaccctgatagagtaaataaattttatgggcgggtgccaaatactgctgtgaatctatttgtatagtatccatgaatgaatttatggaaatagatatttgtgcagctcaatttatgcagagattaaatgacatcataatactggatgaaaacttgcatagaattctgattaaatagtgggtctgtttcacatgtgcagtttgaagtatttaaataaccactcctttcacagtttattttcttctcaagcgttttcaagatctagcatgtggattttaaaagatttgccctcattaacaagaataacatttaaaggagattgtttcaaaatatttttgcaaattgagataaggacagaaagattgagaaacattgtatattttgcaaaaacaagatgtttgtagctgtttcagagagagtacggtatatttatggtaattttatccactagcaaatcttgatttagtttgatagtgtgtggaattttattttgaaggataagaccatgggaaaattgtggtaaagactgtttgtacccttcatgaaataattctgaagttgccatcagttttactaatcttctgtgaaatgcatagatatgcgcatgttcaactttttattgtggtcttataattaaatgtaaaattgaaaattcatttgctgtttcaaagtgtgatatctttcacaatagcctttttatagtcagtaattcagaataatcaagttcatatggataaatgcatttttatttcctatttctttagggagtgctacaaatgtttgtcacttaaatttcaagtttctgttttaatagttaactgactatagattgttttctatgccatgtatgtgccacttctgagagtagtaaatgactctttgctacattttaaaagcaattgtattagtaagaactttgtaaataaatacctaaaacccaagtgt

SEQ ID NO: 30345 - DNA, 7284 bp, Homo Sapiens; identical to SEQ ID NO: 23780

SEQ ID NO: 30346 - DNA, 2684 bp, Homo Sapiens
aataacctggagccggcggcgtaggttggctctttagggcttcaccccgaagctccaccttcgctcccgtctttctggaaacaccgctttgatctcggcggtgcgggacaggtacctcccggctgctgcgggtgccctggatccagtcggctgcaccaggcgagcgagacccttccctggtggaggctcagagttccggcagggtgcatccggcctgtgtgtggcgcgaggcagggaagccggtacccgggtcctggccccagcgctgacgttttctctcccctttcttctctcttcgcggttgcggcgtcgcagacgctagtgtgagcccccatggcagatacgaccccgagcggcccccaaggggcgggcgctgtgcaattcatgatgaccaataaactggacacggcaatgtggctttctcgcttgttcacagtttactgctctgctctgtttgttctgcctcttcttgggttgcatgaagcagcaagcttttaccaacgtgctttgctggcaaatgctcttaccagtgctctgaggctgcatcaaagattaccacacttccagttaagcagagcattcctggcccaggctttgttagaggacagctgccactacctgttgtattcactcatctttgtaaattcctatccagttacaatgagtatcttcccagtcttgttattctctttgcttcatgctgccacatatacgaaaaaggtccttgacgcaaggggctcaaatagtttacctctgctgagatctgtcttggacaaattaagtgctaatcaacaaaatattctgaaattcattgcttgcaatgaaatattcctgatgcctgcgacagtttttatgctttttagtggtcaaggaagtttgctccaaccttttatatactatagatttcttacccttcgatattcgtctcgaagaaacccatattgtcggaccttatttaatgaactgaggattgttgttgaacacataataatgaaacctgcttgcccactgtttgtgagaagactttgtctccagagcattgcctttataagcagattggcaccaacagttccatagtttaacatctagttaagctacaaatatagtataagcattattagcagctggtacttctgctaggggttgtaaattccaggtgttacactgacctcaatccaatttacataatttacataaatgcatctcggtggaaaaataatcattttcttggcatgttaaatcaagcttaaaaagttttgagaaaattttactgtgctgtgttgctaatggttaaagaagtctgtatctagtgataaatataccagtttttttaaaaagatgctgttgtgcctatatcatgaagtacattaatttctcatgtaaaaaaaatagctctaaaatttgtttcaacctaattggtaacctgagtttatatctggcatgaattcattatggtgatacacatatgtgaattcagtacattttgagacagtattctaccattcagtaattttggttaatgattttaacacttctcagtgtatttaatttcaaattgtttttttaattggttttatgctgctttgttaggacagatgtgttttgaatgtaccattataagaagaattctatgtatcttaaactatgatcttctaaaattttatttccgtaagtacttctgtggccttgagtattttttaaaaggctcaactgtaagcctcttagccagttggataaatatttggggtcacctagccattgaaagcagaaagcagtagtgacacagctttcccttcaaagagccattgagaaacatttctcaaacaggaaatccttcttttactaatgtggacatatagattattcgtattatagtttgtagaactacctagttcagaatcttgactgccagttttcttggtttcttaggcttgaattttcatagacaattgcaacagtttagatgccttttgaaaggaatgtaatgaagattcagcatctgactatatgtgtgtctatcctgaaataataatggagagtatactgtagattacatgtttacccatcaaatctgacttaaaaggttaaatggaaggttttataggtaaggtaattgattgggaatggggtagggggaggagttgtgggggaataatgtgcatttcagtctcaacgcatagataaatttaggggaattggatgcattattcaactttgatttgggttgtaaaatgtgttaaatcctgttcattgaactcccatcaactcttatgaaattcatgctgatcttcattaccgttgcatgattggaaatgtttaaaacattgtacagttttagtatagagaaatgtaatggtttttgtgaccagtttctgtctgcatgtaatttggatttctcaaatacattcattagtaatttatcagtaacattagttttatttttgttcatctccttatctataaaaaggggatattcttaggataaatacatgaaaaattatacttgatagcttaactataatcagctatttttgtatttttgtaatatttgtccactaagctggagaagcagcctcatacagttgattttgtgtatgtggctagtcttattgtcactatgtaagtaatccaatggttttagaaactaaactttctagagcaataaaatgactataatgttaagt

SEQ ID NO: 30347 - DNA, 2396 bp, Homo Sapiens
aaatccttccttccccggggtagaagtccagggtgagaaattggttccgaactcaaaggaacccagtgccgggccacagccgggtcacgtggccggcggccccccatgacgtgctggctgcggggcgtcacggcgacgttcgggcgacctgccgagtggccaggctacctcagtcacctgtgtggtcgcagtgctgccatggacctgggacccatgcgcaagagttaccgcggggaccgagaggcatttgaggagactcatctgacctcccttgacccagtgaaacagtttgctgcctggtttgaggaggctgttcagtgtcctgacataggggaagccaatgccatgtgtctggctacctgcaccagagatggaaaaccctctgctcgcatgttgctgctgaagggcttcgggaaagatggcttccgcttcttcactaacttcgagagtcgaaaaggaaaagagctggactctaatccctttgcttcccttgtcttctactgggagccacttaaccgtcaggtgcgtgtggaaggccctgtgaagaaactgcctgaggaggaggctgagtgctacttccactcccgccccaagagcagccagattggggctgtggtcagccaccagagttctgtgatccctgatcgggagtatctgagaaagaaaaatgaggaactggaacagctctaccaggatcaagaggtgcccaagccaaaatcctggggtggctatgtcctgtaccctcaggtgatggagttctggcaaggtcaaaccaaccgcctgcatgaccggatagtctttcggcggggcctacccacaggagattcccctttggggcccatgacccaccgcggggaggaagactggctctatgagagacttgcaccttaactctgggacctgctggcccagagtggagctagggctaggtgtcaagagagggtgtgggattgggacccaggcccttctttctaaactcaacccatttccctccctaccccttatcttcaggactcttcagagctaatcctctaagttctctgtactcagttggttctcagttagctggttaagtggagtgtaatggtggcgtagagaatcacaaatggaaaataattccataattatttttttgaccttgcctatgattgattaggatagctccctctaggggtagcagccggtgtgactccctttctggtgacagacagggccccagcagccctgtctgttaccatgtgagtcatactggccaaagcttagtcctagcatatgcacctgagccaacctggccaatcagattgttttgtcaataatttgaaatttgaactggagagatccagaaccttgggagtcattaaagccaagtcattcatagcagccaggaaacaataggaaccaaaagcctctgcctgctgctattgcaattcccaggatctctccttccctggatccctccctcccaggtctgggctgtgcagttcctccccctgccttaaaacaccccactatctctgtaaagtctctctctctctttttttttttttacttaatctagctagaatctatttctgttgattacaacttaactaactcatttacggataggactttttttttttctttttttcttttttcttttctttttttttttgagatggagtctcactctgtcacccaggctggagtgcagtggtgtgatcttggctcactgcaacctctgcctcccaggttcaagcaattctcctgcctcagcctcccaagtagctgggactacaggcacacgccaccacacccaactaatttttgtatttttagtagagatggggtttcaccatgttggccaggattgtctccatctcttgaccttgtgatccacccacctcagcctcccaaagtgctgggattacaggcatgagccaccacacccagcgagacggggtttcattatgttggccaggctggtctccaactcctgacctaaagtgatctgcccgccttggcctcccaaagtgctgggattacagacatgagccaccacgcttggccgggatagtatatttttatagcacttcccctactgattgctgccttctctgtggctacaagggacccacagaattacagggaagttacagggaagcaggtttcatctcaatattgggagggatttcaaacaatcacacctgcctgagaaggagtgggctgtcactaggaatttttattcccagtccgtcaggaattttgtagaagggcttcatgtgctggtaccaataggacaggaagattttaatcagctttactatctatgtttttttatggaaactgtgtgtatgtatacatacattttccaaaaagaaaaattaaatgattatagagattatgtttttcagact

SEQ ID NO: 30348 - DNA, 1753 bp, Homo Sapiens
ctctgtttacgaatgtttgggcgcgaattactctaagcgcggctctcagaagggtgcaagaagaatcagtgcactgtgtttagatcaagatgtctggtaaagcaaatgcttccaagaaaaacgctcaacagttaaaaagaaatccaaagagaaaaaaggataatgaggaagttgtgttgtcagagaataaggttagaaacacagtgaaaaaaaataaaaatcatctgaaagatctgtcttctgaaggacaaacaaagcacactaacctaaaacacggaaagacagcagccagcaagagaaaaacctggcaacctctgtcaaagagtaccagagaccatttgcaaactatgatggaatcagtaataatgacaattttgagtaacagtattaaagaaaaagaagaaatacaataccatctcaacttcctgaagaaaagattgctacaacagtgtgaaactctgaaagtccctcccaaaaagatggaagatttaactaatgtatcaagtctactgaatatggaaagggcacgagacaaagctaatgaagaaggtctggcattactacaggaagaaatagataaaatggtagagaccacagagttaatgactgggaatattcagagcctaaagaacaaaattcagattctggcaagtgaggtggaagaagaagaggagagagtaaaacagatgcatcaaataaatagtagtggagtactctctcttccggaactttctcagaaaactctcaaagcacccacacttcagaaagaaattttggcgctaattccaaaccagaatgctcttctaaaggacttggatattcttcataattcatcacagatgaagagcatgtcaaccttcattgaagaagcctataagaaactggatgcatcttaaagagtgttttttttttagattgttccatattaatttaatgttcgtgaatttgtaaaactgttaacctatgattatatgtacagaggctaaggcttctgcaggatttattatctcctgatatgcactttaaaattagtctttgtagttctatcattagcatctaatgtagttctgaagactgtttttagcagttgccaaatctaggaaactaacatttatattgctgtatctataagtatttgcctaaaaccataaaataggaattgccttaaggatctaatagtttataatgcctgaatggaactcatttattggttaacagctcatatcaggagctgtgataagtaagtgtttacatacactgtctagtgcataaaaaccttagtgtttgctatcattcattctgtagccaatggcttacagtttctgtctggtcatctggaacttgaaaaatcctcaaatgccttcactcttttacctaactccctagtctttttgggaagtagttaagatatgcctgctatctttaactttggaggtagtatcaaaattttacttctttggttgtttagtgaattaatgttgaatattttctactgtcatcaaaacatattcccaaaaagtattaaaaaggaaccttagcacatttattttattaaaacaagaaaacccaaaatatataaaccttttcttattatgataataagcttatatatgtgaataagttataacctagtgtataaaaaattatttctaacaaactacagtatactgtcttgggtttttttttttttttttagtctgtaaaataaaatgactgcaattactttttaaaaaaaaaaaaaaaaaaaaaaaaa

SEQ ID NO: 30349 - DNA, 2506 bp, Homo Sapiens
agatggcgcggagcgggaggcggccctggagcgaccccggaggactaagcgggaacgggaccagctgtactacgagtgctactcggacgtttcggtccacgaggagatgatcgcggaccgcgtccgcaccgatgcctaccgcctgggtatccttcggaactgggcagcactgcgaggcaagacggtactggacgtgggcgcgggcaccggcattctgagcatcttctgtgcccaggccggggcccggcgcgtgtacgcggtagaggccagcgccatctggcaacaggcccgggaggtggtgcggttcaacgggctggaggaccgggtgcacgtcctgccgggaccagtggagactgtagagttgccggaacaggtggatgccatcgtgagcgagtggatgggctacggactcctgcacgagtccatgctgagctccgtcctccacgcgcgaaccaagtggctgaaggagggcggtcttctcctgccggcctccgccgagctcttcatagcccccatcagcgaccagatgctggaatggcgcctgggcttctggagccaggtgaagcagcactatggtgtggacatgagctgcctggagggcttcgccacgcgctgtctcatgggccactcggagatcgttgtgcagggattgtccggcgaggacgtgctggcccggccgcagcgctttgctcagctagagctctcccgcgccggcttggagcaggagctggaggccggagtgggcgggcgcttccgctgcagctgctatggctcggcgcccatgcatggctttgccatctggttccaggtgaccttccctggaggggagtcggagaaacccctggtgctgtccacctcgccttttcacccggccactcactggaaacaggcgctcctctacctgaacgagccggtgcaagtggagcaagacacggacgtttcaggagagatcacgctgctgccctcccgggacaacccccgtcgcctgcgcgtgctgctgcgctacaaagtgggagaccaggaggagaagaccaaagactttgccatggaggactgagcgttgccttttctcccagctacctcccaaagcagcctgacctgcgtgggagaggcgtagcgaggtcggaggggaaagggagatcccacgtgcaagtagggggaatatctcccccttttccctcatagcctctagggagggagagtgacttcattctccatttgaagagattcttctggtgatgtttacttaaaaagtgatccccctcaacaacggatacagcgtgcttattattgggcatttagcctcaaaagcatgtagtaccaagcacttgtatttccgtatattttgtttcgcgggggagtgagggggaagaacacggatgaaaatgtcagtttttgaagggtccatgcacatccctgacacctcacaccttatctaagtctgaagctggggagaaaggggttcatttagacttcatacatttccagtacgactttagtatctctccagagccatattttctcagtccgaattaattccccctccctaggtgcctgtaggctatggtacttcttcctcattgttttctaggtaaacttcactactggtaattaaggggaaggatatgaggaagcagtttaaatagccctgttctcattactctgaccacatacatcatagggtgctaaagttgatgaacacattaatccgttaagtaaaatggactttgtaattgtacagcatacctaagaaactcagaaggtgcatttaagagagagacctgaaagaaatagtatggatttttaaaaattcttgtctctactattataaccaaaaaatatttcttgtatgtcccataaaaatatttgtgtaattcttatgaaacaggctggtagaggaggtttctgagcctagcccaagggcttattcatcaccatgggtaaattatttaaactcacttaattaaggaaaatattttcccagctagaaaagtatactcattctcatttaaactctctcatttggagggatcatgtgagttggcctacttacaagtagtgaaagttcccttttcagttttgttttgttttgttttgtttttctctttcactcagccaaatgtgaaagttgtgaatttaggaaaatcacttgtaatgaagtgtgaatcttgttatcaaatttatttctctgatgtttccttccttatccttgtagccaataaaacattgacattctcacgttttatagatgaggtaaaaagtcttgtgtgctgtgagttataatgcttttgcctttttaatattattagttcttaagtgttacagccccttcagaatataacttcaggacaattcaaactatgcttaatgtatgattttcgagcttctgtatgctaagaaaataggtgtgaaaaactggtgttctgaaatagcctaacatttattgtaattctgaattttctgcccttttattcattgcatattaaagtattagagtataaaaact

SEQ ID NO: 30350 - DNA, 2415 bp, Homo Sapiens
aaaagacgccgggcgcggcggcgcgcggagaagtgcggcggagcggcgcctgcattagcaggtatgcaaagaagccttttcaccctgatgtccttagagataatatggatcagtccagagttctcctctgggtgaaagcagaaccctttatagtgggtgccttgcaggtcccccctccatccaagtttagtcttcactatctcaggaagatatccacctatgtgcaaatccgggccacagaaggagcttacccgcgcctctactggtctacatggaggcacatcgcttgtgggaagctgcagttggccaaggacctggcgtggctttacttcgaaatatttgatagtctttcaatgaagacacctgaggagcgcctggaatggtctgaggttctgtccaactgcatgtctgaggaggaagttgaaaagcagagaaatcagctttcagtggacacgctacagtttctgctcttcttatacattcaacagttgaacaaggtctccctaaggacatctttgattggcgaagagtggcccagtcccagaaacaaatctcagtctcctgacctgactgaaaaatctaattgtcataataagaactggaatgattacagtcaccaagcttttgtctatgatcatctgtctgatctcctcgagctgcttttagatccaaaacaactcactgcatcatttcattcaacccatagtagtctagtgtctcgagaagctgttgtggcgctcagcttccttattgaaggtacaataagtagagccaggaagatctatccacttcatgaacttgcactgtggcaaccactgcatgcagatagtggcttctcaaagatctctaagactttctctttctacaaactggaaacctggttgaggtcctgtttgactgggaatccatttggtacatcagcttgcctcaagtctggaaagaaattggcttgggctcatcaagttgaagggaccaccaaaagagctaagattgcttgtaatactcatgtggcccctaggatgcaccgactggtagtgatgagccaggtttacaagcagacactggctaagagctcagacactctggcgggggcacatgtaaagattcatcgttgcaacgaatcttttatatatctgctctctcccttacgatctgtgacaattgagaagtgcaggaatagcatctttgtcttgggccctgtagggactacacttcacctccacagttgtgacaatgttaaagtcattgctgtttgccatcgtttgtccatctcttctacaacaggttgcatctttcacgttcttacgcctacacgcccacttattctctctgggaaccagacagtaacttttgccccttttcatacacattacccaatgctagaggaccatatggccaggactggccttgctacagtgcctaactattgggataatccaatggttgtgtgcagagagaacagcgacacaagagtcttccagcttttaccaccttgtgaattctatgtatttattattccctttgaaatggaaggggacacaacagagatacccgggggtcttccatctgtatatcagaaagcactgggtcaaagagaacagaagatacagatctggcagaaaactgtgaaggaggctcatttgacaaaggatcaaaggaagcagttccaggtactggtagagaacaagttttatgaatggttgattaatacaggacatcgccaacagctggacagccttgtaccccctgcagcaggctccaaacaagcagctggataaggatcttacatgcagacactgggccctggaaatacaaggataaatggaggatggtgctcatcttgaaacttgaaactaaattgggaaggtgctattgctgcttaagagacattgggacttttctgtcttttttttttttttttttttgaggcagagtcttgttctgtcgcccaggctggcgtgcagtggcgcgatctcggctcactgcaagctctgcctcccgggttcacgccattctcctgcctcagcctcctgagtagctgggactacaggcgcccgccaccacgcccggccaattttttttgtatttttagtagagacggggtttcaccgtgttagtcaggatggtctcgatctcctgacctcgtgatccgcccatctcggcctcccaaagtgctgggattacaggcgtgagccaccgtgcccagccttctgttctatttaagaactttgatttccattccattttcatttattactgtttaggccgaattttcgctaaacttctgactttcatataaacatattgcttatagaacatcagaagactcatctttgtgatgcccaaatgaaaaagttggtgaaggtagtaccattgtatgtatgttaatattaaagcaactgagtgtagatttgc

SEQ ID NO: 30351 - DNA, 7419 bp, Homo Sapiens
atgacggccaggggtcagagccccctcgcgccgctgttggagactttggaagacccttctgcctcccatggagggcagactgacgcttacctgactctgaccagtcgtatgactggagaagaaggaaaagaagtaattacagaaattgagaaaaaacttcctcggctgtacaaagttttaaagactcacatttccagtcaaaactcggagctgagtagtgctgctctacaagccctggggttttgcttatataatcccaaaattacctcagaattatcagaggcaaatgctctagaattgctttcaaaattgaatgataccattaagaattcagacaaaaatgtacgtactagagcactttgggtgatatctaagcagacatttccctctgaagtggttggcaaaatggtatccagtataattgattcattagaaatactgtttaacaaaggagagacgcattctgctgttgttgattttgaagcattaaatgttatcgtaaggctaattgaacaagccccaattcaaatgggagaagaggcagtgaggtgggcaaaactggtcatacctttagtggttcattcagcacaaaaggtacatttgcggggagcaactgctctggagatgggaatgccattattgcttcagaaacagcaagaaatagcatctattacggagcagcttatgactactaaattaatctcagaacttcagaagctatttatgagtaaaaatgagacttacgtgttaaaattatggcctttgtttgtcaaactacttggaaggaccttgcatcgaagtgggagtttcatcaattctctcttgcaactagaagaacttggatttcgtagtggagcacccatgattaaaaagatagcttttattgcttggaagagtttaatagataattttgctttaaatccagatatactatgtagtgcaaaaagactcaagttgttaatgcagcctttgagttccatccatgtgagaacagaaactctagcattaacaaaactagaagtctggtggtatttactgatgagacttggacctcatcttcctgctaattttgaacaggtttgtgtgcctctgattcaaagtacaataagcattgattctaatgcctcacctcagggcaattcgtgtcatgtagctacatctccaggtttaaatcctatgactcctgtacacaaaggtgcttcctccccgtacggagccccgggaactccccgaatgaacctgagttcgaatttaggtggaatggccacaatcccatccattcaacttttgggacttgaaatgttgcttcatttcttgttgggtccagaagccttgagttttgctaagcaaaataaacttgtgctgagcttagagccattggaacatccgttaatcagcagcccttcctttttttccaaacatgcaaatacacttatcactgctgttcatgatagctttgttgcagttggaaaagatgcccccgatgtggttgtcagtgctatctggaaggagctaattagcttggtgaagtcagttactgaatcaggtaacaaaaaagagaaaccaggttctgaagttttgactctcttattaaagtctttggaaagcatagtaaagtctgaagtatttcctgtatcaaaaacgctggtcctcatggaaattacaattaaaggacttcctcagaaagtattaggttcaccagcatatcaggttgctaatatggatattcttaatggaactccagctttgttcttaattcaattaattttcaacaatttcttggaatgtggtgtatcagatgaaaggttctttctcagtttggaatcacttgtaggctgtgttctttctggtccaacttcaccactagctttcagtgactcagttttaaatgttattaatcaaaatgcaaagcagttggaaaataaggagcatctctggaaaatgtggagtgttatagtcaccccattaactgaattgattaatcagaccaatgaagtaaatcaaggtgatgccttagaacataattttagtgccatctatggtgcattgactttaccagtaaaccacattttttcagaacagagatttccagtggccaccatgaagactttgcttagaacttggtcagaattatatagagcatttgctcgttgtgctgctttggtggcaacagcagaagagaacttgtgctgtgaggaactttcttccaagataatgtccagtttggaagatgaaggcttttctaatttgttgttcgtggatagaattatttatattattactgtaatggttgattgcattgacttctcaccatataatattaaatatcagcccaaagttaaatcaccacagagaccttcagattggtccaaaaagaagaatgagcccctagggaaattgacttctttatttaaacttattgtgaaagtgatctattctttccacacactgagcttcaaggaagcacattctgataccctcttcactattggcaactcaatcaccggcattatttccagtgtacttgggcatatttctttgccttctatgatccgaaaaatatttgcaactttaacaagacctctggcattattttatgaaaactcaaagcttgatgaagttcctaaagtatatagttgtctgaacaacaagttagaaaagctactgggagaaattattgcttgtctgcaattcagctacaccggaacttatgatagtgaacttcttgaacaactctccccactattatgcataatatttctgcacaagaataaacagattcgaaaacagagtgctcagttctggaatgccacttttgccaaagtgatgatgttggtttatcctgaagagttaaaaccagtactaacacaagccaaacaaaaatttctgctcctgttgcctggtttggaaactgttgaaatgatggaggaatccagtggaccatattctgatggaacagaaaattcacaactaaatgtgaagataagtggcatggagagaaaatcaaatggaaaaagagattcatttttggcacaaacaaagaataaaaaagaaaatatgaaaccagcagccaaactgaaacttgaatcttcgtctttaaaagtaaagggtgaaattcttttggaagaggaaaagtctactgactttgtgtttatacctccagaaggaaaagatgcaaaggaaagaatattaactgatcatcaaaaagaagttctcaaaacaaagcggtgtgatattcctgccatgtataataatctggatgtttcccaagataccttatttactcagtatagtcaggaagagcctatggaaattcctactttaaccagaaaaccaaaggaggattctaagatgatgattacggaggagcaaatggacagtgacattgtcattcctcaagatgtcacggaagactgtggtatggctgaacatcttgaaaagtcctccctttcgaataatgagtgtggttctcttgacaaaaccagtccagaaatgtcaaacagtaataatgatgaaagaaaaaaagctttaatttcatcaaggaaaacatcaactgaatgtgcatctagtacagaaaattctttcgttgtcagcagtagttcagtttctaataccactgttgctggaactcccccataccctacaagtcggaggcaaacctttattactttggagaagtttgatggttcagaaaatagaccttttagtccatcccccttgaataatatttcatcaactgttacagtgaaaaataaccaggaaaccatgattaaaacagattttctaccaaaagcaaagcaaagagaagggactttttcaaaatctgattctgaaaaaatagtgaatggaactaagagatcaagccggagagctggtaaagctgaacaaacagggaataaaaggtctaagcccttaatgagatctgagccggagaaaaatactgaggaatctgttgaaggcattgtagtcttagaaaataacccacctggtttgcttaatcaaacagaatgtgtgtcagataatcaggttcatctttctgaatctacaatggagcatgacaatacaaagcttaaagcagcaacagtggaaaatgctgtattattggaaactaatactgtagaggagaaaaatgtagaaattaatttggaatccaaagagaatacacccccagtagtaatatcagcagatcaaatggtaaatgaggatagtcaggttcagataactccaaatcagaaaacccttagacggtcttcaaggcgacgttcagaagtagtagagtctaccactgaaagccaagataaggaaaatagtcatcaaaaaaaggaacgacgtaaggaagaagaaaaacctcttcagaagagtccattgcatataaaagatgatgtgttacctaaacaaaaactgattgctgaacaaactctacaggagaatttaattgagaaaggaagtaatttacatgagaagactcttggggaaactagtgctaatgcagaaactgaacaaaataaaaaaaaggcagaccctgagaacattaagtctgagggggatggtacccaggacattgtagataagtcctctgagaaactagtcagaggccgaacacggtatcaaactagaagagcatctcagggtttgctttccagcattgaaaactcagaatctgatagttcggaggcaaaagaagaaggttctaggaagaagagatctggaaaatggaaaaacaaaagcaatgaaagtgttgacattcaagatcaagaagagaaagtggtgaaacaggaatgtataaaagctgaaaatcagtcacatgattataaagcaacttctgaagaagatgtaagcataaaatctccgatttgcgaaaaacaagatgaaagtaatactgtaatatgtcaggattctacagtaacttcagatttgttgcaagttcctgatgatttaccaaatgtgtgtgaggaaaaaaatgaaactagcaaatatgcagaatattcctttacaagtctacctgtgccagaatcaaatctaaggactagaaatgccattaagagattacataagcgagactcttttgataattgtagtttgggagaatcctcaaaaatagggatatcagatatttcttcgctttcagaaaaaacttttcaaacacttgaatgccaacacaagagaagtaggagggtgaggagatctaaaggttgtgattgctgtggggaaaaatcacaacctcaggaaaagtcactcattgggttaaagaatacagaaaataatgacgtagagattagtgaaacaaaaaaggcagatgtgcaagcacctgtaagcccatcagaaacttctcaagctaatccatattctgaaggacaatttttagatgaacatcatagtgtgaattttcatttgggtctcaaagaggataatgatactattaatgattcattaattgtttctgaaaccaaatcaaaagaaaacactatgcaagaatctcttccttctggaatagtaaactttagagaggaaatttgtgatatggattctagtgaagcaatgtctcttgaaagccaggagtcacctaatgaaaattttaaaactgttggcccgtgtttaggagactcgaaaaatgtttcacaggaatctttggagacaaaagaagaaaaaccagaagaaaccccaaaaatggaactgagtctagagaatgttactgttgaaggaaatgcatgtaaagtaacagaatccaatctagagaaagcaaaaactatggaattgaatgtaggaaatgaagctagctttcatggacaagagagaaccaaaactggtatttctgaagaagcagcaatagaagaaaataaaagaaatgatgactctgaagcagacacagctaaactgaatgccaaagaagtagcaactgaggaatttaattcagatattagtctttctgataatactacacctgtaaaattgaatgctcaaactgagatttctgaacaaacagcagctggggaactagatggaggaaatgatgtatctgatctacactcatctgaagaaacgaataccaaaatgaaaaataatgaagaaatgatgatcggcgaggcaatggctgaaactggccatgatggtgaaacagagaatgagggcataactaccaaaacctcaaagcctgatgaagctgaaacaaacatgttgactgcagaaatggacaactttgtttgtgacacagttgaaatgagcactgaagaaggaatcattgacgctaataaaactgaaacaaatactgagtatagtaaatctgaagaaaaattagataacaatcaaatggtaatggaaagtgatattttacaggaagatcaccatacttcacagaaagtggaggaaccatcacagtgtctggcatctggaacagctatctctgagctaataatagaagacaataatgcatctcctcaaaaactaagggaacttgatccttcacttgtgtcagcaaatgacagtcctagtggcatgcagacacgctgtgtctggtctcctttggcttctccgtctacgagcattttaaagagaggactaaaaagatcccaagaagatgaaatctcatcacctgttaataaggttcgccgtgtctcctttgcagatccaatataccaagcaggattggcagatgacattgatagacggtgctctattgttaggtcccattcttccaatagttctcccataggaaaaagtgttaaaacttctcctactacacaatctaagcataataccacttcagccaaaggatttctgtccccaggatcacgtagccctaaatttaagagctcaaagaagtgtttaatttcagaaatggccaaagaatccataccatgcccaacagaaagtgtttacccaccattggtgaactgtgtggcaccagttgacatcattttacctcagattacatcaaacatgtgggcaagaggcctgggacaactcattagagctaagaatataaaaactattggtgatttgagtactcttacagcatctgaaataaaaactcttcctatccgttctccaaaagtgtccaatgtaaaaaaggctctcagaatatatcatgagcagcaggtgaagactcgtggactagaagagattccagtttttgatatttctgaaaaaacagtaaatggaatagaaaataaatctttgtcacctgatgaagaaagacttgtctcagatataattgatcctgttgctttagaaattccattatccaaaaaccttctggcacagattagtgctcttgctcttcagctggattcagaagatcttcataattattcaggaagccaactatttgaaatgcacgagaaactaagttgtatggcaaactctgtaataaaaaatctacagtcacgttggagatcaccatcccatgaaaattctatttag

SEQ ID NO: 30352 - DNA, 3389 bp, Homo Sapiens
agagcggccgcggctcccccgcacctgcggccatggatgaggagcgcgccctctacatcgtccgggccggcgaagcaggggctatcgagcgggtcctgagggattacagcgacaagcatagggctactttcaaatttgaatcaacagatgaagataaaagaaagaaactctgtgaaggcatatttaaagtccttataaaggacatcccaacaacatgtcaagtgtcctgcctggaagtactccgcattctctccagagacaaaaaggttttagttcctgtgacaactaaggaaaatatgcagatactgctgcgactagccaagctaaatgagttagatgattctttggagaaagtatcagagttcccagttattgtggagtcattaaaatgtctgtgtaatatagtgttcaacagtcagatggcacagcagctcagcctggaacttaatcttgctgcaaagctctgtaacctcctgagaaagtgcaaggaccggaaatttatcaatgacattaagtgctttgacttgcgcttgctcttccttctgtcacttttgcacaccgacatcaggtcacaattgcgctatgagctccagggactaccgctgctaacgcagatcttggaaagtgcctttagcatcaagtggaccgatgagtatgaatcggccatagaccataatggacctcctctctcacctcaggagacagactgtgccattgaggccctcaaagctctcttcaatgtgacggtagacagttggaaggtgcataaagagagtgattctcatcagttccgtgtaatggcagctgtccttcgtcattgtttactaatcgtaggtccaactgaagacaaaacagaagagctacacagcaatgcagtcaaccttttaagcaatgttccagtctcttgtttggatgttctcatttgtccgttaacccatgaagaaacagcccaagaggcaacgactctagatgaactgcccagtaataaaacagctgagaaagaaacagttttgaaaaacaataccatggtatacaatggtatgaatatggaggccattcatgttttactgaattttatggagaagagaatagacaagggaagcagctatagagagggtctaactccagttctcagcttattaaccgaatgttcccgagcccatcgaaacatccgaaaatttctcaaagatcaggttttaccaccgttgagggatgtgacaaatcgacctgaagttggctcaactgtgagaaataagctggtgcgcctcatgacacatgttgaccttggagtcaagcaaattgctgctgaattcctttttgtcctttgcaaagagagagtggatagtctgctgaaatacactggctatgggaatgctgcaggactgttggcggccaggggcctcttggctggaggaagaggagataattggtactcagaggatgaggacacagacactgaagaatacaaaaatgcaaaaccaaacattaatcttatcactggtcatttagaggaaccaatgccaaaccccatagatgaaatgacagaagaacaaaaagaatatgaagccatgaaacttgtcaacatgcttgataaactttccaggagagcagatgtgaaggacctgcaccaggatggtggttagcaacagtggcccgtgccaaagcacttaccaaagtgatgatgactaagaccctgtcattaattccatgtgtcaatactgccctgtagtacacagagcagacaagaaagaagagcccttgaaaacaagggaatgatttttgagtcgttatcaagctaagtggcaagcgggaagctgaaactcgtatagttgaacattcttggaggcttatctcttccctggccagatgcctgatcagatgagaagcccgccatgatactgtcacagtgcctagaatgggctctttatccagtagacaccactgtactttttgatacgagggcagtcttaacttgtgttaaggcctgtgtgtagcattgaagagaggagttgcttaaaccaatgggactaaaacctgatgggacaataacgcctttggaggaagcactcaaccagtactctgtcatcgaagagaccagctctgacacagactaaaagcatcacctgctcaactctcaatattgctttatcagcatcttttctctgtagctccaggggaatcttttctctaaaacatttatgcccttgctttggctagaaacacattaactggtttactcattgagaatccagcatatttaagaggtgaccctgtgttttttgtgatattgaggcattcatacagagctgcagttagacggggttacgggggctaaaagcagaaaaaaaattccatttcatcgggatggaactgaaggattttattctataaagcggccctggttgaatctggcaattctttttgccaagatccctagcagaagatttagccatgtccttcccctcacttgtgtgagtggccccttctgaatctctccagcagccagaggcacgtgagaagcagaaagagctggtaaataaagccttgggcaagcgacttcttagatcagaactcaccaaatggaagcctagcagctgctccataaacctagccccattcttcatatcaattttgtataaatatatagaaacacacacacagcctcagacttacaaactgattatactctaaaagtttgtatgtcagttagctaaaacttcagaatacatttctccctataaagagttataaatgatggtttagttctcaggcagctacaaatgcctatttattccctaatgtacctgaacactagtaccatagaactgaaccaccatctgtatcagcgcatggggagtgtgcattctgaggtctaacccggggtgccaggaacacacacatcctccatcccagcatagagaatggggactccctgagtaatgggagttctttcatggcctctgcttggggtgggggagtcagcagcacccatttgtacatataggtcattcatacatcacattttaaattggggactgtgtgtgctggtgtgtgtgtgagttctacgtttctaccatatgtgatcagtttaatagtaactttatttatttaaaaaaaagaaacacaattagttactgttaaactgataaagggtgtttatttttacttttagaattggtcctatgaagaagtagaaagtgagtcatgcactagacagtgggcctagctcatcagtggctaaagttgaaaaggggttggtttcctgtatatatatgtatgtatatacacacgtacatacattcatatatatacatatatacataatgtgcttaaccactgccttttaaaactttaaattaaataaaacattggggttgattcaatttggc

SEQ ID NO: 30353 - DNA, 993 bp, Homo Sapiens
aggccggaaccatggcagtgaccaaggagctcttacagatggacctgtacgcgctgctaggcattgaggagaaggcagcggacaaagaggtaaagaaggcgtataggcagaaggccctctcctgccacccagacaaaaatccagataatcccagagcagctgaactcttccaccagctttctcaggccttggaggtgctgaccgatgctgcagccagggctgcatatgacaaggtcaggaaagccaagaagcaagcagcagagaggacccagaaacttgatgagaaaaggaagaaagtgaagcttgacctggaggcccgggagcggcaggcccaggcccaggagagtgaggaggaagaggagagccggagcaccaggacactagagcaagagatcgaacgcctgagagaagagggttcccggcagctggaggaacagcagaggctcatccgggagcagatacgccaggagcgtgaccagaggttgagaggaaaggcagaaaatactgaaggccaaggaacccccaaactaaagctaaaatggaagtgcaagaaggaggatgagtcaaaaggtggctactccaaagacgtcctcctacggcttttgcagaagtatggtgaggttctcaacctggtgctttccagtaagaagccaggcactgctgtggtggagtttgcaaccgtcaaggcagcggagctggctgtccagaatgaagttggcctggtggataaccctctgaagatttcctggttggagggacagccccaggatgccgtgggccgcagccactcaggactgtcaaagggctcagtgctgtcagagagggactacgagagcctcgtcatgatgcgcatgcgccaggcggccgagcggcaacagctgatcgcacggatgcagcaggaagaccaggaggggccgcctacgtagccccagctccagccatccacccctcagcccttttcttcaacgtcaccaataaatttttttttttttt

SEQ ID NO: 30354 - DNA, 4284 bp, Homo Sapiens
gggagggatgtcagccttctctgaggcggcgctggagaagaagctgtcggagttgagcaactcgcagcagagcgtgcagaccttgtccctgtggctcattcaccaccgtaaacactcgcggcccatcgtcaccgtgtgggagcgggagctgcggaaagccaaaccaaacaggaagcttacttttctctacctagccaatgatgtcatacagaacagcaagaggaaggggccagagtttacaaaagattttgcaccagttatagtggaggcttttaagcatgtttcaagtgaaactgatgaaagttgtaagaagcaccttggaagagtgttatctatttgggaagaaaggtctgtttatgaaaatgatgtattagaacaacttaaacaagctctgtatggtgataagaagcctaggaagcgaacttatgaacagataaaggtggatgaaaatgaaaactgttcctctctgggatctccaagtgaaccaccacagactctagatctcgttagagcattacaagatctggaaaatgcagcctcaggtgatgcagcagttcatcagaggatagcttctttacctgttgaagtccaagaagtatctctattagataaaataacagataaagaatctggagaaaggctttccaaaatggtagaggatgcgtgtatgttgctggcagattacaatggcagattggcggcagaaatagatgatagaaagcaactcactcgaatgttagcagattttcttcgttgtcaaaaggaagcccttgcagagaaagagcataaattggaagagtacaagcgcaagctagccagagtttccctggtgcgcaaagaactcaggtcccggatccagagcctgccagacttatctcgattgcccaatgtcactggcagccacatgcacctgccctttgcgggagacatctacagtgaagattgatggaccagcctctttccaggtcccaggactttgcaagagatggagacaggttaggtggatagtcctgtagtgttatttttgtatattgttgagaaagaaacactaacaaaaggaacaacgagtaatttataaaattgtttaaaatgttggtttgtttactattttattggtaaattaacatgacttaatttgaacaaagtgatgatttgtgtgtattaataagctcacaaatagtgattattttcaaaagatctttttgtaaattttttttttgatccaaggccttgtgagaaatctcttgtttgtatttcttcaggtattttcaattgtttttctttattttcttcagcatttaatcactgtatactatgtaattcctgaaggggaagaactaattaggagttgattgagactttattatggtatagttaggacttgattgtagaagggactaaatgttccaacataatctttacccttctccccaaacaaaatatcaattctgtgtctctacatgcctttgattccttagaggtcggtaatttaacataaaacagggatgtcactttgaggggcagatgaaagtctagagaactgttccttaatagcattgtaaaagttccattccaactgccagtgtagattttaaaagtgttaaatagtgactcccttgattaaactgtttgtaattatttgagtagattaataatgaaaatactttggaaataatatacattttgacattctaccaagaggacaactttggttctggaactggtttctatttgtcaaatcagtttccttttaacataattaatccctttaacaaaaagccgtctatgggattaaaagacacgtgaaatgatacttttattattcccttgctcatataactttaaaaataatacttttagctctaatagctcaagaacacaatattcgttaatgttcagtaaagtagcctgagacattttcaatgtttccttaaggtttttgaatgactgtatatttggcagttaagcagtgccacactacagggtagatatggtaaattttatatttgtatatttacagttacaaaacaaatgtacttttaccttttatttctgaccctgtgtgttagagcagttgcatgctctcctgctgttaaaaacacattgttaagctgtggatttgtactcaataatgacttaggataaacatttattttcattcattgctttacatactagacatttttcttctctttgtaagtagattcaaattagatagtcaataaaacatcttgaaaatcccacaagccaattatgtctctctagtctgaatggcttcattgtttctttctcagtattagaaattatagttacaatgaattgcatatgaagaaggcagacatttatttttaatagccaagtagttctgcaaatagttcttttaacaatttgacctctctccaaaacagagacacatataagtagtgctcatccatgcactactaataatacatggcttattccaaagtttttagtcaacttttgggacttggggtgcattttctcacagaaagaatagtagttaggttccctaacactaccgctgatagctcacctgggaactgaatccacctaaccatgaatgtccttcacttgtaacgtggttcacaggttactaatcatagatcctgaccagcatttgtaacactgctctaactaggacacagcatgcagcagccacactcacaccctgggatgtctgtgtacctctgtccctaggtgtaggaaatggaagaaaaagattcagccaagtggggaggtgacagatgcacaattatgaaacctggttgtacatgttatgaaagtatactaagtaagttagtttttattattaatgtgaaagcaaaaacttgtatgttaacttattttcaatatcttgaccttatttatgatctgctaaagtggtgatttatccattcaaaatatatatttttttccatttaaaactaatttataaactatgtactcctgggaagatttgaaatcttttagaagtttgttgaaatattttcaccatttcagacagacttctgacttagatactgattttaatgccagtatctgctctaaatatttatgataaaaatgcattatttttttaaagagcttgatgagatttgtgataagtgatagtactcaaaaacctgaatcccacccctcgaccaatcctccacaaacttcagttgttggttaacgtattaactgaacacagacaatacagtctgatttagaagtcatcttttcagccgtgtgataattaacatggtaagccttagcagcaaacattcttcctaaaaggaagacttcattttctcaagaaatgggattagttgggggtattataataccaaattgtaaatcatgagcgttttctccactgtgcacctgaggcagatcatgcatctttgagtgcagtttggtctgacccctcaagagaaaagcatggtgccgtagggctgctatggtttgaatggatgccatcactcttttctccacatacagtgcagagagctgtctggagtcacaatctgaacagattctcgggcgctccttctctccttccatcactacagtaagtaaaaggaccatagaggggaaccaggaatctgagaatcagctgtgctcaatagccaacctccctgtccagatgcagctattttggtatctcctatcacatgcactctgaatcagggtttttctataagaaatctttcagaatcagcaaaagtggggatgacccaggcatcttgatttgcaaaatcacaaaactaagttgtcagttatcactgtagatgagcaactcatctttttaaagtatagttactgaactgattctgagaaatctttagagagaaaaaactcaacagtacaaattaactaattgggaaagttagaatgtcctttctgaatttttcattaaaaaaattacattatctgaaataacataaagctactaaactgctttgtattctattaagaaatagctcctaaggatgtagtcttgtttcatagttgttgcactatatcaaaacttaaaatgtaagcccagttcttctctgtatagaaaggaaacattgtgttacttaatgaattatttatacagagcatttgttgccaactgttgttccagccatccacacaggagtctgttctgaggtggcaatagcacatgggaagatgaactttccctgtttgtttacccgttcttctttggctgtatctgatgacagtataagatgttcttaataaagttttatgttctttttgaaaaaaaaaaaaaaaaaa

SEQ ID NO: 30355 - DNA, 3127 bp, Homo Sapiens
gatgtgttattccttctctgcatcgaaggatcaggaagtttgtgctctctgcgtggctaagtttttcacctactaggacgggggtggggtggggagaacaggtgtccttctaaaatacagcacaagctacagcctgcgtccagccataacccaggagtaacatcagaaacaggtgagaatgaccactttaactcaccgggcccgtcgcactgaaataagcaagaactctgaaaagaagatggaaagtgaggaagacagtaattgggagaaaagtccagacaatgaagattctggagactctaaggatatccgccttactcttatggaagaagtattgcttctgggactaaaagataaagaggggtacacatctttctggaatgactgcatatcatcaggcctgcgagggggcatcctgatagagctggccatgcggggtcgaatctatctggaacccccgaccatgcgtaagaagcgactactagacagaaaggtactgctaaagtcagacagcccaacaggtgatgttttactggatgaaactctgaaacacatcaaagcaactgaacccacagaaactgtccaaacatggatagagctactcactggtgagacctggaaccccttcaaattacagtaccagctgagaaatgtacgagagcgcatcgcaaagaacctagtagagaaaggtattctaaccactgagaagcagaatttcctgctatttgacatgactactcatccagtgaccaatacaacagagaaacagcgactagtgaaaaaacttcaagatagtgtactagagcggtgggtaaatgaccctcagcgtatggacaagcgaacactagcactcctggtgctagcccactcctctgatgtgctagagaatgtcttctcctctctgacagatgacaagtatgatgtggcaatgaatcgagccaaggacttagtagaactggaccctgaagtggaagggacaaagcctagtgccacagaaatgatctgggctgtgctggcagccttcaataaatcttaaagccggcaggtggatttctccttttcccctgctggctggtgactgtcagagaccccatcactgagttttgtgtgatgagatgttttcatcatttttgtttccttttcttgaatcagacttgtgatttggggagagcaacttcagggcttctccatagaccttgaccattataagcagaccttatttctccctacacttccactccataggtaaataaactgggtgaagccacacacacccaatgaacattttctcccatttggtggtttagtttcacccagtgtgcttttggataagcagaaatatctaaatgggattttgagttctccagctatagaatgtgaatgagataaaaagtgaactatctattatatttttctgagtttgttttctatcataaatacatgttttcacagcctttgtctctcagactctgctaaataatgtagcttattgaaataactgtcgctgaataaggagcaatgagaaacaaaactaatttttggagcagatggtctctggaattgcatatcctgctagtgattttctcatctttccttttctaacctaatgagaatgtcccagattcaattacctggatgtcaaagtcctagagccagaaatatattctctcatccctcttagcattctcttgctccctcattcactagggcaaatgtctaaatgaagaaaagtctctctcaacacctcgttcatgcaatcagcattagaatttgtaaggaaggaaggggggtggcatgaaaatttccattcttggggtatatgactgtcctgtttcccccaggccactttttttttttttttcttttgagacagggtcttgctcttgcccaggcaggagtacagtagtgcaatcacagctgactgcagccttgacctccagggctcaaggatcctcctgcctcagtctcccaactaagtgggactacaggcacgtgccaccatactcagcttttttttgtttgttttagacaagagtctcgctttgttgcccaggctggtcttgaattcctgggctcaagcaattcttccacctcagcctcccaaagtgctgagattactggcttgagccactgcacccacccctccagactactttaaatgtctctgctctgactgaattgaaggaattgtaagtttcagttgctgaatatatcagtatatctgaactccggatctttttatttcctatttttggcttcctacataaattaataaagtctgtctatatttaaggtttctgggagtagttttgtctatatttaatccatagatgtgctcctagtcatcagtcttatttcagtaaaaccatctttctggccaaatctctaacacgttttttacttcagtagtgagggcaatgagaagctttattaagaaagatcctatttaaagggctaatttggtattgaaagcatgctgatataaagtccagtatttgaggatataaagaggatgtgcactgagctgtgctgatgttcagcatttattatactttaatgggatagtgcttcttgaccattatagaacaacaaactgtcaaagggttaatacagatgacccagacctgacattaaatcctcttgattagaaataattaaatgaattatttattcatttctctcctctgccaaatctacttagccccacaaaaatgccccagctcagttaacatttttttgtttttcactttaggtatctcttaggcaaatagagatataaattgtaataggaaacagtctctaaatgtgaggctgaatacagcttcagtctggctctctaataggacaaaagccagtccatgtgttgtctctaactgatttagctttttcttttctttgaacaattcggcatgaattgaaaccaggttttcctgtggaaagttatagcttgattgggagatagaagttgaattgagttctttcttgcaactcttagtgtttatttttatatctcagtaagacgaggataccttcagtttgaatctgcataatgttcactgccaaactccttctcatttaatgcttatggccttcacatttctgtataataaagatcaattatcagctc

SEQ ID NO: 30356 - DNA, 4179 bp, Homo Sapiens
atggtggagccagggcaagatttactgcttgctgctttgagtgagagtggaattagtccgaatgacctctttgatattgatggtggagatgcagggcttgcaactccaatgcctaccccgtcagttcagcagtcagtgccacttagtgcattagaactaggtttggagaccgaagcagcagttcctgttaaacaagaaccagagactgtacctactccagcactattaaatgtgaggcagcctccatctactacaacatttgtgctgaatcaaataaatcatcttccacccttgggatctacaattgtaatgactaaaacaccacctgtaacaaccaacaggcaaaccatcactttaactaagtttatccagactactgcaagcacacgcccgtcagtctcagcaccaacagtacgaaatgccatgacctctgcaccttcaaaagaccaagttcagcttaaagatctactgaaaaataatagtcttaatgaactgatgaaactaaagccacctgctaatattgctcagccagtagcaacagcagctactgatgtaagcaatggtacagtaaagaaagagtcttctaataaagaaggagctagaatgtggataaacgacatgaagatgaggagtttttccccaaccatgaaggttcctgttgtaaaagaagatgatgaaccagaggaagaagatgaagaagaaatgggtcatgcagaaacctatgcagaatacatgccaataaaattaaaaattggcctacgtcatccagatgctgtagtggaaaccagctctttatccagtgttactcctcctgatgtttggtacaaaacatccatttctgaggaaaccattgataatggctggttatcagcattgcagcttgaggcaattacatatgcagcccagcaacatgaaactttcctacctaatggagatcgtgctggcttcttaataggtgatggtgccggtgtaggaaaaggaaggacgatagcaggaatcatctatgaaaattatttgttgagtagaaaacgagcattgtggtttagtgtttcaaatgacttaaagtatgatgctgaaagagatttaagggatattggagcaaaaaacattttggttcattcgttaaataagtttaaatacggaaaaatttcttccaaacataatgggagtgtgaaaaagggtgttatttttgctacttactcttcacttattggtgaaagccagtctggcggcaagtataaaactaggttaaaacaacttctgcattggtgcggtgatgacttcgatggagtgatagtgtttgatgagtgtcataaagccaaaaacttatgtcctgttggttcttcaaagccaaccaagacaggcttagcagttttagagcttcagaacaaattgccaaaagccagagttgtttatgctagtgcaactggtgcttctgaaccacgcaacatggcctatatgaaccgtcttggcatatggggtgagggtactccatttagagaattcagtgattttattcaagcagtagaacggagaggagttggtgccatggaaatagttgctatggatatgaagcttagaggaatgtacattgctcgacaactgagctttactggagtgaccttcaaaattgaggaagttcttctttctcagagctacgttaaaatgtataacaaagctgtcaagctgtgggtcattgccagagagcggtttcagcaagctgcagatctgattgatgctgagcaacgaatgaagaagtccatgtggggtcagttctggtctgctcaccagaggttcttcaaatacttatgcatagcatccaaagttaaaagggttgtgcaactagctcgagaggaaatcaagaatggaaaatgtgttgtaattggtctgcagtctacaggagaagctagaacattagaagctttggaagagggcgggggagaattgaatgattttgtttcaactgccaaaggtgtgttgcagtcactcattgaaaaacattttcctgctccagacaggaaaaaactttatagtttactaggaatcgatttgacagctccaagtaacaacagttcgccaagagatagtccttgtaaagaaaataaaataaagaagcggaaaggtgaagaaataactcgagaagccaaaaaagcacgaaaagtaggtggccttactggtagcagttctgacgacagtggaagtgaatctgatgcctctgataatgaagaaagtgactatgagagctctaaaaacatgagttctggagatgatgacgatttcaacccatttttagatgagtctaatgaggatgatgaaagtgatccctggttaattagaaaagaccacaagaaaaacaaagagaaaaaaaagaagaaaagtatagatccagattctattcaaagtgccttattagcatcaggtcttggatcaaaacgacctagtttttcatctacaccagttatctcacctgctcctaacagtacaccagctaacagtaacaccaacagtaacagtagccttataacaagtcaggatgctgtggaaagggctcagcagatgaagaaagacctgcttgataagctagaaaaattagctgaagacctcccccctaataccctggatgaacttatcgatgaacttggtggccctgagaacgttgctgagatgactggccgcaagggacgggttgtgagcaatgatgatggaagcatatcttatgagtcaagatctgaacttgatgtgcctgtggaaatactaaacatcacagaaaaacaacgatttatggatggagataagaatattgctatcatctcagaagctgccagctcgggtatttcattacaagcagataggagagctaaaaatcaaaggcgaagagttcatatgactttagaattaccttggagcgctgatagagcaattcaacagttcggacgtactcatagatcaaaccaagttactgctcctgagtatgtctttctgatatctgaactggcaggagaacaaagatttgcatctattgttgctaaaagacttgagagtttgggggcacttacacatggcgatagaagggcaacagaatctagagatctgagcaggttcaactttgataataagtatggaagaaatgctttagaaattgtcatgaaatccattgtaaacttggattctcctatggtatcaccacctccagactatcctggagaattttttaaagatgttcgacaaggactgataggcgttggcctgataaatgtagaagatcgctcgggaattcttactctcgataaagattataacaacataggaaaattcttaaatagaattttaggcatggaggtgcatcagcagaatgcgttatttcagtattttgcggacacacttactgcagttgttcaaaatgccaaaaaaaatggaagatatgatatgggaatcttagatcttggttctggagatgaaaaagtgcggaaaagtgatgttaaaaagtttctgactccaggatattcaacctctggccacgtagaattatacacaattagtgtagagaggggaatgtcatgggaggaagctaccaagatttgggctgagctgacaggaccagacgatggcttttacttgtcattgcaaataaggaacaacaagaaaactgccatcttagttaaagaagtgaatcctaaaaagaaacttttcttagtttatcgaccaaatactgggaagcagctcaaattagaaatttatgctgatctaaaaaagaaatataagaaggtcgtctcagatgatgccctgatgcactggttagatcagtataattcatctgcagatacttgtactcatgcttattggcgcggcaattgcaaaaaagcaagcttggggctagtttgtgaaataggtcttcgttgccgtacatattatgtattatgtggttcagtgctgagtgtctggacaaaagttgagggtgttctagcatctgtcagtggcacaaacgtgaagatgcagatcgtgcggctaagaacggaagatgggcaacggattgtaggtttgatcattccggcaaattgtgtgtctcctcttgtaaatctcctatcaacttcagaccagtctcaacagcttgcggtccaacagaaacagctatggcaacagcatcaccctcagagcatcaccaacttgagcaacgcatga

SEQ ID NO: 30357 - DNA, 3457 bp, Homo Sapiens
caactcctccaaggctcaaaatttcttcagaatctagttcctcatagatcttatgtttcaaccatgatcttggaagtagtgaagaatagcgttcatagctgggaccatgttactcagggcctcgtagaacttggtttcattttgatggattcatatgggccaaagaaggttcttgatggaaaaactattgaaaccagcccaagtctttctagaatgccaaaccagcatgcatgtaagctcggagctaatatcctgttggaaacttttaagatccatgagatgatcagacaagaaattttggagcaggtcctcaacagggttgttaccagagcatcttctcccatcagtcatttcttagacctgctttcaaatatcgtcatgtatgcacccttagttcttcaaagttgttcttctaaagtcacagaagcttttgactatttgtcctttctgccccttcagactgtacaaaggctgcttaaggcagtgcagccccttctcaaagtcagcatgtcaatgagagactgcttgatacttgtccttcggaaagctatgtttgccaaccagcttgatgcccgaaaatctgcagttgctgggtttttgctgctcctgaagaactttaaagttttaggcagcctgtcatcctctcagtgcagtcagtctctcagtgtcagtcaggttcatgtggatgttcacagccattacaattctgtcgccaatgaaactttttgccttgagatcatggatagtttgaggagatgcttaagccagcaagctgatgttcgactcatgctttatgaggggttttatgatgttcttcgaaggaactctcagctggctaattcagtcatgcaaactctgctctcacagttaaaacagttctatgagccaaaacctgatctgctgcctcctctgaaattagaagcttgtattctgacccaaggagataagatctctctacaagaaccactggattatctgctgtgttgtattcagcattgtttggcctggtataagaatacagtcatacccttacagcagggagaggaggaagaggaggaggaagaggcattctacgaagacctagatgatatattggagtccattactaatagaatgattaagagtgagctggaagactttgaactggataaatcagcagatttttctcagagcaccagtattggcataaaaaataatatctctgcttttcttgtgatgggagtttgtgaggttttaatagaatacaatttctccataagtagtttcagtaagaataggtttgaggacatcctgagcttatttatgtgttacaaaaaactctcagacattcttaatgaaaaagcgggtaaagccaaaactaaaatggccaacaagacaagtgatagtcttttgtccatgaaatttgtgtccagtcttctcactgctcttttcagagtcttgctatggagatacacttcaattcctacttcagtggaagagtcgggaaagaaagagaaaggaaagagcatctcactgctgtgcttggagggtttacagaaaatattcagtgctgtgcaacagttctatcagcccaagattcagcagtttctcagagctctggatgtcacagataaggaaggagaagagagagaagatgcagatgtcagtgtcactcagagaacagcattccagatccggcaatttcagaggtccttgttgaatttacttagcagtcaagaggaagattttaatagcaaagaagccctcctgctagtcacggttcttaccagtttgtccaagttactggagccctcctctcctcagtttgtgcagatgttatcctggacatcaaagatttgcaaggaaaacagccgggaggatgccttgttttgcaagagcttgatgaacttgctcttcagcctgcatgtttcgtataagagtcctgtcattctgctgcgtgacttgtcccaggatatccacgggcatctgggagatatagaccaggatgtagaggtggagaaaacaaaccactttgcaatagtgaatttgagaacggctgcccccactgtctgtttacttgttctgagtcaggccgagaaggttctagaagaagtggactggctaatcaccaagcttaagggacaagtgagccaagaaaccttatcagaagaggcctcttctcaggcaaccctaccaaatcagcctgttgagaaagctatcatcatgcaactgggaactctgcttacatttttccacgagctggtgcagacagctctgccatcaggcagctgtgtggacaccttgttaaaggacttgtgcaaaatgtacaccacacttacagcccttgtcagatattatctccaggtgtgtcagagctccggaggaattccaaaaaatatggaaaagctggtgaagctgtctggttctcatctgacccccctgtgttattctttcatttcttacgtacagaataagagtaagagcctgaactatacgggagagaaaaaggagaaacctgctgccgttgccacagccatggccagagttcttcgggaaaccaagccaatccctaacctcatctttgccatagaacagtatgaaaaatttctcatccacctttctaagaagtccaaggtgaacctgatgcagcacatgaagctcagcacctcacgagacttcaagatcaaaggaaacatcctagacatggttcttcgagaggatggcgaagatgaaaatgaagagggcactgcatcagagcatgggggacagaacaaagaaccagccaagaagaaaaggaaaaaataaatgaaatgcctgagttaatgtgaactttggggcttctgcttcatttttacccaacaagcaacaatgccccttgtcctgtagtccacaccgatgttggcatcttggttctgaacccactgaattcaactgcaccttcagttagaaggaatcttcttggcaggtcctgctactgaaaaatggctggccttaggcaagcccttttgcaaaaagcacagctgaaagcctgagtttgggagcctgcacccaccccgatgaagctccacgggagcaaatacagagcctccaggcagtgctatggtccaggctggcttcgtttttccaaggagcctttggtgagttcaattatctggtaaatatccagcgcttcacctgaaagatagtgcaaattggttaggatgccacctcaagaactgtaactgagagctcagaagtgagcaaaggagcttaatgctaaggtcaaaaggagagtgaaaggttgagaacaattgccacgaacggtaatgttacatgttaggagggtctgttttctttttatataagtgtgtcttagatatattttaaatagaaaataagctttctgatttacttgtttggtatttaaagcacagtttgtttttctgtcacctatagagtgcaagaatgcactctatagaataaattctctttaaacatt

SEQ ID NO: 30358 - DNA, 3598 bp, Homo Sapiens
aaaagggcagctccgggggaaagagggtggcgtcccggggaagcccgcagccgccgccgatgtcgctgggactcggaagtgccgaaagaggggtgttgggaactcgcggcgcgcgtgaacgttgccgtcgccgccgcccgggacagcccggagaaactctcagcgtaggcatcgggaaccttcgtgccaaggagccatgccgccccgatgggaactggcactttacctacttgcctcactaggcttccacttctattccttctatgaagtttacaaagtctccagagaacacgaagaggagctggaccaggaatttgagctggagactgacactttatttggaggattaaagaaggatgcgaccgactttgagtggagcttctggatggaatgggggaagcagtggctggtgtggcttctccttggccacatggtagtgtctcaaatggccacactgctggcaagaaagcacagaccctggattctcatgctctatgggatgtgggcctgctggtgtgtgctggggacccctggtgtggctatggttttgctccataccaccatctctttctgcgtggcccagttccggtctcagctcctgacgtggctctgttctctcctcctcctctccacactgaggctgcagggtgtggaagaagttaagagaaggtggtacaagacagaaaacgagtactacctgctgcagttcacgctgaccgttcgctgcctctactacaccagcttcagcctggagctctgctggcagcagctgcctgctgcatcgacctcctactcctttccctggatgctggcctatgtcttttattatccagtcttacacaatgggcccatcctcagcttctcggagttcatcaaacagatgcagcagcaggagcatgactccctgaaggccagcctgtgtgtcctggccctggggctgggccgccttctttgctggtggtggctggccgagctgatggctcacctgatgtacatgcatgccatctacagcagcatccccctcctggagactgtctcttgttggaccttaggaggactggcgttagcccaggtgctctttttctacgtgaagtacttggtgctctttggcgtgcctgctctgctcatgcgcctggatggactcactccacccgccctcccccgctgcgtgagcaccatgttcagtttcaccgggatgtggaggtattttgatgttggactgcataatttcttaatcaggtatgtgtacattccagtgggcgggtcccagcatggcctgctggggacactgttttccacggcgatgacatttgcatttgtgagctactggcatggcggctacgactacctctggtgctgggcagcgctcaactggctgggagtcactgtggagaatggagtccggaggctggtggagactccctgcatccaggacagtctggcccgatacttctccccacaagctcgccgtcgattccacgctgcccttgcttcttgttccacctcgatgctgatcctgtccaacctggtatttcttgggggcgatgaggttgggaaaacctactggaataggatcttcatacaaggctggccttgggtgaccctctctgtcctgggattcctgtactgctactcccacgtgggcattgcctgggcccagacctacgccacggactaatgctgttgggcccaggccagtcattgttgctggcctccaaggcaaatagtgcttcaccctgacctctcactccaggacagcctctaagggatttgatctgctcatcttcagttgaatgccctcactccaagactggatgctggatctcatagaaaattcacagccagacaatcttctaatctggagtctttgagatcttctaccccaactcatcattttcctattgaggaaacgggtccagggcagtcgtgtgtcttacccagctacacagggtgacattttggtctagaacctagtctcatgagccctttgcattctttccccttaagcaagaatagaatgtagtggaaatttattgattgagacacagaaatcctgattagtgataggcctgtcttctgggcaatatttctaaaatatttgagtgacattgatgtttaagtgacctccttcatcacatcctgcagtatctccagaagcagcactagggtttgagtttcatgcttcagcccctctgtaggaatgagaccaagccacagctgtcttttgaattacgtagtcgaagaagacggtagcagccctgtagcattctaaggcatctatacccaaggagtcctgtgatttgagcttcagcagggtgatctacatttgggtgcttgtttctgagatttgcagagaagtataacatggtagttcctctaccttacagttaatcgtttcttaataaagaagcagaatttagaaaccacaggatagtgtacccacagatgggtgttatcaaggccagtcatgaggatggtgtcctggagtcttgtccaccctctccatacaagtctcaaaagtcatcctcctactcagtgattcacgtttagtggtttatattattaaggtttgattcaaacagagccttttctgtcctgtagataatctacatgtttgtagaattattttgaatatgtttgaggaaaatgtttaaaatctaaatatactcacataacttgattattcactcctctgaaaagatgctggataggctaccaaagttcccaagtggtagataattcagaagacttgtttgaatttggatttttttttttttttttggagtggggaagggtataaaggaggcttaaaatttgaatccataatatatctaattacaggagaatttacaacatctcaagtacgtaaattaagttgtcattgagtgaaaggttcacttggacctagtgctgcctcctgtttattacatagcatggcccttatgtcttgagttgaggttatcatctcaatgaggcttaagctcctagagtacaggaccattttgttgattgtctttcttcatagcttctctgcttggcaaagagatgggagggggccagatactgactacctggggtaggcacattgtgtgttaaagcaagacagaggccagagaggggcaggtagacctgcatagcagcagcctcagcagctgtcttggtaaaggagagagagagacatggggccagtaattccggggtgctcagaagttttaggagggaatgagcctcagggaggagtgagcacctaaatgaacgcagtaaaccttcatggaccaacagtgattgaggatttgtgggcagccagagggagtctgactgaagtttacttggaaagaaagggcttgctaagaaaaaagggagtaaaaatgatgatagggaagtgtctaatgtatgtgcacatataagtaatacaaaagttttgagctcttccaagtataccatttatatacaaacaaataggtttattcattcattaaactactttggaagcgtcagtggatatatttgaaagtggtaatcctgaatctcttttaaactattatatgattcataatggttctcaggaattaataaatgattactgtgtttagctctg

SEQ ID NO: 30359 - DNA, 3807 bp, Homo Sapiens; identical to SEQ ID NO: 26015

SEQ ID NO: 30360 - DNA, 3468 bp, Homo Sapiens
acttctggggcagccgtgagcagcgggcacacgggcagccacgaaagcagcagcgagggtggtgcaaacacctcataactacaccgaatccagtagcgcctggcgcccccggcgcgcaaggccgcctctactccgcctcatctttgtcccaagtcctttcacagcctgccttcctcaaacggcccgatgcgcccccgtctttgccggagtaagcagaccgccagcagccggcccgcaggtcagtcgaccctctctggatgcaggtcgccgggaaaacccggagcggagcatccctcgggccgggaaacgccctcggcgcgcacccactggcgcgcatgctcagtccgcgcggcggctgcgagtaggaagctccgcgcggcggcgggggcggcgacggcgactggcgggtgggagtggaggcaccggctggcgggcgggggtacagggacggggcaggggctcccgctccaggttccttgaagcacttccgaccgcgaagcccggcgcgagaagcgagctaacccaagagccaacaacgagcgcggagagggcagcggactgagcggagccgccggccagagcgggctcggagcccgggtctccgccgctcgggacccggctaggcggcggcgggggcggcgatgttccactgcatccccctgtggcggtgcaaccgtcatgtggagagcatcgacaagcgccactgctcgctggtctacgtccccgaggagatctaccgctatgcccggagcctggaggagctgctgctggacgccaaccagctccgcgagctgcccgagcaatttttccagctagtcaaattacgaaagcttggacttagtgataatgaaattcagcggctccctccagaaatagcaaacttcatgcagctggtggaactagatgtgtctcgaaatgagattcctgaaattccagaaagcatttcattctgtaaagcactgcaggtagctgacttcagcggaaacccactgactaggttgccagaaagctttcctgaattacagaatttaacatgtctttctgtaaatgacatctcactacagtctctacctgaaaatattggcaatctttataacctggcttcactggaactgagagagaatcttcttacatatcttcctgactctcttacccagctgcgaagactagaagaacttgatttaggaaacaatgaaatatataatttgaatcaattggagccctcttacatctaaaagatctctggttggatggaaatcaactgtcagaattacctcaggaaataggaaatctgaagaacctgctgtgtttagatgtctctgaaaacaggttggaaagacttcctgaagaaatcagtggcctgacttcattaacggatttagtcatttcccagaacttattagaaacgattccggatggcattggaaaactaaagaaactgtcaatcttgaaggtggatcagaatagactcacacagttgcctgaagcagttggggaatgtgaaagtctcactgagttagttcttacagaaaatcagctcctgaccctgcctaaaagcattggaaaactaaagaagttgagcaacttgaatgcagacagaaataaattagtgtccttaccaaaagagatcggcgggtgctgcagcctcactgtgttctgtgtacgtgacaacagactaactcggatacctgcagaggtgtcacaggcaacagaacttcatgtcctggatgtggcagggaacaggttgctgcatctacctttatccctgactgccttgaagttgaaggctctgtggctatctgacaaccagtcccagcccctgcttacattccagacagacacagactacaccacaggagagaagattttaacctgtgtcttacttcctcagctgccttctgaacctacttgtcaagagaatctgcctcgctgtggtgcactggagaacttggtaaatgatgtctctgatgaagcctggaacgagcgtgctgtcaacagagtcagtgcgatccgatttgtggaggatgagaaagatgaagaagacaatgagacgagaacacttctaaggcgagccactccacacccaggggagttaaagcacatgaaaaagacagtggagaatttacggaatgacatgaatgctgctaaaggactggactcaaacaaaaacgaggtcaatcatgccattgaccgagtgaccacttctgtgtagagtttcacctccaagttttacctcctgtgtcttcctctgctgtcgagacgttcctgtctgcttcccgggagcctcacgtgctccttgtcctaaccagcccccgcgcgccatcttcccgtggagtgtggggaagctgctgtctcccaggaagtgccttactcatcccgcaaccagtcagcgcaccagtggtctcccggtgtgattttttttttttttaatttcagttgtttgtaataagtagaatacactactgtaaacatacgacctttgtttttgtcttatgttggggtaaaggaaagcaggaaggggaatttttatcctcctcccttccgtaaagtgctgggatattttgaatcccccaagttcccttggacctactgatgagagatagttttatgtatggggaaaaatggatactttttaaaccttttttggcagctcagatggtgtaaattttaaaattttgtataggtatttcataacaaaaatatgtatttcttttttgttattttatcttgaaaacggtacatattttagtatttgtgcagaaaaacaagtcctaaagtatttgtttttatttgtaccatccacttgtgccttactgtatcctgtgtcatgtccaatcagttgtaaacaatggcatctttgaacagtgtgatgagaataggaatgtggtgttttaaagcagtgttgcattttaatcagtaatctacctggtggatttgtttttaaccaaaaagatgaattatcaatgatttgtaattatatcggttgattttttttgaaaagatgaaccaaaggatttgactgctaatattttattccttacactttttttctgaataagtctctcataatgagtgcagtgtcagactgtgcctactctgatggtatgtgccatttgtaaaataaaatagagcagaaaaacacaaaaagagaacactggttcagacattcagtgggcaagtaaattatggactgcaaaataatgatttttattcaagaaagctttaaaagttttatatccagatatacaaccacaataaagcaaaataacctactatcaaaatagaaatgttgctatctttataagtgcaatttaatttgtaaatagagtttgaatcaaagtatcacaaaatactgcttcaagatttaattttaaatctgctaatttaagggatattgggaaaagttttggtgtgtttctgttgatttcttttttgtatgctgtgataaaagagaaatgaaaagtgaaa

SEQ ID NO: 30361 - DNA, 3744 bp, Homo Sapiens
atgtcactttttttaagggtagtatttagtttcacaatgtttggggacctgtttgaagaggagtattccactgtgtctaataatcagtatggaaaagggaagaaattaaagactaaagctttggagccacctgctcctagagaattcaccaatttaagcggaatcagaaatcagggtggaacctgttacctcaattcccttcttcagactcttcatttcacacctgaattcagagaagctctattttctcttggcccagaagagcttggtttgtttgaagataaggataaacccgatgcaaaggttcgaatcatccctttacagttacagcgcttgtttgctcagcttctgctcttagaccaggaagctgcatccacagcagacctcactgacagctttgggtggaccagtaatgaggaaatgaggcaacatgatgtgcaggaactgaatcgaatcctcttcagcgctttggaaacttctttagttgggacctccggtcatgacctcatctatcgtctgtaccatggaaccattgttaaccagattgtttgtaaagaatgtaagaacgttagcgagaggcaggaagacttcttagatctaacagtagcagtcaaaaatgtatccggtttggaagatgctctctggaacatgtatgtagaagaggaagtttttgattgtgacaacttgtaccactgtggaacttgtgacaggctggttaaagcagcaaagtcggccaaattacgtaagctgcctccttttcttactgtttcattactaagatttaattttgattttgtgaaatgcgaacgctacaaggaaactagctgttatacattccctctccggattaatctcaagcccttttgtgaacagagtgaattggatgacttagaatatatatatgacctcttctcagttattatacacaaaggtggctgctacggaggccattaccatgtatatattaaagatgttgatcatttgggaaactggcagtttcaagaggaaaaaagtaaaccagatgtgaatctgaaagatctccagagtgaagaagagattgatcatccactgatgattctaaaagcaatcttattagaggagaataatctaattcctgttgatcagctgggccagaaacttttgaaaaagataggaatatcttggaacaagaagtacagaaaacagcatggaccattgcggaagttcttacagctccattctcagatatttctactcagttcagatgaaagtacagttcgtctcttgaagaatagttctctccaggctgagtctgatttccaaaggaatgaccagcaaattttcaagatgcttcctccagaatccccaggtttaaacaatagcatctcctgtccccactggtttgatataaatgattctaaagtccagccaatcagggaaaaggatattgaacagcaatttcagggtaaagaaagtgcctacatgttgttttatcggaaatcccagttgcagagaccccctgaagctcgagctaatccaagatatggggttccatgtcatttactgaatgaaatggatgcagctaacattgaactgcaaaccaaaagggcagaatgtgattctgcaaacaatacttttgaattgcatcttcacctgggccctcagtatcatttcttcaatggggctctgcacccagtagtctctcaaacagaaagcgtgtgggatttgacctttgataaaagaaaaactttaggagatctccggcagtcaatatttcagctgttagaattttgggaaggagacatggttcttagtgttgcaaagcttgtaccagcaggacttcacatttaccagtcacttggcggggatgaactgacactgtgtgaaactgaaattgctgatggggaagacatctttgtgtggaatggggtggaggttggtggagtccacattcaaactggtattgactgcgaacctctacttttaaatgttcttcatctagacacaagcagtgatggagaaaagtgttgtcaggtgatagaatctccacatgtctttccagctaatgcagaagtgggcactgtcctcacagccttagcaatcccagcaggtgtcatcttcatcaacagtgctggatgtccaggtggggagggttggacggccatccccaaggaagacatgaggaagacgttcagggagcaagggctcagaaatggaagctcaattttaattcaggattctcatgatgataacagcttgttgaccaaggaagagaaatgggtcactagtatgaatgagattgactggctccacgttaaaaatttatgccagttagaatctgaagagaagcaagttaaaatatcagcaactgttaacacaatggtgtttgatattcgaattaaagccataaaggaattaaaattaatgaaggaactagctgacaacagctgtttgagacctattgatagaaatgggaagcttctttgtccagtgccggacagctatactttgaaggaagcagaattgaagatgggaagttcattgggactgtgtcttggaaaagcaccaagttcgtctcagttgttcctgttttttgcaatggggagtgacgttcaacctgggacagaaatggaaatcgtagtagaagaaacaatatctgtgagagattgtttaaagttaatgctgaagaaatctggcctacaaggagatgcctggcatttacgaaaaatggattggtgctatgaagctggagagcctttatgtgaagaagatgcaacactgaaagaacttctgatatgttctggagatactttgcttttaattgaaggacaacttcctcctctgggtttcctgaaggtgcccatctggtggtaccagcttcagggtccctcaggacactgggagagtcatcaggaccagaccaactgtacttcgtcttggggcagagtttggagagccacttccagccaaggtgcttctgggaacgagcctgcgcaagtttctctcctctacttgggagacatagagatctcagaagatgccacgctggcggagctgaagtctcaggccatgaccttgcctcctttcctggagttcggtgtcccgtccccagcccacctcagagcctggacggtggagaggaagcgcccaggcaggcttttacgaactgaccggcagccactcagggaatataaactaggacggagaattgagatctgcttagagccccttcagaaaggcgaaaacttgggcccccaggacgtgctgctgaggacacaggtgcgcatccctggtgagaggacctatgcccctgccctggacctggtgtggaacgcggcccagggtgggactgccggctccctgaggcagagagttgccgatttctatcgtcttcccgtggagaagattgaaattgccaaatactttcccgaaaagttcgagtggcttccgatatctagctggaaccaacaaataaccaagaggaaaaagaaaaaaaaacaagattatttgcaaggggcaccgtattacttgaaagacggagatactattggtgttaagaatctcctgattgacgacgatgatgatttcagtacaatcagagatgacactggaaaagaaaagcagaaacaacgggccctggggagaaggaaaagccaagaagccctccatgagcagagcagctacatcctctccagtgcagagacgcctgcccggccccgagccccggaaacttctctctccatccacgtggggagcttcagataa

SEQ ID NO: 30362 - DNA, 2543 bp, Homo Sapiens
gaggcgggcaaggcgggcgccgaggtttgcaaaggctcgcagcggccagaaacccggctccgagcggcggcggcccggcttccgctgcccgtgagctaaggacggtccgctccctctagccagctccgaatcctgatccaggcgggggccaggggcccctcgcctcccctctgaggaccgaagatgagcttcctcttcagcagccgctcttctaaaacattcaaaccaaagaagaatatccctgaaggatctcatcagtatgaactcttaaaacatgcagaagcaactctaggaagtgggaatctgagacaagctgttatgttgcctgagggagaggatctcaatgaatggattgctgtgaacactgtggatttctttaaccagatcaacatgttatatggaactattacagaattctgcactgaagcaagctgtccagtcatgtctgcaggtccgagatatgaatatcactgggcagatggtactaatattaaaaagccaatcaaatgttctgcaccaaaatacattgactatttgatgacttgggttcaagatcagcttgatgatgaaactctttttccttctaagattggtgtcccatttcccaaaaactttatgtctgtggcaaagactattctaaagcgtctgttcagggtttatgcccatatttatcaccagcactttgattctgtgatgcagctgcaagagggggcccacctcaacacctcctttaagcactttattttctttgttcaggagtttaatctgattgataggcgtgagctggcacctcttcaagaattaatagagaaacttggatcaaaagacagataaatgtttcttctagaacacagttacccccttgcttcatctattgctagaactatctcattgctatctgttatagactagtgatacaaactttaagaaaacaggataaaaagatacccattgcctgtgtctactgataaaattatcccaaaggtaggttggtgtgatagtttccgagtaagaccttaaggacacagccaaatcttaagtactgtgtgaccactcttgttgttatcacatagtcatacttggttgtaatatgtgatggttaacctgtagcttataaatttacttattattcttttactcatttactcagtcatttctttacaagaaaatgattgaatctgttttaggtgacagcacaatggacattaagaatttccatcaataatttatgaataagtttccagaacaaatttcctaataacacaatcagattggttttattcttttattttacgaataaaaaatgtatttttcagtatccttgagatttagaacatctgtgtcacttcagataacattttagtttcaagtttgtatggtagtgtttttatagataagatacgtctattttttcaaaattcatgattgcagtttaaatcatcatatgacgtgtgggtgggagcaaccaaagttatttttacagggactttattttttgatctttatttgagattgttttcatatctatctaaattattaggagtgtgtgtatcagaagtaattttttaatgtcttctaaggatggtcttccaggcttttaaactgaaaagcttaattcagatagtagcttttggctgagaaaaggaatccaaaatattaataaatttagatctcaaaaccactatttttattatttcattatttttcagaggccttaaaattctggataagagaatggaggaaaatactcagagtacttgattattttatttccttttattaaaaaattacttctatgtttttattgtctcttgagccttagttaagagtagtgtagaaatgcatgaacttcatcctaataaggataaaacttaaggaaaaccacaataaaccatgaaggtgtacacatcctataacacagataaagttttggtgtgctacctattcttgagagagtgagtgagtgtatgtgtttaaaggaaacaaaatgggagaaataagttttaaaaaaatcctcattttgttaatattcaaaagatggactgagcttccacttgggttttatcttgttttaattgtttttgtatcaaaacttgaaattcctctatttctattgggatataaaagccttccccttcagtgaagaaaacatttattttttatttgattcctaggatttagtaaactctagctgtctatttaaaatgtactgaggcacaacaagtattatactggaagacttgccaaactggcaaagctttaagttcatcagcattctatgtggttcagagctgtgatttttgcaaagtattttaccaacctcctcgatggctttgataaaggttagatttgatgttttttttttagatttatttttcttactccactaaactataaagaaaataattacttagaaactccattttaaataatcatttcctagaaattcttaaatatatacagaattttaaagaaaacatttcatctgatttagttagcatccacatatcattgaggaattaaagtgtgggacagtcattatt

SEQ ID NO: 30363 - DNA, 2723 bp, Homo Sapiens
gagacgccctgcgccttcgccttctccgcccccgggccggggcccgcgccgccgcccccgctgcccgccttccccgaggcgcccggctccgagcccgcctgctgtccgctggccttcagggtggacccgttcaccgactacggctcctcgctcaccgtcacgctgccgcccgagctgcaggcgcaccagcccttccaggtcatcctgcggtacacctcgaccgacgcccccgccatctggtggctggacccagagctgacctatggctgcgccaagcccttcgtcttcacccagggccactccgtgtgcaaccgctccttcttcccgtgcttcgacacacctgccgtgaagtgcacctactctgccgtcgtcaaggcgccatcgggggtgcaggtgctgatgagtgccacccggagtgcatacatggaggaagaaggcgtcttccacttccacatggagcaccccgtgcccgcctacctcgtggccctggtggccggagacctcaagccggcagacatcgggcccaggagccgcgtgtgggccgagccatgcctcctgcccacggccaccagcaagctgtcgggcgcagtggagcagtggctgagtgcagctgagcggctgtatgggccctacatgtggggcaggtacgacattgtcttcctgccaccctccttccccatcgtggccatggagaacccctgcctcaccttcatcatctcctccatcctggagagcgatgagttcctggtcatcgatgtcatccacgaggtggcccacagttggttcggcaacgctgtcaccaacgccacgtgggaagagatgtggctgagcgagggcctggccacctatgcccagcgccgtatcaccaccgaaacctacggtgctgccttcacctgcctggagactgccttccgcctggacgccctgcaccggcagatgaagcttctgggagaggacagcccggtcagcaaactgcaggtcaagctggagccaggagtgaatcccagccacctgatgaacctgttcacctacgagaagggctactgcttcgtgtactacctgtcccagctctgcggagacccacagcgctttgatgactttctccgagcctatgtggagaagtacaagttcaccagcgtggtggcccaggacctgctggactccttcctgagcttcttcccggagctgaaggagcagagcgtggactgccgggcagggctggaattcgagcgctggctcaatgccacaggcccgccgctggctgagccggacctgtctcagggatccagcctgacccggcccgtggaggcccttttccagctgtggaccgcagaacctctggaccaggcagctgcctcggccagcgccattgacatctccaagtggaggaccttccagacagcactcttcctggaccggctcctggatgggtccccgctgccgcaggaggtggtgatgagcctgtccaagtgctactcctccctgctggactcgatgaacgctgagatccgcatccgctggctgcagattgaggtccgcaacgactactatcctgacctccacagggtgcggcgcttcctggagagccagatgtcacgcatgtacaccatcccgctgtacgaggacctctgcaccggtgccctcaagtccttcgcgctggaggtcttctaccagacgcagggccggctgcaccccaacctgcgcagagccatccagcagatcctgtcccagggcctgggctccagcacagagcccgcctcagagcccagcacggagctgggcaaggctgaagcagacacagactcggacgcacaggccctgctgcttggggacgaggcccccagcagtgccatctctctcagggacgtcaatgtgtctgcctagccctgttggcgggctgaccctcgacctcccagacaccacaattgtgccttctgtgggccaggcctgccatgactgcgtctcggctctggccatgagctctgcccaggcccacaagcccctcccctgggctctcccaggcagggagaatggggagagggacctccttgtgtctggcagagacctgtggacctggcctccccactcccagctctcttgcactgcaggccctggggccagcccgcacacaccatgcctcctgtctcaacactgacagctgtgcctagccccggatgccagcacctgccaggtgccgccccggggcaagggccccagcagccctatggtgaccgccacactgtgccttaatgtctgccgggggcccaggctgtgctgtccctgcagcacgcctccttgcagggatctgagccaccctccccgcacagccctgcaccccgcccctggggttggcagcctcagttggcccctggcagaggaacaaggacacagacattccctcagtgtggggggcaggggacacagggagaggatggttgtccctggggagggccctctggccccaggcaaccttagcccctcagaacagggagtcccaggacccagggagagtgtggggacaggacagcctgtctcttgtagcttcctggggtgggaggcacaggggcaaagcaataccccagggaaagtgggaggtggtgctggtgctctctccaggcccaccatgctgggagaggcggccagagcctggggcctccagcctgggactgctgtgatggggtatcacggtgatggtcccattaaacttccactctgcaaacctg

SEQ ID NO: 30364 - DNA, 5386 bp, Homo Sapiens
gcggcggtgtctcaggcggcaatggaaggatccgagcctgtggccgcccatcagggggaaaaggcgtcctgttcttcctgggggactggcagcacaaataaaaatttgcccattatgtcaacagcatctgtggaaatcgatgatgcattgtatagtcgacagaggtacgttcttggagacacagcaatgcagaagatggccaagtcccatgttttcttaagtgggatgggtggtcttggtttggaaattgcaaagaatcttgttcttgcagggattaaggcagttacaattcatgatacagaaaaatgccaagcatgggatctaggaaccaacttctttctcagtgaagatgatgttgttaataagagaaacagggctgaagctgtacttaaacatattgcagaactaaatccatacgttcatgtcacatcatcttctgctcctttcaatgagaccacagatctctcctttttagataaataccagtgtgtagtattgactgagatgaaacttccattgcagaagaagatcaatgacttttgccgttctcagtgccctccaattaagtttatcagtgcagatgtacatggaatttggtcaaggttattttgtgatttcggtgatgaatttgaagttttagatacaacaggagaagaaccaaaagaaattttcatttcaaacataacgcaaacaaatcctggcattgttacttgccttgaaaatcatcctcacaaactggagacaggacaattcctaacatttcgagaaattaatggaatgacaggtttaaatggatctatacaacaaataacggtgatatcgccattttcttttagtattggtgacaccacagaactggaaccatatttacatggaggcatagctgtccaagttaagactcctaaaacagttttttttgaatcactggagaggcagttaaaacatccaaagtgccttattgtggattttagcaaccctgaggcacctttagagattcacacagctatgcttgccttggaccagtttcaggagaaatacagtcgcaagccaaatgttggatgccaacaagattcagaagaactgttgaaactagcaacatctataagtgaaaccttggaagagaagcctgatgtaaatgctgacattgtgcattggctctcttggactgcccaaggctttttatctccacttgctgcagcagtaggaggtgttgccagccaagaagtattgaaagctgtaacaggaaaattttctcctttgtgccagtggttatatcttgaagcagcagatattgttgaatcactaggcaaacctgaatgtgaagaatttctcccacgaggagatagatatgatgccttaagagcttgcattggagacactttgtgtcagaaactgcaaaatttaaacatcttcttagtagggtgtggagccataggctgtgaaatgttgaaaaattttgctttacttggtgttggcacaagcaaagagaaaggaatgattacagttacagatcctgacttgatagagaaatccaacttaaatagacagttcctatttcgtcctcatcacatacagaaacctaaaagttacactgctgctgatgctactctgaaaataaattctcaaataaagatagatgcacacctgaacaaagtatgtccaaccactgagaccatttacaatgatgagttctatactaaacaagatgtaattattacagcattagataatgtggaagccaggagatacgtagacagtcgttgcttagcaaatctaaggcctcttttagattctggaacaatgggcactaagggacacactgaagttattgtaccgcatttgactgagtcttacaatagtcatcgggatcccccagaagaggaaataccattttgtactctaaaatcctttccagctgctattgaacacaccatacagtgggcaagagataagtttgaaagttccttttcccacaaaccttcattgtttaacaaattttggcaaacctattcatctgcagaagaagtcttacagaagatacagagtggacacagtttagaaggctgttttcaagttataaagttacttagcagaagacctagaaattggtcccagtgtgtagaattagcaagattaaagtttgaaaaatattttaaccataaggctcttcagcttcttcactgtttccctcttgacatacgattaaaagatggcagtttattttggcagtcaccaaagaggccaccctctccaataaaatttgatttaaatgagcctttgcacctcagtttccttcagaatgctgcaaaactatatgctacagtatattgtattccatttgcagaagaggacttatcagcagatgccctcttgaatattctttcagaagtaaagattcaggaattcaagccttccaataaggttgttcaaacagatgaaactgcaaggaaaccagaccatgttcctattagcagtgaagatgagaggaatgcaattttccaactagaaaaggctattttatctaatgaagccaccaaaagtgaccttcagatggcagtgctttcatttgaaaaagatgatgatcataatggacacatagatttcatcacagctgcatcaaatcctcgtgccaaaatgtacagcattgaaccagctgaccgtttcaaaacaaagcgcatagctggtaaaattatacctgctatagcaacaaccactgctacagtttctggcttggttgccttggagatgatcaaagtaactggtggctatccatttgaagcttacaaaaattgttttcttaacttagccattccaattgtagtatttacagagacaactgaagtaaggaaaactaaaatcagaaatggaatatcatttacaatttgggatcgatggaccgtacatggaaaagaagatttcaccctcttggatttcataaatgcagtcaaagagaagtatggaattgagccaacaatggtggtacagggagtcaaaatgctttatgttcctgtaatgcctggtcatgcaaaaagattgaagttaacaatgcataaacttgtaaaacctactactgaaaagaaatatgtggatcttactgtgtcatttgctccagacattgatggagatgaagatttgccgggacctccagtaagatactacttcagtcatgacactgattaatacaagttgtcttaacgttactccaggaccacttgattttggaaagagtgcacttaattcagaagctaaagaaaatcagttcataatactatggatttctctttcattaagccttaattttaagggaaacatcagtaagaaactgcactgaagaattataaaacattttggggcatagcatacacttgtctaacggttcacacgtggctatgatcacaagcaactttgaactggaatgctatttacaaaagttttgtgtattaatctgtgtattaatctctctggataaaaagaaggaaaaaatatgtatgaccagaacagatatggatgaagaaattgaaagcaacgaatgcaactattcaaaaagtttaattttatgaatttcttttttgtttagtcttgaagactgattttctatgcaaatagtgtttggcatcctgcacctctgatatgatttggctttgagaatttaataccactgggaagaagtatggtagtggtggatgaagggtggatattttaaattgtgcagttacagtttactgtcctattacctctgctcgtttaaccagtttgttatatcactgtgtccccaaaatcaggatttttgttgatagcatcagtgttgtaggagcaataggtcagatgagacatattaacttagactaaacgtgaacagtattatatggactctcacaacgctcttagagaatccgtgaatgtgaacagacaaatgtggctaaccatttgattcttcagtatgccttctaatgtggctattttatttatgtgagactctaaacctgattgtcctaatatataaaactaaaagattttgtaaagggagtgtctttagaaatagatgaaatgtagaatgttaaaaattattgctagggtagtctttttttccagaaacctaattagggtattaaattttgtgttttttttttttttttttttttaaacagaagcatgttatttcattcccattcccagaaagggagttaatgaagataaaaatttattttttaaggtctttattgagagaaactttgttttctgatatgaactattgcagatgtttttataaatactttcattaaaatgatgtaaacagtagtacccaacactgtaaactcagtgaaaatagtaaatgattcttttattactaagactgttatgcattctgaagcagttggcttttttttaaccataggaagtcatttccctctagctccttcccttctactctcctgctcagaccattagtaggtactttgttaaataaaaaactagattaacatcaatattactccaatttggtatcttttacactatgtattatacctactttctttttatttcatttacaaatagtttaaattactttatcaaccagctgtattgtttccctcttgtaaaagtaccatcaagtggggaaaatgtatgtggaagtggagagtgaatttgtatgactaaaggataatctgtacatggggaagtgggcaaaagtgaataggatgaatttaaagaaaatgactacctttggaaaaaagaaattaaattttgttcacatatcctaccctttcccattgtgcatatcccaagtgtcatatttaaaactaaggttacttaaaacagaatccaggaatatcaaggctctgtggcttggaattttagaggataggactaataaaaggacttttgcaaagaaggcttttttccacgttcactttgttttgtgttctttgaaagtaactgatacttttcgggtagttaattcagcagtccataaatatgatccagtaacttgcttatattttattgaagtctcgacagctcttcagaagtaaatttagaacgatgctgtcagttcatatttatagatattagtgttttagcagataaaacaaaatcaacaaaaattaagttcattttgtgattaaacctgcaaccatttttccattactttttttctatagttaatggttattgccatgatttcttctgtttggttctactaagctagaaagccagggtgaagttaatgataattcccattattttatttctgtaccatgagattgctgttgatgactgaaataccaggtgcaaaaattaatgatttgatttttgtacagtttcaatgagtattttttacttattaaaaataaattaagaaatgcaaaaaaaaaaaaaaaaaaaa

SEQ ID NO: 30365 - DNA, 3088 bp, Homo Sapiens; identical to SEQ ID NO: 24325

SEQ ID NO: 30366 - DNA, 2527 bp, Homo Sapiens
taaaattgacctggaatcaaccattgacatgtcctgtgctaaatatgaattcactgatgccctgctgtgccatgatgatgagctggaagggcgccggattgccttcatcctgtacctggttcctccctgggacaggagcatgggtggtaccctggacctgtacagcattgatgaacactttcagccgaagcagattgtcaagtctcttatcccttcgtggaacaaactggttttctttgaagtatctcctgtgtcctttcaccaggtgtctgaagtgctgtctgaagaaaagtcacgtttgtctataagtggctggtttcatggtccatcattgactcggcctcccaactactttgaaccccccatacctcggagccctcacatcccacaagatcatgagattttgtatgattggatcaaccctacttatctggacatggattaccaagttcaaattcaagaagagtttgaagaaagttctgaaattctcctgaaggagtttcttaagcctgagaaattcacgaaagtctgtgaggccttggagcatggacatgtggaatggagcagccgaggtccccctaacaaaaggttttatgagaaagctgaggagagtaagcttcctgagatattgaaggggtgcatgaagttatttcgctctgaggcactattcttgctgctctccaacttcacaggcctgaagcttcatttcttggccccttcggaagaagatgagatgaatgataaaaaagaggcagaaaccactgatatcactgaagaagggactagccatagtcctcctgagccagagaataatcagatggccatcagcaacaacagccaacagagcaatgagcagacagacccagagccagaggaaaatgaaacaaagaaagaatcaagtgttcccatgtgccaaggggaactgaggcattggaagaccggtcactacactttaattcatgaccatagcaaggctgaatttgccctagacttaattctgtactgtggctgtgaaggctgggagccagaatatggcggttttacttcttacattgccaaaggtgaagatgaagagctgctaacagtgaatccagaaagcaattctttggcattggtctacagagacagagagactctgaaatttgtcaagcatattaaccaccgaagcctggaacaaaagaaaaccttcccaaacagaacaggtttctgggacttttcattcatctattatgaatgacagcactgggcaaagctgaacaaaaatgtgacccttcgtaattactgggaagtctgaaagagctaagcatggagtcaaggagaactacatggtagcttgcctgacagtgttcttaaaactggttgtcttttactaggactcataatgattgtcctcaaccgagaccttgagcttgcagctacgtacttatctcttgattaaaaaaaaaaaagttggcttttttttttttaacatttagtcctttttccatattggcttcttcagtgaatttttaagttcaatttgtttttattgaggtaaaatatttataacataaaactgaccagcttacccatttttaaatatgcaattcagtggattaagtacattctcattgttgtccagccatcaccatcatccatctccagaagttttccatcttcccaaattctgtgcccattgaacaataactccccacctccccttcccctagcaacagccatactttttgtctctatcatcaacttcactactcatatttctcatgtaagtggaatcatacagtatttgtccttttgtgactggtttcacttagcataaagtctttaagatgcatccatgtttccagtgtttcggtttttttagaaaaactcatacgtgattgcagccgggcatggtggctcacgcctgtaatcccagcacttgggaggccaaggcaggcggatcacctgaggtcaggagttaaagaccagcctgacaaacatggagaaaccccatctctactaaaaatacaaaattagctgggcgtggtggcacatgcctgtaatcccagctactcaggaggctggggcaggagaattggttgaacccaggaggcggaggttgcagtgagccgagattgtgccactgcactccagcctgggcaacaagggtgaaactctgtctcaaaaaaaaaaaagaagaaaaaaacataagtgattgcagaattttgttcttctcataatttctggtttagaaaattatggagccttacatcctgatcatgctgggccttagaattctgacacagtgagtcatcacatttcctcccactgcctgtggccttgttccaccatgactctcacagtacagtgtaggcttagtgtagtagtattcccttggaaagggtctggcctaccatcacatgccccaagaaacttctggttggtaaagaagataggctgcttattgccatgtgtagtcacttccaagtgcccactgcctttccatcctgcaattgtggcctgtgtataattaaatgattttagcctc

SEQ ID NO: 30367 - DNA, 2794 bp, Homo Sapiens
gaccagccgtgcaaatctctagaagatgacggtgttctttaaaacgcttcgaaatcactggaagaaaactacagctgggctctgcctgctgacctggggaggccattggctctatggaaaacactgtgataacctcctaaggagagcagcctgtcaagaagctcaggtgtttggcaatcaactcattcctcccaatgcacaagtgaagaaggccactgtttttctcaatcctgcagcttgcaaaggaaaagctaggactctatttgaaaaaaatgctgccccgattttacatttatctggcatggatgtgactattgttaagacagattatgagggacaagccaagaaactcctggaactgatggaaaacacggatgtgatcattgttgcaggaggagatgggacactgcaggaggttgttactggtgttcttcgacgaacagatgaggctaccttcagtaagattcccattggatttatcccactgggagagaccagtagtttgagtcataccctctttgccgaaagtggaaacaaagtccaacatattactgatgccacacttgccattgtgaaaggagagacagttccacttgatgtcttgcagatcaagggtgaaaaggaacagcctgtatttgcaatgaccggccttcgatggggatctttcagagatgctggcgtcaaagttagcaagtactggtatcttgggcctctaaaaatcaaagcagcccactttttcagcactcttaaggagtggcctcagactcatcaagcctctatctcatacacgggacctacagagagacctcccaatgaaccagaggagacccctgtacaaaggccttctttgtacaggagaatattacgaaggcttgcgtcctactgggcacaaccacaggatgccctttcccaagaggtgagcccggaggtctggaaagatgtgcagctgtccaccattgaactgtccatcacaacacggaataatcagcttgacccgacaagcaaagaagattttctgaatatctgcattgaacctgacaccatcagcaaaggagactttataactataggaagtcgaaaggtgagaaaccccaagctgcacgtggagggcacggagtgtctccaagccagccagtgcactttgcttatcccggagggagcagggggctcttttagcattgacagtgaggagtatgaagcgatgcctgtggaggtgaaactgctccccaggaagctgcagttcttctgtgatcctaggaagagagaacagatgctcacaagccccacccagtgagcagcagaagacaagcactctgagaccacactttaggccaccggtgggaccaaaagggaacaggtgcctcagccatcccaacagtgtcgtcagagggtccccagggcattttcatggcaagtacccctctgcccccactccagcagtgcttcccaaagtgtgctctgtcacctgctttgcaatcggcttccattagcgcatgttttattttggtgtgacggttggccctcctaaacacggactttcctcaggctggttcaagacggaaaaggactttcttctgttttcttccaaagtgcaaccacagtggagagcccacggtgggcttagcctgcctaggcccttccatttctcttctttgaccgtgctaggaattccaggaaagtgcattcctgccctggtgaccttttcctatgtctaggctcctccacaggtgctgctattttgtgagctccggctcctgtttagcttttatttcagttctaacctcagtccagaaacatatgtgaggttgtttccctcttcagccacggctacaataccggaaaatgctagtttttatttatttttttaagtagtgcttcctaaatggtttgcatgagagccacctggggtacatgttgaaaacttatttggggtctaccccaaacctaataacccaaatttggggatggggcccaggaatatgcatttttaaaaagtcatctgcccttcccaggtgattctgtaagttgtccctcaactgtacttggagaaatcgtgttttaaagcagtagtccacaaagtattctgctcatgtgcccccaaaagtattttgaaaaatcatgtataccctcacccatctaagttgatatctaaaattttatctaagttggtatctaaaatttttcatgggaagttaaatagttgacaaagtatgtatttgctggtgtcgtgtaaatattggtattttaaaataaaaactgttacatcactattttaaacatatccagtacaatttaaatatcacaacaatttgacacccttcattcatttataaaaataaatgagctagttctttagtagttaaacatttcaaattggcttttctccttctgtatttccataccacttttcagccaagaatcctatcataatgtaatctattatgcccgacatcttttaatcattcaccccattacttcttgtcaacaaaaaatataaatggaaattttttttttagctcttgctttaagtgtttgtttgttatctcagtccagaaccaatattatcgtaattaattattggtatataatgaaaacggtattaattcttggatgattaaaagtttttttattagaatgttctttatcctaattagttcatttatccaagaatacatgaatgtgatttacagctgagatggggttcaacctcagctgtattccttgtttctgtatagatgtaagcacataaattcgatggaatagaattacgttaacaatgaaaaaaaaaaaaaaa

SEQ ID NO: 30368 - DNA, 3279 bp, Homo Sapiens
actgccggcctgcgcggtactcactgccggcctccgcggtacccactgccggcctccgcgctacccggccgcagcgcgcgagtcacatggaagctcctgaggagcccgcgccagtgcgcggaggcccggaggccacccttgaggtccgtgggtcgcgctgcttgcggctgtccgccttccgagaagagctgcgggcgctcttggtcctggctggccccgcgttcttggttcagctgatggtgttcctgatcagcttcataagctccgtgttctgtggccacctgggcaagctggagctggatgcagtcacgctggcaatcgcggttatcaatgtcactggtgtctcagtgggattcggcttatcttctgcctgtgacaccctcatctcccagacgtacgggagccagaacctgaagcacgtgggcgtgatcctgcagcggagtgcgctcgtcctgctcctctgctgcttcccctgctgggcgctctttctcaacacccagcacatcctgctgctcttcaggcaggacccagatgtgtccaggcttacccagacctatgtcacgatcttcattccagctcttcctgcaacctttctttatatgttacaagttaaatatttgctcaaccagggaattgtactgccccagatcgtaactggagttgcagccaaccttgtcaatgccctcgccaactatctgtttctccatcaactgcatcttggggtgataggctctgcactggcaaacttgatttcccagtacaccctggctctactcctctttctctacatcctcgggaaaaaactgcatcaagctacatggggaggctggtccctcgagtgcctgcaggactgggcctccttcctccgcctggccatccccagcatgctcatgctgtgcatggagtggtgggcctatgaggtcgggagcttcctcagtggcatcctcggcatggtggagctgggcgctcagtccatcgtgtatgaactggccatcattgtgtacatggtccctgcaggcttcagtgtggctgccagtgtccgggtaggaaacgctctgggtgctggagacatggagcaggcacggaagtcctctaccgtttccctgctgattacagtgctctttgctgtagccttcagtgtcctgctgttaagctgtaaggatcacgtggggtacatttttactaccgaccgagacatcattaatctggtggctcaggtggttccaatttatgctgtttcccacctctttgaagctcttgcttgcacgagtggtggtgttctgagggggagtggaaatcagaaggttggagccattgtgaataccattgggtactatgtggttggcctccccatcgggatcgcgctgatgtttgcaaccacacttggagtgatgggtctgtggtcagggatcatcatctgtacagtctttcaagctgtgtgttttctaggctttattattcagctaaattggaaaaaagcctgtcagcaggctcaggtacacgccaatttgaaagtaaacaacgtgcctcggagtgggaattctgctctccctcaggatccgcttcacccagggtgccctgaaaaccttgaaggaattttaacgaacgatgttggaaagacaggcgagcctcagtcagatcagcagatgcgccaagaagaacctttgccggaacatccacaggacggcgctaaattgtccaggaaacagctggtgctgcggcgagggcttctgctcctgggggtcttcttaatcttgctggtggggattttagtgagattctatgtcagaattcagtgacgtggtaggaaagaaagtcaggtcaagtgatgcttttgagcttacacacaattcacaggcccaccagtgacaatttactgtgagttaatgtcattcaggtgtgcccatggattttgagggctggaaatgcaaagacacatttttctataaaaagaaaaagcaactaaggttaaaagctatattgtggcccaagacactgtctgaaagatgacatgagtagtaattcaccactatctgaaccaagcaaggatcaatgtgctgactgcattggccaatggctttgatacttctgctatttttttagacacaaacccataaactaactgcttaagaattcatactgcttgaattatgtaaaatatattttacagtatatctttccttgggccttagattactattcactgggcaaatggtatttgtttttgttttaattttttttttaatagacggaagtcttgctctgtcatgcaggctggagtgcggtggtgcgatcatagctcactgcagcctcgaactcttgggcttcaagcaatcctcctgtgtcagccaccagagtagctgagactacaggggtatgccaccatgcccagctggcatttgttaatcttcatttgaggtctagatctaggcactgtggacactgaaaaacagttgggaaatctttcgagctgtggaaatccaaacaaagactgataattcctggtaggggtgtgtgcgtgacgtactgcagcctcaacctcctgggctcaagtgatcctcccacctcagcctcctgagtagctgagaccacaggcgtgtgccaccacgcctagctaattttttataccagggtctaccctttgtttcccaggctggtcttgaattcctgggatcaagcaatccttccaccttgccctcccaaagtgttgggattataggcatgagccaccacgactggccagaggacaaaattttaataaaggtcttagcttaagcagtaatcctacttcattaagccttcctggggtgcggtacacaccgttaattcagcaaccctcagtacatactaagtatgctcagtgctgtgaaagtggattacaccaaattaagtcattcttatcacacccaatcaaaagtcaagaagccagggataaaagcacctcaggcacataacattaatctagtaatgtaattctctgcacatccagctggtgaaactgcgtgctgtaagctgggaccagctttgtccataactgctgagagaacttgctgaagctctaggaataattttgcctgcccggttgctcaccagttgtagcttgccagctcccaacacccttcctggtgccaataaactttctcaaagagcaatactgacatttcttttgataaaacctccagccttctctgtgttgttccgacataccgaggaccaactggtctacatggatgccctgaacatgcaattctttcttccaaaataaaacattaaatagag

SEQ ID NO: 30369 - DNA, 3682 bp, Homo Sapiens
acggcgcgcgcgcaccccttccgcgcagccccctgacctgcagcctccggacctcgctgcagcgcggacccggcccgcccgcccgaatgagtcagctgaggctgctgccgtcccgtcttggggtacaggctgcgaggctcctggctgcacatgacgtcccggtgtttggctggcgcagcaggtcctccgggccaccggccaccttcccaagcagcaaaggtggaggcggctccagttacatggaggagatgtacttcgcctggttggaaaacccccagagtgtccacaagtcctgggacagcttcttcagggaagccagcgaggaagccttttctggctctgctcagccacggcccccttctgttgtccatgagggcaggtctgcagtctcaagtcggaccaagaccagcaaattggtggaggaccacctggctgtacagtccctgatccgggcctaccagatccggggtcaccatgtggcccagctggaccccctgggcattctggatgcagacctggactcctttgtgccctcagacttgatcacaaccattgataaactggccttctatgaccttcaggaggctgaccttgataaggagttccagctgccgacaaccaccttcattgggggctctgaaaacaccctttctctgcgggagatcattcggcgcctggagaacacctactgccagcacattggcctggagttcatgttcatcaacgatgtggagcagtgccagtggatccggcagaagtttgagacccctggtgtgatgcagttctccagcgaggagaagcggaccctgctggcccggctagtgcgctccatgaggtttgaagacttcctggcccggaaatggtcctcagagaagcggtttggcctggagggctgtgaagtgatgattcctgccctcaagaccatcatcgacaaatccagcgagatggggattgagaatgtcatcttggggatgccacacaggggaaggctgaacgtgctggccaacgtgatccgcaaggacctggagcagatcttctgccggtttgaccccaagctggaggcggcggacgagggctccggggatgtcaagtaccacctgggcatgtaccatgagaggatcaaccgcgtcaccaaccggaacatcactctgtcgctggttgccaacccctcccacctggaggcagtggaccctgtggtgcaggggaagacaaaggcagagcagttctaccgtggagatgcccagggcaagaaggtcatgtccatcctggttcatggggacgccgcctttgctggccagggcgtggtatatgagaccttccacctgagcgacttgccctcctacacgaccaatggtaccgtgcacgtcgtcgtcaacaaccagattggattcaccacagacccccgaatggcccgctcctcaccatacccgaccgacgtggcccgggtggtcaatgcgcctatcttccatgtgaatgccgatgacccagaggctgtgatatatgtgtgcagtgtggcagccgaatggagaaacactttcaacaaagatgttgtcgtggacctggtctgttaccgccggcgtggccacaatgagatggacgagcccatgttcacccagccgctcatgtacaagcagatccacagacaggtgcctgtgctgaagaagtacgcagacaagctgattgccgagggcacagtcaccctgcaggagtttgaggaagaaattgccaaatacgaccggatctgtgaggaggcttatggcaggtccaaggataaaaagattctgcatataaagcactggttggactccccctggcctggcttcttcaacgtagatggggagcccaagagcatgacatgcccagccacggggatccctgaggacatgctcacccacatcggcagtgtggccagctctgtgcccctggaggactttaagatccacactggcctctctcgcattctgcggggccgtgcggacatgaccaagaaccggacggtggactgggcgttggcagagtacatggcctttggctccctgctgaaggaaggcatccacgtgcggctcagcgggcaggatgtggagaggggcacattcagtcaccggcaccatgttctccatgaccaggaggttgaccgcaggacgtgtgtgcctatgaatcatctctggcctgaccaggccccgtacaccgtgtgcaacagctccctctcggagtacggagtcctgggctttgagctgggctatgccatggccagccccaatgccctggtcctctgggaggcccagtttggggacttccacaacacggcccagtgcatcatcgaccagttcatcagcaccggccaggccaagtgggtgcggcataatggcattgtgctgctgctgccccatggcatggaaggcatgggcccagagcactcgtcagcgaggcccgaaaggttcctgcagatgagcaatgatgactcggatgcctaccctgcattcaccaaggacttcgaggtgagccagctctatgactgcaactggatcgtggtcaactgctccacaccggccaactacttccacgtgctgcgccggcagatcctgctgcccttccgcaagccgctgattatcttcacacctaaatctctgctgaggcacccagaggccaagtccagctttgaccaaatggtatccgggaccagcttccagcgggtgattcctgaagatggggccgcagcacgggcccctgagcaggtgcagcggctcatcttctgcacgggaaaggtgtactatgacctggtgaaggagcggagcagccaggacctggaggagaaagtggccatcacgcgcctggagcagatctctccattccccttcgacctgatcaagcaggaggcagagaagtacccaggtgcggagctggcctggtgtcaggaggagcacaagaacatgggctactatgactacatcagcccacgcttcatgaccatcctgaggcgcgcacggcccatatggtatgttggccgggacccagcggctgcaccagccacaggaaacaggaacactcacctggtgtcactgaagaagtttctggatactgccttcaatctccaggcctttgagggcaagacattttagagctgggcaaaacctgtgtaggtctcgctgtgggtttgctggggaccaagggggtgatgaaaaggggaggggcggagctcctgcccaagagaggggctgtggggccccaggataaaacagacacagtgacagggccaagagccagcactgctggccttggtgtcatgccagaatctaccaggactgagggagccagaggagtcctgtaggcaggctactgtgctggagcatcccccagctgctcccatcttgctggaatttcttgggcggcttctccacctgtatctcaagacagacacccgggggcctgtgtctgtggccgctcccatcccggcagccctggctgctgctcgccccaccctcgcttatctgtagattcaaagcgatgttctcttctgtgctcttagaagtagggagttcagcagtaacagccaggtgaagcgaacctgctgggtgatttgtttgcgctctgttttatggggcattcctgcgagatgtgtcagcttctgtatgagatgcagccacagctcatgtgtaccaaagtagaaaaccaaatcacagag

SEQ ID NO: 30370 - DNA, 3598 bp, Homo Sapiens
aagtgcacggaggagttccgggggccaggcggccgccgcgagtctggtatcctgagcttcgtgagttgagcgctgctgctccgcggtggagtcaccgcaccgctcccgggatcatggtgttctacttcaccagcagcagcgttaattcatctgcctacactatttacatgggaaaagataaatatgaaaatgaagatctgatcaagcatggctggcctgaagatatctgggagagaatatagaagacatcccaaaggaagtgctgatggactgtgcccaccttgtgaaggccaatagcattcaaggctgcaagatgaacaacgttaatgtggtatatacgccgtggtctaacctgaagaaaacagctgacatggatgtggggcagataggctttcacaggcagaaggatgtaaaaattgtgacagtggagaagaaagtaaatgagatcctgaaccgattagaaaagaccaaagtcgagcggttcccagacctagcagcagagaaagaatgcagagatcgtgaagagaggaatgagaaaaaagcccaaattcaggaaatgaaaaagagagaaaaagaagaaatgaagaagaagagggaaatggatgaacttaggagctattcatcactaatgaaagttgaaaatatgtcttcaaatcaggatggcaatgattcagatgaattcatgtaaaaggagaaaaggagaaaaggacctttgaaagatgtgaatgtagagacaattgcagaccttttggtttcatctgtgttctgaagtataaaatacaaccaaaattctaccttcatcctacccagaaattattgattttcaagttttaaaaaaattgtaccttttttgctgacagaaaaggatcagatatgtataaaatagttgaacttgacagcatataacttaaagtgaaaatgtttttgccagaacatgtcttggtaccttgtgaaagcaggctgcccttgttcttgagatagactttaaaatgaaccagctctgaaaagtacttctgctgctctggtctatccctgaaaacagatgtcttgaaacacttttcatattcttaaaataatcttcacttctgttaagaagaacatgttggtgggtaattatgcgaatgtttccctgtccctgatttctcgattaggcgtatgggttttgaaaaagagatttttcagaagattgtcagcttcagtattcacgttccatcgtgtcatctgggtctgttagtgtagtgaccctcagtgcagtctgtcccagcgtttacgtccttgcttcctctgagcggaggcctccatcttagtatcaacatatttaaagaaattgatggtgttcatcaagctggggcctgtggcagttgttgcctgagcaccaagtaacccaagccacctatgtgacaacttctgggcccaggagtaatttctcagcattgagggtaaaataggatggagtgctctgttgatcatttgggagatgtaggttacctgatttgtgccttaggatgcagcgtgaagcagaagtccatattgcaattatgattttagaaggaactaagcattttactcacacccacagcagcaagaatgacctcctgcagcagatattccacctgtaatagcactttggaactgtgggcaaaaccaaaaggctagtgcttccatttattccatgttggtgtatggggttgaactggaaaattccctgaggcaaaactcactggccaaattttgagagggtatagaaaatgactttagaaatgagtggttttgtgtatgtgtctgatgatattcagtctgatgttccgcaattttaaaagttataataaaataccatttttttaatctggaaggacattgatatatgaattcttagaatttgctattaaaaagggtagcccccattccacaagctggttttgagggtgatcttgctctaaaaaacctcattcatcataggctcagtctgacaggttctgtacggggctatcatctttctcctcctctgctaaatgcctctttcttccagctgctcactgggtcaaagggatgtcctttctcagatgtattcttgatacatctcagatgtattcgtagctgtgctccttccatacttccaaggagtccggcttctacagaattcctctgtacctcacactgcaacacatgtagatagcgcttttgaaaaatacatatatttttactatagtatgagaggtcctggggctcaaactttaaacatttcctaactcagcttacactggtttaaaatgtccaggtctctgctgaattctcttgttgaattcatagctctccaacctcctctgtgttgattcctatgcccctaaccctgcggcctctttgttttatttttttccccatctctgttggtcccagggaaagcaaggaaattttcttttgaggacttataggttgattgcccacaggtcaaactgttggcattgaactcctctcatttcttgccattggattgtttcctaaacgttggataggagaattcgaaattgttgctatttttatgagctgtgcccttgatcaaatctgtgctgtgggtctgagtcattttgccaatgtcgtcttcagtttcaacactctgatcagcatgcaggcgaggggcatgtttaatttacttcactaactgctatattctatagctttagacttcatatttcttatccacctttgtctaggctcacgatctttgggcgagggagctttgtcaccgtggttgggctagaacaaatattgagaagtttaccaacacagatgttgagaagtttattgaaaggcactgacattagcagaataagtgatggacattagttgaaccccttcagtgtctatgtgttttattgtattgtctttaactcgttcttgaagcacagatttcagcgagcctttcagctattcagtgccagcggttttccccactcaggaaagatggtgtgagccatacacacagcaggattagacggggagagtttcagctgcagcttctagtttaagaccaaagcccttcctcccgctgctgcatctgtctgagaggggaagctcttgttttccaagctggaaccgtttatgaggaaaactgagcagggtggcaaaatggaaaaggaacaattttctagtttttcctacgcgtgatattgacgcgtgctttttctttgatttgaggtacagcatgtaaataacaaatttccatattcaaaatgatcatattagagtgactgagtgaccttttgattttgaagcagactaaaatctgaccagaccacaatgaaaagtataaaattagaaacttaaattccaagctaaatttcagctttgacccacctaactccagtgaataggtggcagctcagaaacaaggacagcactgctgctgccagagcaagctcacatccagctggcacttcgtgagagctccttcctgccgggcacgtgtgagttcagcgtgggcaagagacttttatgcacattctgtcattcaaaagggaaatgatgccaaccccagatgcagcatgtcctgaatgaatgatctgtaaaatacaataataaaagcttatagtttgagtag

SEQ ID NO: 30371 - DNA, 2273 bp, Homo Sapiens
agtgcccgcgcagcgttgagttgcacagcggtattctcaccaggccctgcaatcggtgggccacagtgccggccacagagatggtggaaggaccaggctgtactctgaatggagagaagattcgcgcgcgggtgctcccgggccaggcggtgaccggcgtgcggggaagcgctctgcggagtccgcagggccgcgccttgcggctcgcagcctccacggttgtggtctccccgcaggctgctgcactgaataatgattccagccagaatgtcttgagcctgtttaatggatatgtttacagtggcgtggaaactttggggaaggagctctttatgtactttggaccaaaagctttacggattcatttcggaatgaaaggcttcatcatgattaatccacttgagtataaatataaaaatggagcttctcctgttttggaagtgcagctcaccaaagatttgatttgtttctttgactcatcagtagaactcagaaactcaatggaaagccaacagagaataagaatgatgaaagaattagatgtatgttcacctgaatttagtttcttgagagcagaaagtgaagttaaaaaacagaaaggccggatgctaggtgatgtgctaatggatcagaacgtattgcctggagtagggaacatcatcaaaaatgaagctctctttgacagtggtctccacccagctgttaaagtttgtcaattaacagatgaacagatccatcacctcatgaaaatgatacgtgatttcagcattctcttttacaggtgccgtaaagcaggacttgctctctctaaacactataaggtttacaagcgtcctaattgtggtcagtgccactgcagaataactgtgtgccgctttggggacaataacagaatgacatatttctgtcctcactgtcaaaaagaaaatcctcaacatgttgacatatgcaagctaccgactagaaatactataatcagttggacatctagcagggtggatcatgttatggactccgtggctcggaagtcggaagagcactggacctgtgtggtgtgtactttaatcaataagccctcttctaaggcatgtgatgcttgcttgacctcaaggcctattgattcagtgctcaagagtgaagaaaattctactgtctttagccacttaatgaagtacccgtgtaatacttttggaaaacctcatacagaagtcaagatcaacaggaaaactgcatttggaactacaactcttgtcttgactgattttagcaataaatccagtactttggaaagaaaaacaaagcaaaaccagatactagatgaggagtttcaaaactctcctcctgctagtgtgtgtttgaatgatatacagcacccctccaagaagacaacaaacgatataactcaactatccagcaaagtaaacatatcacctacaatcagttcagaatctaaattatttagtccagcacataaaaaaccgaaaacagcccactactcatcaccagagcttaaaagctgcaaccctggatattctaacagtgaacttcaaattaatatgacagatggccctcgtaccttaaatcctgacagccctcgctgcagtaaacacaaccgcctctgcatcctccgagttgtgaggaaggatggggaaaacaagggcaggcagttttatgcctgtcctctacctagagaagcacaatgtggattttttgaatgggcagatttgtccttcccattctgcaaccatggcaagcgttccaccatgaaaacagtattgaagattggacctaacaatggaaagaatttttttgtgtgtcctcttgggaaggaaaaacaatgcaattttttccagtgggcagaaaatgggccaggaataaaaattattcctggatgctaatatctgtagattctctggcatttagtctcttcaaactgtgtataatgtttggtcctcctctgtttcatagaaaagtcatagaatatctatgatacattgaaaagttactgcaatatttgagaactgttctttttttttcttgtgtgtgccatctttccattgttggctacgtcttttcttttgccttgatgaacgttctatgtatttcatcggatatacagcatattccatttaggatgtgtatttaatgcatttagtaatgacgataaagtgtttttagtatgcttttagtctcttgtaactggggagaagcagtgttttttttttaggaaaggattatgcgacacaataaaataagatattctgtctgtagtg

SEQ ID NO: 30372 - DNA, 4083 bp, Homo Sapiens
tcttcccatccacccgccgcttctttcctccatctagcgatttttattttttaagtgtctcttcctttttctttcttttcttttttattttttatatatattttttggcattgctttgcagatgttgggatgagagtcggagccgaataccaagctcggatccctgaatttgatccaggtgctacaaagtacacagataaagacaatggagggatgcttgtatggtctccatatcacagtatcccagatgccaaattggatgaatacattgcaattgcaaaggaaaagcatggctacaatgtggaacaggcacttggcatgttgttctggcataaacataacattgagaagtcccttgctgatctccctaatttcactccctttccggatgagtggacagtggaagataaagtcctatttgaacaagcctttagttttcatggaaagagctttcacaggattcagcaaatgcttccagataagacaattgcaagccttgtaaaatattactattcttggaaaaaaactcgctctaggacaagtttgatggatcgccaggctcgtaaactagctaatagacataatcagggtgacagtgatgatgatgtagaagaaacacatccaatggatgggaatgatagtgattatgatcccaaaaaagaagccaaaaaagagggtaatactgaacaacctgtccaaactagcaagattggacttggaagaagagagtatcagagtttacaacatcgccatcattctcagcgttctaagtgccgtccacctaagggcatgtatttaacccaggaagatgtggtagcagtttcctgtagtcccaatgcagccaacaccatcctgaggcaactggacatggagttgatctctctaaaacgtcaggttcagaatgctaagcaagtaaacagtgcacttaaacagaaaatggaaggtggaattgaagaattcaaacctcctgagtcaaatcagaaaattaatgcccgttggaccacagaggagcagcttctagcagtgcaaggtgtccgcaaatatggtaaagattttcaagctattgcagatgtaattggcaacaagactgttggccaagtgaagaacttctttgtaaactacaggcgtcggtttaacttagaggaggtattgcaggagtgggaagcagaacaaggaacccaggcttctaatggtgatgcttctactttaggggaggagacaaaaagtgcttctaatgtgccatcagggaagagcactgatgaagaagaggaggcacagaccccacaggctcctcggacactgggtccatcacctcctgccccatcatccactccaacaccaacagcccctattgccactctgaaccagcctccaccacttcttcgtccaacactgcctgctgccccggctcttcaccggcagcctcctccactccagcagcaggctcggttcatccagccccggccaactttaaatcagcctccaccacctcttattcgccctgctaattccatgccaccccgtctaaacccaagaccggtgttgtccacggttggtggtcaacagccaccatcacttattggaattcagacagattcacagtcctcactgcactaaaaattaaattggacacagctgcagtaacttttcaccccatcattataccagtgctcatctgactgatgaaaaagaggaaagaataatcatttctagatactgaggctgcgaactagttctgtggcagtggactagcataagtggatgtctaagaaatttttcagttcactagactaaaatgttttacaacaaaaagcctccagttagcctcctttctagagtatatgttcagcaatgtgatctcataaaaggaaaaacaaaagatttaagtattctatataccaagtttttgttttgtttttactgtatttattttattgaggttctttatattcctgcctcttcatagtcaaggctcttagtacaggaatattgacttaggaattgtgaaaactccttaagtttcttaagttaaggatgtttggcttttttctttaattttttaaaaaccattttcctatgttaggagtgcaagaatagccagcatttccgattttgacatatgttcattttatgcatatttaagaaattatagctgcatatcccttctttcaaaaaatgttgcttttttttttaaaggaattttaatatattcctttaaaagaaagcaatttaatcaattgcaaagcaattatataaaaccacaaagaatgtactgaacctactaaccctttaacatacagtttagggtcctagcgcagagtccttgtttaaaggtcattgactcatcatctgtcagtaatgagaggattggaagaataattttgcatacaaatgaggacttaatttgttgaaatataatctctttaagttccttgaaaatggagttggttttttttgtttctaaatgctatctgcttttaactagtagttgcctacatctggggacttcagagaagaattatattttgttagttaagtagacacagtggttatggaagcatttctttacagtaccctttacgtgtttggtttctgaacttaaaattgccctcatacttaataatatggtctgcatttaatatgaaaggtgttttattgataaatctattgtactatttggatacatttgtgtattccttgcagccaacctgtattcgtgggattggtgtagggttaaatcatcaacattatttcataaaataagaatttgttctgtgttatctaaagatgtatcagtatattgtcacagttgtgctgttaactaaaaatgctgagacccctttttatagaaaaacaaaaagacatcaagtcttcttaattcaacccataatcattaagtacttaacaaagaatattttacaagtgatagtatttcaacaatgtgtaattaatatttttgatacagtgatttcatattggaatcattatttgtgcaaagggacagacagatcacttagattgctatactagtggacataggctaaatgtttgcacattcacattcttatcacgtgtagaatacttcacaaaatagtcaacatctaaggccctaatttatgttttgaaagatcatgtgttcccaaagtattccctattgttggctccacagccttaaagtgctatagatttaaattcattgattagttttaatttttaattttagactgtgtatttccataaataccctacgtactggcatatttgaaactctttttccaggttaggtccttttctttctcattgaatcatcttaaatagttcttggccctgaatttagctgatttaaaattcttaatattcaagaatttatacttattttttccttaaaagccacaggggacagttaaatatcttaaaatatctaaaacattttttaaagcacttagattgtcttacgtatgtgcatactatacctttacagcgtttattgtcttgtctcttgtcagtagaccttcagtacacagtatgtgggatatgtcagtcaagttggtcagcaccagcatctgtccagctgttcagtatattgtgattcattaaaaaatctcttctatcccagacatgggccaaggtgctgtatctgagggatgtgctgtaatttgatttacatgcattagagcacacagtagaaaaacgttagcttcattagtaatatgacacatgtatatagtgagatgtctttattgtgtgctttgcatattttgtaaatattttgcacgtcattatttttcttttttgtttaagcagtgtttggcctggaagagtgatatgcttgctgcttaatcaaaggattaaagatttaaagatgtctatgtcttctatttttatataatttcatgttctatgaggaatttagtacctcttcactgtgaaattcgaaataatgatttttataaaagcaaaactagaaatcttttaatgacaattttcattaatttcagggttatcatttttgagaaatctacaccaaagtggttttttaaaattacataactaaaaataaaccacactgtggatacatcttat

SEQ ID NO: 30373 - DNA, 4098 bp, Homo Sapiens
atgctgcaaatgccgaagttaaatgaaatacctccggggagggcaggccgcagggaggctcggggggagggaagatggcctggacaaacaggtcctgaagctgcgaggctggagtggagggcgcaggggcaggcgggcggcgccagagctccatgggacagctggggaagctccaggctacctacacaacctggcccaggctggtcacggtgtcccccctccctgctctgtgccctctccttccagaaatccaccatggagagtaaggatgaggtcagcgacaccgacagtggcatcatcctgcagtctggccccgacagcccggtctccccaatgaaggagctgacccatgcagtgcacaagcagcagagggccctggaagcgaggctggaggcctgcctggaggagctgaggagactctgccttcgggaagcggagctgacgggcaccttgccagcggagtatcccctcaaaccaggggaaaaggcccccaaggttcgccgcaggatcggagcggcttacaaactggatgactgggccttgcacagagaggaccccctaagcagcctggagcgccagctggccctgcagctgcagatcacagaggcagcccgtcggctgtgcctggaggagaacctcagcaggcaggctcggcggcagcggaagcactccatgctgcaggaggagaagaagctgcaggagctccagcgctgcctggtcgagcggcggcgcaatagcgagccacctccggctgctgctctccccctgggccgagagctcagtgcctctgatgacagctccctgtcagatgggctcctcctggaggaagaggaatcccaagtgccaaaacctcctccagagtctccagccccaccttctcggcctctcccaccccaaacccttgagggtctgcagccaacaggacctgaggctgggagcccagaacgggctccagtccagaacagcccctggaaggaaaccagcctggaccacccctatgagaagcccaggaagtcttctgagccctggagcgagtccagcagcccagccaccacaccacaggatgggcccagtgcctccagcctgtggcttctggagcctgcctcctaccacgtggttcccatccgtggtgttcctggccagtggcagggccgcaccagtgccccagccacccctgagatacaggggaggaggggccagtcgcagtctctgagggtggattccttccgggcgggtcctgagggccgaggtcgcagcgcctttccccgccgccgccccactcactacacggtgacagtgccagattcctgctttcccgcgaccaagcccccgctgccccacgccgcctgccactcctgctcagaagacagtggctctgacgtctccagcatctcccaccccacttcgccgggcagcagcagccccgacatctcctttctgcagcctctctcccctcccaagacccatcgtcaccgcggggcctgggtcccagccggcagcagagagctggtcgcccaccaccccaagctactgctgccgcctggctatttcccggcggggcggtacgtggtggtggctgagagccccctgccgcctggcgagtgggagctgtgccgcgcagccccgggccctgcttacgaggaggagggcactcccctgcgctaccagcgtctggtgccctcccgcagccgcatcgtgcggacgccctccctgaaggacagcccggcaggccgggggctcagcaaggccgccgtgtccgaggagctcaagtggtggcacgagcgtgcacgcctccggagcacccgaccccactcactggaccgccaaggagctttccgggtcaggagcctgccccttgggagagagggcttcggacgagccctgggaccccgggcacaggtgcccacagtttgtgtgctgtggagatcgcctgatggggcccctgtgcaagtctttgtacctgaaaaaggagagatcatcagccaggtgtaactctgcgccccacgctggaaaaaactgtttcatagaggggctgggctgagacccccccacccctgagtgcctctttcagctcccccatccccatcgcaggccgatgacctggagctaagaccttttattattttttttttacacgacttttttcagaagccctgacctaaggatttatatatgtggattgtcctcaatacccctgtgatatgattatgttttatcccccagagtttggcctactggacttaaggccttgcctgtctgactgacagcctctatctccttatataagacaagtggcaggggacgagtgaagcagagtgagccaccttgggagttctccaacgctctgtgctctggttctaagaaattccctggggaactgcccctggccctcctgtcccactattgctggaggctggacatggtacatactcatgcacatgactctcccccatttcccaggtctctgggtaccccagcctgggctgggggagaatctcttcccccttttctaatgtgctctgtgatgcacacaccaagtggtaggtcaaaggtcagtatatcccggtggtgtattgtcttgctagaccctgctattttcctgaccccctaaatcctctttagggacccagtcactataccctgtctatgccctgtgggctcccagacccctgagctttgagtcagtggcatcacagtttgtagcctcagggggtctggctgggggctggtccatgcttgtggttagtggacagcagccaccctttgacagctacctctggacatctcaagggcttgcagccccactgctccttctaacattttgtttgtttttgagatggagtctcgctctgtcgcccaggctggaatgctgtagcaagatttcggctcactgcaacccccgtctcccgggttcaagcgaatctcctgcctcagccttctgagtagctgggattacaggcaagcaccaccatgcctgctaattttttatttttagtagagatggggtttcatcatgttggccaggctggtctcgaactcctgacctcaagtgatccacctgccttggcctttcaaagtgctgggattacaggcatgagccaccgcacctggcccttctaacgttttttcatcatagtcccaaaaaccaatactttacaagtggtttttgaaaggcaccacttttgtggcatgttctggttgggagagggagtcacagttcctactccccccaccagctatgcttctgctctgagaaggtggttatttatacaaacatggacatactcactcccaagggctgatgagatgctgaattttctttgggggcattcattaattgtcccagctgcagcgactggagcaagtctggaagctgcctgtgctaagaccacccagctgtccctgggttctcatcctagggccttctttgcttccaggtcaggggacctgcttcaatgagaaagcaactgaattgaggctaggagaggtagggagagctgagttctgacttcacctgtgcagaactctctgcccccatgttacctggactggaacagactgtgaatatagcagaaggttccaagaactctggtgtctgacctagaagaggcacagttctctctactggaaagaaaacgatgtagccgattgcacaagggtgccaagggaagacccaggatggcccatcaaaggaacctgggggaggatgcaggaggctgaagggatgcacctggcatttctctcactgtgctcttaccgcatcagcaacccccaacttttgggcctactctgccccccatgcgtgaataccctgcttggatgctgtgcttttccggtttgtctctaagcccctttctccagggcatgttggtttccctggcctctcagtgtcctaactggagcccagagtgccttgttctgagccaggagacggctgagcactggccctccacacctaagcgtcctttacattaacttattggtcttgtataacacctggtgccattgccaagtggctgtgtcctcagctacagagctggaattgtgtggggtttagtgctaaatacttcaataaagtctgttttttgtgattggctg

SEQ ID NO: 30374 - DNA, 3328 bp, Homo Sapiens
aggcgctagaggcgggggcgccgggaggcgcgggctttgctcctggggtctcggccttggccggctggacctgaccctagggcggcttgcgcagctgtcgggacgtgactgcgttcagccgcgtcgggcgtgcttcccagacttgcccaagttcgggtgccctagctgcccctttgcagccgctggcctacccggcccgcgggtgagaaggttgcgacgggaggtgggtggaactcgccagcgccgggaccgcggattggctgcctcggctttctcttttccccgtgggctccggcgtgaggcgctgaagcggccggcagccggcgaccggccctcaccgtccgccgggttgcgctctgcttttgcggtgaggcgttgaccacgcccatatgaattggagctctccgccagtaggagtttccggaaggagtttgaatttttgtgatttttatgcttgtttggtcggtggaatatgttgggatttatgtttgcctctgaacaagtgtcttgctcacatcgtaaatgactttctctccgaaacgctaaatattctttcccgcaggagctcatatccttattttccatgacagatcttaacgacaatatatgcaaaagatatataaagatgataactaatatagttatactgagcctgatcatttgcatttcgttagctttctggattatatcaatgactgcaagcacctattatggtaacttacgacctatttctccgtggcgttggctgttttctgttgttgttcctgttctgatcgtctctaatggccttaaaaagaaaagtctagatcacagtggggctctaggagggctagtcgttggatttatcctaaccattgcaaatttcagcttttttacctctttgctgatgtttttcttgtcttcttcgaaactcactaaatggaagggagaagtgaagaagcgtctagattcagaatataaggaaggtgggcaaaggaattgggttcaggtgttctgtaatggagctgtacccacagaactggccctgctgtacatgatagaaaatggccccggggaaatcccagtcgatttttccaagcagtactccgcttcctggatgtgtttgtctctcttggctgcactggcctgctctgctggagacacatgggcttcagaagttggcccagttctgagtaaaagttctccaagactgataacaacctgggagaaagttccagttggtaccaatggaggagttacagtggtgggccttgtctccagtctccttggtggtacctttgtgggcattgcatacttcctcacacagctgatttttgtgaatgatttagacatttctgccccgcagtggccaattattgcatttggtggtttagctggattactaggatcaattgtggactcatacttaggggctacaatgcagtatactgggttggatgaaagcactggcatggtggtcaacagcccaacaaataaggcaaggcacatagcagggaaacccattcttgataacaacgcagtgaatctgttttcttctgttcttattgccctcttgctcccaactgctgcttggggtttttggcccagggggtgaactttatttcatttccacaggttgaaactggtgagtccagctaaatttgcaattccaactttcatcctaagaataataactgtaatggcaaagcggaaatgccagttcctcctgtattccattgagatgggatttcacattttcctctcatcaactcccctgtaatagctagcgtctttctagtgaaagagaagaattcctagaacttatgcatttttttcctgctgaatggaagtcttgagcaatgaagctatattgtccctacatattactatatattgaactgaaagttcttacataatcaatgtcaagttttgtcttattttgttttgtttgtttaaaccagtgtaggaaataaaagtgatgatatttaaaatagttctcagttgaagcagagaaatgccactgtgctagttgcccaaatgttgtatctattttaaatagtttaagctgatgtgtatgggagcctaaacaagtgtagtatcctgaacttctcccattaattgctattcacaattgggaaaagtgtggagattggttcctagtgagttttgtggcctactccacatttgttcttccttcctcagggttagtgatgaaaaaaagtaaatatctttttcatatgtccattagaatgtatgaaaaaaatcattttaactaaaagcaaaagaattttatcttatatctaaaaaatatataacttactatatgtttcagttgctctctgaacaaaaattatcttcaatttaatatgtggaatgtgttttctagctttctttgaattatgtatggcaacctggtttagcactggcatcctgaacagttaagagtcactgggaaattattgtatttctttataaatttactgtcatatcaattgctggaaaatgctatgatttttctattattaccttctaagttgtattctctcttacactgtagcctcaactaaggcaattctgctatgtttgttcttcactatgatttactgtgtgccaaaggagttttgacagggtacagagtattttactaaaagtatttttaaatgtttctcatgtgatttctgtaccttcttcctcctgccccttttgcttttttaaagaaactggggaaggatttatgaatacaccaccaccagagtggataatgcttagaattctttattggtggccctactatggtgatgatctagaactgacttacttcaggacagaagaaaaaacaatcacacccttaacctttaagccagttagatcagggggttgcaacaattgggttaaactttgggtatacattggaagcaccagggcatgtttgctttttttgtttatgtgtttgttttttgagacagagtctcacactgtggcccaggctggactccagcacagtggcatgatctcagctccgcctcctgggttcacgtgattctcatgcctcagcctcccgggtggctgggatcacaggcgtgcaccatcacgcccggctaatttttgtattttcagtcgagaccggcctggccaacgtggtgaaacaccgtctctactaaaaatacaaaaaattaggtgtggtggtgcgtgcctgtattcccggccactcgggaggctgaggcaggagaatcgctggaacctgggatgtggaggttgcagtgagccaagattgcaccactgtactccagcctgggcaacagagggagactccatctagactccatctcaaaaaaaaaaaaaaaaaaaa

SEQ ID NO: 30375 - DNA, 2022 bp, Homo Sapiens
attccccaacctgatagccctccgcgacgcattacgcaccgcggacagctggagaggccgaggcgctctcgctttgatttcggcgcctccgccctcgcggggagagattggctgcggccgcgggacggggtagtgagcgcgtcacttcctgccgctgccaggcgcgtcctcccgcgcgctatgacggccagcgcacagccgcgcgggcggcggccaggagtcggagtcggagtcgtggtgaccagctgcaagcatccgcgttgcgtcctcctggggaagaggaaaggctcggttggagctggcagtttccaactccctggaggtcatctggagttcggtgaaacctgggaagaatgtgctcaaagggaaacctgggaagaagcagctcttcacctgaaaaatgttcactttgcctcagttgtgaattctttcattgagaaggagaattaccattatgttactatattaatgaaaggagaagtggatgtgactcatgattcagaaccaaagaatgtagagcctgaaaaaaatgaaagttgggagtgggttccttgggaagaactacctcccctggaccagcttttctggggactgcgttgtttaaaagaacaaggctatgatccatttaaagaagatctgaaccatctggtgggatacaaaggaaatcatctctaggtggccgagaagatttgattttctttaaaaagacaagaataaggtctggttagggaatgaaaaatgtatacatttcggaacaactccattttatctaaaaaagttcttgtgattgccagtttatttgcagtctcttaatgtatcccccactctttcagccagtacttgagaaaatttttctgaaatatgtcattgaattgtattccagacacagaatacatgataaatactgatattatgggtaatctgctttccatatttacctatgatatttactgtgcagtttgtcattactagcttgcatggagtaggatgcagtcaaatttgccttagtgtttctgttcaaatagagacctgaattcaaatattgtagtttaggttcaaacagagtatggctgttgcaaaatttaccaaatttgttgattacctcttttattaaagaaatgttggggagagggtaatatattgtgacaatttttgcaacttacagggaataggacaggtcattagggtgtatttcccaggtttccaattgagaatctaaaccaagagaagtgagacaaaccatctaatatctgtatcatgctattaataggctgtgatgttgagtttctcacttactctttctgaggtccagggtccttatatgaagagattcatatatatgaagagattcgtctagagcagtggttgtcaaagtgtggtctgggggggcctcaagagcctttcaagggtattctaggtcaaagctgtttttataacactaagacattatttcactatttatagcttttccttttttttatttgagaaggagtcttgctctgttgcccacattggagtgcagtggcacgatctcagctcattgcagcctccgccacctgggttcaagcaattctcctacctcagcttcccgagtagctgggattataggcacccaccaccacacctggctaatttttgtatttttagtggagacggggtttcaccatgttggccaggctggtctggaactcctgagctcaagtgatctgcccatctcagcctcccaaagtgctgggattacaggtatgagccacaacgcccagccatcatttatctttttcactcattttttcatgagtatgcagaggagttttcaagaggctatctggtgtgatattgtaataggctgaatgcaaaagcagatacaagattccagctttcgtctgtcatcagacattgaagagatttggagaaatgtaaagcagcagtactcttctcactaatttttattgtggttagttagaaaaatggttatttttagtgggttttaatatgtgaaaaaaataaaattagctatttgcc

SEQ ID NO: 30376 - DNA, 2331 bp, Homo Sapiens
aaaaacaagctcagcgatggcggctccagaaggcagcggtctaggcgaggacgcccggctggaccaggagaccgcccagtggctgcgctgggacaagaattccttaactttggaggcagtgaaacgactaatagcagaaggtaataaagaagaactacgaaaatgttttggggcccgaatggagtttgggacagctggcctccgagctgctatgggacctggaatttctcgtatgaatgacttgaccatcatccagactacacagggattttgcagatacctggaaaaacaattcagtgacttaaagcagaaaggcatcgtgatcagttttgacgcccgagctcatccatccagtgggggtagcagcagaaggtttgcccgacttgctgcaaccacatttatcagtcaggggattcctgtgtacctcttttctgatataacgccaaccccctttgtgcccttcacagtatcacatttgaaactttgtgctggaatcatggtaactgcatctcacaatccaaagcaggataatggttataaggtctattgggataatggagctcagatcatttctcctcacgataaagggatttctcaagctattgaagaaaatctagaaccgtggcctcaagcttgggacgattctttaattgatagcagtccacttctccacaatccgagtgcttccatcaataatgactactttgaagaccttaaaaagtactgtttccacaggagcgtgaacagggagacaaaggtgaagtttgtgcacacctctgtccatggggtgggtcatagctttgtgcagtcagctttcaaggcttttgaccttgttcctcctgaggctgttcctgaacagaaagatccggatcctgagtttccaacagtgaaatacccgaatcccgaagaggggaaaggtgtcttgactttgtcttttgctttggctgacaaaaccaaggccagaattgttttagctaacgacccggatgctgatagacttgctgtggcagaaaagcaagacagtggtgaatggagggtgttttcaggcaatgagttgggggccctcctgggctggtggctttttacatcttggaaagagaagaaccaggatcgcagtgctctcaaagacacgtacatgttgtccagcaccgtctcctccaaaatcttgcgggccattgccttaaaggaaggttttcattttgaggaaacattaactggctttaagtggatgggaaacagagccaaacagctaatagaccaggggaaaactgttttatttgcatttgaagaagctattggatacatgtgctgcccttttgttctggacaaagatggagtcagtgccgctgtcataagtgcagagttggctagcttcctagcaaccaagaatttgtctttgtctcagcaactaaaggccatttatgtggagtatggctaccatattactaaagcttcctattttatctgccatgatcaagaaaccattaagaaattatttgaaaacctcagaaactacgatggaaaaaataattatccaaaagcttgtggcaaatttgaaatttctgccattagggaccttacaactggctatgatgatagccaacctgataaaaaagctgttcttcccactagtaaaagcagccaaatgatcaccttcacctttgctaatggaggcgtggccaccatgcgcaccagtgggacagagcccaaaatcaagtactatgcagagctgtgtgccccacctgggaacagtgatcctgagcagctgaagaaggaactgaatgaactggtcagtgctattgaagaacattttttccagccacagaagtacaatctgcagccaaaagcagactaaaatagtccagccttgggtatacttgcatttacctacaattaagctgggtttaacttgttaagcaatatttttaagggccaaatgattcaaaacatcacaggtatttatgtgttttacaaagacctacattcctcattgtttcatgtttgacctttaaggtgaaaaaagaaaatggccaaacccaacaaactaacattcctactaaaaagttgagcttggacatattttgaatttttgtaagtgaagatttttaaactgactaacttaaaaaaatagattgtaattgatgtgccttaatttgcataaatcataaatgtatgtcctctctgtaattgttttaatgtgtgcttgaaatatccagaaaacctatggagttagtaaattctgggctgtcatatgtaggatagccactttttaggtatatgtacatttatatttctatcaattccttagaaagtaaaataaatgaatagatc

SEQ ID NO: 30377 - DNA, 1689 bp, Homo Sapiens
acccaagttggaggtaggggcctgtggaaacatgaagagggtaaacagctgtgtgaagagtgatgagcatgtcctggaggagctggaaacagaaggggagaggcagctgaaaagcctccttcagcatcaacttgatacttctgtctccattgaggaatgtatgtctaagaaagagagctttgctcctggtactatgtacaagccctttgggaaggaagcagctgggactatgactttgtcccaattccagacactgcatgagaaggaccaggaaactgcttctctcagggaattagggcttaatgaaacagaaatcttgatctggaagagccatgtttctggtgaaaagaagacaaaactgagggcaactcctgaagcaatacagaaccgtcttcaagatattgaagaaaggatctcggagcgtcagcgcattctttgcctgccacagagatttgcaaagagcaaacagctgacccggcgagaaatggaaatagaaaagtctttatttcagggagctgatcgtcactccttccttaaggctctttattaccaagatgaaccccaaaagaagaacaaaggtgatcccatgaacaacctggaaagtttttaccaagagatgataatgaaaaaacgtcttgaagagtttcaacttatgagaggtgaaccctttgcttcccactcactggtctcagctacatcagtgggtgatagtggcacagctgagagcccatcattactccaggacaagggaaaacaggcagcacagggtaaaggccccagtctccatgtggcaaatgttattgatttttcacctgagcagtgttggactgggcctaagaagctgacgcagccaatagaatttgtcccagaagatgaaatccagagaaatcgtttgtcagaggaagagatccgaaaaattcctatgttttcttcatataatccaggggaaccaaacaaggtattatacctgaagaaccttagccctcgggtgactgaaagagatcttgtgtcattgttcgctcggttccaggagaaaaaaggacctccaattcaattccgaatgatgactggacgaatgaggggccaggcctttatcacctttcccaataaggagatagcatggcaagcattgcatctagtaaatggatacaaactatatgggaaaatattggtgatagagtttggaaagaacaaaaagcaacggtcaaatctccaagcgacttctctcatatcatgtgctacaggtagcactacagaaattagtggtagctagaatatatataaattgtgggtcctggatggtctttcttgaattggaatcttggatctaggatttatgtatagacaccagtttgtttggagttgaagaggaaaaactaactgagggaggggaaaaaagtaatttcagcttttggagagaactggtagaaaacattttctattatataattgaagactatataggacagatgatatgctgagtatgaagggtaaagtgcaaagagtattattttctcaggatgaattacaacggattattcctaaggatttttaaaaatctttataatttttctggggtcctcaatatttgtctctagagataacattctttcttagactgcttcgtatacacagaaataaaaaactaattaaatgttgaaaaaaaaaaaaaaaaaaaaaaaaaaaaaa

SEQ ID NO: 30378 - DNA, 4458 bp, Homo Sapiens
gaggtgccggcggctggcggccgcggagtcttcggcgagacctaccgggccctgtctgtgccggccgtgagctgcggcaggacggctggagattacttctctaacaggatcaccagtttgctccacaaagcacaatgtctcgatcacgacaacccccccttgtgaccggcatctctccaaatgaagggataccatggacgaaggtcacaatcaggggagaaaatctggggactggccccaccgacctcataggcttgaccatttgtggacataattgcctcctgacggcagaatggatgtctgcaagtaaaatagtatgtcgagtgggacaagccaaaaatgacaaaggagacattattgtcaccactaagtcaggtggcagaggaacctcaacagtctctttcaagctactcaaacctgagaaaataggcattttggatcagtctgctgtgtgggttgatgaaatgaattattatgatatgcgcactgacaggaacaaaggaattccgcccttgtccttacgtcctgctaacccgcttggcattgagattgaaaaaagtaaattttcgcagaaggacttagaaatgctattccatggaatgagtgctgattttacaagtgagaatttctcagcagcctggtatcttatagagaatcactcaaacaccagttttgagcagctcaaaatggcagtcaccaacctaaagagacaggctaacaagaagagtgagggcagcctggcctatgtgaaaggcggtctcagtacattcttcgaagcacaggatgccctctcagccatccatcaaaaactagaagcagatggaacggaaaaagtagaaggatccatgacgcagaaactggagaatgttctgaacagagcaagtaatactgcagacacattgtttcaagaagtattaggtcggaaagacaaggcagattccactagaaatgcactcaatgtgcttcagcgatttaagtttcttttcaaccttcctctaaatattgaaaggaatattcaaaagggtgattatgatgtggttattaatgattatgaaaaggccaagtcactttttgggaaaacggaggtgcaagttttcaagaaatattatgctgaagtagaaacaaggattgaagctttaagagaattacttctggataaattgcttgagacaccatcaactttacatgaccaaaaacgttacataaggtacctgtctgaccttcatgcgtctggtgaccctgcttggcaatgcattggagcccaacacaagtggatccttcagctcatgcacagttgcaaagagggctacgtgaaagatctgaaaggtaacccaggcctgcacagtcccatgttggatcttgataatgatacacgtccctcagtgttgggccatctcagtcagacagcgtccctgaagaggggcagcagctttcagtctggtcgagacgacacgtggagatacaaaactccccacagggtggcctttgttgaaaaattgacaaaactcgtcttgagccagctgcctaacttctggaaactctggatctcctacgttaatggaagcctcttcagtgagactgctgagaagtcaggccagattgaaagatcaaagaatgtaaggcaaagacaaaatgattttaagaaaatgattcaggaagtaatgcactccctggtgaagcttacccgcggagccctgcttcccctcagcatccgggatggggaagccaagcagtacggaggctgggaggtgaagtgcgagctctccggacagtggctcgctcacgccatccagactgtaagacttactcatgaatcgttgactgcccttgaaattcctaatgacctgttacagactatccaggatctcatcttggatctccgagtacgttgcgtaatggccacgttgcagcacacggcggaagaaataaagagattagctgaaaaagaagactggattgttgacaatgaaggactgacttctctaccatgtcagtttgaacagtgcatcgtgtgttctctgcagtcactgaagggggttctggagtgcaagccgggagaggccagtgtcttccaacaacctaaaacacaggaggaggtttgccagctaagcatcaatataatgcaggtttttatatactgtctggaacagttgagcaccaagcctgatgcagatatagatactacacatctctctgttgatgtttcttcccctgacttgtttggaagtatccatgaagacttcagcttgacctcagaacagcgccttttgatagtcctaagtaattgctgctatctagaacgtcacaccttcctaaatatcgcagaacattttgaaaagcacaacttccagggaatagaaaaaatcacacaggttagcatggcctcattgaaagaactagatcaaagactctttgaaaattacatcgagttgaaagcagatcccatcgttggctccttagaacctggaatttatgcaggatattttgattggaaggactgcctgcctccaacaggtgtcagaaactatttaaaagaagcactggtgaatataattgccgtgcatgcagaggtgttcaccatttccaaagaactggtccctcgggtactatccaaggtgatagaagcagtttctgaagagctcagtcgactgatgcagtgtgtttcatccttcagcaaaaatggagctttacaggcgagacttgaaatctgtgctttgagggacactgtggctgtttacctgacacccgaaagcaagtcaagttttaagcaggctttggaagccctgccccagctttccagtggagcagataaaaagttactggaagagctcctgaacaagttcaagagtagcatgcacttgcagctcacctgtttccaagcagcttcttcaaccatgatgaaaacataaatatctgccacataaaagaagtccaggaaaataacacgtaataagactgttcactctctaagtaccctaaaggtatttggtgtattaaacattgggtttgccatttttctcttttttcttcctctgacttcgaaaattgttggtatacatttcaaccaaaatgacctcatttgaaatgcccaggaagtatttgttttgccattcttactagatcagatcctgtatgactttaaaatacattttaaaatatattttgcatctcagcagaaggttgagtgctgcaggaagagctgcttctgcagggagttttctggaatggcgtggcacatattgaagcatttctcagtgtcccgttcacggaagcgcaggcagctcccacgacacacggagagactgactgatacgagatttggaaagctatgtagacatctttggagctcttactgtcctaaactgtacagctgtgcttaaaaccctcatttcatataaatggccttaagttttctaattcaagcgggtttttggaaaaatttatggtctccattaaaatacatattacaactggggtagattatttgtggtccaggtgtctgtgatttaactttgcgttttgctatctgatttttatttttcacagggctaagcatgagctttcattctcactcactcttaatttgtcgtgcgtcactacacatgcacgtgttgcagtccctgaggccctgtgtgttatctgtgatggagtgtgaatgtgtaacgggcactgtgttacactctgaggtgttggcggggcggtcgcagacttcagggtcccctaacggaaaggccaggctccgcgtggacggccaactccctgcccgctccttcagcaggtgactgtctctgccacttcttacctgctgaaggatcttgctcagtagctggaacaatgctgctgtcacacagtctcttctctgaaacttcaggatgctccttggtcaccaggcaatgggagctgtagaccagccgcatgcacttgccccacattcactgctgactggcttcactggaataggttcaggtcaccgggacttctctcagagtcagcggcccacccaactccctcataccgtcgcatctgaaaattttcagagaggaattctctttgtagtcggcttgtcagggttttcaagtttttctatggttatttttaaatctctttttttaaatgctaaaattaatgtcctcattaatgcaagtaattttagagcacagtgtagccatgtacagtttccattatttaaaataaataaatgtgttggttcatttggtgtatggggggacatcatggtaactggaaatgaaagtttaatctttcacaaatgtgcttgataaagctgttaagaattgtctttcctaagtatgttaactgttgtatctaactcaactgtgagctaagtttaaaaactgcaatcatgaatgtttgtgatattttaaatatctactacagcacattcagccaataaagaatctgcctttaatgtaagttgtaatttaaaaaaaaaaaaaaaaa

SEQ ID NO: 30379 - DNA, 2007 bp, Homo Sapiens
gtccgggatgaaaacgggagcttgtacccaggagtcacagctattgatatgatgtacaaggagggtctgcatggtgtggacaatgggatattaatatttgacaaggttcggatacccagggagaacctgctggataagtttggttccgtggctccagatggacagtaccattcgcctattaggaacaagagtgcaagattcaatgccatgctggcagcactgaccccttcgagattagctgtggctttccaagctatgggtgccatgaagcttgggttgacgatagccattcgctatagccacagccggaggcagtttgggcccaaaaccaaggaagaggtgaagatcattgagcaccaaacacagaccctgcggctgatgccccacctggccacagccttggccctgaccttcgtcagcaggtatgctggggccctcctggatgaggatgtcttccagggaaaggagctggtcaacagtcgctcgctgcaggctctggtggcagggctgaaggcctacagcacctgggagaacatccgctgcctgcaggactgccgcgagtgcactggaggcatgggttacatgatggaaaatcgaatctccggcttaaagtgtgacacagatgtgtttgccacttttgaaggtgacgatgttgttatgcttcaggttgtggggcgggaactgctggcccaatacaccaaacagtatgaagaaaaaccactctttggcctgctccaaaactgggctgaatctgtgggggacaagctgagaaccagtttcctggcatttaacatggacacagttgatgatctcgcctttctgttgaaagcagtgaaatttcgtgaaagggttcttcagcggggtttggtggccagaatttattataaggtaaagaccaagaaggaggattttttccatgcctggaactcgtgtctgcaccacgtggcttctctgtccctggcacacactcaccgagttaccttagagcagttctccctagcagtgaagagctgtcctgaccaagaggaccagactttgttaatgaagtttcgtctgttgtatggaaccaagctggtgtttcaggagcgggcctggtatttagaacataaatacttgactcccatggccagcacgaggatcaggaatcaggagagatgctgaaacacaaacaggtataagactcagtctccacatgaagggagctcatatccaaggacacaaaaccactttaaaaacataaatactggccaggtgcagtggctcatgcctgtaatcccagcactatgggaggctgaggtgggcagatctcctgagctcaggagttcgacaccatcttgggcaacatggtgaaaccctgtctactaaaatacaaaaaaattagctgggcgtggtggcatgtggctgtagtcccagctactcgggaggctgaggcacgagaatcgcttgagccctggagttggaggttgcagtgagcagagattgcgccactgtactccagtttggactacagagtgagactccatctcaaaacaaaacaaaacaacaacagcaaaaaacaacaaaacaaaacacaaatactctcacggggcatggaggttttcgaacgaacttggccataagaataaattcagagttgacagaacagacgtcttaggaataaatgccattcttatgctagaccttgaagagtagaaaattaagagatggtggcccaattgagaggggaaaatgcagttgaaacttcagacagggttgataaagtgaggacgatcatagacatggagtacttagacatattaataaacaataaagactttacctgtctaatggaaaacctggagaagtcgtcaggaaccagactacagtggaccctggagaaccttgaagaacatttttccttttcaggaaaacggaggttacagagaaaagtatatgtaatgatgctacagtaatgtatttctgtataacaaatgactccaaacttacgacttaaaacaaccaccactt

SEQ ID NO: 30380 - DNA, 1924 bp, Homo Sapiens
agtgtaataaggtcccggagaagtgtcactggccctgagtgggacccggtagcccgttcgctccgcgccggcggcctgtccccgcggcttggcgggctagggcaggggaaatgttgcaggaggagtcggacctctctctcattattgcccagatagtccaaaagctcaagggctccaatttgtactctcagctggaacggcaggcctgggccagtcttcagagacctgagattaaacttgaatcactgaaagaagatattaaggaattctttaaaatatcaggttgggagaagaaacttcagaatgctgtttatagtgaactgagtgtgtttcctttacctagtcatcctgctgcacctcctgaacatcttaaagaacctttggtatacatgaggaaagcacagggaagttgggaaaaaagaattttgaagagtttaaatagtatgtgcactgaactgagtatcccactggcacgaaagaggccagttggagaacagaaagaacttcttaataaatggaatgaaatgggaactgatgaaccagatttaagccttttcagacctgtttatgcacctaaggattttcttgaggtattaattaatcttcgcaacccaaattatgaaaacggtgattctcctagtttcaggactcatttgggtttaattcaagttccactgaaagtaaaagacatccctgaattgaaagaatgctttgtggaacttggcttaaatataggacaactgggtatagatgattctacacaagtgcctcctgaactttttgaaaatgagcatgtacgtattgggcaaaaagttctagcagaacaagatagtgctgctgctcaacagtacatcagacaaggaagtcccacggcactgagagctgaattgtgggctctcattttgaatatttccagccaacctgaggatgtcttgtattatgagcagcttaagaccaatgtgatacaacatgaccttttggtggacagtctaatctataaagatgtgaagttgacagcaagcaatgatgattattattttgtatttgaagattatttatatcaggtattactttgtttttcccgggatacatctgtgttgagtcactttgcattcaacagtgcctcgccaccaaaatcatacataagaggaaaactaggactggaagaatatgctgtcttttacccaccaaatggtgttatcccttttcatggattttcaatgtatgttgcaccactttgttttctataccatgaaccttccaaattgtatcagatattccgtgagatgtatgtgcgttttttcttcagactccattccatctcttctcatccttctggtattgtgtcactctgtctgctgtttgaaactcttcttcaaacttatcttccccaactcttttatcatctacgagaaattggggctcaaccacttcgcatatcatttaagtggatggttcgagctttctctggatacttagctacagatcagctcttgcttttatgggatagaatcctaggatacaactctctggaaattcttgctgtgctggcagctgccgtgtttgctttccgagcagtgaacctgatggaggtgacatcactggctgcagctgaagcagttcttgctgacctttctactttaaaagttatgcctcttcttcagatttttctgtttgctactgtcacctgatcttcttcacagtcactggcaacacatctagtttttcattagaaacaaatcatgaactatgcaaactctgcataaaaccaaaatgaaactttgcatataagccaataaagatcatgttccctcttcagttaaacctaagtagtttctcactttttgaaacaataactctgcaccaaatattgcatcgcatgctgctgattttcaagagagaagcaataaacacaacttctgct

SEQ ID NO: 30381 - DNA, 1920 bp, Homo Sapiens
atggaacagcggttagctgagtttcgggcggcgcggaaacgggcgggtctggcggcccaaccccctgctgccagtcagggcgcacaaaccccaggagagaaggcggaagcagcagcgactctaaaggcagccccaggctggctaaagcggttcctggtatggaaacctaggcccgcgagtgcccgggcccagcccggcctagttcaggaagcggctcagccccagggcagcacatcagagacaccatggaacacagccattcctctgccgtcgtgctgggaccagtctttcctgaccaatatcaccttcttgaaggttcttctctggttggtcctgctgggactgtttgtggaactggaatttggcctggcatattttgtcctgtccttgttctattggatgtacgtcgggacacgaggccctgaagagaagaaagagggagagaagagcgcctactctgtgttcaatccaggctgtgaagccatccagggcaccctgactgcagagcagttggagcgcgagttacagttgagacccctggcagggagataggacccagctgtgctgtcatgcagctaacctctgatgtggtcttcctcaccattggctatggatttgatttcaggtgtataggactaagggcagcttgcgggttagctctgtgactgcatagtttttctaccttctttccctgatcttttgctgccgtttgatctttgatagttttggtgaaactctctaaaatacattcactgtgggtccgacgcaatttataaaaattatgtactcaagaagggagacctgtttgtttcatttctcatctgtttgggagatgattttagagcactagaaaggcactggggagattctcagcttaaaacatccagcagtttgaagtatgattaggtacatcagggctgcattgtcaatgttctctttaagtcttttaacatttatagcaattttttttttcccggagagtttaggttgcaagttttgggtttcttgtttgtttttgttttgcttcctgctttaattctttaattttcagtcattactggtattgaaaaataaaatatctttaaaacatctcctcttcagaaataggtccctcttcattgcccatcaccatcttccactctcctattattttgccactactcagtaaaggaaggtaggaagagacaaacgcctaagtgcaggtgtggggagggatttcacaagtggttattaacggccagttcagcaagaagtgttgagtgtgtacaaaggggagggctggaagtgttaactccagacccgttggctgcttgagttgtttcttatattctaaagcagcagtccctaacctttttggcaccagggaccagttttgtggaacacagtttttccatggacggggtggtggtggaggatgaaacttccacctcagatcatcaggcattagagtctcataaggagcacgcaacctagatccctcgcatgcgcagttcacaatacggttctaagggctttagagtaagcagccttttcacctgtgggcctctggtgagaaattctgtaaattgtgataatcaggctggattttaatgctgcttttccagtacaatgttagagtttgggttcattaaaattaggcaaactcccattgggttagggcttctctcattccattttgtggctaaccttactgtgtttcagcccttgctgaaaattcttctgatacgtgttgcccttcctcacagccctttggccattgggagtttggctgtccctcagagccatccggtcaagcagatggtctgttctatctcacagaaaagtcttttcttccatgagttctgtctgaactgaacatgtaaaaagtatgggaaacagatgaatccctattaaacatgaagttttgattgtatttaagat

SEQ ID NO: 30382 - DNA, 3246 bp, Homo Sapiens
tgcggtgcctgcgcccgcggcggcggaggcgcaggcggtggcgagtggatatctccggagcatttggataatgtgacagttggaatgcagtgatgtcgactctttgcccaccgccatctccagctgttgccaagacagagattgctttaagtggcaaatcacctttattagcagctacttttgcttactgggacaatattcttggtcctagagtaaggcacatttgggctccaaagacagaacaggtacttctcagtgatggagaaataacttttcttgccaaccacactctaaatggagaaatccttcgaaatgcagagagtggtgctatagatgtaaagttttttgtcttgtctgaaaagggagtgattattgtttcattaatctttgatggaaactggaatggggatcgcagcacatatggactatcaattatacttccacagacagaacttagtttctacctcccacttcatagagtgtgtgttgatagattaacacatataatccggaaaggaagaatatggatgcataaggaaagacaagaaaatgtccagaagattatcttagaaggcacagagagaatggaagatcagggtcagagtattattccaatgcttactggagaagtgattcctgtaatggaactgctttcatctatgaaatcacacagtgttcctgaagaaatagatatagctgatacagtactcaatgatgatgatattggtgacagctgtcatgaaggctttcttctcaatgccatcagctcacacttgcaaacctgtggctgttccgttgtagtaggtagcagtgcagagaaagtaaataagatagtcagaacattatgcctttttctgactccagcagagagaaaatgctccaggttatgtgaagcagaatcatcatttaaatatgagtcagggctctttgtacaaggcctgctaaaggattcaactggaagctttgtgctgcctttccggcaagtcatgtatgctccatatcccaccacacacatagatgtggatgtcaatactgtgaagcagatgccaccctgtcatgaacatatttataatcagcgtagatacatgagatccgagctgacagccttctggagagccacttcagaagaagacatggctcaggatacgatcatctacactgacgaaagctttactcctgatttgaacatttttcaagatgtcttacacagagacactctagtgaaagccttcctggatcaggtctttcagctgaaacctggcttatctctcagaagtactttccttgcacagtttctacttgtccttcacagaaaagccttgacactaataaaatatatagaagacgatacgcagaagggaaaaaagccctttaaatctcttcggaacctgaagatagaccttgatttaacagcagagggcgatcttaacataataatggctctggctgagaaaattaaaccaggcctacactcttttatctttggaagacctttctacactagtgtgcaagaacgagatgttctaatgactttttaaatgtgtaacttaataagcctattccatcacaatcatgatcgctggtaaagtagctcagtggtgtggggaaacgttcccctggatcatactccagaattctgctctcagcaattgcagttaagtaagttacactacagttctcacaagagcctgtgaggggatgtcaggtgcatcattacattgggtgtctcttttcctagatttatgcttttgggatacagacctatgtttacaatataataaatattattgctatcttttaaagatataataataggatgtaaacttgaccacaactactgtttttttgaaatacatgattcatggtttacatgtgtcaaggtgaaatctgagttggcttttacagatagttgactttctatcttttggcattctttggtgtgtagaattactgtaatacttctgcaatcaactgaaaactagagcctttaaatgatttcaattccacagaaagaaagtgagcttgaacataggatgagctttagaaagaaaattgatcaagcagatgtttaattggaattgattattagatcctactttgtggatttagtccctgggattcagtctgtagaaatgtctaatagttctctatagtccttgttcctggtgaaccacagttagggtgttttgtttattttattgttcttgctattgttgatattctatgtagttgagctctgtaaaaggaaattgtattttatgttttagtaattgttgccaactttttaaattaattttcattatttttgagccaaattgaaatgtgcacctcctgtgccttttttctccttagaaaatctaattacttggaacaagttcagatttcactggtcagtcattttcatcttgttttcttcttgctaagtcttaccatgtacctgctttggcaatcattgcaactctgagattataaaatgccttagagaatatactaactaataagatctttttttcagaaacagaaaatagttccttgagtacttccttcttgcatttctgcctatgtttttgaagttgttgctgtttgcctgcaataggctataaggaatagcaggagaaattttactgaagtgctgttttcctaggtgctactttggcagagctaagttatcttttgttttcttaatgcgtttggaccattttgctggctataaaataactgattaatataattctaacacaatgttgacattgtagttacacaaacacaaataaatattttatttaaaattctggaagtaatataaaagggaaaatatatttataagaaagggataaaggtaatagagcccttctgccccccacccaccaaatttacacaacaaaatgacatgttcgaatgtgaaaggtcataatagctttcccatcatgaatcagaaagatgtggacagcttgatgttttagacaaccactgaactagatgactgttgtactgtagctcagtcatttaaaaaatatataaatactaccttgtagtgtcccatactgtgttttttacatggtagattcttatttaagtgctaactggttattttctttggctggtttattgtactgttatacagaatgtaagttgtacagtgaaataagttattaaagcatgtgtaaacattgttatatatcttttctcctaaatggagaattttgaataaaatatatttgaaattttaaaaaaaaaaaaaaaaaa

SEQ ID NO: 30383 - DNA, 2257 bp, Homo Sapiens
agactgaaaactaaagcctgcagagacctctgaaggaaaacctgtcccgggctctgtcacttcacacccatggctaaccctggaggtggtgctgtttgcaacgggaaacttcacaatcacaagaaacagagcaatggctcacaaagcagaaactgcacaaagaatggaatagtgaaggaagcccagcaaaatgggaagccacatttttatgataagctcattgttgaatcgtttgaggaagcaccccttcatgttatggttttcacttacatgggatatggaattggaaccctgtttggctatctcagagactttttaagaaactggggaatagaaaaatgcaacgcagctgtggaacgaaaagaacaaaaagtacgtatgcgcacctccctggatctttgtcaatgcctactcctctctaaagtgttctcagaagtggtgatgcaggtgcagattctagaaagcatgaggtgctcaggaactattcagggcaaatttcattcatctccacctgctaaaccccattacccatgggcttatggacctgtttttacaaacatctcatgggcaactactatttgccacataccaaactaaggcttttcccataccttgtaatatttaatttttgtaacaaccccatgatatagatattaaactataattttgaagataaaaacatcaaaatataaaagcaagtgctcctgggtgggactgtactttggtcttctagttgtaagttgggtattatttatgctctatcctgaaaaggaaagtgcatttgagtgaactgggacttttttatttcatctaaatctgatttctcacctttgacactattaatattttgaaccaattttttgggcattgtaagaattttaacagcatctgaaaaatatagcattaaaccactaaagctaaggaccctgatgaagtcactgcaccctccactacctctactggaacaggcactggtatccactgctgagagacccatagacggttcacatcacaggactctgtggagacaatccccagtaccaacttggagccgggtagactcggtgggtggcgagacccagaagagagacaacaatcactgcagtcagctcacaggaagccacatccataggaaaagggggagagtaatacatcaagggaacaccccaagggacaaaagaatctgaacaacagtcttcagccctagactttcccaaatgagaaggaaccagaaaaccaaccttggtaatatgacaaaacaaggctcttcaacaccccccaaaatataatactagttcaccggcaatggatccaaaccaagaagaaatccctgatttacctgaaaaagaattcaggaggttattaagctaatcagggagaggccagagaaaggcaaagcccaatgcaagaaaatccaaaaaatgttacaagaagtgaagagagaaatattcaaggaaatagatggcttaaagtaaaaacaatcaaaaattcaagaaactttggacacacttttagaaatgcaaaatgctctggaaagtctcagcaatagaattgaactagtagaagaaaaaaattcagagcttaaagacaaggtcttcgaattaacccaattcaacaaagacaaagaaaaattaataagaaaatatgaacaaagcctccaagaagtctgggattatgttaaacaaccaaacctaagaataatcaatgttcctgaggaagaagagaattctaaaagcctggaaaacatatttgggggaataattgaggaaaacttccctggccttgctagagacctagacatccaaatacaagaagcacaaagatcacccaggaaattcatcaccaaaagatcttcacctaggtacactgtcatcaggttatccaaaggaaaccattttaagagctgtgagcagaagcaccaggtaacttacaaaggaaaaatctatcagattaacagcagatttctcagcagaaaccctacaagctaagacagaattggggccctatcttcagccccctcaaacaaaacaattatcagccaagaattttgtatacagcgaaactaagcatcatatttgaaggaaagatacagtcatcttcagacaaacaaatgccaagataattcacaccaagccaccactacaagaactgataaaaggagctctaaatattgaaacaaatcctggaaaacagagcttctttaaagcataaatcacgtgggacctattaaaaaacacacacacacaagttaaaaagc

SEQ ID NO: 30384 - DNA, 5325 bp, Homo Sapiens
gtgaattatgattttccttagtcagaagcactcatttttacccatgtagaccatccttaggaattaaatattggttatttaatgtagattataatgggaagctgatttttttcacaatggcatatttcaaggacttggttccaaactgagctgaagcttcccaatgcgttttgtacagtctgggaaaaactgtgctgcactggcccacttttgaaggccatcatgctctgtaatataaggatatcatcttattgctgatatctttggagagtccctagcagacacagaaaatgaatggaggcaaagagtgtgacggaggggacaaggaaggaggtcttccagctatacaagttcctgtgggttggcagcgtcgtgtggatcaaaatggagtgctttatgtcagtcccagtgggtctttgttatcttgcttggagcaggttaaaacatacctgcttactgatggaacatgcaagtgtggcttggaatgtcctcttattcttcccaaggtatttaattttgatcctggagctgctgtgaaacagagaaccgcagaagatgttaaggcagatgaagatgtcacaaagctatgcatacataaaagaaaaattattgcagtggccacacttcataaaagcatggaagccccacatccttctctggtgctcaccagtcccggaggaggaacaaatgcaactccagtagtaccttctcgggcagcaactccaagatcagtaagaaataagtctcatgaaggaattacaaattctgtaatgcctgaatgtaagaatcctttcaagttaatgattggatcatcaaatgccatgggaaggctatatgtacaagaactgcctggaagccaacaacaagaactccaccctgtctacccccgacagagattgggcagcagtgaacatggacagaaatctccattccgtggcagccatggaggcctgcccagcccagcgtcatcaggttcccagatatatggagatggttcaatctctccaaggactgacccacttggaagtcctgatgttttcacaagaagtaatcctggttttcatggagctcccaattctagtcctattcacctgaataggactcctctttctccaccttcagtaatgctacatggttctcctgtacagtcatcctgtgcaatggctggaaggactaatatacctctttccccaaccttgactacaaagagtccagtaatgaaaaaaccaatgtgtaatttttcaactaatatggaaataccacgagcaatgttccaccacaaaccaccccaaggcccacctccccctcctccaccttcttgtgctcttcagaaaaagccattaacatctgagaaagatccacttggcattcttgaccctattcctagtaaaccagtgaatcagaaccctgttatcattaatccaaccagtttccattcaaatgtccactctcaggtacctatgatgaatgtaagcatgcctcctgctgttgttcctttgccaagtaatctcccattgccaactgtaaaacctggtcacatgaatcatgggagtcatgtacaaagagttcagcattcagcttcaacctccctgtccccttctccagtgacatcccccgtgcacatgatggggactggaattggaaggattgaggcatcgccccaaagatcacgctcatcttccacatcatcagatcatggaaatttcatgatgccacctgtaggaccccaggccacttctagtggtattaaggttccacccaggtcaccaaggtcaacaatagggtccccaaggccatcaatgccatcaagcccttctaccaagtccgatggacatcatcagtacaaggatatccctaacccattaattgctggaataagtaatgtactaaataccccaagcagtgcagcttttcctactgcatctgccggaagtagttctgtaaagagtcagcctggtttgctgggaatgcctttaaatcagatcttgaaccagcacaatgctgcctcctttccagcaagtagtttactctcagcagcagccaaagcacagctagcaaatcaaaacaaacttgctggtaacaacagtagcagcagtagcaattctggagctgttgccggcagtggcaacactgaaggacatagcactttaaacaccatgttccctcctactgccaacatgcttctcccaacaggtgaagggcaaagtggtcgagcagcactaagagataagctgatgtctcagcaaaaagacgcattgcggaaaagaaaacaaccacctacgacagtgttgagtttgctcagacagtctcaaatggatagttctgcagttcctaaacctggacctgacttgctaaggaagcagggtcagggttcatttcccatcagttcaatgtctcagttactacagtctatgagttgtcaaagctctcacttgagtagcaatagtaccccgggttgtggggcctcaaatactgctttgccttgctctgctaaccagctgcattttacagatcccagtatgaactctagtgttcttcagaacatacctttaagaggggaagccgtgcactgccacaatgcaaacactaactttgttcacagtaacagtccagtccccaaccaccatcttgcaggtttaataaatcagattcaggctagcgggaactgtgggatgctcagtcagtcgggcatggctttaggaaattccttacatcccaatccacctcagtcaagaatttcaacgtcctccactccagtgataccaaacagcattgttagcagctataatcaaacaagttctgaagcaggcggttcaggaccatcatcctccatagccatagcgggcaccaaccaccctgccatcacaaagacaacatctgttcttcaagatggcgtcatagtcaccactgcagctggaaacccactgcagagtcagctacccattgggagtgattttccttttgttggccaggagcacgcacttcattttccatccaacagcacttcaaacaaccatcttccacaccccttgaaccccagcctcctcagttctctacctatctctttgccagtgaatcaacagcatctcctaaaccagaatctattaaatatcctccagccttcagcaggagaaggtgatatgtcatcaataaacaatactttgagtaaccatcaactgactcatctacagtcgctgttaaacaacaatcagatgtttcctccaaatcagcaacagcagcaacttctccaggggtaccagaatctccaggcgttccaaggacagtccacaattccttgcccagctaacaataaccccatggcttgtctgtttcagaactttcaggtgagaatgcaggaagatgcagctctcctaaacaaaagaataagcactcagcctgggctcacagcacttcctgagaatccaaacactacacttccaccttttcaagatacaccttgtgagttgcaaccgaggattgacccatctcttggtcaacaggtgaaggatggcctcgttgtgggtggcccaggtgatgcttccgtagatgccatttacaaagcagttgtcgatgcagccagcaaaggaatgcaggttgtcatcaccactgcagtcaacagtacaactcagatcagccccattccagctctgagtgccatgagtgccttcactgcctcaattggtgacccattaaatctctccagtgctgtcagtgcggtcattcatggacggaacatgggaggtgttgatcatgatggtaggctgaggaattcaagaggggctcggctgcccaagaatctagaccatgggaaaaatgtgaacgaaggagatgggtttgaatatttcaagtcagcaagttgccacacatccaaaaaacagtgggacggggagcaaagccccagaggggagcgaaacaggtggaagtacgaggaatttttagatcatccaggccatatccacagtagtccttgtcatgaaaggcccaacaatgtctctacactgccatttctgcctggggaacagcacccaatactgttaccaccaagaaactgtccaggggataaaattctagaggaaaatttcaggtataataactacaaaagaactatgatgagttttaaggagagactagagaacactgtggaaagatgtgcacacataaatgggaatagacctcgacagagtcggggatttggagagctgctaagcactgcaaagcaagacctggtcctagaggagcagtctccaagttcctcaaatagtttggaaaattctctggtcaaagactacatccattacaatggagactttaatgccaaaagcgttaatgggtgtgtgcctagcccttcagatgctaaaagcattagtagtgaagatgacctaaggaacccagactccccctcttcaaatgaattgatacattatagaccaaggacgttcaatgttggcgacttggtctggggccaaatcaaaggactgacttcctggcctggaaaattagtaagagaagacgacgttcacaattcatgtcaacaaagccccgaggaagggaaggtggagcccgagaagttgaagacactaacagaaggtttggaagcctacagccgtgtccggaaaaggaacagaaaaagtggaaagctaaataaccatttagaagctgctattcatgaggccatgagtgaactggacaaaatgtctgggactgtacaccaaatcccacagggtgacagacaaatgagaccccccaaacccaagaggaggaagatctccagataacagagactactccactaatgcgcagtgtttattaaaggaacatgcacagatgtatctgtatataggtattgatatagccacagttatatcaatatttagactatggcagatagctaccaccaccacagggtgctaaaagaaacagtgatacaaaatttttttgatcaggaaggataatgaatgctggaaaagccaatcaaagtctctgtgtgatgagagtgatcaatggtcaagagattactgagaaactctttttctataatactaaattgtgattataagaaatagtccaaatgtttctgaagaattttcaatgttgtatatagaaaatacagaatttcatggtgatatcagaaatgtaaatattgtacagtattgtcatgtacaagcgtacctaatgcacactttatcttttattgtacaaagaaatagtgtacaaaattctttggtttctatggagtacacctaccagagactaccagtgtaaagtgataaataaaaatacaacctaaatgcttttctatgataatgtaaaaaaaaaaaaaaaaaa

SEQ ID NO: 30385 - DNA, 4584 bp, Homo Sapiens; identical to SEQ ID NO: 28054

SEQ ID NO: 30386 - DNA, 3810 bp, Homo Sapiens
gcctgcggagaaaagctgggaacggccgcttccggcatgttcatctctggacgaagaacggccgacaagtggagggcggaggagagactccaatgcccagcgggcagtgcgcgggcggcgcttgcgcgatgcgcggacgggggggcggtcgggccatttaaatgtgtgtttgtgggtgaaatggctgcgcaggtcggagcggtgcgcgtagtacgggcggtggcggcgcaggaggagccggacaaagaggggaaggagaaacctcatgctggggtctccccgcggggagttaaacggcagcgccgatctagcagtggggggtctcaggagaagcgggggcggccgagccaggagccccctctcgctccccctcaccggcggcgtcgcagccgccaacatcctgggccgctgccgccaacgaatgcagccccaactgtcccaggccctgttgagcctcttctcctgccgcctccgccgccaccttcgctggcacccgccgggcccgctgtcgctgcccctctcccggccccaagcacctcggccctcttcaccttctcgcctctgacggtgagcgcggccgggcccaagcataagggccacaaggagcggcacaagcaccatcaccaccgcggccccgatggtgatcccagctcctgcggaaccgatctcaagcacaaggacaagcaggaaaacggcgagaggactggaggggtgcctctgatcaaagcccccaagagagaaacaccagatgaaaatggtaaaacccagagagccgatgattttgtcttgaagaaaataaagaagaaaaagaaaaagaaacaccgagaagacatgcgaggaagacgccttaaaatgtacaataaggaagtacaaaccgtctgtgctggcctgacccgcatcagtaaagaaattctcacccaaggacaaataaatagcacttcaggacttaataaggagtccttcaggtatctgaaagatgaacagctgtgccgattaaatttgggtatgcaagaatatcgggtaccccagggagtacaaacaccttttatgactcaccaggaacattctattcgtagaaatttcttaaaaacaggtactaaatttagcaactttattcatgaggaacaccagtccaatggtggtgctcttgtccttcatgcttacatggatgaactctcatttttgtctccaatggagatggagagattttctgaggagtttcttgctttgacattcagtgaaaatgagaaaaatgctgcttactatgctttagcaatagtgcatggagcggctgcttatctcccagacttcttggactactttgcttttaatttccccaacactccagtgaaaatggaaattctgggcaagaaagatattgaaacaaccaccatttcaaattttcacactcaggtcaacaggacatactgctgtggcacctaccgagcaggtcctatgcggcagataagtctcgttggagcagtagatgaagaagttggtgattatttcccagagttccttgatatgttagaagaatcaccatttctgaaaatgactttgccctggggtacactttctagcctccgactccagtgtaggtcccagagtgatgatgggcctataatgtgggtaaggccaggagaacagatgatccctacagcagatatgccaaagtcacccttcaaaagacgacgatcaatgaatgaaataaaaaatctccagtacctacctcggaccagtgaaccccgcgaagttctctttgaagataggactagagctcatgctgatcatgtcggtcaggggtttgactggcagagtacggctgctgttggagttttgaaagctgtacaatttggtgaatggagtgaccaacctcgcataaccaaagatgtgatttgttttcatgctgaggattttactgatgttgtacaaagacttcagttagatcttcatgaacctccagtttcccagtgcgtacagtgggtagatgaagctaaactaaaccaaatgaggcgggaaggcattcgttatgctagaattcagctttgcgacaatgatatctacttcatccctagaaatgtcattcatcagttcaaaacagtttcggcggtgtgcagcttagcctggcatataaggcttaaacagtaccaccctgttgtggaagccactcaaaacacagaaagcaattctaacatggactgtggtttaactggaaagcgagaattagaagttgactcccaatgtgtgaggataaaaactgaatctgaagaagcatgcacagagattcagctgttaacaactgcttcatcatctttcccacctgcatcagaacttaatctacagcaagatcagaagactcagcctattccagttttaaaagtggaaagtagactggactctgaccagcaacacaatctgcaagaacattcaaccacttctgtgtgatatgtacatattcaaacacattttttaacttttttaaattttgatgtgaagttatagttttataactggcttaagttaagttttattggagaaatcttgcctataattctataaagagaaatgacattccacaaatgtcaagcatatcttttttacacagattatgcaaagttaagagttgtatcttatcccgttagtacagtatgtaatagtgggtctgctgctactttctgttttaaggtgtgaggtaacaattcaatctcttcttcaaatcaaaatgagaattctctggaataacagattcttgtttggtaaattattcacttcccttaattttatcttgccttgtctcttgccatatttgctgtttttatggataaataagatttatggtttagtacttgtgtctttatggcacaggttcaatttctacagtgaaaatggcataggttgcaggaaagaatttctgcatctggtacatgggcaagtaagttatttagttctaaccacaaataacaagtagtttccaaggaaatttcagtggctctctggtttcttaacaaaagagaaagcacagcactttctgatccaaactgtcttttttttgtatctgttatttaaagcccagtggatatttcaattaaaaaaaaaatctaaagatgaatagtccttggtcattcattatccatggctcattaatctcttctagaatatatgctaactgttgaagatattttgggtaaaagagataatgttgacatgatactctattgttctgcttcctggcatcctcacattttgtggggataattttgcttcctaaactgatcacaactattaaacttagagaataataatagtctttctgatgaggctgccatattttgagcatcaatcttatgataaactattcttgtcacttggcatcaacctcttcatgataaatatctactactgagacacttcaattcacagttttaactggtgaatacctgggtttatttactattactctgtgttgctattttctaagaaagaatacagcactagacttcatcctagagtttcaggtaggctaatgcttagtgcctgagtatttaaattttcttttcaaacaggcacagttcacattgctagtatggtcctaactttctgttattttagaatgttaacatgattcacattatactttctcttagttaataatacagtaggccttttgtttattaatggaagagtactccccacacctaagaccagattcttatatctccctggttacagtgcaatttggagattttttttttttcctggatggtaagatttgaaatatttacattaacataggcaaaaaaaaaaaaaaaa

SEQ ID NO: 30387 - DNA, 2076 bp, Homo Sapiens
ctccgcccctttaacctttagggtgcgcgggtgcagtatatctcgcgctctctcccctttccccctcccctttccccaccccgggcgctcaggttggtctggaccggaagcgaagatggcgacttctggcgcggcctcggcggagctggtgatcggctggtgcatattcggcctcttactactggctattttggcattctgctggatatatgttcgtaaataccaaagtcggcgggaaagtgaagttgtctccaccataacagcaattttttctctagcaattgcacttatcacatcagcacttctaccagtggatatatttttggtttcttacatgaaaaatcaaaatggtacatttaaggactgggctaatgctaatgtcagcagacagattgaggacactgtattatacggttactatactttatattctgttatattgttctgtgtgttcttctggatcccttttgtctacttctattatgaagaaaaggatgatgatgatactagtaaatgtactcaaattaaaacggcactcaagtatactttgggatttgttgtgatttgtgcactgcttcttttagttggtgcctttgttccattgaatgttcccaataacaaaaattctacagagtgggaaaaagtgaagtccctatttgaagaacttggaagtagtcatggtttagctgcattgtcattttctatcagttctctgaccttgattggaatgttggcagctataacttacacagcctatggcatgtctgcgttacctttaaatctgataaaaggcactagaagcgctgcttatgaacgtttggaaaacactgaagacattgaagaagtagaacaacacattcaaacgattaaatcaaaaagcaaagatggtcgacctttgccagcaagggataaacgcgccttaaaacaatttgaagaaaggttacgaacacttaagaagagagagaggcatttagaattcattgaaaacagctggtggacaaaattttgtggcgctctgcgtcccctgaagatcgtctggggaatatttttcatcttagttgcattgctgtttgtaatttctctcttcttgtcaaatttagataaagctcttcattcagctggaatagattctggtttcataatttttggagctaacctgagtaatccactgaatatgcttttgcctttactacaaacagttttccctcttgattatattcttataacaattattattatgtactttatttttacttcaatggcaggaattcgaaatattggcatatggttcttttgggttagattatataaaatcagaagaggtagaaccaggccccaagcactcctttttctctgcatgatacttctgcttattgtccttcacactagctacatgatttatagtcttgctccccaatatgttatgtatggaagccaaaattacttaatagagactaatataacttctgataatcataaaggcaattcaaccctttctgtgccaaagagatgtgatgcagatgctcctgaagatcagtgtactgttacccggacatacctattccttcacaagttctggttcttcagtgctgcttactattttggtaactgggcctttcttggggtatttttgattggattaattgtatcctgttgtaaagggaagaaatcggttattgaaggagtagatgaagattcagacataagtgatgatgagccctctgtctattctgcttgacagccttctgtcttaaaggttttataatgctgactgaatatctgttatgcatttttaaagtattaaactaacattaggatttgctaactagctttcatcaaaaatgggagcatggctataagacaactatattttattatatgttttctgaagtaacattgtatcatagattaacattttaaattaccataatcatgctatgtaaatataagactactggctttgtgagggaatgtttgtgcaaaattttttcctctaatgtataatagtgttaaattgattaaaaatcttccagaattaaaaaaaaaaaaaaaaaaaaaataaaaaaaaaaaaaaaa

SEQ ID NO: 30388 - DNA, 2786 bp, Homo Sapiens
gaattcaggtaaaatattctgcctgaccagggctacatgataagccacgtacttgatcactttgtagggtcgcagcacccttcttactactattttaggtaattcaggtttctgacggggaagccagtggagctgagcgggctgcaagaggggtgggttctggatgagaagttgggacgcgtgacgagggagtagagagtgaaccttggcttaaaaggaaggaaaataactgtgaagaaaagatgacccaacttgaaataaaacctgaagaccttatctcccacttgagagagagaagaagctgaaagccatcagcttgcactctgggctcacagacagagagggtgaggggttgagcccagatctatgacttcagacccctgtctcggcccctaggcctgatcattcattcaaactctcaataaacacggattaccagaccctgcgcagggaacacatctgggaaaacagctgcaacctcggataccagcacgggacaagctatctcagggcaatgaggaacaactaaagagaatcccaggaaccaggtaaccaatcgccagaagccctccgccctcatggtccattgggtcaaggccccactgccgcctcgtatcgccagcctccagtcctgcctccacgacgcgcccttccccaaggctggccgggtctggatgtcgccatcccctattcggagctacagacctcgcagctgaactcttaaaaagaacctcgcttcttcctcacggtgctccagctccacacaccgtactgagcctcgccagccaccgtacgcgaggtcgcggcgcgtccgtgacgtcactgatgtgcgcttctcccgcactaagggaaacatggctctagcgcggccggtgcggctcttttccctcgtgactcggttgctcctggcgccgcgacggggcctcacggtccgcagtcccgacgaacccctgccggtggtgcgcatcccagtggctctacagcggcagttggaacagcggcagagcaggcggcggaacctcccgaggccggtgctggttcgacccggaccgctgctggtttcggcgcggcggccggagttgaaccagccggcgcgcctcacactgggccgttgggagcgcgcgccgctagcctctcaaggctggaagagtcgacgcgcgcgtcgggaccacttctccatcgagcgcgcgcaacaggaggcgccagcggtgcgaaagctctcgtctaagggcagctttgctgacctgggcctggagccccgtgtgctgcacgcactacaggaggctgcgcctgaagtcgttcagcccacaaccgtgcagtctagcaccatcccctcactacttcgcggccgccatgtcgtttgcgccgcagaaaccggcagtggcaagactctcagctacctcctgccgctgcttcaacggctcttgggccagccaagcctggactcccttcctatccccgcgccccgaggcctggtccttgttccttcccgagaattggcccaacaggtgcgggctgtggcccaacccttgggccgctccttgggcctgctggtgcgggacctggagggaggccacggcatgcgtaggatcaggctgcagctgtccagacagccttcagcagatgtgcttgtggccactccaggggctctgtggaaggccctgaaaagtcgactgatcagtctggagcaactctccttcttggtgttggatgaggcagacacactgctggatgaaagcttcctggaactggtggactacatcttagagaagagccacatagcagaaggcccagctgacttggaagaccccttcaatcccaaagctcagttagtgctggtaggagccacatttcccgaaggtgtaggccagttgctgaataaagtcgccagcccagatgctgtcaccaccatcaccagctccaagctccactgtatcatgcctcatgtgaaacagacatttctgagactgaagggagcagataaggtggccgagctggtgcacatcctcaagcatcgtgacagagcagaaaggactggtccctcaggaactgttctggtgttctgtaatagctccagcactgtgaactggctgggatatattctggatgaccacaaaatccaacacctaaggttgcaggggcaaatgccagccttgatgagggtaggaatcttccagtccttccagaagagctcccgagacatacttctctgcacagacatagcctctcggggcctggacagcactggtgtggagctggttgtcaattatgatttccccccaacgctgcaagattacatccacagagcagggagagtgggccgtgtggggagcgaggtgccaggcaccgtcatcagttttgtgacccatccctgggatgtgagcctggttcagaagattgagctggcggctcgccgaaggagaagtcttccaggactagcatcctcggtgaaagagcctttgccccaagcaacctgattttgacaaatctgattaaaatgtgatgctagaacagggatctttcccagtatcttgagtgggtgaccacacttgtcagtgggaggctctgggctgccctgtcggctccttgagggcgggatgaactgctttgtgacttggaaaggtacgctgctggccagcattggagaagaagctgctgagcatggctttctgtagtctttagcaagacacaagtggattttgactttgtatcatgtcatgatttctaacaataaatgatgtttttatgtgcctcccctaagaataattagcaccggggcggaattc

SEQ ID NO: 30389 - DNA, 4602 bp, Homo Sapiens; identical to SEQ ID NO: 22507

SEQ ID NO: 30390 - DNA, 1687 bp, Homo Sapiens
ggggagcctttggagagaagggagagggcccgtcggacagccacagcggccagcgcagcggcagcggcggcggcaccaccatcaccgctcgcaccccagccgcccggcccgcgaccaggcagcggcggccgccggcgggatcggaggaggcggcgaagcgactccgatcctccctctgagccttgctcagctctgccccgcgcctcccgggctccggtccgcgcggcggggtccctgctcctgcgccccgggcgcgcttcccggacaccccggtccccgcagccaggacaaagccatgaagccagcgctgctggaagtgatgaggatgaacagaatctgccggatggtgctggccacttgcttgggatcctttatcctggtcatcttctatttccaaagtatgttgcacccagtcatgcggaggaatccctttggtgtggacatctgctgccggaaggggtcccgaagccccctgcaggaactctacaacccaatccagctggagctctcaaacactgctgtcctgcaccagatgcggcgggaccaggtgacagacacgtgccgagccaacagcgccacaagccgtaagcggagggtgctgacccccaacgacctgaagcacttggtggtggatgaggaccacgagctcatctactgctacgtgcccaaggtggcctgcaccaactggaagcggctcatgatggtcctgaccgggcgggggaagtacagcgaccccatggagatcccggccaacgaggcacacgtctccgccaacctgaagaccctgaaccagtacagcatcccagaaatcaaccaccgcttgaaaagctacatgaagttcctgtttgtccgggagcccttcgagaggctagtgtccgcctaccgcaacaagttcacccagaagtacaacatctccttccacaagcggtacggcaccaagatcatcaaacgccagcggaagaacgccacccaggaggccctgcgcaaaggggacgatgtcaaattcgaggagtttgtggcctatctcatcgacccacacacccagcgggaggagcctttcaacgaacactggcaaaccgtctactcactctgccatccctgccacatccactatgacctcgtgggcaagtacgagacactggaagaggattctaattacgtcctgcagctggcaggagtgggcagctacctgaagttccccacctatgcaaagtctacgagaactactgatgaaatgaccacagaattcttccagaacatcagctcagagcaccaaacgcagctgtacgaagtctacaaactcgattttttaatgttcaattactcagtgccaagctacctgaaattggaataaagggggtggggagagggagagaatcatgctttttaatttaagatttttatttgtcaaaagaattatatggatattgggttattttgtaaattaatatttctttggggatgatgctgcgagcagcatagtgagaattatttaaaatccttcgtagggaaggacagctgtctttgcaggggaaataggatgggtcgttcttgtctgtagaagtgaatactgcaacactgtctcaaaggtttcttgtgttctggtgaattccatgaattgtgcattccataaattctaattaatattatttatagcaaaaaaaaaaaaaaaaaaaaaaaaaaaaaa

SEQ ID NO: 30391 - DNA, 5499 bp, Homo Sapiens
tctgcccgccttctggctccccgggagcccagactggtcggagcccgagcggtggcagcgcggggagccccacgcgccgaagggagcggacccgacaggacggccctagaggaggtgctgccgccacagtagcagggaccggagtctcgagccgcggcctcccggaccgtgctgcccaggccagctcagggacagccgggagtacgaaagccccaccctctggggcaccccgggagcggaggcgggagcggggacgcgagcaacctctccccctgttggagagaaaagacccttaccactcgggtgagggaaagaagagacccctggaggggacgcctctctcctgcctagaggcgaggaagacccctgtactggccggggaggagacccccagaagtggaaagaagggagctttccgtagggaagcagagtgagaccaccctagcgcgcccccgcccctccaaacacacactctcaacagttcaggactttggaggcaaagagagacggggctgtgcctgtggagtaggcaccctcggcccaccactattcacaggagacaggagtccttacgttcagaagccactccagggaaagaagaggaatcggctttcagccttctggagaggggaagacctccccctcaacttcctcgtgcctagacagtggaacggggtggagcccctccgctcctatctccagcagacagaaagagccctccacctcagaaagatccagtttgggggggaggggaactcccccaagggggaggagacaactcctggttgggagaggctcctcccctcctcccccgggtaacaagcagggtgtggggggtgtgccaccttccccaagtaggacctccttctcctccccctccccctcctccaaccttgactcctcatcctcaggggacccagttcccctcaccaacttgggaggctcagcctcgtccaggaagagccactgaggatgagagccgtcacctgcctctgaagaggggaatccctccaaccccaaactccagtaccaggtggttccctccctttgccggaggaaccttggagacagaacccagaagtaccatggcttctgacctagagagtagcctcacctccatagactggctcccccagctgaccctccgagctaccattgagaagcttggaagtgcctcccaggctgggcctcccgggagcagccgcaagtgttcaccagggtcacccacagatcctaatgccaccctgagcaaagacgaggcagcagtgcaccaggacggcaagccacgatacagctatgccactctcatcacctatgccatcaactcctctccagccaagaagatgaccctcagcgagatttaccgctggatctgtgataacttcccctattacaagaatgctggcattggttggaagaattcaatacggcacaacctttctctcaacaagtgtttccggaaggtgcccagacctcgggatgaccctgggaagggttcctattggacaattgacacctgccctgacatttcccgaaagagaagacaccctccagatgatgatctgtcccaagactcaccagaacaggaggcaagcaagagcccacggggaggcgttgcagggagtggagaagcctcactgcctcctgaggggaatccgcagatgtcacttcagagccccacatctatagccagctacagccagggcacaggatctgtggatggtggagcagtggcagcaggggcttcaggccgagaaagtgctgagggtccccctcccctctataacaccaaccatgactttaaattctcctactcagagatcaactttcaggatctaagctggtccttccgcaacctctataagtccatgctggagaagtcctcttcctcctctcagcacggcttttcttctctcctgggggacatcccaccctcgaacaactactacatgtatcagcagcagcagccaccgccacctcaacagcagcagcagcagcagcagccgccacagccacctccccagcagtcccagccacagcagcagcaggcacctgcccagggcccctcagctgtagggggtgctcctccactgcacaccccaagcacagatggttgtaccccaccagggggaaagcaagctggggcggaaggctatgggcctccccctgtaatggccatgcatccacccccgctgcagcatggaggctaccaccctcatcagcaccatccccactcccaccctgcccagcagccaccacctccacagccacaggcacaaggccaggctcccatcaacaacactggctttgcctttccttctgactggtgctctaatattgactctttaaaggaaagcttcaagatggtgaatcggctcaattggtccagcattgagcagtcacaattctcagaactgatggagagtctacgacaggcagagcagaagaactggaccctcgaccagcatcacattgccaatctgtgtgactccctcaaccacttccttactcagactggtcacgtgccccctcaagggggtacccaccgcccaccagcccctgcccgtattgctgactcctgtgccctcaccagtggcaaacaggagtcagccatgagccaagtgaactcttatgggcacccacaagctccccacctctaccctggcccatcaccaatgtacccaatccccacccaggactcagcaggatacaatcgcccagcacaccatatggtccctcggccatcagtgccacctcctggtgccaatgaggagatccctgatgacttcgactgggacttgatcacttagtgcatcacagagtgtggacatcagcccagggccgcgtggtgaaatctggcagtggggaaagagcaaccccagcccgtcccttccccccgtctgtatatagacatatatcctctttttgttctttctctgtcagagaagccactgcaagatgctgccgaagataaccctctctttcctgcctcattcttctctcttccttcctgttttttcctagttcttttattattattcttatattattattattattattggttatatactgtccatagtctcctgtccctacatcatggatcatgtccaccttttgctaatttaaaatcatcaggctggaagatgaagccatgatagctacagagaaaggttttagactccagtttacctttctcttggagaaactcaatgctaatcccaccttttggccctaaattgttttttgttcccatcagtttcaggccaggactggagaggccacattaccaagtagaaagggtctgaaacattacttggcagccaagaatttggaggttttaaaatggtgctaattctgtcctctgaggtcttccttgtccctttataccttcaatccttacttctgccagtctgtatttcctatcaagggtgaaagtgatgatggtggtgcaggagggtgacaataaaatcctagtggaattggagaccattggaagggatggaatataagtcagtgtgaaactgagtatacactgccatgttacatcagtgtccattggcttgttttgagcctgttctctaagaagataggattggttttagcccaaactctgcttctatggtagggcatgaggacaactattcagcatggttttagcttcttggagatgattccaacttaactattttggctttttaaacataattttctctgaaaattaattgtggctcttatttgcatttacgaatgatcttcccatccctttttcccattcagcaaatattagtttgtcctcctttaattgtttgcccaaatcttccacccatcttttttcttccctcattttctgggattctcaagaaagaaaaagtaacccattatcactctgagtttcgtcgtgccctgagacatgatgggaatctcattcccacctctcatagcagagccaaacctttagtgttggtggtaggaggatggggagaggaaaaaagagctggcaaagaaatggatagggaatattttagttctttaaatatataggcagatgcttctcttggaatccagatcatctggctgaagcttttgcaagtaggctttgaggggtgaaggagattggtggaggagagtaaataatctagaggcaagagttcagtgagggccaagggggacccccagaaaaaggtatggagctaactcatctcttttacaaggggtggccatgacttactgttgcaaagtactcagtgtatatttaatgttgattgttgaattttagttacgagagggaagaacaattttacttctgtccttatttcacttgctgaaaagctgtgggacaaaatgtatggaatagacaaggccactttctttgtgatttctgcttttcatgcatattattttatttacccataatttccaagaggtttggcgttccgctctcctgcttttttctttcatccacccctttcctttttttggaagggggttatatatgagagttcattgaagaagtccagtgaggctgaagtaaaggggcaagatagggcagttaactaaagagcactttatttctttgaagcctttctaagaaagaaatgggggtgcgagtggcttgaatctcccatgatgttggagggcacttagtggggttgaagtatgacataatatttcccattggggaaaggagaatttctcttagagggtggcaaaatgcctttgcccagtgtccctattttaggcatcttttccttccttattccttccagtcagggtgtgtcctatacaaaacttcccatcagttctcctcaatattccccatttgtaaatgatcacttctcttttctaaacccttttcctgttcagatccatacaggatttgcaagggtaggatcatacatgcaaatgccccttgttcatctgtgtcttctgcaaactagtctcatgaagaattctggcgtgcagccagggtagctgaagtttgggtctgggactggagattggccattaggcctcctgagattccagctcccttccaccaagcccagtcttgctacgtggcacagggcaaacctgactccctttgggcctcagtttcccctccccttcatgaaatgaaaagaatactactttttcttgttggtctagcattgctggacacaaagtgtagtcattattgttgtattgggtgatgtgtgcaaaactgcagaagctcactgcctataagaggaaataagagagaaagtggaggagagggacaaaaggagtaattatttggtatagatccacccatcccaacctttctctcctcagtccctgctcctcatgtttctggtttggtgagtcctttgtgccaccacccataatgctttgcattgctgcatcctgggaagggggtatatggtctcacaagttgttgtcattgtttttttgcatgctttcttaataaaaaaaaaaaaagaatgtttacagttttatcttaaaaaaaaaaaaaaaaaa

SEQ ID NO: 30392 - DNA, 2844 bp, Homo Sapiens
acccaaccctgtcattatttcccctccgactgggccggtgccatcggaaaccggagtgaccagaggagggacacgcatccaatttcactgggctgcaagatatcaataagccttgcctctttaaactacttatgtacaaataaaagtgatggtgagaacctggctcaggaaatgcagtagcaggccatattgcatccaaaggaattactcacagctgtgctgtgtgcattctctgtgggcctagcagggaaggggacagccctgtggcaatgggcatgacacggatgctcctggaatgcagtctcagtgacaagttgtgtgtcatccaggagaagcagtatgaagtgattatcgtcccaactttgttggttactatcttcctcatccttcttggggtcatcctgtggctttttatcagagaacaaagaactcaacagcagcgttctggacctcaaggcattgcccctgttcctccacctagggacctaagctgggaagcaggacatggaggaaatgtggctttgccacttaaggagacatccgtggaaaactttctgggagctaccacacctgccctggctaagctgcaggtgccgcgggagcaactctctgaagttctggagcagatttgcagtggtagctgtgggcccatctttcgagccaatatgaacactggggacccttctaagcccaagagtgttattctcaaggctttaaaagaaccagctgggctccatgaggtacaagatttcttagggcgaatccaattccatcaatacctggggaaacacaaaaacctggtgcagctggaaggctgctgcactgaaaagctgccactctatatggtgttggaggatgtggcccagggggacctgctcggctttctctggacctgtcggcgggatgtgatgactatggatggtcttctctatgatctcacagaaaaacaagtatatcacatcggaaagcaggtccttttggcgctggaattcctgcaggagaagcatttgttccatggggatgtggcagccaggaatattctgatgcaaagtgatctcactgctaagctctgtggattaggcctggcttatgaagtttacacccgaggggccatctcctctactcaaaccatacctctcaagtggcttgccccagaacggcttctcctgagacctgctagcatcagagcagatgtctggtcttttgggatcctgctctatgagatggtgactctaggagcaccaccgtatcctgaagtccctcctaccagcatcctagagcatctccaaagaaggaaaatcatgaagagacccagtagctgcacacataccatgtacagtatcatgaagtcctgctggcgctggcgtgaggctgaccgcccctcacctagagagctgcgcttgcgcctagaagctgccattaaaactgcagatgacgaggctgtgttacaagtaccagagttggtggtacctgaactgtatgcagctgtggccggcatcagagtggagagcctcttctacaactatagcatgctttgaagagtctcgggcaagaaacattcatgcatgagtatatgttcttggaatcaattcctctaagaacagagaatggtctttcccagggacacaaagggagaaatgggacatggattcttgatcttcctttacacatttctcgggaaatctgaaatgatgctggatgggactctacacatcctgagctaagacatactgtcagtctcacttctgctgtcccagtcctagaaatcctgggtagaagtggtggacctgtgcaaaggaggttttagaactctgcagtatttgttggggcatggcacaaataagctcatccctcccgtccgaggctagtttcctctggaaccacatttttatctagatgaaaatttggaatgaaatgaaggaatagaaatccaataaaagagttgaagggaaagaaaatttaaggttcttcttgctcaggattacagatatggaccaacacctccttcaagaaaaggtggtaggacacaaagttcttcagtcctgagccctacatgtggggttggaggagaactataacggaaaaacctctgagtttcaccttaggtatagataaaagaaagatggtccccttttatctgattctgagacaggtaaattctgtttgttactacgtttaattagaaggtggaggagtcatttcatgattaagaacattcaacatgtattgttcattaagctagcttcctagttccgattagactaaggagactaagcctagagagtcaatgttagaacagtgaaaagaattctgtgtgtgtgtgtgtgtgtgtgcacaataaataggaaatgtagaaaccaagcaagaaggcttagtagctcagtctttaacaagggctagaaaagaatgtaatctgatatggaaggatagcagcttctaattttcaatcatctgttgatatactgtgaaacttattttattaaattaatatttattaaatggaaatatgcttttctggtttataactactaaaaatatcatagggaggataaaagtaaataagtgaaagttaatgccaatagaaaaattcaagagataatgtacaatgtcagaaaagggattctttatgtgtaaatggggataatacctatttcacaaggttgttctgaggattgatacgttttgagtatgtatttgtacactatctggcacatatgcgctcaataaacgtgtttctccttttaaaaaaaaaaaaaaaaaaaaaaaaaaaaaaaaaaaaaaaaaaaaaaaaaaaaaaaaaaaaaaaaaaaaaaaaaaaaaaaaaaaaaaaaaaaaaaaaaaaaa

SEQ ID NO: 30393 - DNA, 7207 bp, Homo Sapiens
ggccgcgtcgaccatgaaaaagcggcggcggcgggagagaggaggaggcggcggcggggcagtgaaactacggtagctgccccctgagctggtggtgtggctttgtggggagggcgtagttcctaatcccctttccgggcagccgccggggctcggggctgtgagcggccgtgaggctgcctccccgggccccctgcctccgccatgttccgcagggcacgccttagcgtgaagccgaatgtcaggcctggtgtaggcgccaggggctccacagcttccaatccccagcgtggacgggagtctcccaggccgccggagcctgccacggactctgcttccaagcccgcggagcccacagatgtgcccacagtcgatttcggtggagcggagccccaagaaaaggctcctaggagcagtactgaaaagactggtggtgacaatgatgttgaagaatccagtagatcttcctctactgtttcacagagaagaaagcgaatatcaagtacttctagcctggttaagtctagtgtcagtgttccttcagaatctcatcccttatctacaattaatcaagaggctccacagccaactgccacttcaacaaaagagaaacagccatgctcagacagataccgaatatacaaagcccagaaactgagggaaatgttaaaagaagaattgagaaaagagaagaaacaatggaaaaacaaatatgctataaatgaaagtcagaggccaccagatcgttcaaaaatgactatgagagacttcatatattatctaccagataataatccaatgacttcttcactggaacaagaaaagaaaactgaaaagccatcgactccagtccagacaagagagcaagaaggtaagagtactcctaatgctgaagataatgaaatggaagaagagacagatgatgggccattactggttcctcgagtaaaagtggcagaagatggttccattattttggatgaagaaagtttaactgtagaagttttaagaacaaaaggcccttgtgttgttgaagaaaatgaccccatatttgagcgcggttctacaactacatactccagctttaggaaaaactattactctaaaccatggtcaaataaagaaacagatatgttttttttagccatcagcatggtaggaactgacttttctatgatcggacaactttttcctcacagagcaaggatagaaattaagaataaatttaaacgggaagagaaaacaaatggatggagaatagacaaagcattccaggaaaagcgcccttttgacttcgatttttttgctcatttgcttcagaaagttcttgctgaagaagagaaaagaaaacaaaaatctgttaaaaatcacagtttaaaggagaagaaatccaccaaaccacggaaaaatgtaaaagtgaaaaaagttgcctgtgaaggagtgaataatgatccagatgagtctatgagttctagaatttcagacacggaaagatctcagaaggatgctcagacagttgaagaagagtctctgaccttatcaagggaggatgcagagcaggttgcattagaagtagacctaaatcaaaagaaaagaaggaggaagaagcaagatggagctaatgaactgggagtaaacaatcttttagaaaatgccactgttcaggcgggtccttctaaaggagaaaaacacaagaataaatgtcaggctataaggcctgagctaaaggaaggtgaatgcagtaaggagcagatgctttcctgcacacaaaacatagatggcattgtgggttttgcctccactgaaaaagttgagaaaagaactgaccccatcctttcattaagtaatcaacaagatgccacatcagtagcaactgagtcttcagaatcaagcacttcagatttgccttcattcgaagttggaattagagcattgtgtgaggtgaataatgctgagggtagttgtatagaagaaagaaatgttgacctaaaaaataattcactggaaattgatcaaacagaaaatgttaaaccaatgttgagaggtcgcttccaaagacctaaacccaatttgtcaagggctgggaagaaatcagttctttcacaaggcaaaacagagtcagagagcaagaattcacattcaaaaacttcagttgaaaagaaccacgtggaaaaagataaaatgaatacattggacattttgagaatggagactacagagagagagaatccagaagctgaaactgtatctgttttgggtgaaaaaaattgtctgcaggaagggagtcaactaaaggctttaagacctgtacaagtgaggggccgattgcaaaagccaaagccaaatgcaggtaaagctgctgaaagaaaagaaattctcatatcacaggaagaaattggggccaatgtagagaagaatgaaaatgaatcctgtgctgatagagatactcctcaacacatggaagatcaatcgcgtaaagattttgaagaggaagatgtcatattacagcctgagaaaaatgattcttttcaaaatgtgcagccagatgagcccaaggttcttaatgaatgtctaagcgttcaagagaataataaggcaaataaacttaaccaagtcccaattctaaggactcgatttcagaaaccaaagccaaatataggaagaggaactggaaggagagaaatttcctcaaaggaagaggtactagagaagattcttgtctctggggaaatggcggcagcattgagagaaactgtaagactagacacctcaccaaaggagatggtaccagcagagattaatactaaagaaatgcagtcagatttaaaagaaactggaagaagagccatttctcccagggagaagattctagatgtgattgatgacaccatagaaatggagacaggtctgaaagcaatgggaagagagatttgtctaagggagaagacgccagaggtgattgatgccactgaggaaatagacaaagatttggaagaagctggaagaagagaaatatccccacagaaaaatggcccagaggaggttaagcctctaggtgaagtggagacagatttgaaagcaactggaaatgagagttccccaagggagaagacaccagagggtactgatgccactgaggaaatagacaaaaatttggaagaaactggaagaagaaaaatatccccaagggaaaatggcccagaggaggtcaagcctgtagatgaaatggagacagatttgaacgcaactggaagagagagttctccaagggagaagacaccagaggtgattgatgctactgaggaaatagatttggaagaaactgaaagagaagtatccccacaggaaaatggactagaggaggtcaagcctctaggtgaaatggagacggatttgaaagcaactggaagagacagtttcccaagggggaagacaccagaggtgattgatgccattgaggaaatagagatagatttggaagaaactgaaagagaaatatccccacaggaaaatggcctagaggaggttaagcctctaggtgaaatgcaaacagatttgaaagcaaccggaagggagatttccccaagggagaagacaccagaggtgattgatgccactgaggaaatagacaaagatctggaagaaactggaagaagagaaatatccccagaggaaaatggcccagaggaggtcaagcctgtagatgaaatggagacagacttgaaaacaactggaagagagggttcctcaagggagaagacacgagaggtgattgatgctgctgaggtaatagagacagatttggaagaaactgaaagagaaatatcgccacaggaaaatggcccagaggaggtcaagcctgtaggtaaaatggagacagatttgaaagaaattagagaagaaatttcccaaagggaaaaggtgctagcagagttcagtgctataagggaaaaggagattgatttgaaagaaactggaaaaagagacattcccatcatggagaaagtatcaggaaagatggctgttgttgaagaaatggaggcagatttgaaagaaactggaaaagaaaattttagagagagaggatctgaagagatctgtgttactgaggaaaaggtggcagaattgaaacaaactggaaaaacagacatttctccaagggaaaacgagctagaggagaccagtacctcaagacaaactgacacacatttaatgcagagcggtagcaatgacttcagtgctatgccttcactagatattcagaacattagcagtgaagtactgtcgatgatgcatacacctgtagaagaaaaaagaaattctgaaaaagaagtatcaagtcacttcagtcatttcaagatttcttcacagactcatgaatctgataaaacagaagtccaggggattcaatctccagatgttccagagcagttttcagatattaatttaagcaaatctcttcctcaagaacagaagccacttgaaattaaaccagcaccttttgtgaggagccgattcaaaagaccaaaaccaaacttagcaagagcagctttgaagagagagactacagaatcagaaaaatatatatatgagaagaaatcagaaaccaagaaaatggagactattgtgatgcaagaaaataatgaacaaactgatactctcccttctcaacatgatgaagcttccctaatgatatcaagagaaaaagacacattaggtcacaggaatgaggaggctgtgatattgccatgtacacagactgaaaggaacctttcaccttcaaattcttgtgaacctaaagaggagtctcagtcagcaccagtccagaaaaatgactcagttgtttctgtggggactaataatgtaaacactttccagcaagaaatgaaggaaagtgttatccaaactgctcgacaagtaaggggccgacttcagagaccgagaccaaatataagaaagacaggacagaggcaaatagtagacaaaggtgaagccaaaggcataattaaggaaggaagaacgatattaccaaaagatgaaactgaaaagaaagtcttaactgtgtcaaattctcaaattgaaactgaaattgaagttccatcgtccgcagttccagaacacagaatgtatgaaaatcaaagtcaggtggttcttgtagaaaaccttcatgttaacaaaacaaatgaaacaatcagacatgaaaataaaccgtatgttcctagttcagcacaaatgacaagaaggaaattccaaaaggctaagccaaatttgggaagagcacacagtaagaaagaggaaccagttttagaaaaagtcacaacagatcagagcaaggaaggcaagccagaagatcatttgctgcagaaaggagcttccaacacccagctccttctaaaagaaaaagctgagcttctgacatctctggaggtttcagcaagaaaagattgtgtaggttccaaagagtctgctttggcaaaaatagatgcggaattagaagaagttggaccatcaagaagggttggagaggaaactgtaggagataattcaccatcttcagttgttgaagagcaatatctcaataaactaacaagctgtccacaaccgttaaacgaaacaagttactctaaaattgccctggatgggaaaacaactatctcttctacatctgagtatgagagaaatcgtggtgaaaggagaagtcataaaaagttcaaaccaaatgtcaccagaggtcgtggatcaaaacgagttcggggtaagacctctaagaaggaacctagagcttccaaggccatgctggtgactcttcgggcttcccaggaagaagatgatgatgctgacgattttgagtctgactatgaggaagaaagctatcatcttgctcccgaagaagtaaacaaagctccagtatttgtacctgttggtctcagatctcctgaacctgtttctgctcagattgaggaaacaatggaagagcttgaaataactgtgaatgtcccagatgtaggatgcatagctgttgttgaacatgagctaccaaacacagatgtgactactgaagaaatgaaacaagaagaaaatttgagtgtaccgtttgaaatgaccacaagtgaacatatccaagatgaaccaggtaccaatgatggaagcaccgaagctgcaataactttacttacaatgggagatctagtattgcagtcagagatcagtagtgaacagggtgatgtaggagtatgtatacttcctcatgttcattcaaaggataaaagccatattccttctagcctagataatgtaaatcacaaaattgttcatgaatgtcaggaactttcttcacctgtcattactacatctcctgcatcatttgaagaaaacaagattgtattggaggaacaaagttccagagaagaaataagtttaatggagaaagtaaaggagaatgctacaccaaccaggaatacaatttctaaagtgaccagtaatttgagaataagaagtaggcttgctaagcctaaaccaaatcttgagaagactttagggaccaacaggcttgatgattatcaggaagtttccagtttgtgtgtaaccaaaggggcagaaatggaaactcaaagagaaacagagaaaaatgcttccaaagcaacagaattggaaaataaaaaccttggaccagttacaacagcagagaataaggatcagagcaaattggcatgtgtacatggtatcaaagggaccagtatttcttcagaagtaaacctaactgaaagaaacgaaaatcaagaagagagctctcaggaggttcacatgttgtcagttgctccagttgcttcctctgagacagggccctgcacacttggtttggataggggtcttggtgaaaattctgttgaagagccccagataaaggactctaaaggagacagtgtgcttacacttcctgtgccagaggtaaaagaatgtacagtataataagggatagcaaggtgttttcctccatttaaaaaaaaaaaaggtataatttacatacaataaacttcacctcttttatcttcatttttctttatttcttcttttttttttggagacagtcttgttctgttgcccaggcaagagtgcagtggtatgatctcagctcactgcagcctctgccacccagattcaacagattctcctgcctcggcctgccgggtagctgggactacaggca

SEQ ID NO: 30394 - DNA, 1535 bp, Homo Sapiens
gcgcgttcgggagcttcggccctgcgtaggaggcgggtgcaggtgtgggtgctgagccgcccgccgcctggagggggagacagcttcaggacacgcaggccgcagcgagggcccgggcccgggggatcccaggccatggatgctccccactccaaagcagccctggacagcattaacgagctgcccgagaacatcctgctggagctgttcacgcacgtgcccgcccgccagctgctgctgaactgccgcctggtctgcagcctctggcgggacctcatcgacctcatgaccctctggaaacgcaagtgcctgcgagagggcttcatcaccaaggactgggaccagcccgtggccgactggaaaatcttctacttcctacggagcctgcataggaacctcctgcgcaacccgtgtgctgaagaggatatgtttgcatggcaaattgatttcaatggtggggaccgctggaaggtggagagcctccctggagcccacgggacagattttcctgaccccaaagtcaagaagtattttgtcacatcctacgaaatgtgcctcaagtcccagctggtggaccttgtagccgagggctactgggaggagctactagacacattccggccggacatcgtggttaaggactggtttgctgccagagccgactgtggctgcacctaccaactcaaagtgcagctggcctcggctgactacttcgtgttggcctccttcgagcccccacctgtgaccatccaacagtggaacaatgccacatggacagaggtctcctacaccttctcagactacccccggggtgtccgctacatcctcttccagcatgggggcagggacacccagtactgggcaggctggtatgggccccgagtcaccaacagcagcattgtcgtcagccccaagatgaccaggaaccaggcctcctccgaggctcagcctgggcagaagcatggacaggaggaggctgcccaatcgccctaccgagctgttgtccagattttctgacagctgtccatcctgtgtctgggtcagccagaggttcctccaggcaggagctgagcatggggtgggcagtgaggtccctgtaccagcgactcctgccccggttcaaccctaccagcttgtggtaacttactgtcacatagctctgacgttttgttgtaataaatgttttcaggccgggcactgtggctcacgcctgtaatcccagcactttgggagaccgaggcaggtggatcacgaggtcaggagacagagaccatcctggccaacacggtgaaaccctgtctctactaaaaatacaaaaaattagccgggcgtggtggcgggcgcctgtagtcccagctactcgggaggctgatgcagaagaatggcgtgaacccggaaggcagagcttgcagtgagccgagatcacgccactgcactccagcctgggtgacagagcgagactctggctcataaaataataataataataaataaataaaaaataaatggttttcagtaaaaaaaaaaaaaaaaaa

SEQ ID NO: 30395 - DNA, 4215 bp, Homo Sapiens
acggtaggggagcagagtgggcaggccgggggtgagggctcgcgctccgggagctgcacggggctgcgtggaaagagcgccgagcggtggcgtcgttgtcgccccctcctcgtcgggaagaatcgtttggtctcctgccgtgcccggaatcccagtcagaagttccagcctgccactgttctctgatgccatgccagcaccaactcaactgttttttcctctcatccgtaactgtgaactgagcaggatctatggcactgcatgttactgccaccacaaacatctctgttgttcctcatcgtacattcctcagagtcgactgagatacacacctcatccagcatatgctaccttttgcaggccaaaggagaactggtggcagtacacccaaggaaggagatatgcttccacaccacagaaattttacctcacacctccacaagtcaatagcatccttaaagctaatgaatacagtttcaaagtgccagaatttgacggcaaaaatgtcagttctatccttggatttgacagcaatcagctgcctgcaaatgcacccattgaggaccggagaagtgcagcaacctgcttgcagaccagagggatgcttttgggggtttttgatggccatgcaggttgtgcttgttcccaggcagtcagtgaaagactcttttattatattgctgtctctttgttaccccatgagactttgctagagattgaaaatgcagtggagagcggccgggcactgctacccattctccagtggcacaagcaccccaatgattactttagtaaggaggcatccaaattgtactttaacagcttgaggacttactggcaagagcttatagacctcaacactggtgagtcgactgatattgatgttaaggaggctctaattaatgccttcaagaggcttgataatgacatctccttggaggcgcaagttggtgatcctaattcttttctcaactacctggtgcttcgagtggcattttctggagccactgcttgtgtggcccatgtggatggtgttgaccttcatgtggccaatactggcgatagcagagccatgctgggtgtgcaggaagaggacggctcatggtcagcagtcacgctgtctaatgaccacaatgctcaaaatgaaagagaactagaacggctgaaattggaacatccaaagagtgaggccaagagtgtcgtgaaacaggatcggctgcttggcttgctgatgccatttagggcatttggagatgtaaagttcaaatggagcattgaccttcaaaagagagtgatagaatctggcccagaccagttgaatgacaatgaatataccaagtttattcctcctaattatcacacacctccttatctcactgctgagccagaggtaacttaccaccgattaaggccacaggataagtttctggtgttggctactgatgggttgtgggagactatgcataggcaggatgtggttaggattgtgggtgagtacctaactggcatgcatcaccaacagccaatagctgttggtggctacaaggtgactctgggacagatgcatggccttttaacagaaaggagaaccaaaatgtcctcggtatttgaggatcagaacgcagcaacccatctcattcgccacgctgtgggcaacaacgagtttgggactgttgatcatgagcgcctctctaaaatgcttagtcttcctgaagagcttgctcgaatgtacagagatgacattacaatcattgtagttcagttcaattctcatgttgtaggggcgtatcaaaaccaagaatagtgagtggctctttcactggcaattctcaaatgatatacatttaaagggcagattttttaaaaagatactactataataaacatttccagttggtcattctaagcatttacccttttgatactctagctagtcaggtactccaaattgactttgcagcagggtggcagggtcaggagagtctggtcctgcctagctcagatttcatggcacctgcacttgaagcaagtcacttctttatcacaggtgtcttgaaacattagcttcttttaccaacctgagaaaattaggatgacctggcaaataagatcttgaataggccaaaagcaagtatcttgctgtgtgtagtctcttggttaaagtgaagaaacagtactgttcacacctttcttcactgagattccagtgtacatgagaacatatatttattgcatgattttctagatacacagtctatgcattattcatatacatttattttagcctaaagtggttttcaaatccagttcttcaagccataaatgaccaagatccaagcaatctgaatttgtttttgtgattatttgactggaatgcttcttaagtggaataactatactccgttatccacccgatttcctaatgtaattgaaagattttctattttgccacacacttggagacaataagggtttttagttttatctactcttctattgaagttaaagaaagaaaaaaagatttttttatttgtattaatgaaaagctttagtttaaaataaggagatccagaataaaaagaagagactgatctcttcaattattgtcatctgtagccaccagcacatcactcttatgtaatccccaaaggcttggcatgccgtaagtgtgtggtgggtagactgctgccggggaatcgtacttcttatttagtaatgataagacttttcattatttttggaattttaaagatgacataaataagtttaaatatcaatttggggagtaaggtttaatattgccatcgggtattgagacaggaggaagtttctgtttttctccatttagacataggtcaattaaaatatttgggtttaaaatgactaaatgctttaaacatattgtagcttaagatatatgtgttaagatatatacatgagaaactttaaaaggtaactactgtgcatgcctgatgcttaatagaatacttagtggcatcaaatgtttgcagcagtctccataattatattcagtcccttctaatactgtatcaatgtaaatgaaataaatatattcaaattggctttttgatatgcatcaagtggcattttgttcctgtgtttaatagtgatctgtatacagctgtgcacatattgtcatcacttattctagcatcactgttaaggctgtgattatgtttgatattcacctggattttaatacaagccaatatcagcttcccattgtgtaataacttgggtgtttaggagtcttttcacattttttggggatatgaactagatgttcaagaactccttctggactgtggatactgaatcagtgtactattggctgcagaatttgtttcaattgaaaatagactcaggaagattgctgctcagaatatcatataatgtttattttttgaggtgtttttgtttttatttgtgtgtttttttttttttaagtcagcttggaacttttttcctgggtagtatttgggagagggaaaggctgtactatatatttatttctaaatgttttgactgggcatttttcttttaatgaaatatgtggactgctctagcaaaccctattttcagctactatttgaatattcttgaacaccaccactgaagagtttcatatacaccaaataatgtctcatctctatagtacagggaatataaaattggtttcctgtggtcatgatcaagatagtagtattattacacaagaaacttggtctgcagtctggaagcttgtctgctctatagaaatgaaaatgcagcatgaagttgacattgtggaaatgaaagtaattgggtattagaaatctgaaagtactgtcatctaaaagcaattgtgattttattgtaattggttgtcactgttgtacggtgtctagaattaaagaatacatgtaaactttcatggtatttagcctttcttaaatttttttaaaatttaaactttctaacctatgtattcaacttctgtatttatatttaatcagtggttcatgttatataatacacccttaactagttaaatggaatgttggtatggtacagagtaccatattgctaagaaaactgtcttataaaagatgtatatgtgtgaagacatgaaagtttaatgtacagaatggttggagaaatgcctatggtgaattaaagcttcatatctgctttctgaaaaaaaaaaaaaaaaaa

SEQ ID NO: 30396 - DNA, 5387 bp, Homo Sapiens
gggagcgagtgcggagcgagtgggagcgagacggccctgagtggaagtgtctggctccccgtagaggcccttctgtacgccccgccgcccatgagctcgttctcacgcgaacagcgccgtcgttaggctggctctgtagcctcggcttaccccgggacaggcccacgcctcgccagggagggggcagcccgtcgaggcgcctccctagtcagcgtcggcgtcgcgctgcgaccctggaagcgggagccgccgcgagcgagaggaggagctccagtggcggcggcggcggcggcagcggcagcgggcagcagctccagcagcgccagcaggcgggatcgaggccgtcaacatggcgagcgcctcgtaccacatttccaatttgctggaaaaaatgacatccagcgacaaggactttaggtttatggctacaaatgatttgatgacggaactgcagaaagattccatcaagttggatgatgatagtgaaaggaaagtagtgaaaatgattttgaagttattggaagataaaaatggagaggtacagaatttagctgtcaaatgtcttggtcctttagtgagtaaagtgaaagaataccaagtagagacaattgtagataccctctgcactaacatgctttctgataaagaacaacttcgagacatttcaagtattggtcttaaaacagtaattggagaacttcctccagcttccagtggctctgcattagctgctaatgtatgtaaaaagattactggacgtcttacaagtgcaatagcaaaacaggaagatgtctctgttcagctagaagccttggatattatggctgatatgttgagcaggcaaggaggacttcttgttaatttccatccttcaattctgacctgtctacttccccagttgaccagccctagacttgcagtgaggaaaagaaccattatcgctcttggccatctggttatgagctgtggaaatatagtttttgtagatcttattgaacatctgttgtcagagttgtccaaaaatgattctatgtcaacaacaagaacctacatacaatgtattgctgctattagtaggcaagctggtcatagaataggtgaataccttgagaagataattcctttggtggtaaaattttgcaatgtagatgatgatgaattaagagagtactgtattcaagcctttgaatcatttgtaagaagatgtcctaaggaagtatatcctcatgtttctaccattataaatatttgtcttaaatatcttacctatgatccaaattataattacgatgatgaagatgaagatgaaaatgcaatggatgctgatggtggtgatgatgatgatcaagggagtgatgatgaatacagtgatgatgatgacatgagttggaaagtgagacgtgcagctgcgaagtgcttggatgctgtagttagcacaaggcatgaaatgcttccagaattctacaagaccgtctctcctgcactaatatccagatttaaagagcgtgaagagaatgtaaaggcagatgtttttcacgcatacctttctcttttgaagcaaactcgtcctgtacaaagttggctatgtgaccctgatgcaatggagcagggagaaacacctttaacaatgcttcagagtcaggttcccaacattgttaaagctcttcacaaacagatgaaagaaaaaagtgtgaagacccgacagtgttgttttaacatgttaactgagctggtaaatgtattacctggggccctaactcaacacattcctgtacttgtaccaggaatcattttctcactgaatgataaatcaagctcatcgaatttgaagatcgatgctttgtcatgtctatacgtaatcctctgtaaccattctcctcaagtcttccatcctcacgttcaggctttggttcctccagtggtggcttgtgttggagacccattttacaaaattacatctgaagcacttcttgttactcaacagcttgtcaaagtaattcgtcctttagatcagccttcctcgtttgatgcaactccttatatcaaagatctatttacctgtaccattaagagattaaaagcagctgacattgatcaggaagtcaaggaaagggctatttcctgtatgggacaaattatttgcaaccttggagacaatttgggttctgacttgcctaatacacttcagattttcttggagagactaaagaatgaaattaccaggttaactacagtaaaggcattgacactgattgctgggtcacctttgaagatagatttgaggcctgttctgggagaaggggttcctatccttgcttcatttcttagaaaaaaccagagagctttgaaactgggtactctttctgcccttgatattctaataaaaaactatagtgacagcttgacagctgccatgattgatgcagttctagatgagctcccacctcttatcagcgaaagtgatatgcatgtttcacaaatggccatcagttttcttaccactttggcaaaagtatatccctcctccctttcaaagataagtggatccattctcaatgaacttattggacttgtgagatcacccttattgcaggggggagctcttagtgccatgctagactttttccaagctctggttgtcactggaacaaataatttaggatacatggatttgttgcgcatgctgactggtccagtttactctcagagcacagctcttactcataagcagtcttattattccattgccaaatgtgtagctgcccttactcgagcatgccctaaagagggaccagctgtagtaggtcagtttattcaagatgtcaagaactcaaggtctacagattccattcgtctcttagctctactttctcttggagaagttgggcatcatattgacttaagtggacagttggaactaaaatctgtaatactagaagctttctcatctcctagtgaagaagtcaaatcagctgcatcctatgcattaggcagcattagtgtgggcaaccttcctgaatatctgccgtttgtcctgcaagaaataactagtcaacccaaaaggcagtatcttttacttcattccttgaaggaaattattagctctgcatcagtggtgggccttaaaccatatgttgaaaacatctgggccttattactaaagcactgtgagtgtgcagaggaaggaaccagaaatgttgttgctgaatgtctaggaaaactcactctaattgatccagaaactctccttccacggcttaaggggtacttgatatcaggctcatcatatgcccgaagctcagtggttacggctgtgaaatttacaatttctgaccatccacaacctattgatccactgttaaagaactgcataggtgatttcctaaaaactttggaagacccagatttgaatgtgagaagagtagccttggtcacatttaattcagcagcacataacaagccatcattaataagggatctattggatactgttcttccacatctttacaatgaaacaaaagttagaaaggagcttataagagaggtagaaatgggtccatttaaacatacggttgatgatggtctggatattagaaaggcagcatttgagtgtatgtacacacttctagacagttgtcttgatagacttgatatctttgaatttctaaatcatgttgaagatggtttgaaggaccattatgatattaagatgctgacatttttaatgttggtgagactgtctaccctttgtccaagtgcagtactgcagaggttggaccgacttgttgagccattacgtgcaacatgtacaactaaggtaaaggcaaactcagtaaagcaggagtttgaaaaacaagatgaattaaagcgatctgccatgagagcagtagcagcactgctaaccattccagaagcagagaagagtccactgatgagtgaattccagtcacagatcagttctaaccctgagctggcggctatctttgaaagtatccagaaagattcatcatctactaacttggaatcaatggacactagttagatgtttgttcaccatggggaccattacatatgaccatacaatgcactgaattgacaggttaatcataagacatggaaagagaagtgtctaaaagcttcaaaatgttccacttttttttccttcatggagactgtttgtttggctttcttccattgttgtttttgtagcatttatttcagaaatgtgtatttccataatccagaggttgtaaaaccactagtgttttagtggttacagcaacatttgaaatggaaactaaaagttaggattttatggagtatggagatagggtccagtatctatttaccctgtaatgtttaggattaaaatgttaaaattttgtgaccatgaatttctttcttttataaattttctcatttaaaaatcaaaaatcttgcaaaacaaaaaccatgtttctttttcttgtataactttttgttttcagcaacataaattgatttttagctggcagacaagaatatccatataagatttgttaaccatttcagagagtttggcaatttttaaaagataataaggtatcatttttaagtatgaaaattaacaatatccctgttgcgcacactaattttgcatgagtaagtttacaaatatgtatcgtctgtaaagcagcatgtgcagattattcataatatagaagttaaaataagtattagtgcaattttcagatatttatttttgcacagaaaacacattatctggagagaaagaaaggagaatttttgagacttgggttttcttaatgccagtgtgaatttgcagatgttttcagaaaatcaagtcacagtaacaatttgccacttttttctattataaatcttcttacttaaattttgaatatttagtttttctcagttacccatttgtgtgtgtgtgattccacttagaaattcttaaaaccagatttttctttcattccgtttggatgtctacattccttatcaaaggatataaatactgtgtatgcttttgaattttatttttaggaaaattctgaagccagctatcacaggtttgttagctaataatagtattttcttttagttgagttaggtttttccccatctcctgtagagcgaatttacatattgtattgggtaagtgttcactacttttcctgattaagggatctgtgctggggaacaaagcttttgcagtaccttatattgtagttaaaattttatttaacatatccttcagtgagctcatttcacactgtagcctcttccttaaaatttgtggtgctcctgtaacagtaagaactaattctgaaataaaagacatctcctaaaaaaaaaaaaaaaaaaaaaaaaaaaaaaaaaaa

SEQ ID NO: 30397 - DNA, 4299 bp, Homo Sapiens
gtgacgcgaggtcacgtgacgggttgggcagcctgtgccgccgccgccgctttgtaagaggcacattggcagattttctattttgtacatacattattttgtatatactgtatatgatgacttcagtgagcagtgaccattgtcgaggtgctcgggaaaaaccacagatttcagcagcacaatcaacgcaaccacagaaacaagtggtacaggcaacagctgaacagatgcgtctcgctcaagtgatctttgataagaatgattcagattttgaagctaaagttaagcagcttatggaagtgacagggaaaaatcaggatgaatgcatagtggccctacatgattgtaatggagatgtgaacaaagctatcaatatattgctggaagggaattcagacacaacttcatgggagactgtagggtgtaagaaaaagaattttgcaaaagaaaattcagaaaacaaagagaatagagagaagaaaagcgagaaagaatcgagtcgtggacgtggaaacaacaaccggaaaggaagaggcggcaatcgtggcagagaatttagaggtgaagaaaatggaattgattgcaatcaagtggacaaaccttcagatcgtggcaagcgagcccggggtagaggatttggacgtggcagagggagaggggcaggaaggttctcaacccaaggcatggggacatttaatcctgcagactattcagattctacatctacagatgtgtgtgggacaaagctagtagtttgggaagctgctcagaatggtgcagatgagggaactgaactggcatcaaatactcacaacatagctcaggatctgtcaaacaaaagttcttatggactcaaaggggcttggaagaattctgtggaagagtggacaacagaagactggactgaagatctttctgaaacaaaggtcttcactgcctcatctgctccagcagagaatcacatcttacctgggcaaagcattgatctggtagccttgctccagaagcctgttcctcacagtcaagcctcagaagccaactcctttgaaacttcccaacagcagggctttggccaagcccttgtcttcacaaattcgcaacacaacaatcagatggcaccagggactggcagctccactgccgtcaactcctgttctcctcagagcctgtcatccgtccttggctcaggatttggagagcttgcaccaccaaaaatggcaaacatcaccagctcccagattttggaccagttgaaagctccgagtttgggccagtttaccaccaccccaagtacacagcagaatagtacaagtcaccctacaactactacttcttgggacctcaagcccccaacatcccagtcctcagtcctcagtcatcttgacttcaaatctcaacctgagccatccccagttcttagccagttgagccagcgacaacagcaccagagccaggcagtcactgttcctcctcctggtttggagtcctttccttcccaggcaaaacttcgagaatcaacacctggagacagtccctccactgtgaacaagcttttgcagcttcccagcacgaccattgaaaatatctctgtgtctgtccaccagccacagcccaaacacatcaaacttgctaagcggcggatacccccagcttctaagatcccagcttctgcagtggaaatgcctggttcagcagatgtcacaggattaaatgtgcagtttggggctctggaatttgggtcagaaccttctctctctgaatttggatcagctccaagcagtgaaaatagtaatcagattcccatcagcttgtattcgaagtctttaagtgagcctttgaatacatctttatcaatgaccagtgcagtacagaactccacatatacaacttccgtcattacctcctgcagtctgacaagctcatcactgaattctgctagtccagtagcaatgtcttcctcttatgaccagagttctgtgcataacaggatcccataccaaagccctgtgagttcatcagagtcagctccaggaaccatcatgaatggacatggtggtggtcgaagtcagcagacactagacactccaaagacaacaggccctccctctgccctcccgtctgtgagctccctgcccagcaccacctcctgcactgcacttctgccgtccacatcccagcacactggcgacctgactagcagccctctctctcagcttagcagttcgctctccagccaccagagcagcctctctgcacatgcagccctctcctcgagcacgtcacacacacatgccagtgtggagagcgcctcttcccaccagtcctcagccaccttctccacggcagcgacctccgtctcaagttccgcatcctcaggcgccagcctgtccagtagcatgaacaccgcgaacagcctctgtctgggtgggacccccgcgagtgcatccagcagcagtagcagggccgcgcccttggtgacctcaggcaaagcacccccaaacttacctcagggggtgcctcccctgctgcacaaccagtacctcgtaggtcccggaggactgcttcctgcctacccgatctatggctatgacgagctccagatgctgcagtcacggctgccagtggactactatggaattccctttgctgcacccacagcgcttgccagccgagatgggagcctagctaataatccatatccaggtgatgtcacaaagtttggccgtggggactctgcatcccctgcacccgctaccacaccagctcagccacagcagagccaatcacagacccaccacacagcccagcagcccttcgtgaatcctgcactgccacctggctatagctacactggtcttccctactacacaggcatgcccagtgccttccagtatggccccaccatgtttgtccctccagcctcagccaagcaacatggggtgaacctcagcactcccacacctcccttccagcaggccagtggttatggccagcacggctacagtacaggttatgacgacctgacccaggggacagcagcaggagactactccaaaggtggctatgctggatcatcgcaggcaccaaacaagtctgcaggttctgggcctggcaaaggagtatcagtgtcttcaagcaccactggtctacctgatatgactggttctgtctacaataagacacagacttttgacaagcagggatttcatgcagggacgcctccacctttcagcctgccctcggtcttgggctccactgggcccctggcctcgggagcggcccctggctatgcacccccaccattcctacacatcttgccagcccaccagcagccccactcacagctgctgcaccaccaccttccgcaggatgcacagagtggctcgggtcagcgcagccagcccagctccctgcagcccaagtctcaagcctccaaacctgcctacggcaactctccatactggacaaactaaacccagaagagaggggtgggctggggcaaggcttatcctgggcaggagagaacacacgagcacgtatttgggagcccagtgccctttcctagaattcccgacatgtgtcagccatgcctctgtggggagtctgcctcccagactggctactgtatgtaatgtatttatgtatgtatttgtaaatgtgatagaagtctgggggggagttgggggatggcggcagatgttagccaggtctgccctccccattcaagccccttctccactgtagcaaaataagcacccccaccccatctgccttcaggtcttcttcacagcctgcactgcccagtgggccactaggggcagtctctggaagggctggttcaaggctgtttgggtataggggtcaggtaccaatgaagaatcacgacttgtctcactcctttggaaattgttttctttcctgtgtaattacttcatacctctgtttttgagaaactgttccgtttgtcatctgtcatggtctccttccaccaaatcttcatctgggaatagcagcggtatccctccacccaagtatggccacctgtttgtcttcatatagaacaggggcttctggtctggtcatgtccctagagacttactagagactggctgaccatgaaaaaaaaaaaaataatctgagttattcagccagtcagctcccctttaaaaatctaaggtatctccaagcaacacatctccattctagttgtcttgaaccacgtgggcaactgtttcaggggttttctcttgcccaatccccacctaataaagttctgagagcatgaaaaaaaaaaaaaaa

SEQ ID NO: 30398 - DNA, 2155 bp, Homo Sapiens
gtcgcgacgggggttcagggaatatttactgggcctctccgctccctctgctcttggaggtgccatgaggtcagttagctacgtgcagcgcgtggcgctggagttcagcgggagcctcttcccgcacgcaatctgcctcggagacgttgataacgatacgttaaatgaactggtggtgggagacaccagcgggaaggtgtctgtgtataaaaatgatgacagtcggccatggctcacctgttcctgccagggaatgctgacttgcgctggggttggagacgtgtgtaataaaggaaagaacctgttggtggcagtgagtgctgaaggctggtttcatttgtttgacctgacacctgccaaggtgttggatgcttctgggcaccacgagacactaatcggagaggagcagcgtccagtcttcaagcagcacatccctgccaacaccaaggtcatgctgatcagcgacatcgatggagatgggtgtcgtgagctggtggtgggctacacagaccgtgtggtgcgagctttccgctgggaggagctaggtgagggtcctgaacatctgacagggcagctggtgtccctcaagaaatggatgctggagggtcaggtggacagcctctcagtgactctggggccactgggtcttcctgaactgatggtgtctcagccaggttgtgcgtatgcaattctactgtgtacctggaaaaaggacactgggtcccctcctgcctctgaagggcccacggatggtagtagggagaccccagctgcccgagacgtggtgctgcaccagacatctggccgtatccacaacaagaatgtctccactcacctaattggcaacatcaaacaaggccacggcactgagagtagtggctctggcctctttgccctgtgcaccctggatgggacactgaagctcatggaagaaatggaagaagcagacaagctgctgtggtcagtgcaggtggatcaccagctctttgccctggagaaactggatgtcaccggcaacgggcatgaggaggtagttgcatgcgcctgggatggacagacatatatcattgatcacaaccgcaccgtcgtccgcttccaagtggatgaaaatatccgtgccttctgtgcgggcctgtacgcctgcaaagagggccgcaacagcccctgcctcgtatatgtcactttcaaccagaagatctatgtgtactgggaggtgcagctggagcggatggagtctaccaatctggtgaaactgctggagaccaagccggagtaccacagcctgctgcaggagctgggcgtggatcctgacgacctccctgtgactcgtgccctgcttcaccaaacgctctaccatccagaccagccaccacagtgtgctccctcaagcctccaggatcccacctagctgtacttgcctcatagctggtgaaggattcttctgaacccccaccctaccccctaaaggtatctgtggtattggcaggatagggaatatgcattacagaaatgcaggatttgactctgggcatgaaagatggcagcagccctagggtgaccgtgaactatagacctcgcagtcttttcggtgaaagaagagacaagttgaccctctgcccatttccttatggacctcacccatcatgccagcagggtcataggaccctggccttgttccaaatcatctgggacatgacccactccccactgtcactgtgttgaaaacagagacttgtttgtgtggccccaacacccataaggaaaccaggctttaggcccaggggagcagtggaggtaagggctccaccccatcttaagctctgtcttccgtggcacaattccaagttcttgacgttagtaattgttaaaggaatggcaaactgttttgttttgaaggatctttctacagtctggtcttacccatgttcctagcaaccctgagatgattttcttccatttaccaaagcagccgggtcagtgccttctcacgttgccgtattcttcaggtattagtcagcttcagaagccctgctcccatttttccacccacccattcccccataaaacagcttattgtctccaagacaatagacatttaaaatgtgatgcgggtttatgatccagaccacaatcagaattatatcttgggtcattt

SEQ ID NO: 30399 - DNA, 2144 bp, Homo Sapiens
ttttcggcaaccccggccgaacggccacccagaggctgtgctgagctggcgcagcggcagcagcatgagccggaccctcgcatcggccgtgctcctgtcgagtcccgactactacgagaggctgggccaactccagcacgggctgcgggacagtgaaaagaagagattggacctggaaaagaaactttatgaatataatcagtctgatacatgcagagttaagctgaaatatgtaaaactaaagaattatctgaaggaaatatgtgaatctgaaaagaaggctcatactcgaaaccaagaatatttaaagcgatttgagcgtgtccaagctcatgtcgtacacttcaccacaaatacagagaagcttcaaaaactgaagctcgaatatgagactcaaattaagaagatgctatgctcaaaagatagcctgggactaaaagaggaactgacagatgaagacagagaaaaggttgcagtgcacgaggggattaactcaggaacagccatgtcaagaggattgtatcaaccagcaacaatctttatgggccgccaaatgtcagccatcttaagcatgagagatttcagtacagagcacaaatctccccagcccacaaagaacttttcaattcctgacccacattcacaccgacagacagcccagagcagtaatgtgacagacagctgtgtagtacaaactagtaatgacacacagtgcttaaataagtctgacaacatagatggaaaggcatctcttcagattggtgagaaaatgccagtcacagccagtgtattgtctgaggaggaacaaactcattgcttggagataggaagtaacacacgtcatggcaagagtaatttatctgaaggcaaaaagtctgctgaactcaattccccgttacgggaaagattaagtccagagaacagaaccactgatttaaagtgtgacagttccagcggatcagagggagaaatactgacacgggaacatattgaagttgaggaaaaaagagccagcccgccagtctctccgataccagtttcagaatactgtgaatctgaaaataagtggtctcaagagaagcattctccttgggaaggtgtttcagatcatcttgctcacagggaaccaaagtcacaaaagcccttcagaaaaatgcaggaagaggaggaggaaagttggagcaccagcagagaccttaccatttcaataagtgaagatgatctgattttagagagcccagaaccacagccaaatccaggtggcaagatggagggagaagatggaatagaggccttaaaattaatccatgctgagcaagaaagagttgccctatccactgaaaaaaattgtattttgcaaaccctaagctctcctgattcagaaaaggaatcctccactaacgcaccaacaagagaacctggacaaacaccagactcagacgtaccgagggcacaggtgggtcagcatgttgccaccttgaaagaacatgataattctgtcaaagaagaggcaacagcattattgagaaaagcccttacagaagagtgtggccgtaggtcagctattcacagtagtgaatcatcttgcagcttgccatctattctgaatgacaatagtggaataaaggaagccaaacctgctgtatggctcaacagtgttcctacaagggaacaagaagtttcaagtggctgtggagacaagagcaagaaagaaaatgtggctgcagatatcccaatcacagaaacagaagcctatcagttgctgaagaaggccacccttcaggataatacaaatcaaactgaaaacaggtttcaaaagacagatgcttctgtgtcacacttgtcaggtttgaatattggcagcggtgcattcgagacaaagacagctaacaaaattgcttcggaagctagtttttcatctagtgaaggaagtcctttgtcaaggcatgaaaacaaaaagaaacccgtgatcaattcaaaatctaatgccctctgggatgagtctgatgacagtaactcagaaattgaggctgctttacgccccagaaaccataacaccgatgattctgatgatttttatgactaacgtgctgtgacattggtttcaaataaagtctttaaacaaactaaaaaaaaaaaaaaaa

SEQ ID NO: 30400 - DNA, 1166 bp, Homo Sapiens
tcgggtatgaggctgggactaagccaagggattcaggtgtggtgccggtgggaactgaggaagcgcccaaggaaatgaaacacgatttccaaaatgaacttaatctttcatgagaaactgaggatagagatgtcaataagcagccactgtttccacctccccacctgaagagctaggaggacaactacaaagagcctgactgccttctcggaatgaggagagaggaaaacagcaacagtatcagttttcaagatggcagcatctatgcatggtcagcccagtccttctctagaagatgcaaaactcagaagaccaatggtcatagaaatcatagaaaaaaattttgactatcttagaaaagaaatgacacaaaatatatatcaaatggcgacatttggaacaacagctggtttctctggaatattctcaaacttcctgttcagacgctgcttcaaggttaaacatgatgctttgaagacatatgcatcattggctacacttccatttttgtctactgttgttactgacaagctttttgtaattgatgctttgtattcagataatataagcaaggaaaactgtgttttcagaagctcactgattggcatagtttgtggtgttttctatcccagttctttggcttttactaaaaatggacgcctggcaaccaagtatcataccgttccactgccaccaaaaggaagggttttaatccattggatgacgctttgtcaaacacaaatgaaattaatggcgattcctctagtctttcagattatgtttggaatattaaatggtctataccattatgcagtatttgaagagacacttgagaaaactatacatgaagagtaaccaaaaaaatgaatggttgctaacttagcaaaatgaagtttctataaagaggactcaggcattgctgaaagagttaaaagtaactgtgaacaaataatttgttctgtgccttttgcctggtatatagcaaatactcaaaaaatattcaataattcaatcaataaatataagtttcatcttacacgtaagatacaggtcttatctcctgatggtgtgtccattttgcctggtatataacagataataaatatccagtgtcaataaaaaaaaaaaaaaaaaaaaaaaaaaaaaaaaaaaaaaaaaaaaaaaaa

SEQ ID NO: 30401 - DNA, 6042 bp, Homo Sapiens
ggtcgttttctgatgtgacggctgagacatgagatcttcagcctccaggctctccagtttttcgtcgagagattcactatggaatcggatgccggaccagatctctgtctcggagttcatcgccgagaccaccgaggactacaactcgcccaccacgtccagcttcaccacgcggctgcacaactgcaggaacaccgtcacgctgctggaggaggctctagaccaagatagaacagcccttcagaaagtgaagaagtctgtaaaagcaatatataattctggtcaagatcatgtacaaaatgaagaaaactatgcacaagttcttgataagtttgggagtaattttttaagtcgagacaaccccgaccttggcaccgcgtttgtcaagttttctactcttacaaaggaactgtccacactgctgaaaaatctgctccagggtttgagccacaatgtgatcttcaccttggattctttgttaaaaggagacctaaagggagtcaaaggagatctcaagaagccatttgacaaagcctggaaagattatgagacaaagtttacaaaaattgagaaagagaaaagagagcacgcaaaacaacatgggatgatccgcacagagataacaggagctgagattgcggaagaaatggagaaggaaaggcgcctctttcagctccaaatgtgtgaatatctcattaaagttaatgaaatcaagaccaaaaagggtgtggatctgctgcagaatcttataaagtattaccatgcacagtgcaatttctttcaagatggcttgaaaacagctgataagttgaaacagtacattgaaaaactggctgctgatttatataatataaaacagacccaggatgaagaaaagaaacagctaactgcactccgagacttaataaaatcctctcttcaactggatcagaaagaagattctcagagccggcaaggaggatacagcatgcatcagctccagggcaataaggaatatggcagtgaaaagaaggggtacctgctaaagaaaagtgacgggatccggaaagtatggcagaggaggaagtgttcagtcaagaatgggattctgaccatctcacatgccacatctaacaggcaaccagccaagttgaaccttctcacctgccaagtaaaacctaatgccgaagacaaaaaatcttttgacctgatatcacataatagaacatatcactttcaggcagaagatgagcaggattatgtagcatggatatcagtattgacaaatagcaaagaagaggccctaaccatggccttccgtggagagcagagtgcgggagagaacagcctggaagacctgacaaaagccattattgaggatgtccagcggctcccagggaatgacatttgctgcgattgtggctcatcagaacccacctggctttcaaccaacttgggtattttgacctgtatagaatgttctggcatccatagggaaatgggggttcatatttctcgcattcagtctttggaactagacaaattaggaacttctgaactcttgctggccaagaatgtaggaaacaatagttttaatgatattatggaagcaaatttacccagcccctcaccaaaacccaccccttcaagtgatatgactgtacgaaaagaatatatcactgcaaagtatgtagatcataggttttcaaggaagacctgttcaacttcatcagctaaactaaatgaattgcttgaggccatcaaatccagggatttacttgcactaattcaagtctatgcagaaggggtagagctaatggaaccactgctggaacctgggcaggagcttggggagacagcccttcaccttgccgtccgaactgcagatcagacatctctccatttggttgacttccttgtacaaaactgtgggaacctggataagcagacggccctgggaaacacagttctacactactgtagtatgtacagtaaacctgagtgtttgaagcttttgctcaggagcaagcccactgtggatatagttaaccaggctggagaaactgccctagacatagcaaagagactaaaagctacccagtgtgaagatctgctttcccaggctaaatctggaaagttcaatccacacgtccacgtagaatatgagtggaatcttcgacaggaggagatagatgagagcgatgatgatctggatgacaaaccaagccctatcaagaaagagcgctcacccagacctcagagcttctgccactcctccagcatctccccccaggacaagctggcactgccaggattcagcactccaagggacaaacagcggctctcctatggagccttcaccaaccagatcttcgtttccacaagcacagactcgcccacatcaccaaccacggaggctccccctctgcctcctaggaacgccgggaaaggtccaactggcccaccttcaacactccctctaagcacccagacctctagtggcagctccaccctatccaagaagaggcctcctcccccaccacccggacacaagagaaccctatccgaccctcccagcccactacctcatgggcccccaaacaaaggcgcagttccttggggtaacgatgggggtccatcctcttcaagtaagactacaaacaagtttgagggactatcccagcagtcgagcaccagttctgcaaagactgcccttggcccaagagttcttcctaaactacctcagaaagtggcactaaggaaaacagatcatctctccctagacaaagccaccatcccgcccgaaatctttcagaaatcatcacagttggcagagttgccacaaaagccaccacctggagacctgcccccaaagcccacagaactggcccccaagccccaaattggagatttgccgcctaagccaggagaactgccccccaaaccacagctgggggacctgccacccaaaccccaactctcagacttacctcccaaaccacagatgaaggacctgccccccaaaccacagctgggagacctgctagcaaaatcccagactggagatgtctcacccaaggctcagcaaccctctgaggtcacactgaagtcacacccattggatctatccccaaatgtgcagtccagagacgccatccaaaagcaagcatctgaagactccaacgacctcacgcctactctgccagagacgcccgtaccactgcccagaaaaatcaatacggggaaaaataaagtgaggcgagtgaagaccatttatgactgccaggcagacaacgatgacgagctcacattcatcgagggagaagtgattatcgtcacaggggaagaggaccaggagtggtggattggccacatcgaaggacagcctgaaaggaagggggtctttccagtgtcctttgttcatatcctgtctgactagcaaaacgcagaaccttaagattgtccacatccttcatgcaagactgctgccttcatgtaaccctgggcacagtgtgtatatagctgctgttacagagtaagaaactcatggaagggccacctcaggagggggatataatgtgtgttgtaaatatcctgtggttttctgccttcaccagtatgagggtagcctcggacccggcgcgccttactggtttgccaaagccatccttggcatctagcacttacatctctctatgctgttctacaagcaaacaaacaaaaataggagtataggaactgctggctttgcaaatagaagtggtctccagcaaccgttgaaaggcatagaattgactctgttcctaacaatgcagtattctcaattgtgttactgaaaatgcaacattagcaaagaggtgggttctgttttccaggtgaaacttttagctccatgacagaccagcctgtagttatctgtgtacacagtttacagctacaaaaacctactttggtatttattacagaaaagtgctcagttaaatgtaagtgttattccttcagcaaaatattcactgacccaaaactctttatggcattttacaatgcacacagcctcatgcaagtttagacaagtggatttatactgtcttatgagtgcccgcccctgatatattacctcattatgcaaaaataacatatctttcatgactattttgacaaaagtttaaaacacatatgaagttcaaatttcaggaaccaaggactgccagaaaatattagcctctacattacgcatgcatttagaagcttacctgaaatctgccttttataaaggaatagtatggataagtggaattgtacattttttaaacttgattgccattaaagcagaaattataaggttgcaacaatatttgtttctaatcactggctttctcaagagtatggattgacatattgtgttatgaatgcacatctctcagatgtgttgaagcatccattgcatccattttttattattttcttagttttgttcttggacaaatttaaacttttaaaagattattcaagatgaatttaaaagtcaacccttcacacagtttccctactgtatgtagaatccaggtgctgaaaccaagtgtttcttttcccatgctctttgttaaaccccaattatagataatttttccagtcttaagctctgtccaccttcaagtcaattcataaccaagtttttgaacgctgctatgaattgcactgtgaaaagcactcttccctctcagttttcttttcatcccagccatgtttatcagatccttaagaacattgtatttcagtcttttacatcagtctgaattttggaaaagaatgcaatagttgtactccacagtcagtggaactgttccctgagtccgaggctcatgtgtcattctggcactacatttgcttaaattgctattttggcaacagcacagaaaactaatatttttaagcagagaatcttggcaatgagtgagagatgttaatttcacagaagcacaactcccaacccaacccttaggaaaagccctcttccatcgttacagtgctcagtgaatattaatttagttctgcttaagtggttgctatacaaactttgaatagccacctaataaataaaccttgcatgacaaacctgcaaaatattttatcagctgttattggaaagtgattttaagcaattgcttcctcagtgtcagggcacatgtgaatttccacaccaaacagagcatgaggaaccagttgacatgctgggttgtgactggcagctttagcagcctcggtactgaagccacaccagtgtccggatggaagtctgcatctgaggttgctcagtgtcccggtcattcatttacacattttaacttgcattaaagagctgttcttttctgtggcctagactcttttcactgatctcaaaataaactggtttttttcaaaaaaaaaaaaaaaacaaaaacaaaaaaaaaacacaaaagctgcatgtctaaaattacatggagttagtgtctattctttttccccttttgcagcaacttacacagcatttttaacaccttttttttctagtttttttgttcggttttgttttccatcaggaatttgagttctctctaacccagcttactgtgggacataggaaaactcagtagaaatacctttggtgatcttgttgagtttaagtctgatcttgatcttaaactcagtaagccactatctgcaattttgtacattatatagtattttgaagatatggaaccttatgaaaaaaaaatagcaaattagttctttttcccccagaggggaaagttatgttctgcaaatagtgtgtgtcttattttactgttgaacagcaattgctatttatttttttattgcctagaacttcaacatgttgtataggaatcctgtagtgccactagttaaatgccgaattctcatctggatgttaccatcaaacatcagtacacttgtcatttcacatgtgtttaatgtgacagtttttcagtactgtatgtgttaatttctactttttttaatatttaaaattgcttttaaataaacatattctcagttgatccc

SEQ ID NO: 30402 - DNA, 9926 bp, Homo Sapiens; identical to SEQ ID NO: 23432

SEQ ID NO: 30403 - DNA, 1646 bp, Homo Sapiens
gtggaatgtcatcagttaaggctattttcatttcttttgtggatcttcagttgcttcaggccatctggatgtatacatgcaggtcacagggaatatgatggcttagcttgggttcagaggcctgacacctcaggctgccaaatgtggaagatttaaatacttgaaccaataccctcctcccaaaaactgaaattggcttctgtttctgagttggtccaggcgcaatgttcagcgtatttgaggaaatcacaagaattgtagttaaggagatggatgctggaggggatatgattgccgttagaagccttgttgatgctgatagattccgctgcttccatctggtgggggagaagagaactttctttggatgccggcactacacaacaggcctcaccctgatggacattctggacacacatggggacaagtggttagatgaactggattctgggctccaaggtcaaaaggctgagtttcaaattctggataatgtagactcaacgggagagttgatagtgagattacccaaagaaataacaatttcaggcagtttccagggcttccaccatcagaaaatcaagatatcggagaaccggatatcccagcagtatctggctacccttgaaaacaggaagctgaagagggaactacccttttcattccgatcaattaatacgagagaaaacctgtatctggtgacagaaactctggagacggtaaaggaggaaaccctgaaaagcgaccggcaatataaattttggagccagatctctcagggccatctcagctataaacacaagggccaaagggaagtgaccatccccccaaatcgggtcctgagctatcgagtaaagcagcttgtcttccccaacaaggagacgatgagaaagtctttgggttcggaggattccagaaacatgaaggagaagttggaggacatggagagtgtcctcaaggacctgacagaggagaagagaaaagatgtgctaaactccctcgctaagtgcctcggcaaggaggatattcggcaggatctagagcaaagagtatctgaggtcctgatttccggggagctacacatggaggacccagacaagcctctcctaagcagcctttttaatgctgctggggtcttggtagaagcgcgtgcaaaagccattctggacttcctggatgccctgctagagctgtctgaagagcagcagtttgtggctgaggccctggagaaggggacccttcctctgttgaaggaccaggtgaaatctgtcatggagcagaactgggatgagctggccagcagtcctcctgacatggactatgaccctgaggcacgaattctctgtgcgctgtatgttgttgtctctatcctgctggagctggctgaggggcctacctctgtctcttcctaactacaaaagccctttctccccacaagcctctgggttttccctttaccagtctgtcctcactgccatcgccactaccatcctgtcaccagtgggacctctttaaaacaagcagccaaccattctttgatgtatcccattcgctccatgttaacatccaaaaccagcctggatttcatacatggacttctgattaaaagtggcaggttgtgcatgttaaaaaaaaaaaaaaaaaaaaaa

SEQ ID NO: 30404 - DNA, 3415 bp, Homo Sapiens
ccccctcccctcctgcagcctcctgcgccccgccgagctggcggatggagctgcgcagcgggagcgtgggcagccaggcggtggcgcggaggatggatggggacagccgagatggcggcggcggcaaggacgccaccgggtcggaggactacgagaacctgccgactagcgcctccgtgtccacccacatgacagcaggagcgatggccgggatcctggagcactcggtcatgtacccggtggactcggtgaagacacgaatgcagagtttgagtccagatcccaaagcccagtacacaagtatctacggagccctcaagaaaatcatgcggaccgaaggcttctggaggcccttgcgaggcgtcaacgtcatgatcatgggtgcagggccagcccatgccatgtattttgcctgctatgaaaacatgaaaaggactttaaatgacgttttccaccaccaaggaaacagccacctagccaacggtattttgaaagcgtttgtctggagttagaaagttctcttcttcaacacgtccctccccagggtgttcctccctgtgacccagccgcctcgacttcggcccgcttgctcacgaataaagaactcagagttgtgtgtgcaatgcacacccagacacacgcacgcacacacacgcgcgcgcacacacatgctttttttctgttcccctccgctttctgaagcctggggagaaatcagtgacagaggcgctctctgggttttattgttatgtgggttttcttttgtattttttttgtttgttttgtttttaaacattcaaaagcaattaatgatcagacataggagaaaccctgaatagaaacaaaacttttgaatgctggattcaaaaaagaaaaaaagttatctggacagcttctttgagactatttaaaaactggtacaacaggtctctacaacgccaagatctaactaagctttaaaaggtcaagaagttttatggctgacaaaggactcgcgcaacgcagaaggcctttcccaccttaagcttccggggatctgggaattttacccccattctcttctgtttgtctgagtctcatctctctgcaagcaagggctgaaatcattttgtttggttgttttgagggagagaggcggggtgggggggtgcaaatctgccagcagctcttacgtaaggcatgttttattggggagggctgagcttttattttctcctctccagtggggttggcttttattgtttcttgtttgggtttggaatggaaatatggatagcagcataaagtacttttattttgacaaaattcatttttttcaacaatggagacatagatttgacccacaataacttctccccctctctttttactctgctcaaaaagcatctctcctcccattacccaaccttggtcataagtgtgcctggctggtttgcagatatttgttctgctttgtaaaaattggccattagtgcatttattgagatgatctctaaagagctatgccctgacctacccctgattctatgacattggggcccttcttttgctgaaactgccttacgtaatggttttactccttgaaagagatttgacggaatccattttatgccaagtgctgccctgcactgtttctgcaatatgtggtgtatgctgtggtgatcttgctgggaatgattataagtgtgtgtgtgatgggggagtgggtattacatgcattgctgaagagtcatcctggtgttcctcattcctcccaccttcccgtggtcattttaattacggggcagtgtcaccgcaaagggaggaaactcaaagccgaaagcaaaattccaggcctgattctggcttttgaggttcctggttcttgaagccaggcctgacccgactctcagatggggtcagtcccgtcgctttgcagactgaccctggaaatctacaaaatgcagattttcctgatttcctcttctcttgcccagtttttttttttttttttttttttttttttaaagcctggattgtaaccagattttcttttttcccccttctcagctgtagatatgatatctcctttcagggccccagcttaagggcaaagtgagttaatgtgtagacaaaggcgagggacaagagagagttaacatctagacagtggaaaaagccatggtgtgtggtttctgggaaccaccaacacttgcaggtttagctttttcccagggttgactacaagaaagaaaaccatgtttttgcaagattaaaatgtggttgagtgtgcctaaattaaccatccccatttttatcatatttccaccatcacttcagggttttaagagtcagtgctcacctgggcggagctggtagtacattttgcttcttagaaagctaagtcctgggttccgtctgattttaggttccaggaacttcctgagaacacccgatcgcagagggtaattttctggagtttgttttgcagggatagctgggagtatggccaccctgctccacgatgcggtaatgaatccagcagaagtggtgaagcagcgcttgcagatgtacaactcgcagcaccggtcagcaatcagctgcatccggacggtgtggaggaccgaggggttgggggccttctaccggagctacaccacgcagctgaccatgaacatccccttccagtccatccacttcatcacctatgagttcctgcaggagcaggtcaacccccaccggacctacaacccgcagtcccacatcatctcaggcgggctggccggggccctcgccgcggccgccacgacccccctggacgtctgtaagacccttctgaacactcaggagaacgtggccctctcgctggccaacatcagcggccggctgtcgggtatggccaatgccttccggacggtgtaccagctcaacggcctggccggctacttcaaaggcatccaggcgcgtgtcatctaccagatgccctccaccgccatttcttggtctgtctatgagttcttcaagtactttctcaccaagcgccagctggaaaatcgagctccatactaaaggaagggatcatagaatcttttcttaaagtcattctctgcctgcatccagccccttgccctctcctcacacgtagatcatttttttttttgcagggtgctgcctatgggccctctgctccccaatgccttagagagaggaggggacggcacggccgctcaccggaaggctgtgtgcggggacatccgaggtggtggtggacaggaaggacttgggaaggggagcgagaaattgctttttctcttcctccctgggcagaatgtagcttttctgcttcactgtggcagcctcctccctggatccttagatcccagaggagggaagaaaatttgcagtgactgaaaacagtaaaaaaaaaaaaaaaaaa

SEQ ID NO: 30405 - DNA, 3727 bp, Homo Sapiens
gcttctctgtggtcttgacaagcgctgcctgggctccgccggctcactaataactgagtgaccttttctttggctgtattatgtctggctgggaagggattgcattttgcagctgagagccggagcttccttcagctcggctcctcgcacgctgctggggtaagttgtcttgaaccaggacggagagagacagcctcggactgcagttgcctaaaaggaggacacctgtggctcagatgcggtcaacaccattgcttggcgtatccttgaggacctcattattttaaacttaaaaaaaaatagacattccctcccccgtcttttttttttttttcaaacaatgcttctttttgacctttcccaaggagaagcgctacaaagcagccactgtgcttactgaacggcctccccctgtatcgcttaattgagaaggtatacaaatgctctcagtccagccagacaccaagccgaaaggttgtgctggctgcaaccgaaagatcaaggaccggtatcttctaaaggcactggacaaatactggcatgaagactgcctgaagtgtgcctgctgtgactgtcgcttgggagaggtgggctccaccctgtacactaaagctaatcttatcctttgtcgcagagactatctgaggctctttggtgtaacgggaaactgcgctgcctgtagtaagctcatccctgcctttgagatggtgatgcgtgccaaggacaatgtttaccacctggactgctttgcatgtcagctttgtaatcagagattttgtgttggagacaaatttttcctaaagaataacatgatcctttgccagacggactacgaggaaggtttaatgaaagaaggttatgcaccccaggttcgctgatctatcaacatcaccccattaagaatacaaagcactacattcttttatcttttttgctccacatgtacataagaattgacacaggaacctactgaatagcgtagatataggaaggcaggatggttatatggaataaaaggcggactgcatctgtatgtagtgaaattgccccagttcagagttgaatgtttattattaaagaaaaaagtaatgtacatatggctggatttttttgcttgctattcgtttttgtgtcacttggcatgagatgtttattttggactattgtatataatgtattgtaatatttgaagcacaaatgtaatacagttttattgtgttaccatttgtgttccatttgcttctttgtattgttgcatttagtacaatcagtgtttaaacttactgtatatttatgctttctgtatttaccagctattttaaatgagctgtaactttctagtaaagaattgaaaagcaaatctcactaatgatacacagatagataaagcaagtctatcaacattaaaaatactaaaaaataaagacacacacagagcattttagtgacatccactacttattgccgctatgagttagagtctatcagtgttcttgttataaccccctattttcagggggttaaaaatcagctttaaaaaaatacataaaaatttcatcttaaagcactttcattttataccaacgtgaaaagtgccatttttagaataactttaaagcttaacaggtttccttttaatatcctttttttgtgtgctctttacttacacaatggctttgttttgctttttcagccacaccccttatgtgaactagtgcctttgggtatcacgtaaaattttttccaaagggttactttaaaaatctgttaccacaattatgagatgatttttaagtgataaattaaacttcttcttgtataaattctgcccagatctctccacaagagctgagggtttcataactttatggcttaataaatgtatgacactgaaaagatttgagtgtgaatctactgaaatcactataatgcacattgaagctatgatggtatttgagtagtgaggttacttttgatcggagcaacataatgctcatagaatcttctagaagaagagaaacaaagggattgataaaatgctgagaactagtgattatatatttttctgtatttacctgacatttattttaatgttcaaaaagtaaacactttaagtttgatgtgttttactctctcattgttttaagtaattgccaactcagaatacatcattcttaggctgaaatttgtctttccattttttaaggtgaaatagtactaccttacgtgatagcatacaaagaagaaagctctagaaagagaaattatggagaatgattatttaaattacaattaaggaaatgagaatatgatcccctcttccgagttgcccacaaacttgcttctttgcttttgctccctgtaatagaactacttttcaacaaatctaattttgcacggcaccgttaaccatattttcactacagcaaacttagtgctatgggttttctttttctttgtttttttcttgatcacttgtataggaaacaatattttccagtgttatttgcatatatattttgtccttccaatatatgcattacagatgaaaattaaatgttatacctgaattcttgggttggggccaaaatattaagctgaaaataatgctggtgtggatttgttttaaaacaaagctttattatgaacatgcatgtgaatctggatattgcctcttatttttaagaaaatggttctgtgaaaagtgaatgatatgtatttttccaaatgcttcatggttaggagtcttcaagttccatgttccccagatttgagatatactaaagaaagaaattcaaaagtagctatttggggcccacaaaaataactattattttagccttagagccttacacttgtttcatgaagagaaaggacttgcataaccaaaataaacaaagcaagacaaattaaaaatatgtgggggagagatcagtgaaaagtggttttcttaatgcagccctgctggtccccattaacaattgcttgaaattcacatggatgtaaaattataattgtcaggatcttattcagatgatcttttaaggtttaactggttttgcttttgtttatctatatgtcaaaatacttgtaaattgggaacaaacttctctcagcttcttgaagttgttcaactatccttgccactggaagaccaaacaaggttttcactgctttttcttttacataatatgctgagaattatttcttatgctttttactacaaacaaaattactcacctggattaaagattaaggccttaatctgtttagattatctttaatctccatgaaatcgtgaaataagacaagaatagtgtttcagctgtaggccattttacagctaattgcccataaattgtagcatttattgacctgaagtactaagctaattgtcttgactactcaaagcccctgaattgttgtcaactttcccctttgtgttgtgtagccctaacgtcatttagcttgttgtctgatgcctccagtaggacacctccgatggagctttgatttctgagcagcgaaagctcccttcctaagatgcatctcgcataggctgcctatgatgaaggaccgtgcacctccactccaacagagtgctgagtttaaaagttgacctgtgtttgtaatttcactttcatcttgcttaataaatatctgctggattctttcattcacttttttacatttggatttatgtttttaataaaaggggtgttacact

SEQ ID NO: 30406 - DNA, 2117 bp, Homo Sapiens; identical to SEQ ID NO: 25323

SEQ ID NO: 30407 - DNA, 1932 bp, Homo Sapiens
aagcttggcacgaggccgccattgacacgcacagatagaacccaaagaaaggcaaagagtcctgcccggcaccggcgccgcgtgggccaaacctgcgcccgtggaggggcgcgcagagggcaccgggcgccgggagcaggcggcgcagcaccagcattgtgttagtgccgggaggccactgtgtcagcaagctgagagggaaactgaagcaagatgtcgggccggagtgggaagaagaaaatgtccaagctgtcccgttcagctagggcaggtgtcatctttccagtggggaggctgatgcgttatctgaagaaagggacgttcaagtaccggatcagcgtgggcgcccctgtctacatggcggcagtcattgagtacctggcagcggaaattctagaattggccggcaatgccgcgagggacaacaagaaggcccggatagccccgagacacatcttgctggcagttgccaatgacgaggagctcaaccagctgctaaaaggagtgaccatcgccagtggaggcgtcctgcccagaattcaccccgaactgctggccaaaaagcgagggaccaaaggcaagtcggaaacgatcctctccccacccccagagaaaagaggcaggaaggccacgtcaggcaagaagggggggaagaaatccaaggctgccaaaccacggacgtccaaaaagtccaaaccaaaggacagcgataaagaaggaacttcaaattccacctctgaagatgggccaggggatggattcaccattctgtcttctaagagccttgttctgggacagaagctgtccttaacccagagtgacatcagccatattggctccatgagagtggagggcattgtccacccaaccacagccgaaattgacctcaaagaagatataggtaaagccttggaaaaggctgggggaaaagagttcttggaaacggtaaaggagcttcgcaaatcccaaggccctttggaagtcgccgaagccgccgtcagccaatccagtggactcgcagccaaatttgtcatccactgtcacatccctcagtggggctccgacaaatgtgaagaacagcttgaagagaccatcaaaaactgcctgtcagcggcggaggacaagaagctaaagtccgtcgcgttcccgcctttccccagcggcagaaactgctttcccaaacagactgcggcccaggtgaccctcaaagccatctcagcccactttgatgactcgagcgcgtcctcgctgaagaacgtgtacttcctgctcttcgacagcgagagcatcggcatctacgtgcaggagatggccaagctcgacgccaagtagccgccgcactttccagcagggatcggaggacgacccgagtcccaagagtggggttttgctttttaaaaggagagaggaggggtgatggcaggggagtggagggtggccgggcaggtcctgccggcgcagggagccctctgcccttcacactctcctccaaaagagcctccatctgtaaggaagcaggtctccgcgaggggtttctttccatgtgttttcctcctgttgttaaaagaacttttttaaaaaaacagacctcgttttagatttatagcattgacttttacacacattcacacaagaaaaaaatcctttcaaaattcttaaatcttctgttcctcctttttccaagggaagagggcaaaaagtggcctgggctctgttggtgtgcgtgttccgtggcggagagaagaaaatgggaaagacatctcactggtgcttttctcttttgttttagtgccccccgcccccatccctataatatctgtaactactcctaaaaaggttttgattcaggcttttttttggtttcattttgtttttttaagaaaaagaaaatgaaaggaaaaaaaaaaaaaaaaaaaaaattcctgcggccgc

SEQ ID NO: 30408 - DNA, 4638 bp, Homo Sapiens
ggcgcggcggcggcggtggctgtgaccgcgcggaccgagccgagacattcgcgccgggggatcgggcgccgccgccgctgggccccgggcgcgtggatgcggctgggtcgggcggcgccgtacacctgaggcggagaacggggcgcggcgcgggtgacgctgtcagggccgcggttcctgacgcccaggcgctcgccaggacgagccaggcagtgatttgaggcaccggcttcaccttcacccatggtccggagagcctagcggggctcgccaccgcctcccggctccccttccacgcctcatcctgccagcctcgccgccccgccagcgccgggcaaccgcctcgcccgaagccctccctcgttactgtccgcataccccggcggcgccgccgcgggaagcggctccccctcctcttcctccgcgtcctcttccctctttcccccgccggggccgcttgttgcaccgccccgcggcctgcgggagccgctcgccccggccttgtgctcgcgtccgcacccctttcctgtcgccccccggggcccgcaccacagcccggccggcgagaccccggccagaccccgctgcccgcacaaaatgtcggcccggacgccattgccgacggtgaacgagcgggacacggaaaatcatacatctgtggatggatatactgaaccacacatccagcctaccaagtcgagtagcagacagaacatcccccggtgtagaaactccattacgtcagcaacagatgaacagcctcacattggaaattaccgtttacaaaaaacaatagggaagggaaattttgccaaagtcaaattggcaagacacgttctaactggtagagaggttgctgtgaaaataatagacaaaactcagctaaatcctaccagtctacaaaagttatttcgagaagtacgaataatgaagatactgaatcatcctaatataggtgaagtatttgattacttagttgcccatggaagaatgaaagagaaagaggcccgtgcaaaatttaggcagattgtatctgctgtacagtattgtcatcaaaagtacattgttcaccgtgatcttaaggctgaaaaccttctccttgatggtgatatgaatattaaaattgctgactttggttttagtaatgaatttacagttgggaacaaattggacacattttgtggaagcccaccctatgctgctcccgagcttttccaaggaaagaagtatgatgggcctgaagtggatgtgtggagtctgggcgtcattctctatacattagtcagtggctccttgcctttcgatggccagaatttaaaggaactgcgagagcgagttttacgagggaagtaccgtattcccttctatatgtccacagactgtgaaaatcttctgaagaaattattagtcctgaatccaataaagagaggcagcttggaacaaataatgaaagatcgatggatgaatgttggtcatgaagaggaagaactaaagccatatactgagcctgatccggatttcaatgacacaaaaagaatagacattatggtcaccatgggctttgcacgagatgaaataaatgatgccttaataaatcagaagtatgatgaagttatggctacttatattcttctaggtagaaaaccacctgaatttgaaggtggtgaatcgttatccagtggaaacttgtgtcagaggtcccggcccagtagtgacttaaacaacagcactcttcagtcccctgctcacctgaaggtccagagaagtatctcagcaaatcagaagcagcggcgtttcagtgatcatgctggtccatccattcctcctgctgtatcatataccaaaagacctcaggctaacagtgtggaaagtgaacagaaagaggagtgggacaaagatgtggctcgaaaacttggcagcacaacagttggatcaaaaagcgagatgactgcaagccctcttgtagggccagagaggaaaaaatcttcaactattccaagtaacaatgtgtattctggaggtagcatggcaagaaggaatacatatgtctgtgaaaggaccacagatcgatacgtagcattgcagaatggaaaagacagcagccttacggagatgtctgtgagtagcatatcttctgcaggctcttctgtggcctctgctgtcccctcagcacgaccccgccaccagaagtccatgtccacttctggtcatcctattaaagtcacactgccaaccattaaagacggctctgaagcttaccggcctggtacaacccagagagtgcctgctgcttccccatctgctcacagtattagtactgcgactccagaccggacccgttttccccgagggagctcaagccgaagcactttccatggtgaacagctccgggagcgacgcagcgttgcttataatgggccacctgcttcaccatcccatgaaacgggtgcatttgcacatgccagaaggggaacgtcaactggtataataagcaaaatcacatccaaatttgttcgcagaagtacatcaggggaaccaaaagaaagagacaaggaagagggtaaagattctaagccgcgttctttgcggttcacatggagtatgaagaccactagttcaatggaccctaatgacatgatgagagaaatccgaaaagtgttagatgcaaataactgtgattatgagcaaaaagagagatttttgcttttctgtgtccatggagacgctagacaggatagcctcgtgcagtgggagatggaagtctgcaagttgccacgactgtcacttaatggggttcgcttcaagcgaatatctgggacatctattgcctttaagaacattgcatcaaaaatagcaaatgagcttatgctgtaaagaagtccaaatttacaggttcagggaagatacatacatatatgaggtacagtttttgaatgtactggtaatgcctaatgtggtctgcctgtgaatctccccatgtagaatttgcccttaatgcaataaggttatacatagttatgaactgtaaaattaaagtcagtatgaactataataaatatctgtagcttaaaaagtaggttcacatgtacaggtaagtatattgtgtatttctgttcattttctgttcatagagttgtataataaaacatgattgcttaaaaacttgtatagttgtctagatttctgcacctgaatgtatgtttgatgctttgatttgaaaatgttcttccctgttatttacattctggtgggtttttaaaattcttacctccatcatgcaattttgaaaattgtgtccagaattaaaagtgcatagaaatagcctttacaattgtagcatggacctttaaaaattgttttaaaatcttatttaaatttaaaccagaagctgaaaaatagatcagctttattatacacaaaattattactgcttatctttgctcttttccttgttatcccgcaaggtttagttgagaagatacaaaatgtttacagtgttggcacttagagtttttaaattcaagtacatgaaattcagtaatagcattgccttgagctaactaggaagtaccgggaaaaaagttaaatctacatcaagtttcttttgaactttgaagtgttttctgacccactgctaactgtagcaacaaaatttaaaagaaaaaaaacatactttatctggctattataacataaactgtcacgtaggtttgctgccttcagaataccgcaatttaattgcgggaatataataatattgggactgtttcacagcacaaactcatctttacagtgttgatcaatgcatcagttaagaaataatgccacctcaggaattaactggcattgggaacatttgcctcattctcctgctatcctcttcattcacccctgccactgtaatatctataagtacttaagagacttgtgagcaaaacatactatttataacagtatatgattgatttatgcttatgtggttgttcagtttgttcccatgtaactcgtttgttttaaatattttgccagatttcttgtatttattccacatcattatgcctataatgtgccgctttgtgattgggcatttgcctacttttctttcataattagtgatatatgcgatgtaaaaccactagtaaaggtacattttaatacttgttattttatactgaattagccttggaggttgactgtgcaatgttatttactgttgtaattactgtaataccaacatatgggccccatctgcacactcctgaaaaacagaaagtgtattcaaattttatcagtttaaagaaaataaagctgtgataaatactgtaattccaacctacattagaaggtctaagtgtaggtgatgtgccattccataatggcttccagactagggtgaattttatgttctgtactgtactgtgatgtagctttcttctgtaacagttatgttttaaaattaagtgagttttttttttgccttagcaaagggtggtgtttgaaaaaaaaaatgtgtagcccctttttaacctagtgttcattcaaaaaaaaattgatgcaaatctttattcactttcactggtgcacactgaaattttacttgaacagttctcataataaagcacttgtcttttgctcttt

SEQ ID NO: 30409 - DNA, 5284 bp, Homo Sapiens
gtctgagggaggctccggacccgagagccgcgagagccgccgccgctgcggccgccgccagatctgcggccgggagcccgggctgtgaggagccgggaggagcggggtgcgctgccgggcgctgaccgccctcccgcccgccgtcagaggtctgcggtgacagctcttcttcagagagaaggacaacaaggtcccagtggcccctcctcagggtctgcagtaggcctccgcatggcccaccgaggtgaaccatgaccggctggccaacattcgccattgaccagccggagttgcatctcgccaggaggtgacccctcctccagctgcccccaactcgcccaccctcgcccaggaaagtgcccgcagctgccacggacaccatgtagtagggccggctgcggcgcccagtgagctgcgatggttttgtacacgaccccctttcctaacagctgtctgtccgccctgcactgtgtgtcctgggcccttatctttccatgctactggctggtggaccggctcgctgcctccttcatacccaccacctacgagaagcgccagcgggcagacgacccgtgctgcctgcagctgctctgcactgccctcttcacgcccatctacctggccctcctggtggcctcgctgccctttgcgtttctcggctttctcttctggtccccactgcagtcggcccgccggccctacatctattcacggctggaagacaagggcctggccggtggggcagccctgctcagtgaatggaagggcacggggcctggcaaaagcttctgctttgccactgccaacgtctgcctcctgcccgactcactcgccagggtcaacaacctttttaacacccaagcgcgggccaaggagatcgggcagagaatccgcaatggggccgcccggccccagatcaaaatttacatcgactcccccaccaatacctccatcagcgccgctagcttcagcagcctggtgtcaccacagggcggcgatggggtggcccgggccgtccccgggagcattaagaggacagcctctgtggagtacaagggtgacggtgggcggcaccccggtgacgaggctgccaacggcccagcctctggggaccctgtcgacagcagcagcccggaggatgcctgcatcgtgcgcatcggtggcgaggagggcggccggccacctgaagctgacgaccctgtgcctgggggccaggccaggaacggagctggcgggggcccaaggggccagacgcccaaccataatcagcaggacggggattcagggagcctgggcagcccctcggcctcccgggagtccctggtgaaggggcgagctgggccagacaccagtgccagcggggagccaggtgccaacagcaagctcctgtacaaggcctcggtggtgaagaaggcggctgcacgcaggaggcggcaccccgacgaggccttcgaccatgaggtctccgccttcttccccgccaacctggacttcctgtgcctgcaggaggtgtttgacaagcgagcagccaccaaattgaaagagcagctgcacggctacttcgagtacatcctgtacgacgtcggggtctacggctgccagggctgctgcagcttcaagtgtctcaacagcggcctcctctttgccagccgctaccccatcatggacgtggcctatcactgttaccccaacaagtgtaacgacgatgccctggcctctaagggagctctgtttctcaaggtgcaggtgggaagcacacctcaggaccaaagaatcgtcgggtacatcgcctgcacacacctgcatgccccacaagaggacagcgccatccggtgtgggcagctggacctgcttcaggactggctggctgatttccgaaaatctacctcctcgtccagcgcagccaaccccgaggagctggtggcatttgacgtcgtctgtggagatttcaactttgataactgctcctctgacgacaagctggagcagcaacactccctgttcacccactacagggacccctgccgcctggggcctggtgaggagaagccgtgggccatcggtactctgctggacacgaacggcctgtacgatgaggatgtgtgcacccccgacaacctgcagaaggtcctggagagtgaggagggccgcagggagtacctggcgtttcccaccagcaagagctcgggccagaaggggcggaaggagctgctgaagggcaacggccggcgcatcgactacatgctgcatgcagaggaggggctgtgcccagactggaaggccgaggtggaagaattcagttttatcacccagctgtccggcctgacggaccacctgccagtagccatgcgactgatggtgtcttcgggggaggaggaggcatagaccgtccggagcagcggggcctctgccagcccttgcagctgcagcccatccctgggccatgtcccctccatcgagtgcccggtgcttgggggaggagggcagggacagggagggagccacagtcagtgcccgggaacctggaagctgcgctgctctgcgcctctgggcctcactgtggacagaggagtcaggcccgccccaggagcctccagctgcctaaccagtgccattctttcacaacacgattttctacaaatctacagcacaaccgagtttgtaacccgtgggttagtatgaggaccgggttcgtgtactctctgtatctcctcttaagcttcgtccagggttctttatttttgtctgctgccaatgtcgtctcgcatgcctgcaccctcgcatgcacgctgcccgcatgccacgtgccacgctgtagccacagaccccttgctcgggcctcacccaaggccaaactccaaacacaatcagaaccagccaaagaagcacttcctgggcacggccaccagctctcccgcctccagtgtgggccggctcctgcagggtccgagggctgcatctctaccagccagcccagggctcttcccagggtctcgcattcaagggcaattacattttaaaaagaaaaacagaaaaaggttaatcacaaaaccaaccctcacttcacagggtctgtaagtcactcatagaactttgctcttcccgagacagggtcccttccccagctcaggcacaacagagtctggcaggctctggcaccctgggcctcctccgggagcctcccatctgggcagtggagccataaacggggatccgagaagagagtatccacttttttttttacaggaagaagggactcacagcataaacgggggtgggggggatcctgattttgaaaataatctatttgtagcttctcttctatcaaaaccaacacatcctcttctttctgccaatcctctcccccacgggacacctctctggttcgggaccaatccctccctggggacgtgccccacctgcgtgccggctgagctcaggaacccctgcctgccccccgggtggggctgcggctctggcctcccaggcccatcctcaacagctaccccagccaacaccaaggccacaaggggaccccggcctaggaggcaggaagccaaggtacagagagcagcctggccctcaccagtgcgcaagctggggcagcaaggctgacagttgctgcatgcccagggcagggtgtggtactggcacccaagttcagcatggcagagctggccaacagcttgtccccgatctgcctccagccccaagatgcctacagcccccaggccccttcggcagcactgcctctgcccacctgcctttaagagactccagggctgctcctgtcatgcagcgaaggttttgtctgtttcaaagttcgagactcaacttgagggactgtttttgacaatccccgctgacctccgctcctcgtggcgccctggccctacacccagcctggcccagggccggctttgcctggtgaggctggagggagcaccaggacctgctgtctgctgtcagcccctcctggtgctggtgccctgatgctgtgccttgtcacccattgagctgcaagagggaccaagagggggccacgcagccagccagatgcctggccctgtgctggggcagacaacgctgcagagcccagggagcctggcgctaggacgtgcgtccttgtgacactggcctgtctgaactcacctggcctgggaagcaccgtctgcccgggcccaagccctgcccctccagagtccagagccaggaaggggctgctgagggcgagcatcctgctgggctctctgcccggcccacccctccaaggggctggcctgtgagccttgactgggattcatgatgtggaggcccccaacttccagaagcagctggtactctgctcacacaagcgactgggccggccggccctggacccctagaccccgagccgcctgccgactgcctgcacagggagagcagttgaggcccgggcagggcccccacaccagaccccaacatagcttccccacccaggcaccccctcccggggcagcaggcgtgggagtcagggctgcatgctcctcccctcccacctcacaggcggccttaggcaagtcattttctgtcatcacaaggtcgcctctgcctagtcaggtcctggcgtccagagtaaggatgtgcggcccccaggcccccgcacacctccctcagcaccaagaccgggacccccccacccacgtgtctcattgtggctgcctatggactcccgggccttgtgtgcaggccaggcccttccactgattttttaaagtgaaccattgctggatctcagattctgtggcatctaaggcctagcaggggtgggcacacgggtcacccgaggcccataccaagactctgttcctgccctaggcccagtctcaaaggaagccacaaggcgcgggggccactgaggaaggaaatgttcattttcatttgtccaaaaccaccttaagttttaagtatattaatcttgatgctttttaactattgctttttaacttgctgagatttagaaatactgttataaaaacttttttaatttctgtatttttttctgtattgtatcttcatgggacattaggggttttctatggtaagcacacctatggttttggtaaaaacattatcaaatatatatccagacggttcttccctagaagaaaaacaagtctttacacctgataaaatattttgcgaagagaggtgttctttttccttactggtgctgaaaggaaggatggataacgaggagaaaataaaactgtgaggctcaaaaaaaaaaaaaaaaaaaaaaaaa

SEQ ID NO: 30410 - DNA, 5284 bp, Homo Sapiens; identical to SEQ ID NO: 30409

SEQ ID NO: 30411 - DNA, 7044 bp, Homo Sapiens
tttttgtatttttagtagagacagggtttcaccatgttggtcaggctggtctcaaactcctgacttcgtgatctgcccaccttggcctcccaaagtgctgggattacaggcgtgagccaccgcacccggtcagctattttctacatgcttcatttgcagtgtaatattggattgtatgagactttgggttttgtgttaatacctacagaaaatgttgatattttctcttagcaggctgtcaaccaggttaggttcaggtcataagtttctacccacattctttgaactgtagttgtcattttagtttatttttcaaaaacttttgcagtacctttttggtctgtcttgtgtgtgccttgcagtgaacagtctggatttggacagtggtctgtctgttagttcagtttctcaagcctttgtcacactaataggattggatttatgtatgtccagcttgggaattattacaggaattaaaaacaactttttagagtgctttcctgagctctctttctatttgttcccccttctactttttgcttccctgtggctgctgtttctatcctccagccagagagctagtgtttattttctccattgtgttacacacttgtgcagctgcaaccaccatatccagggcccaatggtaggaggtagagaagaaaagcaaaagggattggcctcatcctcttacaacgatagttccattgaatagagagaaaggttttcctgcctcagagtgttggctgcactaggcttttgttactgtagtctggccctgttaccatgggattgcttgcatgtggggatacaggagaattcagaaaagaaaaaaagatttgctatttctacattctccctgagcattaagacttcccttgcccattcctcaattcaaagctaaggcttcttctggagctgcctctgtgggcggttcgggagataccaaaggagaaaaagtaccactgttgatatggtggtatttcaaattctggtctaccctatttcacatgccttgtttacttttcagagctgacagattgctgctccatgcattctgtccagtttcctaagagagacagcttggagtatgcttaatccatcttacctgggactgaaacagctgcttattttgccgttaaaaattacatgcagtttactgcgtggctccgggtttgtttgtttgtttttcctctttaataggtttattcagaaaacatgtccactgcaattagggaggtaggagtttggagacagaccagaacacttctactgaagaattacttaattaaatgcagaaccaaaaagagtagtgttcaggaaattctttttccactattttttttattttggttaatattaattagcatgatgcatccaaataagaaatatgaagaagtgcctaatatagaactcaatcctatggacaagtttactctttctaatctaattcttggatatactccagtgactaatattacaagcagcatcatgcagaaagtgtctactgatcatctacctgatgtcataattactgaagaatatacaaatgaaaaagaaatgttaacatccagtctctctaagccgagcaactttgtaggtgtggttttcaaagactccatgtcctatgaacttcgtttttttcctgatatgattccagtatcttctatttatatggattcaagagctggctgttcaaaatcatgtgaggctgctcagtactggtcctcaggtttcacagttttacaagcatccatagatgctgccattatacagttgaagaccaatgtttctctttggaaggagctggagtcaactaaagctgttattatgggagaaactgctgttgtagaaatagatacctttccccgaggagtaattttaatatacctagttatagcattttcaccttttggatactttttggcaattcatatcgtagcagaaaaagaaaaaaaaataaaagaatttttaaagataatgggacttcatgatactgccttttggctttcctgggttcttctatatacaagtttaatttttcttatgtcccttcttatggcagtcattgcgacagcttctttgttatttcctcaaagtagcagcattgtgatatttctgctttttttcctttatggattatcatctgtattttttgctttaatgctgacacctctttttaaaaaatcaaaacatgtgggaatagttgaattttttgttactgtggcttttggatttattggccttatgataatcctcatagaaagttttcccaaatcgttagtgtggcttttcagtcctttctgtcactgtacttttgtgattggtattgcacaggtcatgcatttagaagattttaatgaaggtgcttcattttcaaatttgactgcaggcccatatcctctaattattacaattatcatgctcacacttaatagtatattctatgtcctcttggctgtctatcttgatcaagtcattccaggggaatttggcttacggagatcatctttatattttctgaagccttcatattggtcaaagagcaaaagaaattatgaggagttatcagagggcaatgttaatggaaatattagttttagtgaaattattgagccagtttcttcagaatttgtaggaaaagaagccataagaattagtggtattcagaagacatacagaaagaagggtgaaaatgtggaggctttgagaaatttgtcatttgacatatatgagggtcagattactgccttacttggccacagtggaacaggaaagagtacattgatgaatattctttgtggactctgcccaccttctgatgggtttgcatctatatatggacacagagtctcagaaatagatgaaatgtttgaagcaagaaaaatgattggcatttgtccacagttagatatacactttgatgttttgacagtagaagaaaatttatcaattttggcttcaatcaaagggataccagccaacaatataatacaagaagtgcagaaggttttactagatttagacatgcagactatcaaagataaccaagctaaaaaattaagtggtggtcaaaaaagaaagctgtcattaggaattgctgttcttgggaacccaaagatactgctgctagatgaaccaacagctggaatggacccctgttctcgacatattgtatggaatcttttaaaatacagaaaagccaatcgggtgacagtgttcagtactcatttcatggatgaagctgacattcttgcagataggaaagctgtgatatcacaaggaatgctgaaatgtgttggttcttcaatgttcctcaaaagtaaatgggggatcggctaccgcctgagcatgtacatagacaaatattgtgccacagaatctctttcttcactggttaaacaacatatacctggagctactttattacaacagaatgaccaacaacttgtgtatagcttgcctttcaaggacatggacaaattttcaggtttgttttctgccctagacagtcattcaaatttgggtgtcatttcttatggtgtttccatgacgactttggaagacgtatttttaaagctagaagttgaagcagaaattgaccaagcagattatagtgtatttactcagcagccactggaggaagaaatggattcaaaatcttttgatgaaatggaacagagcttacttattctttctgaaaccaaggctgctctagtgagcaccatgagcctttggaaacaacagatgtatacaatagcaaagtttcatttctttaccttgaaacgtgaaagtaaatcagtgagatcagtgttgcttctgcttttaatttttttcacagttcagatttttatgtttttggttcatcactcttttaaaaatgctgtggttcccatcaaacttgttccagacttatattttctaaaacctggagacaaaccacataaatacaaaacaagtctgcttcttcaaaattctgctgactcagatatcagtgatcttattagctttttcacaagccagaacataatggtgacgatgattaatgacagtgactatgtatccgtggctccccatagtgcggctttaaatgtgatgcattcagaaaaggactatgtttttgcagctgttttcaacagtactatggtttattctttacctatattagtgaatatcattagtaactactatctttatcatttaaatgtgactgaaaccatccagatctggagtaccccattctttcaagaaattactgatatagtttttaaaattgagctgtattttcaagcagctttgcttggaatcattgttactgcaatgccaccttactttgccatggaaaatgcagagaatcataagatcaaagcttatactcaacttaaactttcaggtcttttgccatctgcatattggattggacaagctgttgttgatatccccttattttttatcattcttattttgatgctaggaagcttattggcatttcattatggattatatttttatactgtaaagttccttgctgtggttttttgccttattggttatgttccatcagttattctgttcacttatattgcttctttcacctttaagaaaattttaaataccaaagaattttggtcatttatctattctgtggcagcgttggcttgtattgcaatcactgaaataactttctttatgggatacacaattgcaactattcttcattatgccttttgtatcatcattccaatctatccacttctaggttgcctgatttctttcataaagatttcttggaagaatgtacgaaaaaatgtggacacctataatccatgggataggctttcagtagctgttatatcgccttacctgcagtgtgtactgtggattttcctcttacaatactatgagaaaaaatatggaggcagatcaataagaaaagatccctttttcagaaacctttcaacgaagtctaaaaataggaagcttccagaaccaccagacaatgaggatgaagatgaagatgtcaaagctgaaagactaaaggtcaaagagctgatgggttgccagtgttgtgaggagaaaccatccattatggtcagcaatttgcataaagaatatgatgacaagaaagattttcttctttcaagaaaagtaaagaaagtggcaactaaatacatctctttctgtgtgaaaaaaggagagatcttaggactattgggtccaaatggtgctggcaaaagcacaattattaatattctggttggtgatattgaaccaacttcaggccaggtatttttaggagattattcttcagagacaagtgaagatgatgattcactgaagtgtatgggttactgtcctcagataaaccctttgtggccagatactacattgcaggaacattttgaaatttatggagctgtcaaaggaatgagtgcaagtgacatgaaagaagtcataagtcgaataacacatgcacttgatttaaaagaacatcttcagaagactgtaaagaaactacctgcaggaatcaaacgaaagttgtgttttgctctaagtatgctagggaatcctcagattactttgctagatgaaccatctacaggtatggatcccaaagccaaacagcacatgtggcgagcaattcgaactgcatttaaaaacagaaagcgggctgctattctgaccactcactatatggaggaggcagaggctgtctgtgatcgagtagctatcatggtgtctgggcagttaagatgtatcggaacagtacaacatctaaagagtaaatttggaaaaggctactttttggaaattaaattgaaggactggatagaaaacctagaagtagaccgccttcaaagagaaattcagtatattttcccaaatgcaagccgtcaggaaagtttttcttctattttggcttataaaattcctaaggaagatgttcagtccctttcacaatctttttttaagctggaagaagctaaacatgcttttgccattgaagaatatagcttttctcaagcaacattggaacaggtttttgtagaactcactaaagaacaagaggaggaagataatagttgtggaactttaaacagcacactttggtgggaacgaacacaagaagatagagtagtattttgaatttgtattgttcggtctgcttactgggacttctttctttttcacttaattttaactttggtttaaaaagttttttattggaatggtaactggagaaccaagaacgcacttgaaatttttctaagctccttaattgaaatgctgtggttgtgtgttttgcttttctttaaataaaacgtatgtataattaagtgaagctgcatgtttgtattgaagtatattgaactatatagtttgtatgtcatctttttcaccattcagaaacagtgcttctgaatttgtgatttaaaggaattgtaatagaatagttttatttttaagttatctttaagtttatgccatcttcttaaataagtacgtaatgttccaatctaaataaaaaactaattcataactaatgcatagaaaagatacataaagcaatgtgaaagtttcttgcttctcctttttaatttctaaaaaagccactttgaatggaagttgtcatccgtaaaagctgaagtgtaagcactaggaaatctcaatatagagatttgaggaaagttatatccactaggtggcagtcattgatcataataagtgaaatgagcccttgttctagtacatgattttaggcttaggtaattaggtatgtgaaattacatttctttaatttaaagtaaaattcagaaggttttagttattataattaaaggaagactgtgtgtagaatcttacgtaatagtctgattctttgactctgtggctagaatgacagttatctatggaggtggtagaattaagccataccttttccttcatcactcttggaacatataaattttttgtcatcttccttgcaaagggcacatttaattttgttcttgaataaaatattttattgggtaaaaaaaaaaa

SEQ ID NO: 30412 - DNA, 6543 bp, Homo Sapiens
aagaggctgcgcgctgctgtttggggagggggtgtgtggagccgggtcctgtgtccgcagtggctgctgtcggggggtcgcctgttcgcggaggtgcggagagactccttgggggtcgagcactgtggctggcatgccccagtgttttggataccaatgcataggactccatagtaatcgaatttaccagaggcgaacgtcatgagcatagtgatcccattgggggttgatacagcagagacgtcatacttggaaatggctgcaggttcagaaccagaatccgtagaagctagccctgtggtagttgagaaatccaacagttatccccaccagttatataccagcagctcacatcattcacacagttacattggtttgccctatgcggaccataattatggtgctcgtcctcctccgacacctccggcttcccctcctccatcagtccttattagcaaaaatgaagtaggcatatttaccactcctaattttgatgaaacttccagtgctactacaatcagcacatctgaggatggaagttatggtactgatgtaaccaggtgcatatgtggttttacacatgatgatggatacatgatctgttgtgacaaatgcagcgtttggcaacatattgactgcatggggattgataggcagcatattcctgatacatatctatgtgaacgttgtcagcctaggaatttggataaagagagggcagtgctactacaacgccggaaaagggaaaatatgtcagatggtgataccagtgcaactgagagtggtgatgaggttcctgtggaattatatactgcatttcagcatactccaacatcaattactttaactgcttcaagagtttccaaagttaatgataaaagaaggaaaaaaagcggggagaaagaacaacacatttcaaaatgtaaaaaggcatttcgtgaaggatctaggaagtcatcaagagttaagggttcagctccagagattgatccttcatctgatggttcaaattttggatgggagacaaagatcaaagcatggatggatcgatatgaagaagcaaataacaaccagtatagtgagggtgttcagagggaggcacaaagaatagctctgagattaggcaatggaaatgacaaaaaagagatgaataaatccgatttgaataccaacaatttgctcttcaaacctcctgtagagagccatatacaaaagaataagaaaattcttaaatctgcaaaagatttgcctcctgatgcacttatcattgaatacagagggaagtttatgctgagagaacagtttgaagcaaatgggtatttctttaaaagaccatacccttttgtgttattctactctaaatttcatgggctagaaatgtgtgttgatgcaaggacttttgggaatgaggctcgattcatcaggcggtcttgtacacccaatgcagaggtgaggcatgaaattcaagatggaaccatacatctttatatttattctatacacagtattccaaagggaactgaaattactattgcctttgattttgactatggaaattgtaagtacaaggtggactgtgcatgcctcaaagaaaacccagagtgccctgttctaaaacgtagttctgaatccatggaaaatatcaatagtggttatgagaccagacggaaaaaaggaaaaaaagacgaagatatttcaaaagaaaaagatacacaaaatcagaatattactttggattgtgaaggagcgaccaacaaaatgaagagcccagaaactaaacaaagaaagctttctccactgagactatcagtatcaaataatcaggaaccagattttattgatgatatagaagaaaaaactcctattagtaatgaagtagaaatggaatcagaggagcagattgcagaaaggaaaaggaagatgacaagagaagaaagaaaaatggaagcaattttgcaagcttttgccagacttgaaaagagagagaaaagaagagaacaagctttggaaaggatcagcacagccaaaactgaagttaaaactgaatgtaaagatacacagattgtcagtgatgctgaagttattcaggaacaagcaaaagaagaaaatgctagcaagccaacccctgccaaagtaaatagaactaaacagagaaaaagtttttctcggagtaggactcacattggacagcagcgtcggagacacagaactgtcagcatgtgttcagatatccagccatcttctcctgatatagaagttacttcacaacaaaatgatattgaaaatactgtacttacaatagaaccagaaactgaaactgcactagcagaaataattactgaaactgaagttccagcacttaataaatgtcctaccaagtaccccaaaacaaagaagcacttggttaatgaatggttaagtgagaagaatgagaagacaggaaaaccttcagatggcctttcagaaaggcctctacgcataactacagatcctgaagtgttagctacacaactcaattctttaccaggtctcacttacagcccccatgtatactccactcctaagcattatattagatttacttcaccattcctttcagaaaaaaggagaagaaaagaacctactgaaaacatttctggttcatgcaagaagcgatggttgaaacaagctctggaagaagaaaattcagcaattttacatagatttaattcaccctgtcaagaaagatccagaagtcctgcagtcaatggtgaaaataaaagtccactactattaaatgacagctgttcccttccagatttaactacaccactaaaaaaacgaagattttatcagttgctagattcggtttactcagaaacctccacacctactccttccccgtatgctacaccaactcacaccgatattactcctatggacccatcttttgccacgcctccacggataaaatcggatgatgaaacttgtagaaatggttataaacccatatattcaccagttaccccagtaactcctggtacaccaggaaataccatgcactttgagaatatttcttccccagaaagttctccagaaataaagagacgcacttatagtcaagagggatatgacagatcttcaaccatgttaacattggggccttttagaaattctaatttaactgaactgggtctgcaagaaataaagactattggttatacgagccctaggagtaggactgaagtcaacaggcagtgtcctggagaaaaggaacctgcgtcagaccttcagctaggactcgatgcagttgagccaactgccctacataaaaccctggaaacgcctgcacatgacagggctgagcccaacagccaactggactcgactcactctggacggggcacaatgtattcttcctgggtaaagagccctgacagtacaggagttaacttctcagtgaactccaacttgagggacctgacacccccgcatcagttggaggttggaggaggctcccgaataagtgagtcaaagtgcctgatgcaggatgacaccagaggcatgtttatggaaacaactgtgttttgtacttccgaagatgggcttgtatctggtttcggacggactgttaatgacaatttgatcgacgggaattgcacaccccagaatccaccacaaaagaaaaaggtttctctattagaataccgtaagagacaacgtaaagctaggaaaagtggctctaagacagagaactttccactcattagtgtatcaccccatgcaagtggaagcttgagcaacaatggtgatggctgtgccagcagtaatgacaatggggagcaggtggaccacactgctagcctacctttaccaacaccagctacagtttataatgccacttctgaagaaactagcaataactgccctgttaaggatgctactgctagtgagaagaatgaaccagaagttcaatggactgcctcaacttcagtggaacaagtcagagaaaggagttatcagagagctttacttctcagtgatcaccgaaaagataaagatagtgggggagaatcaccatgtgtctcatgttcaccgagtcatgttcagtcttcaccttcatctcattcaaatcacataccccagttgcaagctaagggcccagtcccttctttcagtgaacttatggaagaccctgatcctgaaaatccagaacccacaactacgaatgaatgtccatccccagatacttctcaaaatacttgtaaaagtcctccaaaaatgagcaagcctggttcacctggatctgtaattcctgctcaagcacacgggaaaatattcacaaaaccagatccccaatgggactccacagttagtgcatccgaagctgaaaatggtgttcacctaaaaacagagctccaacaaaaacagctatcaaataacaaccaagcactttcaaagaatcatcctcctcagacacacgttcgtaattcatctgagcaactttcacaaaagctgccttctgtgccaacaaagttgcactgtcctccatcacctcacctagaaaatcctccaaagtcatccacgcctcacacacctgtacagcatggttatctttcaccaaagcctccttcacagcagttaggatctccctacaggcctcatcattcacagtcacctcaagttggaacacctcagcgagagcctcaaagaaacttttatccagcagcacagaaccttccagccaatactcagcaggcaacttctggaacattatttacacagacaccctcaggacaatcttcagcaacatacagtcagtttaaccaacaaagtctgaacagcacggcaccaccccctccacctcctccacctccttcttcgtcttactatcaaaaccagcagccctctgcaaactttcagaattataatcagctcaaaggtagtctttctcaacaaactgtgtttacatcaggaccaaatcaagcacttcctggcaccacaagccagcaaacagttccaggacaccacgtgactccagggcattttttgccctctcagaaccctaccattcaccatcaaactgctgctgccgtagtcccccctcctcctccaccaccacctgctccaggaccgcaccttgtacaacagccgaattcccatcagcaacactctgtagcacatgtagtagggcctgttcatgcggtcacccctgggtcgcatattcattctcaaactgctggacaccacttacccccacccccaccccctcctggtcctgcccctcatcaccatccaccaccccatccatccacaggactccaaggtctacaagcacaacaccagcatgttgtaaattcagcacccccaccaccccctccgccgccaccttccagtgttttggcttctgggcatcataccacatcagctcaagccttacaccacccacctcatcaaggacctccactttttccttcgagtgctcatccaactgtaccaccgtatccctcacaagctacacatcataccactttgggaccgggaccccagcaccagccttctggaacagggccacattgtccattacctgtcacaggtcctcatctccagccccaaggaccaaacagtattccaacacctactgcttcagggttctgtcctcatcctggctctgtggccctgccacatggggttcaaggacctcagcaggcatctccagtgcctggacagattccaattcacagagcacaggtgccaccaacatttcaaaacaattaccatgggtcagggtggcattaaaatggactccaaaaacatttttttaaatgttctgtaagataaactgtatatttcatatgtacctgttaaggtactttttaaagcttgtacatgaacctttgtataaaaaacaccagtgctctttcgttgtatttttctcatttttgctttttaaaattcctttaaaaaatgtgctgttaagccagtattaggtatctttattttgtaagtgaacattccagctgtttttttctggcagatctgatgctgatttgatgctgtatgatcttttttttttttttagttaaattcatttagtgaatgttctattattttatacatacacattaagtactcagctaagtaatggcactatgaggattttttttttctttcctgtcagcagcagttctgtgaatgcatcttaggtataaaaatgcaatacagatttttatattttggtgtggacatggctcattttgttttaccagttatttgcaagcaaaatgtaatttaatgtatagatgatttctaatgtctcctgacaaactgtaaatactgcatttcttttgcgtatataattgcttacagcttttctcatttgatatatagcattgtacatatgacaagtcttttgcaaaactgtgtgatctttgtgaaagtagtacagtatatgacctttaatttcttttttattttaaatatactgtcacactgaagcactggttgggcattttaattcatgttaataaatcccaattatgtcagatttaaaaaaaaaaaaaa

SEQ ID NO: 30413 - DNA, 3744 bp, Homo Sapiens
gacagacaggatggacttcctccggctatacctccctgggctgcaccaggccttgaggggggcactggattccctcggcacctttgtctcctacctcctgggagatgcagtccccactgtagagcgggaggcgcaggcggctgaggaactgggggtggtggcggtgggaaagacagggaagattgtagaggaggaagcccaggaggacctggagggccttagaggcagccaaaacgagggggctggaaggctgagagggcctggagatgacagaagacatgaagtggggagctcagctgtagaacagacctggggctggggagatggcagctcccatgggtcccaagcagagaggcaggacagtggggctggggagacagccaaggctgccaggtgccaggagccaagcgcccacttggaggccagaaagaaatccaaggcagggtctggggcttgccaagacaggagcggccaagcccaggagaggcaggagtcccatgagcaggaagtgaacagagaagagaggctgagaagctgggaacaggaggaggaggaggaagaggtcagggcaagagagccagggatggccagaggggcggagtcagagtggacctggcatggggagacggaggggaaggctggtgctgttgggccaaaggcggcaggggacaaccgggagatggagcagggggtcagggaggcagatgcaggggaaactgaggagcctggggccgaaggggctgggaaaggagaagaggtggtagtggtggagaaggcctgtgaaagcactagggcatgggggacgtggggcccaggggcagagcctgaggactggggaatcttaggcagagaggaggccaggacaaccccaggtagggaagaggccagggcaattttagatggggaggaagccaggacaatctcaggcggggaggaggctgagacagcctcaggcggggaggaggctgaaacagcctcaggcggggaggaggccgggacagcctcgggaggggaggaggccgggatatcctcaggcggggaggctgggacagcctcaggaggggaggaggccgggacagcctcaggaggggacgaggcctggacaacctcaggcaaagaggaggctgacctgctgggagtcagacagactcaatatggagcagttccaggagaaaggctcctagaggctactggaaaagtctgggtcctagaggaggagggggatgaggagagagaggctgaggtgagccctttccccaaacaggcccaggtcctgggcactgaaagaacagaagaggctgctgagagccagaccgcagggagggaagctgtgggaggccaggaggcaggggagagctttgagggccaggtagacctgcgtggtaaggaggctgagatgaggcaggacttggggatcagggccgaccgggccaggatggaagagctggtacaggcagaggaggcccaggaggagagagggagcagcagggatccagtggctgagctgccctcagatggagaggctgaaggcactgccgacttggaggcaactccagaggccaggcctgaggaggagctcacaggggaggagagtgaggcggcccagactagctgtggcctactgggcgtggaatggggtggcctcacacacagcgtcaccaaaggccagggacctgagctgatggggggtgcccagaccccaactaagcaacccgaggaaagggaggcaggggaggtggagctcatgggagttctggccctgagcaaagaggagcaggagaggagcctggaggcaggtcccaggcacgcggggtctgtaaagcctgaggcctccgaggccttcccaggagcctgggaaaaccgcacgagaaaggacatggagagaggaaatactcaggaggatgcggccgatggcgagcagcgggaggaggaggagactgcgggaggccagaccctggcggctgaggctgaaggagaccgagagtctgaactatcagaagtcccagaggcaggcggggaggggctgacaacccaggacgcgggatgtggaactgaggagggagaggcatctgtctcagagaaccaggagctggacggaagcacaggggcagacgcagggccttgcccgtcactgggagaggcctatgccagagaaactgaggatgaggaggcggaggctgacagaacatccagaagaggctggaggctgcaagcggtggctgtgggcctcccggaccgtgaggatgcacagactggctctgtggctgctgggattatggggggtgatgtggtcccacacatcagcgctgctggcgctggtgaagctttggaaggggcgcttgggcaaggctgggactcgaaagaaaaggaagaggcagcagcaggagagcatgcaggtgggcaagaatttggtctggagggctcagcagaggaagaggtgactggcagaggcagccaagtagaggcttttgagtccagggagggaggaccttggggagggcgggtagaggccgaggaatctgcaggcgcagaggacagctgtgggctggatcccgcgggctcccagacagcgagggcagaggggatgggagccatggtggaggctggggggcttctagaaaagtggacgctgttggaagaagaggctgttggatggcaggagagagaacagagggaagacagtgaggggcggtgtggggactaccaccctgagggagaggcaccaaggctccttgatgcagagggtctcatggtgaccgggggccggagggcagaggccaaggagactgagccagaaagcctggaacatgtcaggggccaggaggagcagccaacacaccaggcccctgcagaagctgcgccggagtcagtcggggaagccgagacggctgaggccatgggcagtgccagaggaggtgctgccaacagctggagcgaggccccgctccccgggtccctcctagacgtctctgtcccaaggagtcgcgtgcacctctcgagaagctcctcacagcgtcgctcccggccctcttttcgtcggactccggcctgggagcagcaggaggagcccccagcccccaaccctcctgaggaggagctgtcagctcctgagcagagacccctccagctggaggaacccctggagccaagccctctgaggcatgatgggaccccggtgccagccaggagaaggcccctgggacacgggtttggcctcgcgcaccctggcatgatgcaggagctgcaagcccgtctgggccggcctaagccccagtgactgagacccggtgctctgggagccaggccctgagtgggtgccagaaggcttgctccaatgccactgagccctgctccctctgccactgtggacacatcctctccaccctctgggcctcagtgtcttgatgtatcattcatggagcaggcaaaaccagacgtctgggaataccgtgaacttaaggagtctgattctccgacacaggctggtggaccacctaccccactgagaccacctctcagggtgcctgccctggttcctccccagcctgagtcagctgtctggactgcaaggaggctgggcacgggggctcacgcctgtcaccccagagctttgggaggccaaggtgggaggatcgcttgagaccaggagttcgagaccagcctgggcagcatagcaagatccccatcttttaaaaacaaaataaaacaataaagactgcaaggaaaaaaaaaaaaaaaaaaaaa

SEQ ID NO: 30414 - DNA, 6751 bp, Homo Sapiens
gccaggccgcgtccgccatagtacctggcttggaggtgtcgccgccgctcggtgagagcccccgagcggcagggggccaacacaaaaagggagccggagaagccctagccgctgcccagcagcttgcgggcgtgttctcgcggttccgggcctcaaggcgacggaaacgaaaggcgagcgaagcgcggaggatccggcgagaagaagcgtcagggagcctcggcggtgtccccggggtccgccgaagccacccggccgccggctggggcccggggtggtgaggaagtgctccgaggcctcgccgaggcctagcgccggctttgtgtccgaggcggcggcggcggcggggggaggcggagccgggggcggcctgcgggaaggcctctcctccgccgaccgcgcgttttcggcctaggccgtggggccgctcgtggcctccggggagcaggcgccaggggtttgtgtgcggtgggggcctgggcctgggcctggggaagctgacgccggtcgtccggaagccaggaggaggcgtgaggccgctcgtggactccgggcctaggccctctcccctcaaccttctcccggggcctgggtcaccccaatccacggagagagagacccgccgggaggtgcggccgcgctatggacccctgaccccgtggggtcgctcggactcttaacgtgtggactgaccgctactgactgcaccgccaatccccccgtctctgccggccccttagcatgagcgagggggacccagccgggtgacattgtgcccgttggcggattctcgatttcccctcttccccgtcctcgtcctcctcctcccccatgaagtgattctgagtatcggggggtctctggattattgttctgacgaacccctgcttgtggttggggggtatttaatctgaggccttagggtccttcggtgtctttgagtgttttgtgtgtacatattttgctcttaaagtttataaatatacgtatattgagagtgtccacgtctcctcgctgaaccttaggaatcccttggcaccatgtcctgtgtgcattataaattttcctctaaactcaactatgataccgtcacctttgatgggctccacatctccctctgcgacttaaagaagcagattatggggagagagaagctgaaagctgccgactgcgacctgcagatcaccaatgcgcagacgaaagaagaatatactgatgataatgctctgattcctaagaattcttctgtaattgttagaagaattcctattggaggtgttaaatctacaagcaagacatatgttataagtcgaactgaaccagcgatggcaactacaaaagcaattgatgactcttccgcgtctatttctctggcccagcttacaaagactgccaatctggctgaagccaatgcttctgaagaagataaaattaaagcaatgatgtcgcaatctggccatgaatacgacccaatcaattacatgaagaaacctctaggtccaccacctccatcttacacgtgtttccgttgtggtaaacctggacattatattaagaattgcccaacaaatggggataaaaactttgaatctggtcctaggattaaaaagagcactggaattcccagaagtttcatgatggaagtgaaagatcctaatatgaaaggtgcaatgcttaccaacactggaaaatatgcaataccaactatagatgcagaagcatatgcaattgggaagaaagagaaacctcccttcttaccagaggagccatcttcttcctcagaagaagatgatcctatcccagatgaattgttgtgtctcatctgcaaggatattatgactgatgctgttgtgattccctgctgtggaaacagttactgtgatgaatgtataagaacagcactcctggaatcagatgagcacacatgtccgacgtgtcatcaaaatgatgtttctcctgatgctttaattgccaataaatttttacgacaggctgtaaataacttcaaaaatgaaactggctatacaaaaagactacgaaaacagttacctcctccaccacccccaataccacctccgagaccactgattcagaggaacctacaacctctgatgagatctccgatatcaagacaacaagatcctcttatgattccagtgacatcttcatcaactcacccagctccgtctatatcttcattaacttctaatcagtcttccttggcccctcctgtgtctggaaatccgtcttctgctccagctcctgtacctgatataactgcaacagtatccatatcagttcattcagaaaaatcagatggaccttttcgggattctgataataaaatattgccagctgcagctcttgcatcagagcactcaaagggaacctcctcaattgcaattaccgctcttatggaagagaagggttaccaggtgcctgttcttggaaccccatctttgcttggacagtcattattgcatggacagttgatccccacaactggtccagtaagaataaatactgctcgtccaggtggtggtcgaccaggctgggaacattccaacaaacttggctatctggtttctccaccacaacaaattagaagaggggagaggagctgctacagaagtataaaccgtgggcgacaccacagcgaaagatcacagaggactcaaggcccgtcactaccagcaactccagtctttgtacctgttccaccacctcctttgtatccgcctcctccccatacacttcctctccctccgggtgttcctcctccacagttttctcctcagtttcctcctggccagccaccacccgctgggtatagtgtccctcctccagggtttcctccagctcctgccaatttatcaacaccttgggtatcatcaggagtgcagacagctcattcaaataccatcccaacaacacaagcaccacctttgtccagggaagaattctatagagagcagcgacgactaaaagaagagtctaaatctccctatagtggttcttcgtattcaagaagttcatatacttattctaaatcaagatctggttcaacacgttcacgctcttattctcgatcattcagccgctcacattctcgttcctattcacggtcacctccataccccagaagaggcagaggcaagagccgcaattaccgttcacggtctagatctcatggatatcatcgatctaggtcaaggtcacccccttacagacgctatcattcacgatcaagatctcctcaagcgtttaggggacagtctcctaataaacgtaatgtacctcaaggggaaacagaacgtgaatattttaatagatacagagaagttccaccaccatatgacatgaaagcatattatgggagaagtgttgactttagagacccatttgaaaaagaacgctaccgagaatgggagagaaaatatagagagtggtatgaaaaatattataaaggttatgctgctggagcacagcctagaccctcagcaaatagagagaacttttctccagagagatttttgccacttaacatcaggaattctcccttcacaagaggccgcagagaagactatgttggtgggcaaagtcatagaagtcgaaacataggtagcaactatccagaaaagctttcagcaagagatggtcacaatcagaaggataatacaaagtcaaaagagaaggagagtgaaaacgctccaggagatggtaaaggaaataagcataagaaacacagaaaaagaagaaaaggggaggaaagtgagggttttctgaacccagagttattagagacttctaggaaatcaagagaacctacaggtgttgaagaaaataaaacagactcattgtttgttctcccaagtagagatgatgccacacctgttagagatgaaccaatggatgcagaatcaatcacttttaaatcagtgtctgaaaaagacaagagagaaagggataaaccaaaagcaaagggtgataaaaccaaacggaagaatgatggatctgctgtgtccaaaaaagaaaatattgtaaaacctgctaaaggaccccaagaaaaagtagatggagaacgtgagagatctcctcgatctgaacctccaattaaaaaagccaaagaggagactccgaagactgacaatactaaatcatcatcttcctctcagaaggatgaaaaaatcactggaacccccagaaaagctcactctaaatcagcaaaagaacaccaagaaacaaaaccagtcaaagaggaaaaagtgaagaaggactattccaaagatgtcaaatcagaaaagctaacaactaaggaagaaaaggccaagaagcctaatgagaaaaacaaaccacttgataataagggagaaaaaagaaaaagaaaaactgaagaaaaaggcgtagataaagattttgagtcttcttcaatgaaaatctcgaaactagaagtgactgaaatagtgaaaccatcaccaaagcgcaaaatggaacctgatactgaaaaaatggataggacccctgaaaaggacaaaatttctttaagtgcgccagccaaaaaaatcaaactcaacagagaaactgggaagaaaattggaagtacagaaaatatatcaaacacaaaagaaccctctgaaaaattggagtcaacatctagcaaagttaaacaagaaaaagtcaaaggaaaggtcagacgaaaagtgactggaactgaaggatccagctcaactctggtggattacaccagtacgagctcaactggaggcagtcctgtgcggaaatctgaagaaaaaacagatacaaagcgaactgtgattaaaacgatggaagaatataataatgacaataccgcgccagctgaagatgttatcattatgattcaggttcctcaatccaaatgggataaagatgactttgaatctgaagaagaagatgttaaatccacacagcctatatcaagtgtaggaaaacctgctagtgttataaaaaatgttagtacaaagccatcaaatatagtcaagtatcctgagaaagaaagtgagccatccgagaaaattcagaaattcaccaaggacgtgagccatgaaatcatacaacatgaggttaaaagttcaaaaaactctgcatctagtgaaaaagggaaaaccaaagatcgagattattcagtgttggaaaaggagaaccctgaaaagaggaagaacagcactcagccagagaaagagagtaatttggaccgtctgaatgaacaaggaaattttaaaagtctgtctcaatcttccaaagaggctagaacgtcagataaacatgattccactcgtgcttcctcaaataaagacttcactcccaatagagacaaaaaaactgactatgacaccagagagtattcaagttccaaacgtagagatgaaaagaatgaattaacaagacgaaaagactctccttctcggaataaagattctgcatctggacagaaaaataaaccaagggaagagagagatttgcctaaaaaaggaacaggagattccaaaaaaagtaattctagtccctcaagagacagaaaacctcatgatcacaaagccacttatgatactaaacggccaaatgaagagacaaaatctgtagataaaaatccttgtaaggatcgtgagaagcatgtattagaagcaaggaacaataaagagtcaagtggcaataaactactttatatacttaacccaccagagacacaggttgaaaaagagcaaattactgggcaaattgacaagagtactgtcaagcctaaaccccagttaagtcattcctctagactttcctctgacttaactagagaaactgatgaagctgcttttgaaccagactataatgaaagtgacagtgaaagtaatgtttctgtaaaagaagaggaatcttcaggaaacatttctaaggacctgaaagataaaatagtggagaaagcaaaagagagcctggacacagcagcagttgtccaggtgggcataagcaggaatcagagccacagcagccccagcgtcagccccagcagaagccacagtccttctggaagccagacccgaagccacagtagcagtgccagctcagcagaaagtcaggacagcaagaagaagaagaaaaagaaggaaaagaaaaaacacaagaaacataaaaagcataagaagcataagaaacatgcaggcactgaagtggaattggaaaaaagccaaaaacacaaacacaagaaaaagaagtcaaagaagaacaaagataaagagaaggagaaggagaaagatgaccaaaaagtgaaatctgtcactgtgtaaaaagacagattttttaaattgacttaattactaagtcatctgtattaaattttgttataatgtaaagagattcaagccttgtaaataatgacatggaagaccctgtgctgcacttaaaatattgctgcttgattatttgatttttacatcagagctttataacacgaacttttgtacagaattgtgagttgtgaccatgtaacatgagaggttttgctagggcctattatttttaaccaccattaattagttggggtggagtttactgtaatgtgaaattttcacatttgaattttttaattgcctggcaaaagctgatataagttctaaaatatcagcagaatgatttgctgaattcattacaaccctgttatgtcactttttgattacaataaaagttttcagtaaacttttcaaaaaaaaaaaaaaaaaaa

SEQ ID NO: 30415 - DNA, 4318 bp, Homo Sapiens; identical to SEQ ID NO: 26108

SEQ ID NO: 30416 - DNA, 2266 bp, Homo Sapiens
agcggagcagtagccaccactccgccgaggccgcaaccccggctcggcctccccaggccccgccgctgccgcagtcatggctgctgatggggtggacgaacgctcgcctctgctgtcagcatcccactccggaaatgtcactcccaccgccccaccgtacttgcaagaaagcagccccagagcggagctcccacctccatatacagccattgccagtccagacgccagtggtattccagtaataaactgccgtgtgtgccaatcactaatcaatttggatggcaagcttcaccagcatgtggttaagtgcacagtttgcaatgaagctacgccaatcaaaaaccccccaacaggcaagaaatatgttagatgcccttgtaattgtcttctcatttgtaaggacacatctcggcgaataggatgcccaagacccaactgtagacggataattaaccttggcccagtaatgcttatttctgaagaacaaccagctcagcctgcattgccaatccaaccagaaggtacaagggtcgtgtgtgggcactgtggaaacacattcctgtggatggaactgaggttcaacactctggcaaaatgcccacactgcaaaaaaatctcctcagtgggtagtgcacttccacgaagacgctgctgtgcatatattaccattggaatgatatgtattttcattggagttgggttaactgttggcaccccagattttgcaaggcgatttcgagcaacctatgtttcttgggcaattgcttatctcctaggattgatctgccttatccgagcttgttattggggagccataagagtcagttatccagaacacagttttgcataagcttgtttatgattcagtaatgcaggtgagagtgtctagcagttcttggtaagctactctggacatctttaaattatttatcctaatggattccattctggtttatgtataatcgtttcaagactttgggagtcttttatgaacaaatgctcattgcactatattatatgcaaattgttttgctgctaggttttcaaaatttgaataataaagccttttcatgttcttttacatctcttatagatatttttggatttgttaccaaacattacatttactctcacccttttattatttttaaataagttatttcattacttgctgatacatgagtattcctaagtgtttataaatatttctataatagtttcacatttatatttacattttaattaaacagtatcaaaattgcttgcttaaaacctaagcaatatgcattttgcttgaactgcttactgtaactttaacctaagattatagtgaccttattcaggaaaaaaaaaaaatttagtgtaacttcaaagacttgacattcttgtcagaggaaaaaaaatttctagatactgtttgcttgttttttgttgtttgtagaaagataaaatattttggtaataatttaaaatacaagaacgaatatttatttgtccacagttggagatgttggataaatgtcttttctcaaagatcacaggacttttgtctttcatttttgcctttttatttaccatttataaaagatctggtctggattatggaatttaatgtttatcagctctatgtattcctttatagaggcttgaggaagtatttcacataacatgttttataatacttaaccatttatccaaagatatatttacattgggttgtgcccctttcccttagatcatggtaaatttttcttattgaggtaattatgtactacttatatttgaaggaagcttatgacattttacagtagctaaaatgttgagattagaggtacttttactattcttctcaaaggtaactgatcagataattacccaaattattcaagaaaatagatcagaaataaagaacaacataattttctaagaattcattgaaatttatggaatcagctctcgcactgcccatctttgcagttttgaaaaagaaattgcttaatcacaaatgttctacagtctttaaatgtagtagaattagacagtgagatcatctgagtaaattgattggtgattccagagataagactaatattttaaattatttatgatactgattagtataaaaacgtactcatcacagaatttgaagcaaaatacatgtacacttcaaagagtaaatgacaaatgtataaatgctgtagctcaggattatatgtacctttaaaaatacactaataaagattattgttcaaaaaaaaaaaaaaaa

SEQ ID NO: 30417 - DNA, 5650 bp, Homo Sapiens
agcagcggcggcagcggcagcccagccgagcgttaggtgctgctctctgcgcggcgttttgcaaaggacttcaccgatctacttttgcagtcgcctcggactgtccatgtgtttacttcccccagcccgaggattcgatatctaggttcctgtgaaatgcaactgagcagccaaagtactttgagaacacggggcggcataaacaccaaaacttttttgtggaaggaaaatgcaataagcaagcttgccgttttccgatgcggtgtggagtgagtgtgtgtcgcgcgtgtccgcactggaggcatatgcttgtgtgtgtacatggggtgtgtttttcggtatgtagggagaaaatgcttgccaaccaccggaaatctcctggaatttattagaaaataatggattataaaaagaaggcaagcaaggagcggatctccccttgagttgcaacccgatttgctgctggctcagtttgttgtgattctttttgttgataggtgtctgatggtattccgataacgttccccccttttcttccccttgagcttttacagtttaaaaaaaggaaacaaaaaccaccccaaaatctccccccccgtttttttcgccccgtcgggatcgccgtttccatccatgtgcttgcgtctcccccgcgttccacttaaactattttaatccttggacccaaggaggaggctgataggggggtggataaaaaaagttcttccaaaatagtgtgcccggggagcaggatgggggatttcgcagcccccgctgctgccgcgaatggcagtagtatttgcatcaacagtagcctgaacagcagcctcggcggggccgggatcggtgtgaataatactcccaatagtactcccgctgctccgagtagcaatcacccggcagccggtggatgcggcggctccgggggccccggcggcggttcggcggccgttcccaagcacagcaccgtggtggagcggctccgccagcgcatcgagggctgccgtcggcaccacgtcaactgcgagaacaggtaccagcaggctcaggtggagcagctggagctggagcgccgggacaccgtgagcctctaccagcggaccctggagcagagggccaagaaatcgggcgccggcaccggcaaacagcagcacccgagcaaaccccagcaagatgcggaggctgcctcggcggagcagaggaaccacacgctgatcatgctacaagagactgtgaaaaggaagttggaaggagctcgatcaccacttaatggagaccagcagaatggtgcttgtgatgggaatttttctccgactagcaaacgaattcgaaaggacatttctgcggggatggaagccatcaacaatttgcccagtaacatgccactgccttcagcttctcctcttcaccaacttgacctgaaaccttctttgcccttgcagaacagtggaactcacactcctgggcttctagaagatctaagtaagaatggtaggctccctgagattaaacttcctgtcaacggttgcagtgacctggaggatagcttcaccatcttgcagagcaaagacctcaaacaagaacctctcgatgaccctacttgcatagacacatcagaaacatctctttcaaatcagaacaagctgttctcagacattaatctgaatgatcaggagtggcaagaattaatagatgaattggccaacacggttcctgaggatgacatacaggacctgttcaacgaagactttgaagagaagaaggagccagaattctcgcagccagcaactgagacccctctctcccaggagagtgcgagcgtgaagagcgacccctctcactctcccttcgcacatgtctccatgggatctccccaggcgaggccttcttcttctggtcctcccttttctactgtctccacggccactagtttaccttctgttgccagcactcccgcagctccaaaccctgcaagctcaccagcaaactgtgctgtccagtcccctcaaactccaaaccaagcccacactccaggccaagctccacctcggcctggaaatggttatctcctgaatccggcagcagtgacagtggccggttcagcgtcagggcctgtggctgtgcccagctctgacatgtctccagcagaacagctcaaacagatggctgcacagcagcaacaaagggccaaactcatgcagcagaaacagcaacagcaacagcagcagcagcagcagcagcagcaacagcagcagcagcagcagcaacagcactcaaatcagacttcaaattggtctcccttaggacctccctctagtccatatggagcagcttttactgcagaaaaaccaaatagcccaatgatgtacccccaagcctttaacaaccaaaaccctatagtgcctccaatggcaaacaacctgcagaagacaacaatgaataactacctccctcagaatcacatgaatatgatcaatcagcagccaaataacttgggtacaaactccttaaacaaacagcacaatattctgacttatggcaacactaaacccctgacccacttcaatgcagacctgagtcagaggatgacaccaccagtggccaaccccaacaaaaaccccttgatgccgtatatccagcagcagcaacagcagcagcaacagcaacagcagcagcagcagcagcagcagccgccacctccacagctccaggcccccagggcacacctgagcgaagaccagaaacgcctgcttctcatgaagcagaaaggagtgatgaatcagcccatggcttacgctgcacttccatcccacggtcaggagcagcatccagttggacttccccgaaccacaggccccatgcagtcctccgtgcccccaggctcaggtggcatggtctcaggagccagtcccgcaggccccggcttcctgggcagccagccccaagcagccatcatgaagcagatgctcattgatcagcgggcccagttgatagagcagcagaagcaacagttcctgcgggagcaaaggcagcagcagcagcagcagcagcagattttggcggaacagcagttgcagcaatcacatctaccccggcagcacctccagccacagcggaatccatacccagtgcagcaggtcaatcagtttcaaggttctccccaggatatagcagccgtaagaagccaagcagccctccagagcatgcgaacgtcacggctgatggcacagaacgcaggcatgatgggaataggaccctcccagaaccctgggacgatggccaccgcagctgcgcagtcggagatgggactggccccttatagcaccacgcctaccagccaaccaggaatgtacaatatgagcacaggcatgacccaaatgttgcagcatccaaaccaaagtggcatgagcatcacacataaccaagcccagggaccgaggcaacctgcctctgggcagggggttggaatggtgagtggctttggtcagagcatgctggtgaactcagccattacccagcaacatccacagatgaaagggccagtaggccaggccttgcctaggccccaagcccctccaaggctgcagagccttatgggaacagtccagcaaggagcacaaagctggcaacagaggagcttgcagggcatgcctgggaggactagtggagaattgggaccattcaacaatggcgccagctaccctcttcaagctgggcagccgagactgaccaagcagcacttcccacagggactgagccagtcagtcgtggatgctaacacgggcacagtgaggaccctcaacccagctgccatgggtcggcagatgatgccatcgctcccggggcagcaaggcaccagccaggcgaggccaatggtcatgtctggcctgagccagggagtcccaggcatgccagcgttcagccagcccccagcacagcagcagatacccagtggcagctttgctccaagcagccagagccaagcctatgagcggaatgcccctcaggacgtgtcatacaattacagtggcgacggagctgggggttccttccctggcctcccggacggtgcagaccttgtggactccatcatcaaaggcgggccaggggacgagtggatgcaggagcttgatgaattgtttggtaacccctaatcaagagaggccccaagatccacaactcgagtggttaaagcttaaaaagtgaaaaagaaacaggatgttgacccatccttgttttttgtttttttgacccacgtaaactgagcaaaactgcagctggctgacaatggaagatccaggtgccaatccacagccccaccaggcctcatttcacctgattttcacacagcaatcgagatgagacgccatgcagatcccggctgcgagagagggagacacccggaggagcaggtgggaagatgaagccggccagagcccctctgcccagcatgccctgtgatcgcctggcccagcaggagctgcttcagccgagagggactattacccaagagaggtatcctcagcccctcctgccccaggtcgggagacagcagctttggagacacaaaagagacagagcctcagccagggagagtgagtcccccagaagaggctgggtggttgcacaggccaggtgcacaggttggaaatgcactgaactctgggtgccgagagatgtaaggctttgagacatgctactgaatttggagggcaggcacgaagaacagtgagattgtcaaaaggagacaaccacagatcctacaggactgtctgtctcctgccccatgatgaccctcaggaattgcaaaggctctgctgtcacaaggagagcaggctgagtttggagcagggtccatccggcagtcctgggacggcttccctctgctggtgcccctggtggcagtccctccaggtggggctggagcctgctggcgcccaatacaaaacccatacatccaggtgggtcacatctacttctggcggccgcagggcagggaaacccctactggaccctgtgtgtctgccagcctggagcctttgtctccagccctgcctttattcctccttgcctccacaccagcctccccttgcttctccttacagactatccaagaagtgaagcttatgtctttagggagccttgggcagagtccacataaatgcaggaagaacttagacaatgcctgaaatgcaaaggcgacactggagtcttctttctctaacgtgtagcgttgaatgaatatctgcctggaaccaagagggctgctctgatgtttgggagtcggttttttgtgagccacatctgatatttctgatatccccaggaaggagtggcctggaggtcactggttcaggctccctttgggcgaaatcctgggagtgatgctctaaaaatccacctttcccatcatccctactcatcagaaagacaaatataaaatcccagagaggtggaggagctaaaaaagcaattgctccaccttacaaatttggatagaaaggagatgtagtttatttcatatgggcaaagtagtcctcttccaaagtcctgtacagttgttctctgcaattgacgcacatctgccctaagcgaaatctgtcagaaggaatcaacaaggctccttgcctcccctcccaatccccctttt

SEQ ID NO: 30418 - DNA, 3526 bp, Homo Sapiens
ggcaacccgtgaggctagaaccccgaacgtggtcggttggagaaaatatgtccctccggaggcacattgggaaccctgagtatctgatgaaaaggataccacagaacccaagataccagcatatcaaatcaagactggacactggtaacagtatgactaaatatactgagaagctcgaagagattaagaaaaattatagatacaaaaaagatgagcttttcaagagactaaaagttacaacttttgcccagctgatcatccaagttgcttccctctctgatcaaacactggaagtgacagctgaggagattcaaaggctggaagacaatgattctgcagcttcagaccctgatgctgaaaccactgccaggaccaatgggaaaggaaatccaggtgagcagtcgccgagccctgagcagttcataaacaacgcaggagcaggggactccagccgctcaactcttcagagtgtcatcagtggtgttggggaactggatctagacaaagggccagtgaagaaagcagagccccataccaaagacaaaccttatcctgactgccccttcctgctgctagatgtgcgtgatagagattcttaccagcagtgccacattgttggagcttacagttacccaattgcaactctgtctagaacaatgaacccttattcaaatgatattcttgaatataaaaatgcccatggcaagatcatcattctgtatgacgatgatgaaaggctggccagtcaggcggccaccaccatgtgcgagcgtggatttgaaaacctcttcatgctttccggaggtctaaaagtcttagctcagaaattcccggaaggactgattactggttccctgccagcatcttgccagcaggcccttcctcctgggtctgcccggaaacgatccagccccaaagggccacccctaccagctgagaataaatggagatttaccccagaagacttaaaaaagatagaatattatctggaagaggagcaagggcctgcagatcatcctagccgactgaaccaagctaactcctccggaagagagtccaaggtgcctggtgcccgaagcgctcagaatctgccaggtggcggccccgccagccactcaaacccccgctccctcagcagtggtcacctgcaaggcaaaccctggaagtaaagactttgtctcacttaggcaaataaatgttcttcctcttttcagaacccctgagcatttcccaagttgggtcatttccagaaacttctgcagaggaaagaccatgacatatgtatgggataggcctcttccctgtccctgtctccagttcctctcccctcaggaggccacctcaggaaggattttgacaggtgaccataaaaaccagaggtgtgacaggctctagtctcctccctgttgtttacagcatatttaagtcttgtgaaactgtataggaaaaaagtatctacgtttttagtttttttgttttgtttttttttaataaggtccagcttgttgggtctctctgtgttgttttgtaaatacttcagtcacatctgcccgtgtgcctgtccctgccaccttttcattcactgttcttgacttcatgaaggcttctccgggcagtcttggtgtgagaagctgtttccaagggtgcagatgagccttaggttccagccgcctgcagaccccaccccagcaggctcactcagcaaggagctctctgcccagcatattgcaggccctgttttgagtatggaagccagtgcctgtgtactcactgaaattgaagatgaggaaagtagctgtacactcactgaatgctcccccttactagatatttcctggagccagaaaggtatgcatgtgggtgtcttcacaccggggaggagggcctctcatgggaaagccctggccaccacaccggcctgtgccccttgaagcccaccaaagcggccctcacttgtggtcagtatatcagttatgacgcccattgcccagcttcagtccatccatgttagatggacagaaattatggccagttgaaaataccagctttggttggacaactgtggacacacaaggtgaagaggactccgaagtcctttgtcagggctgacaacctcgtaagcccttgcttagaaatacagtattagtctaattgagtaattagtgcaatttcctgcttacttttcattctcatgactgaactgtgattaggaagttgtgattatagattctggttttggccggaattttgaatcagcattaattgaattgctaaatgactgacattcattccatttaattgggggaacaaaaggcctcaggtaaggatgaggaactctgaaatcagatggaaaagagcggtgttaatttttatggtctgtgatcgtagctgtgataagggactgaggaataaattgtgctctttgtcatggcaaccagcttctgaaaagcccactgaaaattgcctgtcctgctggtaactgctacggggtaagatttgccttaacagtactattttctcgccaccaaaaaaaaaaaaaaaaaaaaaaaaaaatgcaccacagtatttctagcatgggggctgtgtttgtatgagaaataaacgtaataaatatctcatagagacatatggaaaaataactttcagattcagcccagttctgttttagagtgtgtttattcttctctacttgatttccaaagtgcaacattttccgatgctttagaaatcaaacaaaccagggacattgttcagatgtcaagccatgcccaattttccacaagattcaagaatcttgtataaaattcagccaacgtacacatagctttaatgaggagcctgtcatgtttccccataaatttattgcctgagaacttagttcagcctttgctaatgccaaaatgctctggctttgtattttctttacagcatagatagaaaaatgcacatttttccacactcagctttcccctagcatggacaagattttcagccatttttgccacatatacatttttaaggaaaaaagatttttctctgtaagaaagttctggttatgctgttttaaaggtgacttgtcaggagttgagacttccctgccggattctattttgaaagtaaatggtcttccctccttgttccgattctgcgttcccatcgtcagacaactttggagtattagaaaccactgtatatatgtggaaagccaggtcagccagacctgttagaattggtgtgcactcacctgagagatctggcaggttggatatatttatgtgtatttctccacagtgcttgctttgccctgttggtaaggattttaaataaccatgctcaaaagagctgttctaatctgcgttttgcatgttaagtgttaatatcaaacattctttacgtgctcgaggtattgcttttaacattctactttgccagtttcttcattagattaattgacatgtattatttaaatgaccagtgatgctttgtgcaattatgaatgttgaagattaaagtacatagttactaa

SEQ ID NO: 30419 - DNA, 6839 bp, Homo Sapiens; identical to SEQ ID NO: 23464

SEQ ID NO: 30420 - DNA, 3897 bp, Homo Sapiens
gagcgagagtgtgtcgagtgagtgtgcgtctgtgtgtcccggcgagggtgcgcgctcggcgccgggagcgcggccagccgagtccggaggcatcgggaggtcgagagccgccgggaccccagctctgcgttcactgccccgtccggagctggacttcggggccggggccggggccgtgcgccggggacaggcagggccgggtcgcgggccgcgcgtcccccaggccggagatctgcgagtgaagagggacgagggaaaagaaacaaagccacagacgcaacttgagactcccgcatcccaaaagaagcaccagatcagcaaaaaaagaagatgggccccccgagcctcgtgctgtgcttgctgtccgcaactgtgttctccctgctgggtggaagctcggccttcctgtcgcaccaccgcctgaaaggcaggtttcagagggaccgcaggaacatccgccccaacatcatcctggtgctgacggacgaccaggatgtggagctgggttccatgcaggtgatgaacaagacccggcgcatcatggagcagggcggggcgcacttcatcaacgccttcgtgaccacacccatgtgctgcccctcacgctcctccatcctcactggcaagtacgtccacaaccacaacacctacaccaacaatgagaactgctcctcgccctcctggcaggcacagcacgagagccgcacctttgccgtgtacctcaatagcactggctaccggacagctttcttcgggaagtatcttaatgaatacaacggctcctacgtgccacccggctggaaggagtgggtcggactccttaaaaactcccgcttttataactacacgctgtgtcggaacggggtgaaagagaagcacggctccgactactccaaggattacctcacagacctcatcaccaatgacagcgtgagcttcttccgcacgtccaagaagatgtacccgcacaggccagtcctcatggtcatcagccatgcagccccccacggccctgaggattcagccccacaatattcacgcctcttcccaaacgcatctcagcacatcacgccgagctacaactacgcgcccaacccggacaaacactggatcatgcgctacacggggcccatgaagcccatccacatggaattcaccaacatgctccagcggaagcgcttgcagaccctcatgtcggtggacgactccatggagacgatttacaacatgctggttgagacgggcgagctggacaacacgtacatcgtatacaccgccgaccacggttaccacatcggccagtttggcctggtgaaagggaaatccatgccatatgagtttgacatcagggtcccgttctacgtgaggggccccaacgtggaagccggctgtctgaatccccacatcgtcctcaacattgacctggcccccaccatcctggacattgcaggcctggacatacctgcggatatggacgggaaatccatcctcaagctgctggacacggagcggccggtgaatcggtttcacttgaaaaagaagatgagggtctggcgggactccttcttggtggagagaggcaagctgctacacaagagagacaatgacaaggtggacgcccaggaggagaactttctgcccaagtaccagcgtgtgaaggacctgtgtcagcgtgctgagtaccagacggcgtgtgagcagctgggacagaagtggcagtgtgtggaggacgccacggggaagctgaagctgcataagtgcaagggccccatgcggctgggcggcagcagagccctctccaacctcgtgcccaagtactacgggcagggcagcgaggcctgcacctgtgacagcggggactacaagctcagcctggccggacgccggaaaaaactcttcaagaagaagtacaaggccagctatgtccgcagtcgctccatccgctcagtggccatcgaggtggacggcagggtgtaccacgtaggcctgggtgatgccgcccagccccgaaacctcaccaagcggcactggccaggggcccctgaggaccaagatgacaaggatggtggggacttcagtggcactggaggccttcccgactactcagccgccaaccccattaaagtgacacatcggtgctacatcctagagaacgacacagtccagtgtgacctggacctgtacaagtccctgcaggcctggaaagaccacaagctgcacatcgaccacgagattgaaaccctgcagaacaaaattaagaacctgagggaagtccgaggtcacctgaagaaaaagcggccagaagaatgtgactgtcacaaaatcagctaccacacccagcacaaaggccgcctcaagcacagaggctccagtctgcatcctttcaggaagggcctgcaagagaaggacaaggtgtggctgttgcgggagcagaagcgcaagaagaaactccgcaagctgctcaagcgcctgcagaacaacgacacgtgcagcatgccaggcctcacgtgcttcacccacgacaaccagcactggcagacggcgcctttctggacactggggcctttctgtgcctgcaccagcgccaacaataacacgtactggtgcatgaggaccatcaatgagactcacaatttcctcttctgtgaatttgcaactggcttcctagagtactttgatctcaacacagacccctaccagctgatgaatgcagtgaacacactggacagggatgtcctcaaccagctacacgtacagctcatggagctgaggagctgcaagggttacaagcagtgtaacccccggactcgaaacatggacctgggacttaaagatggaggaagctatgagcaatacaggcagtttcagcgtcgaaagtggccagaaatgaagagaccttcttccaaatcactgggacaactgtgggaaggctgggaaggttaagaaacaacagaggtggacctccaaaaacatagaggcatcacctgactgcacaggcaatgaaaaaccatgtgggtgatttccagcagacctgtggtattggccaggaggcctgagaaagcaagcacgcactctcagtcaacatgacagattctggaggataaccagcaggagcagagataacttcaggaagtccatttttgcccctgcttttgctttggattatacctcaccagctgcacaaaatgcattttttcgtatcaaaaagtcaccactaaccctcccccagaagctcacaaaggaaaacggagagagcgagcgagagagatttccttggaaatttctcccaagggcgaaagtcattggaatttttaaatcataggggaaaagcagtcctgttctaaatcctcttattcttttggtttgtcacaaagaaggaactaagaagcaggacagaggcaacgtggagaggctgaaaacagtgcagagacgtttgacaatgagtcagtagcacaaaagagatgacatttacctagcactataaaccctggttgcctctgaagaaactgccttcattgtatatatgtgactatttacatgtaatcaacatgggaacttttaggggaacctaataagaaatcccaattttcaggagtggtggtgtcaataaacgctctgtggccagtgtaaaagaaaatccctcgcagttgtggacatttctgttcctgtccagataccatttctcctagtatttctttgttatgtcccagaactgatgttttttttttaaggtactgaaaagaaatgaagttgatgtatgtcccaagttttgatgaaactgtatttgtaaaaaaaattttgtagtttaagtattgtcatacagtgttcaaaaccccagccaatgaccagcagttggtatgaagaacctttgacattttgtaaaaggccatttcttgg

SEQ ID NO: 30421 - DNA, 5260 bp, Homo Sapiens
atgttgttctcctggcgagaagatcctggagcccagtgcctgctgctttctcttctgctcctcgcagcctcggaggtggggagcggccagctccactactccgtctctgaggaggccaagcatggcaccttcgtgggccgcatcgcgcaggacctggggctggagctggcggagctggtgccgcgcctgttccgggtggcgtccaaaagacacggggaccttctggaggtaaatctgcagaatggcattttgtttgtgaattctcggatagaccgcgaggaactgtgcgggcggagcgcggagtgcagcatccacctggaggtgatcgtggacaggccgctgcaggttttccatgtggaggtggaagtgaaggacattaatgacaacgcgccagtttttccaatggctgtaaagaatctgtttatttccgaatcccgacagcctggctctcggttttcgctagagggcgcatcagatgcagatatcggaacaaattcgttgttgacttacagtcttgattccactgaatattttaccttggacgttaaaagaaatgatgaggaaattaaatcccttggactcgtgttgaaaaaaaatttaaatcgagaggacactcctaagcattatttactaataacagcaattgatggtgggaaaccagagctcactggcacgactcaactaaagatcactgttttagatgtaaacgacaacgccccagcgtttgagaggacgatctataaagtcagattactcgaaaatgcaccaaatggtaccctagtggtgaccgttaacgccaccgatttggatgaaggagtaaataaggatatcgcgtattctttcaatacggacatgtcagcagatattctgtcaaaattccatttagatccagtcaatggacaaatcagtgtaaagggtaacatagatttcgaggaaagtaagtcatatgaaatccaggtagaagccacggataaaggaaatcccccaatgtcagatcactgcacagttctactcgaaattgtggacatcaatgataatgtacctgagttagttattcaatcactatctttacctgtattagaagactctccacttagcacagtcatcgctctgatcagcgtgtccgaccgcgactcaggagtcaatggacaggtcacctgctcgctgacgccccacgtccccttcaagctggtgtccaccttcaagaattactactcattggtgctggacagccctctggaccgcgagagcgtgtcggcctatgagctggtggtgactgctcgggacgggggctcgccttcactgtgggccacggccagcgtgtccgtggaggtggccgacgtgaacgacaatgcgccggcattctcgcagtccgagtacacggtgttcgtgaaggagaacaacccgccgggctgccacatcttcacggtgtctgcgcgggacgcggacgcgcaggagaacgccctggtgtcctactcgctggtggaacggcgggtgggggagcgcgcgctgtcgagctacgtgtcggtacacgcggagagcggcaaggtgtacgcgctgcagccgctggaccacgaggagctagagctgctgcagttccaggtgagtgcgcgcgatgcgggcgtgccgcctctgggcagcaacgtgacgctgcaggtgttcgtgctggacgagaacgacaacgcgccggcactgctgatgcctcgggtgggtggcatcggtggcgcagtgagcgagctggtgccgcggtcagtgggtgcgggccacgtggtagcgaaggtgcgcgcagtggatgcagactcaggctacaacgcgtggctttcgtatgagctgcagcctgggaccggcggtgcgcgcatcccgtttcgcgtggggctgtacacgggagagatcagcacgacccgtgccctggacgaggtggacgccccgcgccatcgcctactggtgctggtgaaggaccacggtgaaccctcattgaccgccacggccactgtgctggtgtcgctggtggagagtggccaggcacccaaggcctcgtcccaggcgtccgctggcgccacgggcccggaagctgcactggtggatgtcaacgtgtacttgatcgtcgccatctgcgcggtgtccagtctgttggtgctcacactgctgctatatactgctctgcggtgctccgcgccgccaaccgaaggcgactgtgggccgggcaagcccacgctggtgtgctccagcgcggtggggagctggtcatactcgcagcagaggcagcagagggtgtgctctggagaggggttgcccaagaccgacctcatggcttttagccctagccttcctccttgtccaattagccgggatagagaggagaaacaggatgtggacgttgatctctcagccaaaccacgacagcccaaccctgactggcgttactctgcctccctgagagcaggcatgcacagctctgtgcacctagaggaggctggcattctacgggctggtccaggagggcctgatcagcagtggccaacagtatccagtgcaacaccagaaccagaggcaggagaagtgtcccctccagtcggtgcgggtgtcaacagcaacagctggacctttaaatacggaccaggcaaccccaaacaatccggtcccggtgagttgcccgacaaattcattatcccaggatctcctgcaatcatctccatccggcaggagcctactaacagccaaattgacaaaagtgacttcataaccttcggcaaaaaggaggagaccaagaaaaagaagaaaaagaagaagggtaacaagacccaggagaaaaaagagaaagggaacagcacgactgacaacagtgaccagtgaggtcctcaaatggaaacaagccacttagccagtttttgtaataatggcaaatctctcccatgtagcaattccctgctcctttttcctatctacatgagccctcttagagacctcagaaatctgcagaaagttccctgtgtctgtctagaacgcatttaacaggttttgtcgtaaaagctttactaagtctggtgttaactctttctctccactctggcttgttttcagaacctaaaaagcagacccaagtttcctttctcctccgccgcaaaggagaggcttcccagccccgccagtgagaggttggactctctgccctgtgctccggggatcctgtcttgatgacacttgcagggcaggctgaaaagttttgagattgagcagcttgggagtttgtggccactgggtatgtgtggctaccgcgggtatgcgagtgccagatattggctgagacgagccagcttagactaattggtacaaggaaggcaagaaaacaaagacaaataaacagcggaagttatcagtatggaggggaagtgtaaacttaaagggaccagactttctaaatcttacaactcaagaggtggcagccaccctctaggagacaaaactacccccactgacaaggctttaggagaccctaaagtctgttggctgtgacgtcattatacctaaaatctgcatcatacctgcaagccaacagttcagtgttttaacagagaaccaccctgggaaacagaagcagatctgatgtgtttcctatacatgtcctgtgctcactttattaaaaattcttttgcacacaatgtttatgaaaaggccagatccttttccaatacttatgcaaaagcaaaagaaaaccccgacacctcacctttcgctgtttgttgtttcatagatttatttaaaaaaagagaaagtctatagctataaatctttaaagagaaatatgaatacaattcccctaaactctcctcaaaagagaattcagtctacagccatttaaatgatcattgctgctacagaagtgctttaagagaattgcctgaaacatctgtattatatcggccacctgccaatcacagctttactctttcaggtcactctggggctgcctcttgcatgtattactaaataaaatgatctctctttctctctctctctctcttttctaagaaacaattatgtgcactttgatacacaaccttctctaaccaactatatatcaagacccaaaaattgaagaaaaatattgttttctcatacagtgagcagatttttcaatctactaattctgtgacttgtcttggtgtgctagcctacaccttctctttggtttagttttccttttctataacactctgaattgctaatcttactaacacctatgatgttacctgaaatcaatctcccatatgtatgctgtatgctatgctaagactcctgaaatatacttactctgtgcttgtgtatgtgaatgttaatgcaactattacctagagtgaactttaagctttattgttgaatgtaattccattatatttccttttgtacacctgtgaaaaagtggagtagtgtttttttaaccattgttaatcagcttttgtgtatgaaagacacagtaaaatttctttcttaaatcaagatactggtgattcaaggaattttatttatggtccagccaagagccatctcgtgccaagacttctgctggcaagggaatggataaagctgttttgttctagtaacaattttggaatgaatactgacaatattccatgagggtgtgcaagcacaaattttaccaatctgacctctttgaagttgcagaatgctttgaaattctaatggtatctgaaatatcagctcatagaaagtaacaaaatttgctgtcaccttaaataagacattttaattttgttataatgtacaatttagaagtttgattaattatattatctatttaggcattaatataaaagaggtaggagtctgttatttaaaaaaagcattaaatttaaaaaaaaactgtcttgtctacttttagcttcattctcccatattttgaagggtgtgtaacttcagctctgcaggattgcatggggtaaaacttgttaccaacacatgtgaaccattgctacattgtaggttgtgatcattttgccccactgaagcccatgtatctgaccttacgtgccttttgaactaggagaatcgggctaatttattaatgatgataattataatgtatctgtacagcactttttacatttgcgaagtgctttccaatccatgttagttactagttattacagctgtaaggataaaacacgtcatgtggattcattttgaattggtgctattggtatttcctctgttattgctaataaatgaaaatggtggtatg

SEQ ID NO: 30422 - DNA, 4872 bp, Homo Sapiens
agaatgggctctaggcgccgctgctcaccaatcagggaatgggaagctgcgcgccattgagtccctccctcccccgcctctaccacacaaagcggaatgagatggatactcacagatcctgacactggagacttagaagtattttccttcgctttctgatatattttggatgtagtcggcctaggacttcatagatacataagccgattcacaaccaaccagctcgagaaaccgcggaatatcggcttagagcctgccatggcgaatcggctacagcgcggggaccgcagtcggctgctgctgctgctgtgcattttcctggggacgctgcgggggttccgggccaggcagatccgatattcggtgccagaagagaccgaaaagggctccttcgtgggcaatatctccaaggacctggggctggagccccgggagctggcgaagcgcggagtccgcatcgtctccagagggaagacacagcttttcgctgtgaatccgcgaagcggcagcttgatcacggcaggcaggatagaccgggaggagctctgtgagacggtgtcctcctgttttttaaatatggaacttctcgtggaagacaccttgaagatttacggagtggaggtggaaataatagatattaatgataacgcccccagcttccaggaggacgaagtggagataaaagtcagtgagcacgcaattcctggggcgcgatttgctcttcctaatgctagggatccagatgtgggcgtgaactccctccagagctaccagctcagccctaataattacttttccttgcaactgcggggcagaacggatggggccaagaatccagagctagtactggagggaagcctggaccgagagaaagaggctgctcacctgctcctcctcacagctttagatggaggcgatcccatccgaaagggcgcagttcccattcgtgtggtggtcctcgatgtaaatgatcacatcccaatgtttacacagtccgtatatcgcgtgagtgttccagaaaacatcagctccggaactcgggtgctgatggttaatgcaacggatccagacgagggaatcaacggggaagtaatgtattcatttcggaacatggaaagcaaggcttctgaaatattccaattggattcacaaactggagaagttcaagtacgggggtctctggattttgaaaaatatagattctatgagatggaaattcaaggccaagatggtggaggtctctttaccaccacgacgatgttgatcactgttgtggatgtgaatgataacgctccagaaataactatcacctcttctattaattcaattctggaaaactctcctccaggtacagtgattgctcttctaaatgtgcaagatcaagattctggagaaaatggtcaagtctcctgttttattcctaaccacctgccttttaaattagaaaagacttatggaaattattacaaattgataacaagcagagtgctggacagggagttggtccagagctacaatataacgttgacagccacagaccagggaagcccgcctttgtctgcagaaactcatgtctggctgaatgtggcagatgacaacgataaccctcccgtttttcctcactcctcttactctgcctacattcccgaaaacaaccccaggggtgcctccatcttctcagtgaccgccctcgacccggacagcaaacagaatgccctggtcacttactctctgacggatgacactgtccagggggtgcctctgtcctcctatgtctctattaactccaacactggtgttctctatgccctacaatccttcgactatgagcagtttcgagacttagaactgagagtgatagcacgtgacagcggggacccgcccctcagcagcaacgtgtcgctgagcctgttcgtgctggaccagaacgacaatgcgcccgagatcctgtaccctgccctccccacagacggctccactggcgtggagctggcgccccgctctgcggaacctggctacctggtgaccaaggtggttgcggtggacaaagattcaggccagaacgcctggctgtcctatcgcctgcttaaggccagcgagccgggactcttcgcggtgggggagcacacgggcgaggtgcgtacagcgcgggcactgctggacagagacgcgctcaagcagagcctcgtggtggccgtccaggaccacggccagccccctctctcggccaccgtcacgctcaccgtggctgtggccgacagcatccccgaagtcctggcggacctcggcagcctcgagtctctggctaactctgaaacctcagacctctcgctgtacttggtggtggcggtggccgcagtctcctgcatcttcctggtctttgtcatcgtgctgctggcactcaggctgtggcgctggcataagtcacgcctgctgcaggcttctgaaggcgggttggcaggtatgcccacgtcacattttgtaggcgtggacggggtacaggctttcctgcaaacctattcccacgaggtctctctcattgcggactcgcagaagagtcacctgattttcccccagcccaactatggggacacgctcatcagccaggagagctgtgagaaaagcgagccactcttgatagctgaagactcagctatcattttaggcaaatgtgacccgacaagtaatcagcaagccccgcccaacacggactggcgtttctctcaggcccagagacccggcaccagcggctcccaaaatggcgatgacaccggcacctggcccaacaaccagtttgacacagagatgctgcaagccatgatcttggcgtccgccagtgaagctgctgatgggagctccaccctgggagggggtgccggcaccatgggattgagcgcccgctacggaccccagttcaccctgcagcacgtgcccgactaccgccagaatgtctacatcccaggcagcaatgccacactgaccaacgcagctggcaagcgggatggcaaggccccagcaggtggcaatggcaacaagaagaagtcgggcaagaaggagaagaagtaacatggaggccaggccaagagccacagggcggcctctccccaaccagcccagcttctccttacctgcacccaggcctcagagtttcagggctaacccccagaatactggtaggggccaaggccatgctccccttgggaaacagaaacaagtgcccagtcagcacctaccccttcccccccagggggttgaatatgcaaaagcagttccgctgggaacccccatccaatcaactgctgtacccatgggggtagtggggttactgtagacaccaagaaccatttgccacaccccgtttagttacagctgaactcctccatcttccaaatcaatcaggcccatccatcccatgcctccctcctccccaccccactccaacagttcctctttcccgagtaaggtggttggggtgttgaagtaccaagtaacctacaagcctcctagttctgaaaagttggaagggcatcatgacctcttggcctctcctttgattctcaatcttcccccaaagcatggtttggtgccagccccttcacctccttccagagcccaagatcaatgctcaagttttggaggacatgatcaccatccccatggtactgatgcttgctggatttagggagggcattttgctaccaagcctcttcccaacgccctggggaccagtcttctgttttgtttttcattgtttgacgtttccactgcatgccttgacttcccccacctcctcctcaaacaagagactccactgcatgttccaagacagtatggggtggtaagataaggaagggaagtgtgtggatgtggatggtgggggcatggacaaagcttgacacatcaagttatcaaggccttggaggaggctctgtatgtcctcaggggactgacaacatcctccagattccagccataaaccaataactaggctggacccttcccactacataatagggctcagcccaggcagccagctttgggctgagctaacaggaccaatggattaaactggcatttcagtccaaggaagctcgaagcaggtttaggaccaggtccccttgagaggtcagaggggcctctgtgggtgctgggtactccagaggtgccactggtggaagggtcagcggagccccagcaggaagggtgggccagccaggccattcttagtccctgggttggggaggcagggagctagggcagggaccaaatgaacagaaagtctcagcccaggatggggcttcttcaacagggcccctgccctcctgaagcctcagtccttcaccttgccaggtgccgtttctcttccgtgaaggccactgcccaggtccccagtgcgccccctagtggccatagcctggttaaagttccccagtgcctccttgtgcatagaccttcttctcccacccccttctgcccctgggtccccggccatccagcggggctgccagagaaccccagacctgcccttacagtagtgtagcgccccctccctctttcggctggtgtagaatagccagtagtgtagtgcggtgtgcttttacgtgatggcgggtgggcagcgggcggcgggctccgcgcagccgtctgtccttgatctgcccgcggcggcccgtgttgtgttttgtgctgtgtccacgcgctaaggcgaccccctcccccgtactgacttctcctataagcgcttctcttcgcatagtcacgtagctcccaccccaccctcttcctgtgtctcacgcaagttttatactctaatatttatatggctttttttcttcgacaaaaaaataataaaacgtttcttctgaaaagctg

SEQ ID NO: 30423 - DNA, 4590 bp, Homo Sapiens
atgcagagagccagagaagccgaaatgatgaaaagtcaggtactgtttcccttcctgctgtctttgttctgcggggccatctcccagcagatccgatacacgattccagaggagctagccaacggctcacgggtggggaaacttgccaaggatctggggctcagtgtccgggagttgccaactcgaaaactgcgggttagtgcagaggattatttcaacgttagtttggagagcggggatttgttagtgaacggtaggatagatcgagagaagatttgcggaaggaaacttgagtgtgcactagaattcgaaacggtcgctgaaaacccaatgaatgttttccacgtggttgttgtaatccaagatattaatgacaatgcaccacgtttcgttgcaaaaggcattgacttagaaatttgtgagtcagccttacccggggtaaaattctctctggattctgctcaagatgcagatgtggaaggcaattcactgaagttatacaccatcaaccccaatcaatacttctctctgtcaacgaaggaaagtcctgatggaagtaaatatccggtattactgctggaaaaacctctagacagggaacatcagagctctcatcgcttaatcctgactgccatggatggcggggacccgcctctaagcggcaccacccatatctggatccgagttacggatgccaatgataatgctcccgtgtttagccaggaggtatacagggttagcctccaagaaaacgtaccgtggggaacctccgtgctgcgggtgatggccacagaccaggatgagggcattaatgcagagatcacctatgccttcctcaattccccaataagtaccagcctcttcaatctcaatccaaatactggcgacatcacaaccaatggcacattggattttgaagagacaagtagatatgtgttgagtgtggaagctaaggatggaggagtacacacagctcactgtaatgttcaaatagaaattgttgacgagaatgacaatgccccagaggtgacattcatgtccttctctaaccagattccagaggattcagaccttggaactgtaatagccctcataaaagtgcgagacaaggattctgggcaaaatggcatggtgacatgctatactcaggaagaagttcctttcaaattagaatccacctcgaagaattattacaagctggtgattgctggagccctaaaccgggagcagacagcagactacaacgtcacaatcatagccaccgacaagggcaaaccagccctttcctccaggacaagcatcaccctgcacatctccgacatcaacgacaatgcacctgttttccatcaggcctcctatgtggtccacgtgtctgagaacaacccacctggcgcctccattgcacaagtaagcgcctccgacccggatttgggacccaacggcagagtctcctactctattctggccagtgacctggagccgcgggagctgttgtcctacgtgtccgtgagcccgcagagcggggtggtgttcgcgcagcgcgccttcgaccacgagcagctgcgcgccttcgagctcacactgcaggccagggaccagggctcccccgcgctcagcgccaacgtgagcctgcgcgtgttggtgggcgacctcaatgacaatgcgccacgggtgctgtaccccgcgctggggcctgatggctccgccctcttcgatatggtgccacgcgccgcagagcccggctacctggtgaccaaggtggtggcggtggacgcagactcaggacacaacgcttggctgtcctaccacgtgctgcaggccagcgagcccgggctcttcagcctggggttgcgcacgggtgaggtgcgcacagcgcgtgccttgggcgacagggacgcggcccgccagcgcctgctggtcgctgtgcgtgatggaggacagccgccactctccgccaccgccacgctgcacctaatcttcgcggatagcctgcaagaggtattgccagacctcagcgaccgccctgagccctctgacccccagacggaactgcagttttacctggttgtggccttggccttgatctcagtgctctttctcctcgcggtgattctagcgatcgccctgcgcctgcgacgttcctccagcctcgacactgagggctgctttcaaaccggtctctgctccaagtctgggcccggggttcctcccaaccacagcgaggggactttgccctattcctacaatctatgtattgcctctcattctgcaaagacagagtttaattctctcaacctgacaccggaaatggctccccctcaggatctgctgtgtgatgatccttctatggttgtatgtgccagtaatgaagatcacaaaatcgcttatgacccttctttgtcttcgcaccaagccccgcccaacacggactggcgtttctctcaggcccagagacccggcaccagcggctcccaaaatggcgatgacaccggcacctggcccaacaaccagtttgacacagagatgctgcaagccatgatcttggcgtccgccagtgaagctgctgatgggagctccaccctgggagggggtgccggcaccatgggattgagcgcccgctacggaccccagttcaccctgcagcacgtgcccgactaccgccagaatgtctacatcccaggcagcaatgccacactgaccaacgcagctggcaagcgggatggcaaggccccagcaggtggcaatggcaacaagaagaagtcgggcaagaaggagaagaagtaacatggaggccaggccaagagccacagggcggcctctccccaaccagcccagcttctccttacctgcacccaggcctcagagtttcagggctaacccccagaatactggtaggggccaaggccatgctccccttgggaaacagaaacaagtgcccagtcagcacctaccccttcccccccagggggttgaatatgcaaaagcagttccgctgggaacccccatccaatcaactgctgtacccatgggggtagtggggttactgtagacaccaagaaccatttgccacaccccgtttagttacagctgaactcctccatcttccaaatcaatcaggcccatccatcccatgcctccctcctccccaccccactccaacagttcctctttcccgagtaaggtggttggggtgttgaagtaccaagtaacctacaagcctcctagttctgaaaagttggaagggcatcatgacctcttggcctctcctttgattctcaatcttcccccaaagcatggtttggtgccagccccttcacctccttccagagcccaagatcaatgctcaagttttggaggacatgatcaccatccccatggtactgatgcttgctggatttagggagggcattttgctaccaagcctcttcccaacgccctggggaccagtcttctgttttgtttttcattgtttgacgtttccactgcatgccttgacttcccccacctcctcctcaaacaagagactccactgcatgttccaagacagtatggggtggtaagataaggaagggaagtgtgtggatgtggatggtgggggcatggacaaagcttgacacatcaagttatcaaggccttggaggaggctctgtatgtcctcaggggactgacaacatcctccagattccagccataaaccaataactaggctggacccttcccactacataatagggctcagcccaggcagccagctttgggctgagctaacaggaccaatggattaaactggcatttcagtccaaggaagctcgaagcaggtttaggaccaggtccccttgagaggtcagaggggcctctgtgggtgctgggtactccagaggtgccactggtggaagggtcagcggagccccagcaggaagggtgggccagccaggccattcttagtccctgggttggggaggcagggagctagggcagggaccaaatgaacagaaagtctcagcccaggatggggcttcttcaacagggcccctgccctcctgaagcctcagtccttcaccttgccaggtgccgtttctcttccgtgaaggccactgcccaggtccccagtgcgccccctagtggccatagcctggttaaagttccccagtgcctccttgtgcatagaccttcttctcccacccccttctgcccctgggtccccggccatccagcggggctgccagagaaccccagacctgcccttacagtagtgtagcgccccctccctctttcggctggtgtagaatagccagtagtgtagtgcggtgtgcttttacgtgatggcgggtgggcagcgggcggcgggctccgcgcagccgtctgtccttgatctgcccgcggcggcccgtgttgtgttttgtgctgtgtccacgcgctaaggcgaccccctcccccgtactgacttctcctataagcgcttctcttcgcatagtcacgtagctcccaccccaccctcttcctgtgtctcacgcaagttttatactctaatatttatatggctttttttcttcgacaaaaaaataataaaacgtttcttctgaaaagctg

SEQ ID NO: 30424 - DNA, 2434 bp, Homo Sapiens
ctgcaggtagaacagcggctggagccggccaagcgggcagcccacaacatccacaagcggctgcaggcctgtctgcagggccagagcggggcagacatggacaagcgggtgaagaagcttcccctcatggctctgtccaccacgatggctgagagcttcaaggagctggaccctgattccagcatggggaaggccttggagatgagctgtgccatccagaatcagctggcccgcatcctggccgagtttgagatgaccctggagagggacgtcctgcagccactcagcaggctgagtgaggaggagctgccagccatcctcaaacacaagaaaagcctccagaagctcgtgtccgactggaacacactcaagagcaggctcagtcaggcaaccaagaattcaggcagcagtcaaggcctaggaggcagcccgggtagtcacagccatacgaccatggccaacaaggtggagacgctgaaggaggaggaggaggagctgaagaggaaagtggagcaatgcagggacgagtacttggctgacctgtaccactttgttaccaaggaggactcctatgccaactacttcattcgtctcctggagattcaggccgattaccatcgcaggtcactgagctcgctggacacagccctggctgagctgagggagaaccacggccaagcagaccactccccttcgatgacagccacccacttccccagggtgtatggggtgtcgctggcaacccacctgcaagagctgggccgggagattgccctgcccatcgaggcctgcgtcatgatgctgctttctgagggcatgaaggaagagggtctcttccgtctggctgctggggcctcggtgctgaagcgtctcaagcagacaatggcctcggacccccacagcctggaggagttctgctccgacccgcacgctgtggcaggtgccctcaagtcctatctgcgggagctgccagagcctctgatgaccttcgacctctatgatgactggatgagggcagccagcctgaaggagccaggggcccggctgcaggccctccaagaggtgtgcagccgcctaccccccgagaacctcagcaacctcaggtacctgatgaagttcctggcacggctggccgaggagcaggaggtgaacaagatgacacccagcaacatcgccatagtcctgggacccaacttgctgtggccacctgagaaagaaggggaccaggcccagctggatgcagcctccgtgtcttccatccaggtggtgggcgtcgtcgaggcgctgatccagagcgcagacaccctcttccctggagacatcaacttcaacgtgtcaggcctcttctcagctgttaccctccaggacacagtcagtgacaggctggcctctgaggaacttccgtccactgccgtgcccaccccagccaccaccccggctccggctccggctccagctccagctccggccccagccttggcttcagcagctaccaaggaaaggacagagtctgaggtgcctcccagaccagcctcccccaaggtcaccaggagtcccccggagacagctgccccagtggaggacatggctcggaggaccaagcgcccggcgccagcccggcccaccatgccgcccccccaggtctccggctcccgctcctcccctccagccccgcccttgccccctggctctggcagccctgggaccccccaagccctgccccgacgtctggttggcagcagcctccgagcccccacagtgccacccccgttaccccccacaccccctcagcctgcccggcgccaaagccggcgttcaccagcctcccccagcccggcctccccaggtccagcctcccccagcccagtctctttgagtaaccctgcacaggtggacctgggggctgccacagcagagggaggagcccctgaggctatcagtggggtccccactcccccagctatcccccctcagccccgccccaggagccttgcctcagagaccaactgagtggctggtttctccctaagcagccctcagcaccccctccctccccacctggccctcccaggacagctctcgccccccacaaaggggcatgggcctccagcctttgcccacaagtgcctcagtgcccactgggtcggcccccatggccaggagggctcaggacaatcctctatttcctgaccttttcctcgtccaccctgggcttggggacccccccaccggactctccactctccggcaggtcctaggggagccaccggaaggaaggagaggtttgcctgctcctacgggactgattcttctcttgccgacatgttttttgtaaggctggtaaataaattattttggacaaaaaaaaaaaaaaaaaaaaaaaaaaaaaaaaaaaaaaaaaaaaaaaaaaaaaaaaaaaaaaaaaaaactcggg

SEQ ID NO: 30425 - DNA, 8670 bp, Homo Sapiens
gcggcgcgcacggtatggcggcggcggcggcggcggcggcgcgcgcctgagaagaggggacgccagcccggtcaggcctcggcgcggcctacacgctccgctcgctcgctcgctcccgcctcccgccccgcgcccggccatggcggagccgtcgtccgcccgacgcccggtgcctctcatcgagtcggagctgtacttccttatcgcccggtacctatcggcgggcccgtgtcggagagcggcccaggtgctggtgcaggagctggagcagtaccagttgttgccgaagagattggactgggagggcaacgagcacaacaggagctacgaggagttggtcttgtccaataagcatgtggctcctgatcatcttttgcaaatctgccagcgcatcggtcctatgttggataaagaaattccacccagtatttcaagagtcacttctttacttggtgcaggaaggcagtctttgctacgtacagcaaaagactgcaggcacacagtttggaagggctctgcctttgctgctcttcatagaggaagacctcctgaaatgccagtgaattatggttccccaccaaatcttgtggagatacatcgaggaaaacaactcacagggtgttccacttttagtacagcatttccaggaactatgtatcagcatataaaaatgcacagaaggattctcggacatctatctgctgtttactgtgtagcatttgataggacaggacatagaatctttacaggttcagatgactgtttggtaaagatttggtcaacacataatggccgcttgttatctacattaagaggtcattctgcagaaatttcagatatggcagtaaactatgagaatacaatgattgctgcggggagctgtgataaaattattagagtgtggtgcttgagaacttgtgccccagttgctgtgctccaaggacacacaggatcaattacatctttacagtttagcccgatggccaaaggctctcaaagatacatggtttccactggtgctgatgggacagtttgcttttggcaatgggatttagaatccttaaaatttagcccacgtcccctgaagttcactgaaaagcctaggccaggcgttcaaatgctttgttcttcttttagtgttggtggtatgtttttagccacaggtagtactgatcatgtaatcagaatgtattttttgggttttgaagcacccgaaaaaatcgcagaacttgaaagccacactgataaagtagatagtatccaattttgtaacaatggtgatcggttcctaagtggtagcagagatggaacagcacggatttggagatttgagcagttagaatggaggagcattttattggatatggctaccagaatctcaggggacttatcttccgaagaggaaaggtttatgaaacctaaagtaacaatgatagcttggaatcaaaatgatagcattgttgtcacagctgtgaatgatcatgtcctcaaagtgtggaattcttacactggacaactgcttcataacttaatgggacatgctgatgaagtatttgttctggagacacatccctttgattccagaattatgttatctgcaggacatgatggcagcatatttatatgggatattacaaaaggtaccaagatgaaacattattttaatatgattgaaggacaaggacatggagctgtgtttgactgtaagttttcacaggatggacagcattttgcctgtacagattctcatgggcaccttctgatatttggttttggatgcagcaaaccatatgaaaagattcctgatcagatgttcttccatactgactatcgaccacttattagagattctaataattatgtcttagatgagcaaactcagcaggctcctcatcttatgcctccaccattcttggtagatgtagatggaaatcctcatccaaccaagtatcagagattagtaccaggccgagaaaattctgcagatgaacatttgattccacagctgggctatgtggcaacaagtgatggagaggtgattgaacaaattataagcctgcaaaccaatgataatgatgaacgcagcccagaatcgagtattcttgatggaatgataagacagttgcagcagcagcaagatcagagaatgggagcagatcaggatactattccaagaggactttcaaatggtgaagaaacaccccggagaggttttagaaggctgagcttagacattcagtcccctccaaatattggtctgcgtcgtagtggacaagttgaaggtgttcgtcagatgcatcaaaacgctccacgcagtcagattgctacagaacgtgacctgcaggcttggaaacgaagagtggttgtaccagaggtaccactaggcatatttaggaagctggaagacttccgattagagaaaggtgaagaggaaagaaatctttatataataggaagaaaaagaaagactcttcagctctcacataagtcggattcagtggttttggtatcacagtctagacaaaggacatgtaggcgtaaatatccaaattatggtagaagaaatcgtagctggcgtgagttatcttctggaaatgagtcttcaagctctgtaagacatgagacttcctgtgatcagagtgaaggttctggttcttcagaagaggatgaatggagaagtgacagaaaaagtgagagttacagcgaaagttcaagtgactcttcatctagatattccgattggacagctgatgcgggcatcaatttgcagcctcctttaagaacatcatgtcgtcgacgaattactcgattttgtagtagttcagaagatgaaatatctactgagaatttatctcctccaaaaagaagacgaaagagaaagaaagaaaataagcctaagaaggagaatttgcggaggatgactccagcagagcttgcaaatatggagcatttatatgaatttcaccctccagtttggattactgacaccacacttagaaaatctccttttgttcctcaaatgggtgatgaggtaatatattttcgacagggtcatgaagcttatattgaggctgtaagaagaaataatatttatgaactgaaccctaataaggagccatggagaaaaatggatcttagggatcaagaattggttaaaatagttggaatacgatatgaagttgggccccctacactctgttgcctaaaactagcatttatagatccagcaactggaaaacttatggacaaatctttctctattagatatcatgatatgccagatgttattgactttcttgtattgcgtcaattttatgatgaagcaagacagaggaattggcagtcttgtgacagattccgctctattattgatgatgcttggtggtttggaacagtgttaagtcaagagccatatcaaccacagtatcctgatagtcatttccagtgttatattgttaggtgggataatactgaaattgaaaaacttagcccatgggacatggaaccaattcctgataatgttgatccacctgaagaattaggagctagtatttctgtcacaacagatgagctagagaaattgctctataaaccacaagctggtgaatggggtcagaaatcaagagatgaagaatgtgatagaattatcagtggtatagatcaacttttgaatcttgatatagcagcagcttttgcaggccctgttgatttgtgtacatacccgaagtactgtactgtagtagcttatccaaccgatctttacacaattcgaatgagacttgttaatcgattttacaggaggctgtctgcgttagtttgggaagtcagatatatagaacataatgccagaacatttaacgaacctgagagtgtaattgcaagatcagctaaaaagataactgaccaacttttaaaatttatcaagaatcaacactgtacaaatatctcagaactttctaacacatctgaaaatgatgagcaaaatgctgaggatttggatgatagtgatcttcctaaaacatcttctggaaggaggagagtccatgatgggaaaaaaagcatcagagctacgaactatgttgaaagcaactggaagaaacagtgtaaggaactagtgaacttaatttttcagtgtgaagattctgaaccatttagacaacctgttgatttggttgaatatccagactacagagatattatagataccccaatggattttggaacagtaagggaaactctagatgcgggaaattatgacagccctttggagttttgcaaagacatccggctgatatttagcaatgcaaaagcgtatacaccaaacaaaagatcaaagatttatagtatgaccttgagattatctgccttatttgaagaaaaaatgaagaaaatctcttctgattttaaaattggtcaaaaattcaatgaaaaacttcgaagaagccagaggttcaagcaacggcaaaattgtaaaggtgacagtcagcctaacaaaagtatcagaaacctcaagccgaagaggttaaaatctcagacaaaaataattcctgagttggtaggttctcctacccagtctacctcaagtaggacagcttatcttggaacccacaagacaagtgctggtatctcttcaggtgttacttctggtgactcttcagattcagcagaatcatcagaaaggaggaaaagaaatagacctataacaaatggttctacattatctgaaagtgaagtggaagattctttagctacctctttgtcatcgtcagcttccagtagttctgaggaaagcaaagagagttccagagctcgtgaatcctcctcacgcagtgggctatccagaagcagcaatctcagggtaaccagaactagagctgctcaaagaaaaactggtcccgtttcattagcaaatggatgtggcagaaaagccactcgaaagagagtctatttaagtgattctgataacaattcattggagactggtgaaattctaaaagccagagctggaaataaccgaaaagtcttaaggaagtgtgctgctgtggctgccaataaaataaagctaatgagtgatgtagaagagaattctagctctgaaagtgtctgttctggtcggaagctgcctcaccgcaatgcttctgctgtagctagaaaaaagttattacataattctgaagatgaacagagcttaaagtcagaaattgaagaagaggagctaaaagatgaaaatcaactattaccagtgtccagttctcacactgcccagagcaatgttgatgaatctgaaaacagagactcagagtcagaaagtgatttgcgggtagcccggaaaaattggcatgctaatggttacaagtcccatactccagcaccttcaaagacaaaatttcttaaaatagagtcttctgaggaagactctaaaagtcatgattcagatcatgcatgtaacagaactgctggcccatcaacgtctgtgcagaaacttaaggcagagagcatctcagaggaagcagattctgaaccaggaagatctggtggtaggaaatacaatacatttcacaagaatgcgagtttctttaaaaaaaccaagattctgagtgactcagaagactctgaatctgaagagcaagatagagaagatgggaaatgtcataaaatggaaatgaacccaatttcaggaaatctgaactgtgaccctattgctatgtcccagtgttcctcagatcatggatgtgaaactgatttagattcagatgatgacaaaatagaaaaaccaaacaattttatgaaagattctgcatcacaagacaatggactaagcagaaaaatttccaggaaaagggtctgttccagtgactcagacagtagtttacaggtggttaagaaatcatcaaaagccagaacaggtctcctgaggattactcgaagatgtgcagctacggctgccaataagatcaagctcatgagtgatgtagaagatgtcagtttagaaaatgtgcacactagaagcaaaaatggaaggaaaaaacctctccatcttgcttgtactacagctaagaagaaattgagtgattgtgaaggaagtgtacattgtgaagtaccaagtgaacagtatgcctgtgaaggcaagccacctgatcctgactccgaaggtagtacaaaagtgcttagtcaggctctaaatggagactcagactctgaagatatgttgaattcagaacacaagcacaggcataccaatattcacaaaatagatgcaccttctaaaagaaaaagttcctctgttacatcttcaggagaagattcaaaaagtcatattccagggagtgagactgataggacattttcttcagagtcaaccttggcacaaaaagctactgcagagaataattttgaagtggaactgaattatgggctgcgcaggtggaatggcagaagactcaggacctatggaaaggctccttttagtaagacaaaagtgattcatgattcacaggaaacagcagagaaggaagtaaaaaggaagagatcgcatcctgaattggaaaatgtgaaaatctctgaaacaactgggaattcaaagtttagacctgatactagttccaaatcatcagatttgggatctgtaactgaatcagatattgactgtactgataatacaaaaaccaaaaggaggaaaacgaaaggaaaagcaaaagtagttagaaaagaatttgttcctagagacagagaacccaatacaaaagtgagaacatgtatgcataatcagaaggatgcagtgcagatgcctagtgaaactctgaaagcaaaaatggtacctgagaaagttccccgcagatgtgctactgttgctgcaaataaaataaagataatgagtaatctaaaagaaacgatctcaggaccagaaaatgtctggattaggaagagtagcagaaaactgccccatcgaaatgcttctgctgcggctaagaaaaaattactgaatgtttataaagaggatgatacaaccataaattctgaaagtgaaaaagagctagaagatattaatagaaaaatgctttttttaagggggttcagatcctggaaagaaaatgcacaatagtgactatgagaatgtagaagtggcatctgaaaacaattggtacacaagtaaactggcagttacattctgctcccagctctaaaattactcccttattggcatctttggaggaattttctaaaagccataatccagtgggttcctcccagtcagctcttgtacagacatgtgctctggggaattctgaggaggaaataaattgcagagtctgtaggtggagaggtggaaagaaaagacaaatggcctgctataagactactattcctttccagaatgcaaggccttgaagacatgattccttagaggaagaatataatgggaagtgtacaggctaggaagaacttgaagtgaacaaatttcaaaatcttaacctgatgctaattttcagggttctccattacagtgtaaaaattcagaccacgacaactatggtgtcatgaggaaaaaaaatcaggcatttttccaaaggaagtgctaatgggcctatttgacttctgagtgaagcaaaaactacccagatccattccctacaattcacatccccaaaggtcaaaaacaaactaggaggacctgggaatttcagctggagatactgattattgagttctgaagtagagtgttggaaataggcaattagagaaagtccattgatgtcattttgtttataatattgcagttcatactgaatgaccacttgatatgactaattcagggaatatatatttttctatgaaagctatgaatgttactatcacggcttttccttatttttacttgtatgtagcagcatttacagaaatgccaaaaatgtgcctcattaagaggcaggtcttaatcagttagataaaaataaaatgtatagcttaagatcaaaacagtcatatttttagatacagtgaaatcttttatgtttctctacagcaccttaaaaattagaacttgaatactttgagtaaacttactacaatctcatcccaacaaactttaatggtagcatgtttggcctatttcattgtggcctgtactaggattagaaaatttggtcgtggtataacaaagaagtgtatttacaataggatttaatttgttgttaatatgtatttgttgaaattaaaattgccagattaaatgaatatactgtcgcatctttttaacatagtaacgtgttactggaaaaattaagttgttgaaagtaagttgttttcccatttaaaaatatctgaatatatgatttgcatgtgtaaatctgaaaaactaaactacagaaacctagggttttctatttcttttttaagtcaaatgcatttttttttttttgttatacagatgaaccaagtgtctaaaatacttgagaaatttgtggttgcatgtctgttttaaaaaaaaggctttttgttttttagcataagccagaatattctaacctactaagtctgtgtcctttgctccttttgtagtatactttcatctaaattactgatccccaatatgttgatacacaggtgagaaagggaagaattcctaataaactgctattacttttaggtgaaaaaaaaaaaaaaaaaaaa

SEQ ID NO: 30426 - DNA, 4919 bp, Homo Sapiens
agcggactgtagagaagatttttattttttgtttcattaacagattattataaagcaaaaagcatgcagaaaaagaagcagacgttttacattgggaattaatgaaagcgtgtctgctagttttgggtaggagaactgggaagttgttgcttaaaattttatatcacctccacaaacaaaactcttcggaaatggtaaaataagaaaatgcatgattctagaggcattcctaagcacccacgtgtcaggctttgtggtgtctgtggtatcatccgaccgtttggactggttagggcttactgagagctccatttctggaaagccttacaagactgaggaatatcagactgcgaatcaccgggaacggttcctttgcagcacagaagcaatctctctccccatcttcgcatattctgatggcaaaacaagtggaagaaaagaggaagcatgactgcagatcagatcagttctctttgtggattatattttcagtaaaatgtatggatctatcttttccttgttcttatatctagatcatgagacttgactgaggctgtatccttatcctccatccatctatggcgaactatagccatgcagctgacaacattttgcaaaatctctcgcctctaacagcctttctgaaactgacttccttgggtttcataataggagtcagcgtggtgggcaacctcctgatctccattttgctagtgaaagataagaccttgcatagagcaccttactacttcctgttggatctttgctgttcagatatcctcagatctgcaatttgtttcccatttgtgttcaactctgtcaaaaatggctctacctggacttatgggactctgacttgcaaagtgattgcctttctgggggttttgtcctgtttccacactgctttcatgctcttctgcatcagtgtcaccagatacttagctatcgcccatcaccgcttctatacaaagaggctgaccttttggacgtgtctggctgtgatctgtatggtgtggactctgtctgtggccatggcatttcccccggttttagacgtgggcacttactcattcattagggaggaagatcaatgcgccttccaacaccgctccttcagggctaatgattccttaggatttatgctgcttcttgctctcatcctcctagccacacagcttgtctacctcaagctgatatttttcgtccacgatcgaagaaaaatgaagccagtccagtttgtagcagcagtcagccagaactggacttttcatggtcctggagccagtggccaggcagctgccaattggctagcaggatttggaaggggtcccacaccacccaccttgctgggcatcaggcaaaatgcaaacaccacaggcagaagaaggctattggtcttagacgagttcaaaatggagaaaagaatcagcagaatgttctatataatgacttttctgtttctaaccttgtggggcccctacctggtggcctgttattggagagtttttgcaagagggcctgtagtaccagggggatttctaacagctgctgtctggatgagttttgcccaagcaggaatcaatccttttgtctgcattttctcaaacagggagctgaggcgctgtttcagcacaacccttctttactgcagaaaatccaggttaccaagggaaccttactgtgttatatgagggagcatctgtaaatctttagccttgtgaaaactaaccttctctgctgagcaattgtggcccatagccatattttgagaagaaattcaagaatggaatcagcagttttaaggatttgggcaacattctgcagtctttgcaatagttcacctataatcctattttaaatctcagagtgatcctgctgactgccagcaaaggtttgtaattaagaagggactgaaccactgccctaagtttctttatgtggtcaaaaactagataatgaaagtagcaggtgctaagtatcagtgctaaatgctctgtatgtcactacatatgaaaaaacatcaaaaaacaattagcattggacatcttaataaattaagttgacatgaggtaaatgtgttgataaaaactaattttagaagtttgaagactttaaaacatttcatactactattgttttgcaaagactaaaatatttggggacttaaagtactgtaatccactaaagacgtgccaatgaattattggaatatcacactttaaaaaccgccttgtaagttctggggagcattccaaagcagtatattggttccaattagagtttactttttttgtattaatacattgctatttctaaataccactttcctcatctactagtaagattgctagcattgaactgtattatgtggtttttgttgatttggtataaagtttttccaattcatttatattttacaaatgctagatattggtctgggaggcaacattaatggtaccagcctgtcacaactgagcagttctaataatgcagaataaatacatgttgccttaaagggttatctagtatccttcatcttatttagcactggagcaaatagccaagggaaatcaaatcagtaactggtcatggtcatgcatctaaaagtgcatggaagatcatttattactttttccttttttctcacatggtttgaaacttaaagtgcacatcactgaaataatgagattttcttctacggtgtgctaccctttctaaactgttctaagaagcaggcagttgatgtatgtttatattttaagtcagctgtcaaggggagaccacagccttagtatgacatcctgcacaatttgtgaagcatttattctactgaaggcacagtcttgtttatactttctgcacattcagtgtattggtaatttaaattatttcagttttaacttgtgaaagcttatattatgatttctggtattttagaaatacattagagtctgtgagtctcattctttaagatacagatatgtgaacttcaatataaagttgcatttgccaaaatttacccgtgtagcctgttaattttcttgaaataagttttacatttttggcacataacaacgttttttttaatttgggaggcaagcacaaactaggaagactagctttattatggttttgctttttgattcttgtagctactatattccagactggaaatgtatgaatgataatcaacataatgctgataaactgacataatattatctgtaaaagcattatttggtagtttattataatcatccctctattattcttaaatgccagtagtatttagagatgtgtacctgcttagttaattggctcagaattttaatataaacatcacactttaatttggagcatagtaccatagaaatttggggttctaaatatacaacttgtaagaagaatggtttacactaacattatgacaaaactagaaaaagttattatttttgtttgctttctgttgttttgtttattggttggtttttgtgaagtttatttttttttggtatttgataattaagattaggaatctaataacacagaattccatattgctatagtacttctgtaaagagaatatcaatataaataaggaaaataaatcaatgaaatgtttcaatgatatatgcaactattcagttttgctcttataaggacagctcaagccatgaattagtgagcattctgacctcatttttactttacaccaaagttgattagatctgagacaaaatttaatgcacaacagtgagttggatctagcaataaagtctccttggtactgaaatcattatctaaaataaaggaaatgttatcaaaagatgttctgataacattgtgattgtaactcaaaaaaatttatagtagaaacgtaattgcaatgatgataataactaactctgcttagaggttcaaatatcaccagcaatcagtaaaaaattcagcaataatcttaaggccagagagaacaggttcaccattgcatagacaagaaaacagatatgggttaagagttggggactgaggagtcaagagcaacggccacgtgaagctgcctgactccacctagctatttggaataaccgattcccacagttttggtaagaaaccagccccagtaatcagtaagtcaggctgaactgcagtgacttttatttaagcctactcctgactaacttggcatttgcaggtcaagcaggaagcagttgacaagacacatcctcagtgaatcaatgccatttgtaactcaactggtaacagtagtaatcatacaaaataaaaacctgcttcagtgtcttaatgaccaaatcacattatctattttagcactcattccaaaattcagtatttaatgtaattaatctttaatccataaaaatacatccccactgtagcggggcagggggtgtccaacttccctgtgagactgattatcaataataatgtgtctccctcttggactgagcacacatctgagctgaacggcctttaaattgtttttcataatagtggtgatatgtttgcttggatacgtctgtactatttcatctggttcattttgcatgtaatagatttatctgtgagatgcctggctgaagctaggcattcagtctgtgactgtggaatcctatgcaggtattaaccaaggcagaaagaggtgagtaacttgcccatttctccacagagaccccatttaaataacacaaaattgaccatagtgattagatgaaaaaattatttgtagataggataatctattgactgaattatcttttgcagatatcagctggttggatttctcaccaggattgtctatagaagttaactgatttatgattgttaacacataaatatggccacttatccatttgcctcaacttcaaaaaaaaaaaaaaagaaaaaaaaaaaaaaaa

SEQ ID NO: 30427 - DNA, 7149 bp, Homo Sapiens
atgtctggcggcgccgcagagaagcagagcagcactcccggttccctgttcctctcgccgccggctcctgcccccaagaatggctccagctccgattcctccgtgggggagaaactgggagccgcggccgccgacgctgtgaccggcaggaccgaggagtacaggcgccgccgccacactatggacaaggacagccgtggggcggccgcgaccactaccaccactgagcaccgcttcttccgccggagcgtcatctgcgactccaatgccactgcgctggagcttcccggccttcctctttccctgccccagcccagcatccccgcggctgtcccgcagagtgctccaccggagccccaccgggaagagaccgtgaccgccaccgccacttcccaggtagcccagcagcctccagccgctgccgcccctggggaacaggccgtcgcgggccctgccccctcgactgtccccagcagtaccagcaaagaccgcccagtgtcccagcctagccttgtggggagcaaagaggagccgccgccggcgagaagtggcagcggcggcggcagcgccaaggagccacaggaggaacggagccagcagcaggatgatatcgaagagctggagaccaaggccgtgggaatgtctaacgatggccgctttctcaagtttgacatcgaaatcggcagaggctcctttaagacggtctacaaaggtctggacactgaaaccaccgtggaagtcgcctggtgtgaactgcaggatcgaaaattaacaaagtctgagaggcagagatttaaagaagaagctgaaatgttaaaaggtcttcagcatcccaatattgttagattttatgattcctgggaatccacagtaaaaggaaagaagtgcattgttttggtgactgaacttatgacgtctggaacacttaaaacgtatctgaaaaggtttaaagtgatgaagatcaaagttctaagaagctggtgccgtcagatccttaaaggtcttcagtttcttcatactcgaactccacctatcattcaccgcgatcttaaatgtgacaacatctttatcaccggccctactggctcagtcaagattggagacctcggtctggcaaccctgaagcgggcttcttttgccaagagtgtgataggtaccccagagttcatggcccctgagatgtatgaggagaaatatgatgaatccgttgacgtttatgcctttgggatgtgcatgcttgagatggctacatctgaatatccttactcggagtgccaaaatgctgcgcagatctaccgtcgcgtgaccagtggggtgaagccagccagttttgacaaagtagcaattcctgaagtgaaggaaattattgaaggatgcatacgacaaaacaaagatgaaagatattccatcaaagaccttttgaaccatgccttcttccaagaggaaacaggagtacgggtagaattagcagaggaagatgatggagaaaaaatagccataaaattatggctacgtattgaagatattaagaaattaaagggaaaatacaaagataatgaagctattgagttttcttttgatttagagagagatgtcccagaagatgttgcacaagaaatggtagagtctgggtatgtctgtgaaggtgatcacaagaccatggctaaagctatcaaagacagagtatcattaattaagaggaaacgagagcagcggcagttggtacgggaggagcaagaaaaaaaaaagcaggaagagagcagtctcaaacagcaggtagaacaatccagtgcttcccagacaggaatcaagcagctcccttctgctagcaccggcatacctactgcttctaccacttcagcttcagtttctacacaagtagaacctgaagaacctgaggcagatcaacatcaacaactacagtaccagcaacccagtatatctgtgttatctgatgggacggttgacagtggtcagggatcctctgtcttcacagaatctcgagtgagcagccaacagacagtttcatatggttcccaacatgaacaggcacattctacaggcacagtcccagggcatataccttctactgtccaagcacagtctcagccccatggggtatatccaccctcaagtgtggcacaggggcagagccagggtcagccatcctcaagtagcttaacaggggtttcatcttcccaacccatacaacatcctcagcagcagcagggaatacagcagacagcccctcctcaacagacagtgcagtattcactttcacagacatcaacctccagtgaggccactactgcacagccagtgagtcagcctcaagctccacaagtcttgcctcaagtatcagctggaaaacagcttccagtttcccagccagtaccaactatccaaggcgaacctcagatcccagttgcgacacaaccctcggttgttccagtccactctggtgctcatttccttccagtgggacagccgctccctactcccttgctccctcagtaccctgtctctcagattcccatatcaactcctcatgtgtctacggctcagacaggtttctcatcccttcccatcacaatggcagctggcattactcagcctctgctcacgttggcttcatctgctacaacagctgcgatcccgggggtatcaactgtggttcctagtcagcttccaacccttctgcagcctgtgactcagctgccaagtcaggttcacccacagctcctacaaccagcagttcagtccatgggaataccagctaaccttggacaagctgctgaggttccactttcctctggagatgttctgtaccagggcttcccacctcgactgccaccacagtacccaggagattcaaatattgctccctcttccaacgtggcttctgtttgcatccattctacagtcctatcccctcccatgccgacagaagtactggctacacctgggtactttcccacagtggtgcagccttatgtggaatcaaatcttttagttcctatgggtggtgtaggaggacaggttcaagtgtcccagccaggagggagtttagcacaagcccccactacatcctcccagcaagcagttttggagagtactcagggagtctctcaggttgctcctgcagagccagttgcagtagcacagccccaagctacccagccgaccactttggcttcctctgtagacagtgcacattcagatgttgcttcaggtatgagtgatggcaatgagaacgtcccatcttccagtggaaggcatgaaggaagaactacaaaacggcattaccgaaaatctgtaaggagtcgctctcgacatgaaaaaacttcacgcccaaaattaagaattttgaatgtttcaaataaaggagaccgagtagtagaatgtcaattagagactcataataggaaaatggttacattcaaatttgacctagatggtgacaaccccgaggagatagcaacaattatggtgaacaatgactttattctagcaatagagagagagtcgtttgtggatcaagtgcgagaaattattgaaaaagctgatgaaatgctcagtgaggatgtcagtgtggaaccagagggtgatcagggattggagagtctacaaggaaaggatgactatggcttttcaggttctcagaaattggaaggagagttcaaacaaccaattcctgcgtcttccatgccacagcaaataggcattcctaccagttctttaactcaagttgttcattctgcgggaaggcggtttatagtgagtcctgtgccagaaagccgattacgagaatcaaaagttttccccagtgaaataacagatacagttgctgcctctacagctcagagccctggaatgaacttgtctcactctgcatcatcccttagtctacaacaggccttttctgaacttagacgtgcccaaatgacagaaggacccaacacagcacctccaaactttagtcatacaggaccaacatttccagtagtacctcctttcttaagtagcattgctggagtcccaaccacagcagcagccacagcaccagtccctgcaacaagcagccctcctaatgacatttccacatcagtaattcagtctgaggttacagtgcccactgaagaggggattgctggagttgccaccagcacaggtgtggtaacttcaggtggtctccccataccacctgtgtctgaatcaccagtactttccagcgtagtttcaagtatcacaatacctgcagttgtctcaatatctactacatccccgtcacttcaagtccccacatccacatctgagatcgttgtttctagtacagcactgtatccttcagtaacagtttcagcaacttcagcctctgcagggggcagtactgctaccccaggtcctaagcctccagctgtagtatctcagcaggcagcaggcagcactactgtgggagccacattaacatcagtttctaccaccacttcattcccaagcacagcttcacagctgtccattcagcttagcagcagtacttctactcctactttagctgaaaccgtggtagttagcgcacactcactagataagacatctcatagcagtacaactggattggctttctccctctctgcaccatcttcctcttcctctcctggagcaggagtgtctagttatatttctcagcctggtgggctgcatcctttggtcattccatcagtgatagcttctactcctattcttccccaagcagcaggacctacttctacacctttattaccccaagtacctagtatcccacccttggtacagcctgttgccaatgtgcctgctgtacagcagacactaattcatagtcagcctcaaccagctttgcttcccaaccagccccatactcattgtcctgaagtagattctgatacacaacccaaagctcctggaattgatgacataaagactctagaagaaaagctgcggtctctgttcagtgaacacagctcatctggagctcagcatgcctctgtctcactggagacctcactagtcatagagagcactgtcacaccaggcatcccaactactgctgttgcaccaagcaaactcctgacttctaccacaagtacttgcttaccaccaaccaatttaccactaggaacagttgctttgccagttacaccagtggtcacacctgggcaagtttctaccccagtcagcactactacatcaggagtgaaacctggaactgctccctccaagccacctctaactaaggctccggtgctgccagtgggtactgaacttccagcaggtactctacccagcgagcagctgccaccttttccaggaccttctctaacccagtcccagcaacctctagaggatcttgatgctcaattgagaagaacacttagtccagagattatcacagtgacttctgcggttggtcctgtgtccatggcggctccaacagcaatcacagaagcaggaacacagcctcagaagggtgtttctcaagtcaaagaaggccctgtcctagcaactagttcaggagctggtgtttttaagatgggacgatttcaggtttctgttgcagcagacggtgcccagaaagagggtaaaaataagtcagaagatgcaaagtctgttcattttgaatccagcacctcagagtcctcagtgctatcaagtagtagtccagagagtaccttggtgaaaccagagccgaatggcataaccatccctggtatctcttcagatgtgccagagagtgcccacaaaactactgcctcagaggcaaagtcagacactgggcagcctaccaaggttggacgttttcaggtgacaactacagcaaacaaagtgggtcgtttctctgtatcaaaaactgaggacaagatcactgacacaaagaaagaaggaccagtggcatctcctccttttatggatttggaacaagctgttcttcctgctgtgataccaaagaaagagaagcctgaactgtcagagccttcacatctaaatgggccgtcttctgacccggaggccgcttttttaagtagggatgtggatgatggttccggtagtccacactcgccccatcagctgagctcaaagagccttcctagccagaatctaagtcaaagccttagtaattcatttaactcctcttacatgagtagcgacaatgagtcagatatcgaagatgaagacttaaagttagagctgcgacgactacgagataaacatctcaaagagattcaggacctgcagagtcgccagaagcatgaaattgaatctttgtataccaaactgggcaaggtgccccctgctgttattattcccccagctgctcccctttcagggagaagacgacgacccactaaaagcaaaggcagcaaatctagtcgaagcagttccttggggaataaaagcccccagctttcaggtaacctgtctggtcagagtgcagcttcagtcttgcacccccagcagaccctccaccctcctggcaacatcccagagtccgggcagaatcagctgttacagccccttaagccatctccctccagtgacaacctctattcagccttcaccagtgatggtgccatttcagtaccaagcctttctgctccaggtcaaggaaccagcagcacaaacactgttggggcaacagtgaacagccaagccgcccaagctcagcctcctgccatgacgtccagcaggaagggcacattcacagatgacttgcacaagttggtagacaattgggcccgagatgccatgaatctctcaggcaggagaggaagcaaagggcacatgaattacgagggccctggaatggcaaggaagttctctgcacctgggcaactgtgcatctccatgacctcgaacctgggtggctctgcccccatctctgcagcatcagctacctctctaggtcacttcaccaagtctatgtgccccccacagcagtatggctttccagctaccccatttggcgctcaatggagtgggacgggtggcccagcaccacagccacttggccagttccaacctgtgggaactgcctccttgcagaatttcaacatcagcaatttgcagaaatccatcagcaaccccccaggctccaacctgcggaccacttag

SEQ ID NO: 30428 - DNA, 4239 bp, Homo Sapiens
ctgtgggcctgggagctgcctctgaggaacacgccgcagggccaggcatgtgaggtctctgcgggtcatggagaacctccctgccgtgaccactgaggagccgacccccatggggaggggtcctgtgggaccctcaggaggtggcagcacccgggaccaggtccggactgtggtcatgaggccctctgtgagctgggagaaagcggggcccgaggaggccaaggcgccggtgagaggcgacgaggctcctcctgcccgcgtggctgggcctgctgctgggacccctccctgccagatgggggtttatcccacagacctgaccctgcagctgctggctgtgcggaggaagagcagactgcgggaccccggcctacagcagaccctccggggccagctccgcctgctggagaatgatagccgggagatggcccgcgtgcttggggaattatcagccaggctgctgtccatccacagtgaccaggaccggatcgtggtgacgtttaagacttttgaagaaatctggaagttttccacctaccatgctctcggcttcactcatcactgcctggcaaacctgctcatggaccaggccttctggctgctcttgcccagtgaggaggaggagacggccatccaagtccatgtggatgagaacgccttaaggctgacccacgagagcctcctcatccaagaagggcccttctttgtcctgtgtcctgaccaccatgtgagagtgatgacgggtccccgggatgcaggaaatggcccccaggccctcaggcaggcttcgggggcaccccagggagaggcggccccggaaacagactcttcaccgccgagccccagcgtgtcctccgaggaggtggcagtggcggccgccccggagcctttgattccatttcatcagtgggctcttaggatcccccaggaccccatcgacgatgccatgggtggccctgtgatgcccggcaacccgctgatggctgtgggcctggcctcggcattggcagacttccagggctcggggcccgaagagatgaccttccgaggtggcgacctcatcgagatccttggggcgcaggtgcccagcctgccctggtgcgtgggccgacacgcagcctcgggccgggtggggtttgtgcggagcagcctcatcagcatgcagggccccgtgtccgagttggaaagtgcgatttttctcaatgaggaagaaaagtcattcttcagcgagggctgcttttctgaggaggatgccaggcagttgctgaggcggatgtcgggcaccgatgtctgcagcgtgtacagcctggactcagtagaggaagctgagaccgagcagccgcaggaaaaagaaatacctccaccttgcctgagcccggagccacaggagaccttgcagaaggtgaagaatgttctggaacaatgcaagacctgcccaggctgcccccaggagccagcgtcctggggtctctgtgcggcatccagcgacgtgagcttgcaggaccccgaggagccctccttctgcttggaagccgaggacgactgggaggacccagaggccctgagctcactgctgctgttcctgaacgcccctgggtacaaggccagcttccgtggcctgtacgatgtggcgctgccgtggctgagcagcgtgttccgcagcttcagcgacgaggaggagctgactgggcgcctggcacaggcccggggggcggccaagaaagctggcctcctcatggccctggccaggctctgcttcctcctggggcggctgtgcagcaggaggctcaagctgtcccaggcccgggtgtactttgaggaagcgctgggggccctggagggcagcttcggggacctgttcctggtggtggctgtgtacgccaacctggccagcatttaccggaagcagaagaaccgggagaagtgtgcacaggtggtgcccaaagccatggccctgctcctggggacgcccgaccacatctgcagcaccgaggcggagggggagctcctgcagctggcgctgcggcgggcggtgggtggccagagcctgcaggccgaggcccgggcctgcttcctgctggccaggcaccacgtgcacctcaagcagcccgaggaggccctgcccttcctagagcggctgctgcttttgcacagggactcgggagccccagaggccgcgtggctctcagactgctacctactcctggctgacatctacagccgcaagtgcctgccccacctggtgctgagctgtgtcaaggtggcctcattgcggacacggggctcgctggccggctcgctgaggagtgtgaacctggtgctccagaacgccccccagccccacagcctccctgcccaaacttcccactacctcaggcaagcgctggcctccctgaccccgggcacaggccaggcgctgcgcggccccctctacaccagcttggcccagctgtacagccaccatggctgccacggcccggccatcaccttcatgacgcaggcagtggaagccagtgctattgccggagtccgtgccatcgtggaccacctggtggccctggcctggctgcacgtgcttcatgggcagagcccggtggccctggacatcctgcagtctgtccgggatgcagtggtggccagcgaggaccaggagggcgtgattgccaacatggtggccgtggctctgaagaggacgggccggacgaggcaggcagctgagagctactaccgcgccctgcgggtggctcgggacctgggccagcaaaggaaccaggcagtggggctggccaacttcggggccctgtgcctgcatgcgggtgccagcaggctggcccagcactacctcctggaggccgtgcggctgttctcgaggctgccccttggggagtgtggccgggacttcacccacgtgctcctgcagctgggccatctctgcacccgccagggcccggcccagcagggcaagggctactacgagtgggcccttctggtcgccgtggagatgggccacgtggagagccagctgcgggccgtccagcggctgtgccacttctacagcgccgtcatgcccagcgaggcccagtgtgtcatctaccatgagctccagctctccccggcctgcaaggtggccgacaaggtgctggaggggcagctcctggagaccatcagccagctctacctgtccctgggcaccgagcgggcctacaaatccgcactggactacaccaaacgaagtctggggattttcattgacctccagaagaaagagaaggaggcgcatgcctggctgcaagcagggaagatctattacatcttgcggcagagcgagctggtggacctctacatccaggtggcacagaacgtggccctgtacacaggcgaccccaacctggggctggagctgtttgaggcggctggagacatcttcttcgacggggcctgggagcgggagaaagctgtgtccttctaccgggaccgggccctgcccctggcagtgactacgggcaaccgcaaggcggagctgcggctgtgcaacaagctggtggcactgctggccacgctggaggagccccaggagggcttggagtttgcccacatggccctagcactcagcatcaccctgggggaccggctgaacgagcgcgtggcctaccaccggctggccgccctgcaacaccgactgggccatggcgagctggcagagcacttctacctcaaggccctgtcgctctgcaactcgccgctggagtttgacgaggagaccctctactacgtgaaggtgtacctggtgctcggtgacatcatcttctacgacctgaaggacccgtttgatgcagccgggtactaccagctggcgctggcggccgccgtggacctgggcaacaagaaggcacagctgaagatctacacgcggctggccaccatctaccacaacttcctcctggaccgtgagaagtcgctcttcttctaccagaaggccaggaccttcgccacagagctcaacgtccgcagggtcaacctgcctcctctgccactctgcgggtgggccccctggttggcccccagccaccctcgctgaggacagcatccaagggagtgggttttgtgcaagggctgggggtctcctgcctctcctggtgtcgccggtggctcattttctggcaaatggaggcacgaacgcaggggccaaatagcaataaatgggttttgttttttttttgcaataaaaaaaaaaaaaaa

SEQ ID NO: 30429 - DNA, 3033 bp, Homo Sapiens
gagcgaacatggcagcagaatgaggaggctggcgccgggtcgtggccgccgctgccgcgctgcagctcgggatcccagtccggcgcgctccgggccgcatccttagccggcctcctggcggccgcgggattatttcattcccaacggagagctagggagaaaggagactcccccgcggagcggttccgtgctctggcagggtgtagacgtttgtctgtgcgattcgccggctgcgcaaacgacgcgggagagagccggtcccgggctgcggcggcgcggccgcggggatgagccggccatggagcggccttggcggggcgcacgcagcggactggcgctgccgcgggagcgcagcctgagccggggctccagggggcttcgaagcctccggcgccctgggggggtccctgccgccgactccgggaaggacgcgagccccgcgtggcggacactgccgcagtcaccgttctgaggcgccccgagcttgctccgcctgcagctcggtgcgctctgggcacccgggcgccttgcccggtgcacggcggctggcgcaccgcggctagattggctacaggagcggggtgcaggactggctagaggtgggtgtgtgcgcgcgttggactggagatccgagcagaagcagaaccaggcggctctgagcagccatgcttcccggggtgggcgtgttcggcaccagcctcacggcccgtgtcatcatcccgctgctgaaagacgagggcttcgcggtgaaggcgctgtggggccgcacgcaggaagaagcggaggagctggccaaggagatgagtgtccccttctacactagccgcattgatgaggtgctgctgcatcaggacgtggacttggtgtgcattaacctgccgccgcccctcaccagacagatcgctgtcaaaaccctaggcatcggcaagaacgtcatctgcgaccgcacggccacgccgctggacgctttccgcatgacctcggccgcccactactaccccaagctcatgagcatcatgggcaacgtgctgcgcttcctgccggctttcgtgcgcatgaagcagctgatcgaggagggctacgtgggcgagccgctggtgtgtgaggtgcaggtgcacggcggcagcctgctgggcaagaagtacaactggagctgcgacgacttgatgggcggcggcggcctgcactccgtgggcacctacatcatcgacctgctcaccttcctcaccggccaaaaggccgtcaaggtccacgggctgctcaagaccttcgtgaagcagactgaccacatcaagggcatccgacagatcaccagcgatgacttctgcaccttccagatggtgctggagggcggggtgtgctgcaccgtcaccctcaacttcaacgtgcccggcgagttcaagcaggatgtcactgtggtgggctcagccgggcgcctgctggccgtgggcaccgacctgtacgggcagcgcaacagcgccccggagcaggagctgctggtgcaggacgccacgccggtgagcaactccctgcttccggagaaggccttcagcgacatcccctcgccctacctgcgcggcaccatcaagatgatgcaggcggtgcgccaggccttccaggaccaggacgaccggcgcacgtgggatgggcggcccctcaccatggccgccaccttcgacgactgcctgtatgccttgtgcgtggtggacaccatcaagaggtccagccagacgggcgagtggcagaacattgccatcatgaccgaggagccggagctgagccccgcctacctgatcagcgaggccatgcgccgcagcaggatgtccctctactgttagcacagattgagaacctcggggacttgagccttctgcaggggatgtccacagagagggaagggccgaggggagagggtgaccatggggaatgtggggatcagggaggtggagggacagtgtgaataaatggcatctaggaaggtaaactccaatcccggtgaccgaccccaaaccagactgttggtgggctgagctcctagcctggaagcattcaggagagcctgccattcctgggatgatccctgctgggtatttgcacgagagtggtttggtttagctgcctctgctgccctttactgtgacaagcaaggaggggttgcttccctccctacctcatccatcccacacaccttggccttctgcaagccaagtggttctgcaaggtcaaggcactagtatcagatggcaagctcagtgcccgggattcccactgctggcaggagaaggcccattttcacagtccacagaagcgtgttaggctggggctgggggtgggatgggctggtgagaaagttcaaattccaggaagccactttttattggatataaggtatctaacggcaaaagtacttagtagcaaagtggccaccttttgattgattgggcttcctcataggaagcactgagggtgtgtctttgtacttggttcattgcccttcacctggtagagaaagagaggtcagaaatagcaagcaaaaagcaggactcccaggagccacaagaaaagagcacaggctgcaccaaagcaggggcagcagagaataaaatatccctttgaacttgtcaacaattaaaaaactgcaaggagtcaccttataacactatttccagtaaaggtggaattgagtatcagagggattactgcggtgttaaggtagccctgccacgtggctctccaggcagggccaagaagacagcacaaagtatgggtttggccataagctcatatgctgcccccaaagactggggagagctgtgtgcctcagtgttgcagtgtgaattcctaaatagagggtaaagtgagcctagccaggaggtgtttggggctctatcgcgcatctctcctaccaagctgggcaagagcttttaggagattcatccagctttgtggatttagaaaggaagccttcagttccaatcagaatcctctttcctttaaaaaaaaaaaaaaaaaaaaaaaaaaaaaaaaaaaaaa

SEQ ID NO: 30430 - DNA, 3910 bp, Homo Sapiens
cggggcagcctaggccgggcgagggccatgctgagcctcgcagccaagctggtggccttcttctggaggacggcggacacccctagggaggaagccgggcagctggagcccgagctcgcggaaggtgacactaagctgaaaactgtacggggtgtcgtgacaaggtactgcagcgattatggcatgattgatgatatgatctacttctccagtgatgctgtgactagcagagtgcttctgaatgttggacaggaagtgattgcagttgtggaagaaaataaagtgtccaatggactgaaagcaatcagggtagaagctgtctctgataagtgggaagacgacagcagaaaccatgggagtccctcagactgcggcccccgagtgttgattggctgtgtgacttccctggtggagggcgcaggctgtatcagtcagaccacctacttctctctggagagtgtgtgcgaaggcttcgagccctgcaagggagactgggtggaggctgagtaccggatccggcctggcacgtggagcagcgaagccacctcagtgaagccactgagatacaagcgcgtggacaaggtctgcatctctagcctctgtggaaggaacggggtgttagaggaaagcatcttctttaccttggactccttgaaactgccagatgggtacacaccccggagaggtgacgtggtcaatgcagtggtggtggagagcagccagtcatgctatgtctggagggcgctttgtatgaccctagtgaagaggcgagacgccgcccctgttcatgaggccactcatttctatggaacgattttgctgaagaacaaaggtgatattgaagttacacaggtgacgcattttggaaccctaaaggaaggaagaagtaaaaccatggtgatctggatagagaataaaggagacattcctcaaaacttagtcagctgtaaactggctggctgggataaatctaaacaattcagattccaaatgctggataaagaccagatgtgccccgtggtatcttttgtttctgttcctgagaaggagaattcatcagatgaaaatattaattcattaaatagccacacaaaaaacaaaacctctcagatgtcggagagcagtttggtgaacaacagaggaatctctccaggtgattgtacctgtaaaggagaaaatggagaaaaagacaacattctatcaaggaagcagatgacagagcctgagcctggggggcttgtccctccagggggaaaaaccttcattgtggtcatctgtgacggaaaaaatcctggccgctgcaaggagctccttttgctttgtttttccgatttcctaattgggcgataccttgaagtaaatgttatcagtggggaggagtcactaattgctgcgcgcgaaccattttcttggaaaaagcttaaaagttcacaagcgttaacatccgcaaaaactacagttgttgtgaccgcacagaaaaggaactcaagacgacaacttccaagttttcttccccaatatccaatcccagatagacttagaaaatgtgtggaacaaaaaattgacatcctgactttccagccattacttgcagagcttctgaacatgtcaaattacaaggagaagttttcgactttgctgtggcttgaggagatttatgcagaaatggaactgaaagagtataacatgagcgggatcatcttaagaaggaatggggatctgctggttctggaggtcccagggttggccgaagggaggccttctctctacgcaggtgataaactgattttaaaaactcaagagtacaatggacatgccatcgaatacatcagctacgtgactgagattcatgaagaagatgtaactcttaaaattaatccagaatttgaacaagcctataactttgaacctatggatgtggaatttacatataataggaccacaagcagacggtgtcactttgcacttgaacacgtcatccacttaggtgtaaaagtgttgtttccagaagaaattattttacagtctccacaagtgacgggaaattggaaccatgcacaagacaccaaaagcagtggacagtccaccagcaaaaagaataggaaaacaatgacggaccaagctgagcatggaacagaggagaggcgtgttggtgacaaggacctgccggtgctggcaccctttactgcagagatgagcgattgggtagatgaaattcagacccctaaagcaagaaagatggagtttttcaacccagtgctaaatgaaaatcagaagttagcagttaaaaggattctgagtggtgactgccgtcccctcccgtatattctctttggacctcctggtactggaaagacagtgacaataatagaggctgttttacaggtacactttgccttgccggacagtcggattttagtctgtgcgccctccaacagtgctgctgacctcgtgtgtctgcggctgcacgagagcaaggtgctacagccggccaccatggtccgggtgaacgccacctgcaggttcgaggagatagttattgacgccgtcaaaccgtattgcagagacggagaagacatctggaaagcctcacgcttccggataatcatcaccacatgcagcagctcagggctgttttaccaaataggagtgagagttgggcacttcactcacgtgtttgtggacgaggctgggcaggcaagtgagccggaatgcctcattcctctggggctgatgtcggacatcagtggccagatcgtgctggcaggagaccccatgcagctcggaccagtcattaagtccagactcgccatggcctatgggctgaacgtgtcctttttggaacggctgatgtctcgacccgcgtaccagagggacgaaaatgctttcggtgcttgtggcgcacataatcccctgttggtcacaaagctggtgaagaactaccggtcccacgaggccctgctgatgctgccctcacggctgttctaccacagggaactcgaggtctgtgcggaccccacagtggtgacctccttgctgggctgggagaagttgcctaagaaaggcttccctctcatcttccatggtgtgcggggcagcgaggcacgggagggaaaaagcccatcgtggttcaacccggccgaggccgtccaggtcctgcgctactgctgcctcctggcccacagcatctccagtcaggtgtctgccagcgacattggcgtcatcacgccctaccggaagcaggtggagaaaatcagaattcttttgcgtaatgttgatctgatggatataaaggttggatcagtagaggagtttcaaggacaagagtatctggtcatcatcatttcgaccgtacggtcaaatgaagatagatttgaagatgatcgatattttttgggtttcttgtccaactcaaaaagatttaatgttgcaatcaccagacccaaagctttgctgatagtgctgggaaacccccatgttctcgttcgagacccctgttttggtgctttgctggaatacagtattacaaacggtgtttacatgggatgcgatttacctcctgcactgcagtctctgcaaaactgtggcgagggggtggcagacccctcctacccagtggtgccagaatccacaggaccagagaagcatcaggagcccagctgatctgcagtggctgacagcagggaggccatgtgctcagcctggccacgttgccgttacagtctgctccgtggctcctgtggcctgcccttgtctcgcagccaggcagggtcgtgtgtgggtgtggggctgccaggttggacgcagctgctgctgccctgactttggcatatgccagcctgttcctgccacagggcagtcactgccgcctaccctgaaataaaccctcgagtgacccccaaaaaaaaaa

SEQ ID NO: 30431 - DNA, 5318 bp, Homo Sapiens
agcgaagccaactgcagctgggataaagtgataatagataggactgacaaggaggcgtggccttccatcacaggaacagagactgaatctgcctcagaatgtactacagacactgactctgcctccaactgtggctcagagaacagtagcatggctacagggagtgcccagggcaacttcactggacataccaagaagacaaatggcaataatggcaccaatggcgcactcgtccaaagcccttctaatcagagtgcccttggagcagggggagcgaacagtaatggaagtgcggccagagtgtggggtgtagccacaggctccagctctggcctggctcactgctctgtcagtggtggggatggaaaaatggacactatgattggagatgggagaagtcagaattgctggggtgcttccaactccaatgctggcattaatcttaaccttaatcctaatgccaacccagctgcctggcctgtacttggacatgaaggaaccgtggcgacaggcaacccttccagtatttgcagtccagtcagtgccataggtcaaaatatgggcaaccagaacgggaacccaacaggcactttaggtgcttggggaaacttgctgccacaagagagcacagaaccacaaacgtccacttctcagaatgtgtctttcagcgcacaacctcagaaccttaacactgatggaccaaataacactaaccccatgaactcttcacccaaccctatcaatgcaatgcagacaaatggactgccaaactggggcatggctgttggtatgggggccatcatcccgccccacctgcaaggccttcctggtgctaatggatcatcagtttctcaagtcagtgggggcagtgctgaaggaataagcaattctgtgtggggactgtccccaggtaaccctgccacaggaaatagcaattctgggttcagtcaggggaatggagacactgtgaactcagcattaagtgctaaacaaaatggatccagcagtgctgtgcaaaaggaaggaagtggaggaaatgcttgggattcaggacctcctgctggtcctggaatactcgcctggggaaggggcagtggcaacaatggcgttggtaatatccattcaggagcttggggccaccccagccgaagcacctctaacggtgtgaatggggaatggggaaagcccccaaaccagcattccaacagtgacatcaatgggaaaggatcaacagggtgggagagtcctagtgtcaccagccagaaccctaccgtacagcctggtggtgaacacatgaactcctgggccaaagcggcatcttctggaactacagcaagtgaaggaagtagtgatggttctggcaaccacaatgaaggaagcactgggagggaaggaacgggagaaggccgaaggcgagataaagggattatagaccaagggcacatccagttgccaaggaatgatcttgacccaagagttctgtctaatactggttggggacagactcctgtaaagcaaaacactgcctgggaatttgaagaatcccctaggtctgaaaggaaaaatgacaatgggacagaggcctggggttgtgcagctactcaggcttcaaactcaggggggaagaacgatgggtccatcatgaacagtacaaatacctcttcagtatctgggtgggtcaacgcgccacctgccgctgtgccagcaaacacaggttggggagacagcaacaacaaagcgccaagtggcccgggggtttggggggactcgataagctctactgctgttagtactgctgctgctgccaagagtggccatgcttggagtggggccgcaaatcaggaggacaagtcacccacctggggtgagcctccaaagcccaaatcccaacactggggagatggacaaagatcaaatccagcctggagtgcaggagggggagattgggcagattcatcgtctgtccttggacacttgggggatgggaaaaaaaatggatctggatgggatgctgacagtaataggtcagggtctggttggaatgacaccacgagatctgggaacagtggctggggcaacagcacaaatacaaaggccaatccaggtacaaactggggggagactttaaaacctggcccccaacagaactgggctagcaaaccccaagacaacaatgtgagtaactggggaggagctgcttctgtgaaacagacaggaacagggtggatcggggggccggtaccggtcaaacagaaggacagcagtgaagcaactggctgggaagaaccctctccaccgtccattcgccgcaaaatggaaattgatgatggtacctcagcttggggggacccaagcaactataacaataaaactgtaaacatgtgggatagaaacaacccggtcatccagagcagtaccacgaccaataccaccaccaccaccaccactaccacgagcaacaccacacacagggtcgagacgccgcccccgcaccaggctggtactcagctgaatcgatcaccgttgcttggtccaggtaggaaagtttcatcaggctggggagaaatgcctaatgttcactcaaagactgaaaactcttggggagaaccatcctccccttctaccctggtggataatggcacagcagcatgggggaagccacccagcagtggcagcgggtggggagatcaccctgccgagccgccggtggcatttggaagagctggcgcacctgttgctgcctcagccctgtgcaaaccagcttcaaaatctatgcaagaaggctggggcagtggtggggatgaaatgaacctcagtaccagccagtgggaggatgaagaaggggacgtgtggaataatgctgcttcccaagaaagcacctcctcctgcagctcctgggggaacgcccccaaaaaaggacttcaaaagggcatgaagacgtctggcaagcaggatgaggcctggatcatgagccggctgatcaaacaactcacagacatgggcttcccgagagagccagctgaggaggccttgaagagtaacaatatgaatcttgatcaggccatgagcgctctgctggaaaagaaggtggacgtggacaagcgtgggctgggagtgaccgaccataatggaatggccgccaagcccctcggctgccgcccgccaatctccaaagagtcttccgtggaccgccccacctttcttgacaaggatggcggcctcgtggaagagcccacgccttcaccgttcttgccttccccaagcctgaagctccccctttcacacagtgcactccccagtcaggccctgggtgggattgcctccgggctgggcatgcaaaacttgaattcttctagacagataccgagtggcaatctgggtatgtttggcaatagtggagcagcacaagccaggaccatgcagcagccgccacagccaccagtgcagcctcttaactcttcccagcccagtctccgtgctcaagtgcctcagtttctatcccctcaggttcaagcacagcttttgcagtttgcagcaaaaaacattggtctcaaccctgcactattaacctcgccaattaatcctcaacatatgacgatgttgaaccagctctatcagctgcagctggcataccaacgtttacaaatccagcagcagatgttacaggcccagcgtaatgtgtccggatccatgagacaacaggagcagcaagttgcgcgcacaatcactaatctgcagcagcagatccagcagcaccagcgccagctggcccaggccctgctcgtgaagcagccaccaccgccaccgcccccgccgcacctgtctctgcacccctctgcaggcaaatcggccatggacagcttcccctcgcacccacagactcccggcctacctgacctgcagaccaaagagcagcagtcttcacccaacacctttgctccttaccctctcgctggactgaacccaaacatgaatgtcaacagcatggacatgaccggtggcttgtcggtgaaggacccatcccagtcccagtcacgcctcccccagtggacgcaccccaactccatggataacttgcccagtgccgcttcccccctggagcagaaccctagcaagcatggtgctatccctggaggtctaagcattgggcctccaggtaagtcctccattgatgactcctatggccggtacgatttaatccagaacagtgagtcaccagccagtcctcccgtagctgttccccatagctggtcacgtgccaaatctgacagtgataaaatctcaaatggctctagcatcaactggcccccagaattccatccgggagttccatggaaaggactgcagaatattgaccctgagaatgaccctgacgtcactcctggcagtgtccccactgggcctaccatcaacaccaccatccaggatgtcaaccgctacctcctcaagagtggaggtaaactgtcagacatcaaatcgacgtggtcctctggccctacctcccacacgcaagcctctctgtctcatgaactatggaaggtgcccagaaacagtactgcacccacgaggccacctccagggttaaccaatcccaagccctcctccacctggggtgccagccccctcggctggaccagctcctactcctcgggttctgcctggagcaccgacacctcaggaagaaccagcagctggctcgttcttcgaaacctcactccccagattgatggttctacactgcggacattgtgtttgcaacatgggcctcttatcacattccacctgaatctgactcaaggcaatgctgtggtccggtacagctccaaggaggaggctgccaaggcccagaagtctctgcacatgtgcgtcctgggaaacactaccatcctggccgagttcgctggtgaagaagaagtgaatcgcttcttagcccaaggccaggcgctgccacccacttccagctggcagtccagcagcgcgtccagccagccgcggctcagcgcagcgggcagctcccatggcctggtacgcagcgacgctggccactggaacgccccgtgcctgggtggcaaggggagcagtgagctgctgtggggcggggtgccccagtactccagcagcctgtggggcccgcccagcgccgacgacagcagggtgataggcagccccacgccgctaaccaccctgctgcctggggacctgctcagcggggagtccctgtaggcgctgccatcatcagcaccaggagagccgacccctcccgggacccctcccggctgggcggccccacagacccgctggaacccagcagcggccgc

SEQ ID NO: 30432 - DNA, 2483 bp, Homo Sapiens
gaattcggcacgagggcagtgggggttacagacagcaccagaggcactcagggcaggagggtagtgggtgctggtcaaggccgctttgcaggggattgggagtggatgctagtggcagtaaagggtaaagggagggcagtgggctctgagctaggaggaggtggcccagccacttctgcagagttcctaaccccagacagctctactgcaccaccccagcccttccccacagcccaaaggaacttaagagggagagcactgtgggcatgcagccaggatttccagcattgcttccaggctcctaggggaaacttaggcactagcgcagactacatccagacatggctatagggaaaagtttgccttgtggcacactgggtatgcctctctatcctctctcctcccccagcaggcatgaagacccccaacgcacaggaagccgaaggggcaacaaaccagggcagctgcaggacgggccactgggtctgcaaacatgacaaagaaaaaagtctcccaaaagaagcagagaggcagaccttcatcccaaccctgcaggaacatcgtgggctgcagaatttctcatggatggaaggaaggagatgagcccatcacgcagtggaaaggaaccgttctggatcaggtgcctataaatccctctctttatctggtgaaatatgatggaattgactgtgtctatggactggaacttcacagagatgaaagggttttgtctcttaaaattctttctgacagggtggcatcatctcacattagtgatgccaaccttgcaaataccataattggcaaagcagtggaacacatgtttgagggagagcatggttctaaggatgaatggagggggatggtcttagctcaagcacctatcatgaaagcctggttttatattacctatgagaaagatcctgtcttgtacatgtaccagcttctagatgattataaggaaggtgacctccgcatcatgccagaatccagtgagtctcctccaacagagagggagccaggaggagttgtagatggcctaataggtaagcatgtggaatataccaaagaagatggctccaaaaggatcggcatggtcattcaccaagtggaaaccaaaccctctgtgtatttcatcaagtttgatgatgatttccatatctatgtctacgatttggtgaaaaagtcctaactgttagggtaaaatttggcacatgtgtggaaacaaatgtataatttgtagacatgcaaaaaatgttgcctttcagtgtactgaaagcttatggaatccctgataactaaacatctttgccagcattaactgttgttttgctctaaaaaatacaaatttgtgaatacatgacatgctgtctgtaagccctttgtcttgttgaaaagttcgggtgtgtttggtagatggggcatggaaggaacgaacagctgtcaatttcggctgtgaataaagttcagctagaatcataatcagtcatttaaaaatggcactggatttagctggtctggtctggagggggcaggggaaggaacaagagattggctgtcttggggagagaggaggaggtgactgcttaggaagaggtggaaaagggccagaaagggaggggctccttgggggaggggatgacctatgagaaggaaacatccaactcagaaggaagactaacagagggagagtgagatcttggggcttagaggaaaatagaataaactgagtagagaggaacacaaagaagcttagaagagggtccagagtaaggtggagaaggatcaacctgacagggatctgggagaggctaaaggatacacaaaggaagaggctatgtgggttagggtgttggagggattagaagagggccactgaggaaggaggaattcaaagaagaaagactgacagagggagtgagaatacaggaaaagagttgtggggtatggggcccatgagagatcggaaggcccaggaaaatgttggacttctggtagtgtccacattgctcttcctggctctatgcacaaaggaagtggcaactgtcaaagatgccagatgcattggaggttcactagaagagcatgttgacaggaatgactcagtcaagttaatcaggagccaagtttatgcccataaggcttttcctgtttcagggagttaatgacacacttgtccagcagaaacccaatgctcagcctaaacacgctaacatggtgccccacatgtgctgggctgtgggctgcctcctcacatttgtcctgcgctagataagcaatcttggtagaggatgggttagtggggctctcagaacttaagagatgtgccatcttgcatttggaaagtactttatccagaaaaaatgaaatcttactgaactcaggtacagcagtctcatcactcctattccttctgctggaatgtttgttttctatctagagatgaggggcatcagaggactgagcctagtgtttctctcgag

SEQ ID NO: 30433 - DNA, 5730 bp, Homo Sapiens
cctccgcctccactcgccctcgtgctcccttcagccccttcgcagctccgtgcgcaaggtcgtgtcccggaagtgaaggggccatgttgatgggtgacccggggagaggtacccggccagaggcgagtcctgcggagtggtagcgcgcacggcctgcggtgtgacacccagcccctgccagtcccccatggccccgtggagccgagaggcggtgctgagtctctatcgggctctgttgcgccagggccgacagcttcgctacactgatcgagacttctactttgcctccatccgccgtgaattccgaaaaaatcagaagctagaggacgctgaggcccgggagaggcagctggagaagggcctggtctttctcaacggcaaattggggaggatcatttaggatcctccaagggaaagaggacaaaggtgccttctgtagacactcctgctctcttccatccccatcttacagatgtattaagaagcctcagatgagcaatggcaggcgctggtgagcgcaaaggcaagaaggatgacaatggcattggcacggccattgactttgtgctctccaatgcccggctggtgctgggggtgggtggagcggccatgctgggcatcgccacgctggcagttaagcggatgtacgatcgggcgatcagtgcccctaccagccccacccgcctgagccattcggggaaaaggagctgggaagaacccaactggatgggctccccacgactgctgaacagggacatgaagacgggcctgagccggtccttgcagacccttcccacagactcctccaccttcgacacagatacattctgcccgccccggcccaagccagtggccaggaagggccaggtagacttgaagaagtcacgactccgcatgtccctgcaggagaaacttcttacttactaccggaaccgggcagccatccctgctggagagcaggctcgggccaagcaagctgctgtggacatatgtgccgagctccggagcttcctgcgggccaagttgcctgacatgccgcttcgggacatgtacttgagtggcagcctctacgatgacctgcaggtggtgacagctgaccacatccaactcattgtgccccttgtgctggagcagaacctgtggtcatgtattcctggtgaagacaccatcatgaatgtccctggcttcttcctggtgcgtcgtgagaatccagagtactttcctcgtgggagcagttactgggaccgctgtgtagtagggggctacctctctccaaagacagtcgcagatacatttgagaaggtagtggctggctccatcaattggccagccatagggtccctcttggactatgtgatccgcccggccccacccccagaagccctcacactggaggtgcagtatgagcgtgacaaacatctcttcattgacttcctgccatcagtgaccctcggtgacacagtcttggtggccaaaccacaccggctagcccagtatgacaacctgtggcggctgagcctgcgtcccgcggagacggcacgcctgcgggctctggaccaggctgactcgggctgccgatctctgtgcctcaagatcctcaaggccatatgcaagtccaccccggctctgggccacctcactgccagccagctaaccaatgtcatcctccacttggcccaggaggaggctgactggtctccggatatgctggccgaccgtttcctgcaggccttgaggggacttatcagctacttagaggctggagtcctgcccagtgccctaaaccccaaggtgaacttatttgcagagctcacccctgaagaaatagacgaattaggatacactctgtattgctcattgtctgagccagaggtgctgctgcagacgtagggcaggtgaaggccaaagcgggtgttggtggtcaggccctggattctccgttagatacacttggctacctagttggtgcctcacagggttcctgctgcctggtgtcttgctgatcatcaccctggtcacttcatgctgattagaatgacatctctttcgtctcctattttgttacccaactcttcctatttttgttaccaatcactgtgctctctgccgccccctggctccaggctaatttttctggaatgaattgagaaggtggcgtgctggcctgagctgatggaccacttggtgttttgcgttttggcccatgtttgctgcctctatctggtctgccttgcccgtttgcctgttcctattcagtgtcttttctattttttcctctctcgttcatgccttctgttttgctcttgtccctggagcatatctgcctaattaagatgttgccttttagttgaatgccactgaagagctgtgatagcatgtttcaaagctgaactctacagagcgagtgctgagacagtatttagggtttctgggagtgaggctggtagaagagttggcctttgaccacggttcctggagtagaagtccatcctccccccaacctcctgacccattcataaatgctgagaatgtctctcatgggaacactgttaatgacccacacaggataagctgaatgcaaagttatttgcaggttgaatttcttggtggctattagcagaagtgcagagtagggaaccagagctggttaagggcctagtgaagggtttgtgtgcccagtgtctgctcgtcatctgtggctgcaggggtcagacagacaaggatggggactgccagggcaccacttcatcatgaatgctggttttcacaccttttccttattttattgccaatcaggacaaggccttgaaggaacgcagccttagacatcaggtgaggatgatggaggtagacagtcgactgaatgtcagctggaaaatccagtcactagttggggtttggtggccatgttttctacccagacaggccctgcttttctaggatgtggccttagagcaagaacagacccaacagccagcccttcatcctccagcgtctgccataggaatgtgagaggggtgtttgctgagcgctccgggcacggccagagggcaagtgagcatgcacggacctcttccccctgtcctgtttctcacccagcacctggggagatcggtgctaccaaggaagagagcacacagataagacagaggggaggaggtgggcatttcctacattcctccttgtttgccgctgctgagattgcagtatttattgcaatgtaaatgtatcctgaaggtggggaggaatgtttaatctaccatgtccgtgtgtcatcttggtttgtgtttttccctgtttgtagcaagactctgatgataattctgtttctcatctgcccattcagtattttgttttccttccgtcaagttgtcttattttttcaatgactacctctccatcattgaggttctggtgaagctctctgcagctgtctcattccttcccaacgatagtaacaggaaatgactctttagcatcgatacctcaacatcaatttagggtagagattcctgcccctcttttgtcacagattaggaaattgagaactagggttaaccttgactatatttagaggtctttttgcctcttttccccttaacaaggatttcttatggtggtttcagtttcatttgcataaaggtattgagagggaacaaaaaacataaagctgagaatcttgagagagctcatctaccctgtctgttggtcagactcaaatgagagttaaaaaaaaaaaaaaaaatctgtatgcctgagtaccatcctggatgaatctagaaggtatggggtagagcttgacagggttcctgtgtacccactgggtatccgttagaggtaagggagaggagaggattgatagagtgttgcaaaagtatagattattcattgagataaaggatttggtttccctgccatgagtattaaaaaaatttaagttttcccaagcttgcatctctgaccaaatttcacataaaacattggaaggaggctgggtgcggtggctcatgcttgtaatcccagcactgggaagctaaggcgggtggatcacttgaggtcaggagttcgagaccagcctggccaacatggtgaaaccccgtctccacgaaaaagataaaaataagctgggcgtggtggcaggcgcctataatcccagctactcgggaggctgaggcaggagaataacttaaacccgggaggcggaggttacagtgagctgagatcgtgccactgcactccagcctgggtgacagagtgagaccctatttcaaaaaaataaaaattggaagaagagcttaaaaaagataagattttaaagagtcccaagttatttaagttgagtgtaattgtcatttaaggaaggcaaatgagtttatcatccttcttaaagagcatctcttttaactgttggacaaaaccataactttgtcattttacaaggaagaacctcttaagaagtcctcagaaccagaagcaatgtgaactctcagcgctggtcctggtgggtttgctgaccatgactgggcaagccgttctttttgctgccatcttcctcatcataaagtgtggaacataggcaattgctttgagattcttggatagaagaggacaacattctgcacctgcccccttttttaaatctttggggaaagatgagtaactttccccactactctgccttcctgttcagtaactcttacttttgcctgaagtaacagcatcttctacttctccatctagagatttttgtgtgtgtgccatcaaggttagcaaactttatacgtagcctaacacttaaaaaatgcactcattatcttaaacctaataaattccagagtttattttggttctcctctgttgcccttcctaaaaaatgagctgaagatgacagtatttttctttacatgcttggttatgacttttaaagttttatttaaataaatgttgaagctcaagtttaaagaagcgttgcagaggcccacggtctcctgggtcccggccacctgtccatattccacatttgctgactgtgctccctgcactccactcaagttgagagttcaaatagtcttgaaggggaatcagcttcaggatggaaggacccaggagaggccccgaggtgggagggttctgtaaatacagactactgcgagtgtccagagctctctgccatgatacttccttgggactgacttggctgagaacgtgttctgtcagaggatttgttagaactctgcccttttgtctgaaactcaaggccaaggagaatgataggagacttaggacagagctgacccttgcaccaggctgggaggctgcagcccttttagatgccacttactgtaagtggccagaataccagagaggtgggttccatggtcaaatgcacagtaggtgtttacctttacatttggatcaccttgtagtctttaaattcttggtccctgaggccaagtccacaacttgccttctagtcacttgcctgcccgcagtggtggtggatgtgttagctggtagatttggaatcagtcaccagtctttctgtactgtcttggttagctctatataagtaggggcagcttagccctgaggcccagagacctgctgtcctttttctccttgagggaggaaataaaactgcggaatacaatgtccttccatagcatgggaagaagaaaataaacatctcctttccaacaaaaaaaaaaaaaaaaaaaaaaaaaaaaaaaa

SEQ ID NO: 30434 - DNA, 1483 bp, Homo Sapiens
cttagtggtgtcggggtctagtggacagagaagactcttggccaggcagatggcttctcggtggcagaacatggggacctccgtgcgccggagatctctccagcaccaggagcagctggaggacagcaaggagctgcagcctgtggtcagccatcaggagacctctgtaggggccctggggtccctgtgcagacagttccaaaggaggctgcccctgagaaccgtcaacctcaacctccgcgcagggccctcctggaaacgcctggaaaccccagagccaggtcagcagggcctccaggctgcagctcgctcagctaagagtgctttgggtgccgtgtcccagagaatccaggagtcctgccaaagtggcaccaagtggctggtggagacccaggtgaaggccaggaggcggaagagaggagcacagaagggcagtggatccccaactcacagcctgagccagaagagcacccggctgtctggagccgcccctgcccactcagccgcagacccctgggagaaggagcatcaccgcctctctgtccggatgggctcacatgcccacccattacggcgatcaaggcgggaggctgccttccggagcccctactcctcaacagagcccctctgctctcccagcgagtctgacagtgacctagagcctgtgggggcgggaattcagcatctccagaagctgtcccaagagctagatgaagccattatggcggaagagagtggtgacatcgtctctctcattcatgactgaggaagtgcctgcaggaaacaagccctgtctgaccgccaaggcttcatactcaaggatgtctatgcttccccgtgtgcttcctggaaaaaacccccgggagtcgtcagtacccctgggccactgctaacaagcacctaacaaggggcccagagccccctgctccagccacatctggacccatcagtgactgcctgccatagcctgagagtgtcttggggagaccttgcagagggggagaattgttccttctgctttcctaggggactcttgagcttagaaactcatcgtacacttgaccttgagccttctatttgcctcatctataacatgaagtgctagcatcagatatttgagagctcttagctctgtacccgggtgcctggtttttggggagtcatccgcagagtcactcacccactgtgtttctggtgccaaggctcttgagggccccactctcatccctcctttccctaccagggactcggaggaaggcataggagatatttccaggcttacgaccctgggctcacgggtacctatttatatgctcagtgcagagcactgtggatgtgccaggaggggtagccctgttcaagagcaatttctgccctttgtaaattatttaagaaacctgctttgtcattttattagaaagaaaccagcatgtgactttcctagataacactgctttctcataataaagactatttgcatttg

SEQ ID NO: 30435 - DNA, 5968 bp, Homo Sapiens
gactttggccggatgactccccagggtcggcatcagcgtgggactgggaacaggtgaagggaaacagaagagagcctgagaagaccgctctcctccgatcctaattgactgagccaatgagagccaaagaggtcacatgctcaactgggcggggagcgggtttccacctgcggcatctttcgcgagcggggagatgagtggggcggaatatgggagaaagggagggcccgccacgctctggctggacacggccttaatcggcccgttcactcgacgtttttggttctacgttgaccccgagaaaccgaaaccgcagggcctagggcgggtggaacgagagggaactacatttcccagcaggctgcggaaacgggactgcggccactacttccggcgtgtaccgagagactggcgtccggcgtgtaccgagagactggcgtccggtgtgcaggtggccacatggatcctggcagccggtggcggaacctgcccagcgggcctagcctaaagcacttgactgacccctcttatggaatcccgcgggaacagcaaaaggcagcgttgcaggagctgacgcgggcgcacgtggagtccttcaactacgctgtgcacgagggtctcggcctcgcggtgcaggctatacctccctttgaatttgctttcaaagatgagcgtatctcttttactattctggatgctgttatcagtccacctacagttccaaaagggaccatctgcaaagaggccaatgtttatccagcagaatgccggggccgaaggagtacctaccgtgggaagttgacagctgatatcaactgggcagtgaatggaatctcaaaaggaatcattaagcagtttcttggctatgttcccatcatggtgaaatccaagctttgcaacttacgtaaccttcccccacaagccctcattgagcaccatgaggaggcagaggaaatggggggctattttataatcaatggcattgaaaaagtcatccgaatgttgattatgcctcggagaaattttcccattgcaatgataagaccaaaatggaaaaccagagggcctggttatactcagtatggagtttcaatgcactgtgtgagggaagaacattccgctgtcaatatgaacctccactacttggaaaatggcacagttatgttgaactttatttaccgaaaagaactgttctttcttcctttgggatttgcacttaaggcacttgtcagcttttctgattatcagatctttcaggagctcatcaaaggaaaagaggatgattctttccttaggaactctgtttctcagatgttaaggattgtaatggaagagggttgttcgacacaaaaacaggtccttaactacctaggtgaatgcttcagagtaaaactcaatgttcctgactggtacccaaatgagcaagctgcggagttcctgtttaaccagtgcatctgtatccacttgaaatccaatactgaaaagttttatatgctttgtctcatgacgcgaaagctctttgctttagccaaaggagagtgcatggaggacaatcctgatagtttggtgaaccaggaagtcctcacaccgggtcagctcttccttatgttcctgaaggaaaaactggaaggttggttagtgtctattaaaatagcttttgataagaaggctcagaagaccagtgtttccatgaacactgacaatttgatgaggatttttacaatgggcatagaccttacaaaaccatttgaatacctttttgctactgggaatctgcgttctaaaacaggtcttggcctcctacaagattctggactttgtgttgtggctgacaagctgaacttcatacgctacctctcccatttccgctgcgtgcacagaggggctgattttgccaagatgaggaccaccacagtacgcaggctgctgccagagtcctggggcttcctttgtcccgtgcataccccagacggggagccctgtggcctgatgaaccacctaactgccgtatgtgaggttgtcacacagtttgtgtatacggcatctattccagctttactgtgcaacttgggggtcactcccattgatggagctccccaccgatcatacagtgagtgctaccctgtcctgctggacggtgtcatggttggctgggtggataaggatcttgctccaggcatcgcagattctcttcgtcattttaaggtgttgagagagaaaagaattcctccctggatggaagtggtccttatacccatgacaggaaaaccaagtctgtacccaggattgttcctttttaccactccttgtagactggtacggcctgtgcagaacttagcattgggcaaagaagagctaattggaactatggaacagatcttcatgaatgtcgctatctttgaggatgaagtttttgctggagttaccacacaccaggaactctttccacacagcctgctgagtgtgattgccaacttcatccctttctctgatcacaaccagagtccacggaacatgtaccaatgccagatgggtaagcaaactatgggctttccacttctcacttatcaagaccgatcggataacaaactgtatcgtcttcagactcctcagagtcccttggtgagaccctccatgtatgattattatgacatggataactatccaattgggaccaatgccatcgttgctgtgatttcttacactggctatgatatggaagatgccatgattgtgaataaggcctcttgggaacgaggctttgcccatggaagtgtctacaagtctgagttcatagacctctctgaaaaaattaaacaaggagatagtagcctggtgtttggcatcaaacctggtgacccacgcgttctgcagaagttagatgacgatggattgccgtttataggagcaaaactgcagtacggagatccgtattacagctacctcaacctcaacaccggggaaagttttgtgatgtactataagagtaaagaaaattgtgttgtggataacatcaaagtgtgcagtaatgacactgggagtggaaaattcaagtgtgtttgcatcactatgagagtgcctcggaacccaactatcggagataaatttgccagtcgccatgggcagaagggcattttaagcagattgtggccggctgaggacatgccttttactgagagtgggatggtcccagacattctgttcaatccccatggttttccatcccgcatgaccattgggatgttaattgagagtatggccgggaagtctgcagctttgcatggtctctgccatgatgctacacccttcatcttctcagaggagaactcggccttagaatactttggtgagatgttaaaggctgctggctacaatttctatggcaccgagaggttatatagtggcatcagtgggctagaactggaagcagacatcttcataggagtggtttattatcagcgcttacgccatatggtctcagacaaatttcaagtaaggacaactggagcccgagacagagtcaccaaccagcctattgggggaagaaatgtccagggtggaatccgttttggggagatggaacgggatgcgcttttagctcatggtacatcttttctccttcatgaccgcctcttcaactgctcagatcggtcggtagcccatgtgtgtgtgaagtgtggcagtttactctctccactgttggagaagccacccccttcttggtctgccatgcgcaacagaaaatacaactgtactctgtgtagtcgcagtgacactatcgatactgtttctgtgccttatgtttttcggtattttgtagctgaactggcagctatgaacatcaaagtgaaactggatgttgtttaacttgatgttgaccttttggattaagaggactatcagattaaagcaaaatgtaattttaattcaatgaagatatcattaccaggttactcttgagatttttcaacggtgttagaactctcaaccaagacctgaaaaccaagtatgcaaggtttctgaatctctctggtagattaactattgacaatgattttctgttatctttgttcaaaaagttcatgtcttctcaaaatatgaaatattgataaatggaagagcatacggtgacaagtctcctttccaaccccaggttccctacaccctgctctcagcaggcagtgagtgtcacacacctgttaatccatcttgagcaggacagtactatacaaatagaatgcaagctgtaatgtaattttatattttcttatagccacgttgaagtaaaaacaaacaggtacagtgttttttaccagctttatagaagtacagttgttacatatttaatgaatacaatttgatgggtctgactatatgcacacacctttgataccatcaccacaatcagggtaataaacatacctgtcatctccacaagtttcctcctgcccctttgttttttgctttttggttgctgttgagtttttgttttgtcttctgtggtaagaacacttaactcaagacctaccctcttaacaaatctttaagtgcacgatatagtattgttaattccaggcaccatgttgtacaacagatctttagaccttacttgtcttgcataactgaagctttatacctgttgaacaactctccatttccctggcccctagcaaccacccttctaccctgtttctatgagtttgactattacagatatctcatatagtgggatcatgcaatatttgtcctgtgactggcttatttcacttagcatagtgaaataagattcatccattttggaagccaggcatggtgctgtgcatctatagtccctgctatttgagaggctgaggtgggaggatcatttgagtgcaggagttcaaggacagcctgggtaatataggaagaccctgtcttgaagaccctgacctcaagtgatccacccacctcggcctccgaaagtgctaggattacaggtgtgagccactgtgcctggcctccggtgagtattttatatttagtctacacttccatacttggcttttttctgcttttatattgatctgctttcatagcagtgtgtagagtgccacttatgttttctttcttgtgtacagtattttattgtatggatttaccatcccctgtgtatttaagttgttccattctttggccattataacttttttctgcaaatattctggtgacttatctttggccattataaactgttgataatagatcatcttgtatatacttctgcaattataagatgttttttgatgatgaaagctttcctaaggtaattctttcctgagtttggttcagatggtctgtcactaattataaggcagataggaacagacagaaaaatctatcatttcaagataggcttagcaggatgggcgcagtggctcacgccactaatcccaacattttaggaggcctaggcaggagcaatcacttgtgcctgggagttctagactagcctgggcgagacttcatctctacaaaaaaagcaacaacgacaaaaaaattagccaagcatagtggcacacccctgtagtcccagctacttgggaggctgaggtgggaggattgcttgaacccaagaggtcgaggctgcagtgagccaagattgtgccactgcactccagcctgggtgacagagcaggaccctgtctctattttataaattaaaaagggctgggtgtggtggctcacacccataatcccaacactttggctcagcagattgcttgaacccaggaattcaagtccaatctgggcaacatggggaaaccccagctctacaaaaaaaattagcctggtgtggtggcacatgcctgtagttccagctactcaggaggctgaggtgggagaatctcctgagcctggaaggtccaggcagtgagccaagattgtgccaccacactccagcctgggcgacagaatgagaccctgtctc

SEQ ID NO: 30436 - DNA, 5968 bp, Homo Sapiens; identical to SEQ ID NO: 30435

SEQ ID NO: 30437 - DNA, 1925 bp, Homo Sapiens
gcggccgtcgcgtctgacagaccactgcagaccacgggccgaggcccagcgcccgtccgcagcgcggccggcatggcggcgacaaggagccccacgcgggcaagggagcgggagcggtctggcgctcccgccgcaggaagtgaccaagttcactcctggatgctagctacaagccaagccttagacactgtctggagaatggcaaaaggctttgtgatgttggcagtttcatttctggtggctgccatctgctacttccggaggctacatttatattcagggcacaagctgaaatggtggattggatatctgcagagaaaattcaaaaggaacctcagtgtggaggcagaggttgatttactcagttattgtgcaagagaatggaaaggagagacaccccgtaacaagctgatgaggaaggcttatgaggagctattttggcggcatcacattaaatgtgttcgacaagtaaggagagataactatgatgctctcagatcagtgttatttcagatattcagccagggcatctcttttccatcatggatgaaagaaaaggacattgttaagcttcctgaaaaactgctgttttcacaaggttgtaattggattcagcagtacagttttggtcctgagaagtatacaggctcgaatgtgtttggaaaactacggaaatatgtggaattattgaaaacacagtggactgaatttaatggcattagagattatcacaagagaggaagtatgtgcaacacccttttttcagatgccattctggaatataaactttatgaagctttaaagttcatcatgctgtatcaagtcactgaagtttatgaacaaatgaagactaaaaaggtcattcccagtctttttagactcctgttttccagggagacatcctctgatcctttgagcttcatgatgaatcacctgaattctgtaggcgacacatgtggactagagcagattgatatgtttatacttggatactcccttgaagtaaagataaaagtgttcagactgttcaagtttaactccagagactttgaagtctgctacccagaggagcctctcagggactggccggagatctccctgctgaccgagaacgaccgccactaccacattccagtcttttaagtccgctgggggccgaacagcagtgctcaccagtgacggtggtcacagttgcaataaagtctctctctgaaaccaaagctagcatttcagcatggaaggaattaggaccttttcttcaggattacaggtacactggatgcagccatgcatggatggtttttctttatttttcagtgatttcctctgaagcagctgcactgatacatttgggagttggtggcttgactttgtccataaggggcgtggccacttcacatgatggcgggcctttaagagcacaaagaagtttaatatggacaacaacaggaaaaagcaagaagaaaacaagtagggaaaaacagctaacctggagagaaagaatttctttaacctttatgttcttcattaaaaatcttatcttggactgatttgagggatttttagaaacatggccttattttatataagcattaccttcccaggaatctttgttgtatattaatttttgataaccatttgattaactttaaaattaagtatatgtgtgtatatatacatatgtatgtttatatacacacatgtatctgtatagttttatatatacatatatacacatagacatacagagaaccactactttgtaatagtgtacagtttgttttatatctctttactttttttgttactattttatctggccagcgtaatagttttatttagattttttaaaattctgtagattaaagcaaatgacagttattgaactatcacaaaactattaaactgtggtacatttaatgtgt

SEQ ID NO: 30438 - DNA, 3303 bp, Homo Sapiens
gacggtggcggctctcggagccggcgcgaatccggcccccgcagcgggacccgggcaggtcttgacgagccctgcccgggccgacgcatgcggaggatggaaacacttgcccggcaatgtctctgggccgcctccttcgcagggcctcctccaaagcctcggacctcctgaccctcacccccggtggcagcggcagcgggtccccctctgtcctggatggagagatcatctactccaagaacaatgtctgcgtgcacccgccggaggggctgcaggggctgggggagcaccacccaggttacctgtgcttgtacatggagaaggatgagatgctgggagccaccctcatcctggcatgggtccccaactctcgcatccagaggcaggacgaggaggccctgcgctacatcacacccgagagctcccccgttcgcaaggcaccccgccctcggggccggcgcacccggagctcaggagcctcccaccagccctccccgacggagctgcggcctaccctgacccccaaagatgaggacatcctggtggtggcccagagtgttccagaccgcatgctcgccagccctgcgccagaggatgaggagaagctggcgcagggcttgggggtggatggtgcccagccagcctcgcagcctgcttgcagcccctccgggatcttgtcgacggtcagtccgcaggatgtcaccgaggaggggcgggagccgcggcccgaggccggggaggaggatggctctttggaactgtcagccgagggcgtgagcagagacagctcctttgactcagactcagacaccttctcctcgcccttctgcctctcgcccatcagcgcggcgctggccgagagccgcggctccgtgtttctggaaagtgacagcagccccccgtccagctccgacgccggcctgcggttcccggacagcaacggcctcctgcagaccccacgctgggacgagccgcagcgggtgtgcgccctggagcagatttgcggcgtgttccgcgtggacctgggccacatgcgctccctccgccttttcttcagcgacgaggcctgcaccagcggccagctggtcgttgccagccgagagagccagtacaaggttttccacttccaccacggcggcctggacaagctgtctgacgtgttccagcagtggaaatactgcaccgagatgcagctcaaagaccagcaggtcgcccccgataagacatgcatgcagttctccatccgccgccccaagctgccgtcctccgagacgcaccccgaggagagcatgtacaagaggctcggcgtctccgcctggctcaaccacctgaatgagctgggccaggtggaggaggagtacaagctgcggaaggccattttctttggcggtattgatgtgtcaatccgcggggaggtctggcccttcctgctgcgctattacagccacgagtccacgtcggaggagcgggaggcgctgcggctgcagaagcgaaaggagtactctgagatccagcagaaaaggctctccatgactcccgaggagcacagagcgttctggcgtaatgtgcagttcactgtggacaaagacgtggtccggacagatcggaacaaccagttcttccggggggaagacaatcccaatgtggagagcatgaggaggatcctgctgaactacgccgtgtacaaccctgccgtcggctattcccaagggatgtcggacctggtggcgcccatcttggccgaggtcctggatgagtcagacaccttctggtgctttgtgggtttgatgcagaacacgatcttcgtcagctcaccccgggacgaggacatggagaaacaactgctgtacctgcgcgagctgctgcggctgacgcacgtgcgcttctaccagcacctggtctcgctgggcgaggacggcctgcagatgctcttctgccaccgctggctccttctgtgcttcaagcgggagttccccgaggccgaagcgctgcggatctgggaggcctgctgggcccactaccagacggactacttccaccttttcatctgcgtggccatcgtggccatctacggggatgacgtcatcgagcagcagctggccacggaccagatgctcctgcacttcggaaacctggccatgcacatgaacggggagctcgttctccggaaggcgaggagtttgctgtaccagttccgcctcctgccccggatcccctgcagcctgcacgatctgtgtaagctgtgcgggtcaggcatgtgggacagcggctccatgcccgcggtggagtgcaccggccaccatcccggctcggagagctgtccctacgggggcacggtggagatgccttcccccaagtccctgagggaaggcaagaagggcccaaagacgccgcaggacggcttcggcttccgcagataggtcgggcccccgacaccggacaggggttgaggggacctcctcagaggccctgggcacgggagggggtggggctgggcgtgaaggggacaggggacgatagaaacctaaggaaaatgcttttgggcaacatgagaggaaccttttcatattaatgacaaaattagagtctggaagtgacagaagtcagatctacagccacccagaggaaagtcagctcctgaaacgctgcagtggaacgcgcagccaccgcacctgagacgcaggctggctgggctctcctgctggctgccctggaggatttcaacatgtcccaggatttgctccaccctcgagggcagccagacagcgtcgccaggcaatgaggaaagcagagacaggagaggaaggcctcactcacccactgcgtcgagggctgcagaacacagcggggtcctgtccaggcccagggacatctttgcaagccagacacacttcctcttgagacctcgttctctcggagtgagccaaacacacttcccaaaacgtccccagccacagctgggatgccgatggaaaggcatctgccataaaagaaaagcaaaagataaaaagcccaaccgatgtggggatagagaggcggaagagcagtcaggcttgaggagctggcgcttgtaatgtttatccgtttaaacatttcgtcctcctggtacacgaagggaactgtctgcccaggagcctgagcctcaggctgttggagaagcatctgatgcctttttctttgctgggggtcttctacgtgaggttccttggcgttgtttaaggtcaactccaccaaatacagcaaccagctggggcttgaaaaaaaaaaaaaaaaaaaaaaaaaaaaaaaaaaaaaaaaaaaaaa

SEQ ID NO: 30439 - DNA, 2390 bp, Homo Sapiens
gtgctggccgcggtaaaagtggtagcagcggaggcgagcggagggtttcccgcggcggagtctcactctgctgcctaggctgagtgcagtggtgtgatcgaggcgcactgcagccttgacctcctgagctcaagcgatcctcacctcggcctaccgagtagctgggactacaggcacgcgccactacactcggatttctgacagtcagacttgtccacaagaactcaactggcaaggctgcttttctgtgctaaaactggggagctagtgggcaccatgaagatcttctgcagtcgggccaatccgaccacggggtctgtggagtggctggaggaggatgaacactatgattaccaccaggagattgcaaggtcatcttatgcagatatgctacatgacaaagacagaaatgtaaaatactaccaaggtatccgggctgccgtgagcagggtgaaggacagaggacagaaggccttggttctcgacattggcactggcacgggactcttgtcaatgatggcggtcacagcaggtgccgacttctgctatgccatcgaggttttcaagcctatggctgatgctgctgtgaagattgtggagaaaaatggctttagtgataagattaaggttatcaacaagcattccaccgaggtgactgtaggtccagagggtgacatgccatgccgtgccaacatcctggtcacagagttgtttgacacagagctgatcggggagggggcgctgccctcctatgagcacgcacacaggcatctcgtggaggaaaattgtgaggccgtgccccacagagccaccgtctatgcacagctggtggagtccgggaggatgtggtcgtggaacaagctatttcccatccacgtgcagaccagcctcggagagcaggtcatcgtccctcccgttgacgtggagagctgccctggcgcaccctctgtctgtgacattcagctgaaccaggtgtcaccagccgactttacagtcctcagcgatgtgctgcccatgttcagcatagacttcagcaagcaagtcagtagctcagcagcctgccatagcaggcggtttgaacctctgacatctggccgagctcaggtggttctctcgtggtgggacattgaaatggaccctgaggggaagatcaagtgcaccatggcccccttctgggcacactcagacccagaggagatgcagtggcgggaccactggatgcagtgtgtgtacttcctgccacaagaggagcctgtggtgcagggctcagcgctctatctggtagcccaccacgatgactactgcgtatggtacagcctgcagaggaccagccctgaaaagaatgagagagtccgccagatgcgccccgtgtgtgactgccaggctcacctgctctggaaccggcctcggtttggagagatcaatgaccaggacagaactgatcggtacgtccaggctctgaggaccgtgctgaagccagacagcgtgtgcctgtgtgtcagcgatggcagcctgctctccgtgctggcccatcacctgggggtggagcaggtgtttacagtcgagagttcagcagcttctcacaaactgttgagaaaaatcttcaaggctaaccacttggaagataaaattaacatcatagagaaacggccggaattattaacaaatgaggacctacagggcagaaaggtctctctcctcctgggcgagccgttcttcactaccagcctgctgccgtggcacaacctctacttctggtacgtgcggaccgctgtggaccagcacctggggccaggtgccatggtgatgccccaggcagcctcgctgcacgctgtggttgtggagttcagggacctgtggcggatccggagcccctgtggtgactgcgaaggcttcgacgtgcacatcatggacgacatgattaagcgtgccctggacttcagggagagcagggaagctgagccccacccgctgtgggagtacccatgccgcagcctctccgagccctggcagatcctgacctttgacttccagcagccggtgcccctgcagcccctgtgtgccgagggcaccgtggagctcagaaggcccgggcagagccacgcagcggtgctatggatggagtaccacctgaccccggagtgcacgctcagcactggcctcctggagcctgcagaccccgaggggggctgctgctggaacccccactgcaagcaggccgtctacttcttcagccctgccccagatcccagagcactgctgggtggcccacggactgtcagctatgcagtggagtttcaccccgacacaggcgacatcatcatggagttcaggcatgcagataccccagactgaccactcttgagcaataaagtggcctgagggctggg

SEQ ID NO: 30440 - DNA, 2802 bp, Homo Sapiens
agcggaggcggcggcggcggcggcggcggcagagggagtttccgctttgcactccaccccggtagcagctccgcggcagggacagcttcctccggacgcttggcgggcttcgctctcgccttacgacagcccggtcggatcatgggtttgcccagggggccggagggccagggtctcccggaggtggaaacaagagaagatgaagaacaaaatgtcaagttgactgaaattctggagctcttggttgcagctgggcatttcagggcaagaattaaaggcttatcaccctttgacaaggtagtaggaggaatgacttggtgtatcaccacttgcaactttgatgtagatgttgatttgctctttcaagaaaactctacgataggtcaaaaaatagctctgtcagaaaaaattgtctcggtcctgccaaggatgaaatgcccacaccagctggagccccaccagatccaggggatggattttattcacatatttcctgttgttcagtggctggtgaaacgagctatagaaacaaaagaagagatgggtgactatatccgctcctactctgtatcccagttccagaagacttacagtctccctgaggatgatgacttcataaagagaaaagaaaaggccatcaagacagttgtggacctctcagaagtgtacaagccccgtcggaaatacaaacgccaccagggagcagaggagctacttgatgaagaatctcgaatccatgctacacttttggaatatggcaggagatatggatttagctgccagagcaaaatggagaaggctgaggacaagaaaacggcacttccagcagggctgtcagctacagaaaaagctgatgcccacgaggaagatgagcttcgagcagctgaagagcagcgtattcagtcgctgatgaccaagatgaccgctatggcaaatgaggagagccgtctcaccgcaagctccgtgggccagattgtgggactctgctctgctgagatcaagcagattgtgtccgagtatgcagagaagcagtctgagctatcagctgaagaaagtccagaaaaattaggaacctcccagctacatcgccggaaagtcatttccttgaacaaacagattgcgcaaaagaccaaacatcttgaagagctgcgagcaagtcacaccagcctacaagccagatataatgaagccaagaaaacgctgacagagctgaagacttacagtgagaaactggacaaagagcaagcagccctcgagaagatagaatccaaagctgatccaagtatcctacagaacctgagagcacttgtagccatgaatgaaaatctgaaaagtcaagaacaggaatttaaagcacattgtcgagaggagatgacacgactacagcaagaaattgaaaacctgaaagctgagagagcaccacgtggagatgaaaagaccctctccagtggagagccgcctggtaccttgacctctgcaatgactcatgacgaagacctagacagacggtataatatggagaaagagaaactttacaagatacgtttactacaggctcgaagaaatcgagaaatagcaattttgcaccgcaagattgatgaagtccctagccgtgccgagctaatacagtatcagaagagatttattgaactctaccgccagatttcagcagtgcacaaagaaaccaagcagttcttcactttatataataccctggatgataaaaaggtttatttggaaaaagagattagtctgctgaactcaattcatgagaacttctcacaggccatggcctcccctgctgcccgggaccagtttttacgtcagatggaacagattgtggaaggaattaagcaaagtagaatgaagatggaaaagaaaaagcaagagaacaaaatgagaagagaccagttgaacgaccagtacttggagctgttagaaaagcagaggctatactttaagactgtgaaagagttcaaggaggagggccgcaagaacgagatgctgctgtccaaggtgaaagcgaaggcctcctgaacatccccagccgtggctgtatgtcattgattttacttttaagcaccgtatatcacctacaagatcatgaaatggttctgaaagcgacagtagagagatgcagttgtgatgatttcaacaacctggatgttttctttctcctctttgcttccattcatctctgttggctgctgttgatggagtcagacagtaaacacgtggcttggataacacccatcatcctatgaagaatatagggagtacttgttctctgttgattcaacttttatgtctccagtaacattgcgcttatgaaggtacctgtatttgtatggactctgaataaagaagaattcatttgtttagcaagtattagttcagcaaccactgagaaataagcactgaggaagattcagagacgtgtaaaacacagttcctactgcacaagtacccagcaggtggcccagggaggcagatacagcacacttgaccgcagaactgggctatccaagatgtttttcagtaaacagaaggcatttagctgaaatgatcagcccatgtagtgttggtcacttgggcctttcacctgccatggtaccttttgttcccagctcctccaggtgccagccagcaggcttggtggtgacagcaactggaacgaaagttcagtgttgttttaatttttatacgttactcaagttgatttctcagaaaattgaaaacagaccttgtgctgaggacacgtcaataaaaattataccttcccctacaaaaaaaaaaaaaaaa

SEQ ID NO: 30441 - DNA, 4154 bp, Homo Sapiens
gaaatctcgcgagggtaggtgcgcgtcggtattttgcgggcaactagctcttccagctgctgtaaattgctgctgcgggagaaactggagccgctgtagccggcgcgcccttcttcccttactgcgaggagccaccgcctctttcgcgctccttatacacctatcactgggagcggtggcagcaacattccctggaccaaccgccgcctcttcaggcggccgctttgccggtcattcccgaagcccggcaactgagggcggccccctttccttaacagtctcctcgctacagatcgtctgctccctcagcctcgcccgagacccacttccccagtctcgcccgggtggaggtcgacgaggaggagacaagagtcacccttcctccaggcggcgccggccccctcacccgcgggtgtgtcctataaatggcgtcggaaagcgacaccgaggaattctatgatgcccctgaagatgtgcacctagggggcggctaccccgtggggtctccaggaaaagttgggctttcaacattcaaggaaacagagaacactgcatacaaagttggaaatgagtcccctgtacaagaattgaaacaagatgtgtctaaaaagattattgaaagtattattgaggagagtcagaaagtactacagcttgaagatgactctttggattccaaaggaaaagaactctctgatcaagctactgccagtcctattgtggctagaacagatctgagcaatatacccggactgttagccatagatcaagtactaccggaagaatcccaaaaggcagagagtcagaatacatttgaagagactgaattagaattaaaaaaatgctttccttctgatgaaacctgtgagaaaccagtagatgaaaccacgaagttaactcaaacaagttcaactgagcagcttaatgtgcttgaaactgaaacagaagtattgaacaaggaagcagtggaagtcaaaggaggtggtgatgttttagagcctgtgtcctcagactccttatctactaaagattttgccgctgtggaagaagtggcccctgccaaacccccaagacaccttactccagagcctgatatagtggctagtacaaagaagcctgttccagcacgcccacctcctccaactaatttcccacctcctagacccccacctccttctcgacctgctccaccaccaagaaaaaggaaaagcgaattggaatttgagactctgaaaactcctgatatagatgttcccaaagagaatattacgtctgattctctcctaaccgcaagcatggcttcagaaagtacggttaaggattctcagccttctcttgatttggcaagtgctaccagtggagataaaatagttaccgcccaggaaaatggaaaagcacctgatgggcagactgtagcaggtgaagtgatgggccctcagagacctagatccaactctgggagagagcttactgatgaggaaattttagccagtgtaatgattaagaacctggatactggagaagaaatacctttgagtcttgcagaagagaaactaccaacaggcattaatcctctcactctacacatcatgagaaggacaaaagaatatgtaagtaatgacgcggcacagtcagatgatgaagagaagttacagtctcagccaacagatactgatggtggaaggttaaaacagaaaacgactcaactaaagaagtttcttggaaaatcagtaaagagagcaaagcaccttgctgaggaatatggtgaacgtgctataaataaagttaaaagtgttagagatgaagtgtttcatactgatcaagatgatccttcatcaagtgatgatgaaggaatgccatacacaagaccagttaaattcaaagcagcacacggtttcaaaggaccttatgattttgatcagatcaaagtggtgcaagatcttagtggtgaacatatgggagctgtttggaccatgaaattttctcactgtggccgattacttgcctcagctggacaagacaatgtagtgagaatatgggctttaaaaaatgcttttgactatttcaacaatatgcgaatgaaatacaatactgaaggacgtgtgtccccatcaccctctcaggaaagtctaagttcatcaaaatcggatacagatacaggggtatgcagtggaactgatgaagaccctgatgataaaaacgcaccctttcggcaacggccattttgcaaatataaaggacatactgctgatctccttgatctttcatggtctaaaaactactttcttctttcttcttcaatggataaaacagtcagattatggcacatttctcgaagagaatgcctttgctgttttcaacatatagattttgtcactgccatagcttttcatccaagagatgacaggtattttctaagtgggtctttggatggaaagctccgcctttggaacatacctgacaaaaaagtggctttgtggaatgaagtagatggtcagacaaaattgatcacagctgcaaatttctgtcagaatggcaaatatgcagtgattgggacatatgatggcagatgtattttctatgatacagagcatttgaaataccatacacaaatacatgtccgatctactagagggcgcaacaaggttggaagaaaaattactggcattgagcctttacctggagaaaataagatattggtaacctcaaatgactccagaatcagactatatgatttgagagatttgtcactatccatgaagtataagggttacgtcaatagcagcagccagatcaaagcaagtttcagccatgattttacttacctcgttagtggttcagaagataagtatgtttatatctggagtacctaccatgacctaagcaagtttacttcagtcaggagagatcgtaatgacttctgggaaggtattaaagcccacaatgcagttgttacatcagccatctttgcaccaaacccaagtttgatgttatctttggatgtgcaatctgaaaaatcagaagggaacgagaaaagtgaagatgctgaagttttggatgccacaccttctggtattatgaagacagataacacagaagttcttctctctgctgacttcactggagcaatcaaagtgtttgttaataaaagaaaaaatgtatcttaatttgaaatggcatttaaaataaacatatcagtaagtttctatatgtatcaaaactgaaaaaatagtgttccaggctaacatacttttttaatttttattgaaagttgttcaaatataatatattttttgagaggcagtgttaatgatctaggaaaccctgggctgatagagtagaaaggaatatggctagaataacattgccaaacattaggctttatgttttgttatgtttgtgttttcgttgtataattatgaacatgcacaagtttctgcatgaaaagatattaatatattaatcacatgtatgtgccttttggttacatgcattaaatctaacagagttaaattatttcagtggctcttttggcctcttactaggggggatagtcttgtttctagcttaaacaattttttttttgcacaaaatttcatttttaataaaagtggtatcttttgactgagttattgttttgaaaatggtatataggtttccagtaggtcaacaaccatatgtaaatggtttttataaatttctcaatttggggacaagatttttttgtggtctaaattgtgggcttaagattcttttctttatatgtgtacatataatttttttttctttgccacactggagcacaatgtttctatgtaaagaattattttcattctttatccatgagcaccaggctttgctcacttaaaaaaaaattaagccacattaaggagtgagtcttcttttttacaataatgtaaaaattaaactgtttacatttttttaaagcattgtagtttttaaaaattaagctgttttgttttgtgttgttgaatttgaaagcctttgtaaatatcaatataatgtaccaatgaaataacatctggggcaatgaaaccctgatcatgttgttgatggttagcatatgtttctgaaaattaaatatgtattattaaaagttggtctccaacacttgtttaaaaaaaaaaaaaaaa

SEQ ID NO: 30442 - DNA, 3593 bp, Homo Sapiens
ggctcctcagcttccagccaaaatggcggagaacagcgagagtctgggcaccgtccccgagcacgagcggatcttgcaggagatcgagagcaccgacaccgcctgtgtggggcccaccctccggtctgtgtatgatgaccaaccaaatgcgcacaagaagtttatggaaaagttagatgcttgtatccgtaatcatgacaaggaaattgaaaagatgtgtaattttcatcatcagggttttgtagatgctattacagaactccttaaagtaaggactgatgcagaaaaactgaaggtgcaagttactgataccaaccgaaggtttcaagatgctggaaaagaggtgatagtccacacagaagatatcattcgatgtagaattcagcagagaaatattacaactgtagtagaaaaattgcagttatgccttcctgtgctagaaatgtacagtaagctgaaagaacagatgagtgccaaaaggtactattctgccctaaaaactatggaacaattagagaatgtgtactttccctgggttagtcaataccggttttgtcagctcatgatagaaaatcttcccaaactccgtgaggatattaaagaaatctccatgtctgatctcaaagactttttggaaagtattcgaaaacattctgacaaaataggtgaaacagcaatgaaacaggcacagcatcagaaaaccttcagtgtttctctgcagaaacaaaataaaatgaaatttgggaaaaatatgtatataaatcgtgatagaattccagaggaaaggaatgaaactgtattgaaacattcacttgaagaagaggatgagaatgaagaagagatcttaactgttcaggatcttgttgatttttcccctgtttatcgatgtttgcacatttattctgttttgggtgacgaggaaacatttgaaaactattatcgaaaacaaagaaagaaacaagcaagactggtattgcaaccccagtcgaatatgcatgaaacagttgatggctatagaagatatttcactcaaattgtagggttctttgtggtagaagatcacattttacatgtgacccaaggattagtaaccagggcatacactgatgaactttggaacatggccctctcaaagataattgctgtccttagagctcattcatcctattgcactgatcctgatcttgttctggagctgaagaatcttactgtaatatttgcagatactttacagggttatggttttccagtgaaccgactttttgaccttttatttgaaataagagaccaatacaatgaaacactgcttaagaaatgggctggagttttcagggacatttttgaagaagataattacagccccatccctgttgtcaatgaagaagaatataaaattgtcatcagcaaatttccctttcaagatccagaccttgaaaagcagtctttcccaaagaaattccccatgtctcagtcagtgcctcatatttacattcaagttaaagaatttatttatgccagccttaaattttcagagtcactacaccggagctcaacagaaatagacgatatgcttagaaaatcaacaaatctgctgctgaccagaactttgagtagctgtttactgaaccttattagaaaacctcatataggtttgacagagctggtacaaatcatcataaacacaacacacctggagcaagcttgtaaatatcttgaggactttataactaacattacaaatatttcccaagaaactgttcatactacaagactttatggactttctactttcaaggatgctcgacatgcagcagaaggagaaatatataccaaactgaatcaaaaaattgatgaatttgttcagcttgctgattatgactggacaatgtctgagccagatggaagagctagtggttatttaatggaccttataaattttttgagaagcatctttcaagtgtttactcatttgcctgggaaagttgctcagacagcttgcatgtcagcctgccagcatctgtcaacatccttaatgcagatgctactggacagtgagttaaaacaaataagcatgggagctgttcagcagtttaacttagatgtcatacagtgtgaattgtttgccagctctgagcctgtgccaggattccagggggataccctgcagctagcattcattgacctcagacaactccttgacctgtttatggtttgggattggtctacttacctagctgattatgggcagccagcttctaagtaccttcgggtgaatccaaacacagcccttactcttttggagaagatgaaggatactagcaaaaagaacaatatatttgctcagttcaggaagaatgatcgagacaaacagaagttgatagagacagtcgtgaaacagctgagaagtttggtgaatggtatgtcccagcacatgtagacctcacatggcttgcactcagtgacaccaaatccatgattcaatgttgatcttgagcaagtattggtcatgatacagtaatttgtttacagaatccaaaaatacaatagagaagatacatgagggcttaaacaagaaatagtaataaatatcatttgtatggatttttaaataatcgaatactattttatatatggaaaaaaatgaccattttttcacttttaggggaaaatgcaaaagtgtaatacataaattgtcacaaattatacatgaaattgattacaaatacatttgaaaaacatatgcctctactcataagtatttttttctatttagacttgaatgataatctgttttttgatcagtatatggctttggaattcaatcatgtctgatatggtagtatttcactaccattttctgacttttagcttttattttcacctcaatgtgatttaagcagaccaaaatttctaattctgctaattctgaaggggaaatagacaaatcttaaaagctgcctgaaatcaaacttgatttaactcagtaagaatgtgaattatttgttctacttgggtggtttaatttaatcgttctgaatatgaacaaaaggttttggattttctaaagatgcagtgttgtttctgttcatcagggttaatatttctaactatattgcttgtaggtgaccccattctggatttgtttggtttggtttggttccagttaaaagagaggacaggaactaaatggggctaaccacttcaggtgcagcttgtgcgagggtagatggttcctgcacacagaagttaccacaggggtcaggttactttcttcaaatagcagatttcagtactttatcctcattgtggaaacaagccaaaccaaatgaactctggaaaacctaaaacaaatgtacattttcctttgtgtatgtttccgtggtccaaatggcaatataaatccagtctttattctccctttgttgtatttatgctgaatcttccctttgccttttcaggatttaggcctgtaagaaactatgcctgattctgtaaaataagtgtaaagaattatatgtacatctctggattttgtgatgaaatattaaaaatattgagcaagttgttgaaaatgcaaaaaaaaaaaaaaaaaa

SEQ ID NO: 30443 - DNA, 3872 bp, Homo Sapiens
gcggccgcgaattcggcacgagcagcaggacaaagtgctcgggacaaggacatagggctgagagtagccatgggctctggaggagacagcctcctggggggcaggggttccctgcctctgctgctcctgctcatcatgggaggcatggctcaggactccccgccccagatcctagtccacccccaggaccagctgttccagggccctggccctgccaggatgagctgccaagcctcaggccagccacctcccaccatccgctggttgctgaatgggcagcccctgagcatggtgcccccagacccacaccacctcctgcctgatgggacccttctgctgctacagccccctgcccggggacatgcccacgatggccaggccctgtccacagacctgggtgtctacacatgtgaggccagcaaccggcttggcacggcagtcagcagaggcgctcggctgtctgtggctgtcctccgggaggatttccagatccagcctcgggacatggtggctgtggtgggtgagcagtttactctggaatgtgggccgccctggggccacccagagcccacagtctcatggtggaaagatgggaaacccctggccctccagcccggaaggcacacagtgtccggggggtccctgctgatggcaagagcagagaagagtgacgaagggacctacatgtgtgtggccaccaacagcgcaggacatagggagagccgcgcagcccgggtttccatccaggagccccaggactacacggagcctgtggagcttctggctgtgcgaattcagctggaaaatgtgacactgctgaacccggatcctgcagagggccccaagcctagaccggcggtgtggctcagctggaaggtcagtggccctgctgcgcctgcccaatcttacacggccttgttcaggacccagactgccccgggaggccagggagctccgtgggcagaggagctgctggccggctggcagagcgcagagcttggaggcctccactggggccaagactacgagttcaaagtgagaccatcctctggccgggctcgaggccctgacagcaacgtgctgctcctgaggctgccggaaaaagtgcccagtgccccacctcaggaagtgactctaaagcctggcaatggcactgtctttgtgagctgggtcccaccacctgctgaaaaccacaatggcatcatccgtggctaccaggtctggagcctgggcaacacatcactgccaccagccaactggactgtagttggtgagcagacccagctggaaatcgccacccatatgccaggctcctactgcgtgcaagtggctgcagtcactggtgctggagctggggagcccagtagacctgtctgcctccttttagagcaggccatggagcgagccacccaagaacccagtgagcatggtccctggaccctggagcagctgagggctaccttgaagcggcctgaggtcattgccacctgcggtgttgcactctggctgctgcttctgggcaccgccgtgtgtatccaccgccggcgccgagctagggtgcacctgggcccaggtctgtacagatataccagtgaggatgccatcctaaaacacaggatggatcacagtgactcccagtggttggcagacacttggcgttccacctctggctctcgggacctgagcagcagcagcagcctcagcagtcggctgggggcggatgcccgggacccactagactgtcgtcgctccttgctctcctgggactcccgaagccccggcgtgcccctgcttccagacaccagcactttttatggctccctcatcgctgagctgccctccagtaccccagccaggccaagtccccaggtcccagctgtcaggcgcctcccaccccagctggcccagctctccagcccctgttccagctcagacagcctctgcagccgcaggggactctcttctccccgcttgtctctggcccctgcagaggcttggaaggccaaaaagaagcaggagctgcagcatgccaacagttccccactgctccggggcagccactccttggagctccgggcctgtgagttaggaaatagaggttccaagaacctttcccaaagcccaggagctgtgccccaagctctggttgcctggcgggccctgggaccgaaactcctcagctcctcaaatgagctggttactcgtcatctccctccagcacccctctttcctcatgaaactcccccaactcagagtcaacagacccagcctccggtggcaccacaggctccctcctccatcctgctgccagcagcccccatccccatccttagcccctgcagtccccctagcccccaggcctcttccctctctggccccagcccagcttccagtcgcctgtccagctcctcactgtcatccctgggggaggatcaagacagcgtgctgacccctgaggaggtagccctgtgcttggaactcagtgagggtgaggagactcccaggaacagcgtctctcccatgccaagggctccttcaccccccaccacctatgggtacatcagcgtcccaacagcctcagagttcacggacatgggcaggactggaggaggggtggggcccaaggggggagtcttgctgtgcccacctcggccctgcctcacccccacccccagcgagggctccttagccaatggttggggctcagcctctgaggacaatgccgccagcgccagagccagccttgtcagctcctccgatggctccttcctcgctgatgctcactttgcccgggccctggcagtggctgtggatagctttggtttcggtctagagcccagggaggcagactgcgtcttcatagatgcctcatcacctccctccccacgggatgagatcttcctgacccccaacctctccctgcccctgtgggagtggaggccagactggttggaagacatggaggtcagccacacccagcggctgggaagggggatgcctccctggccccctgactctcagatctcttcccagagaagtcagctccactgtcgtatgcccaaggctggtgcttctcctgtagattactcctgaaccgtgtccctgagacttcccagacgggaatcagaaccacttctcctgtccacccacaagacctgggctgtggtgtgtgggtcttggcctgtgtttctctgcagctggggtccaccttcccaagcctccagagagttctccctccacgattgtgaaaacaaatgaaaacaaaattagagcaaagctgacctggagccctcagggagcaaaacatcatctccacctgactcctagccactgctttctcctctgtgccatccactcccaccaccaggttgttttggcctgaggagcagccctgcctgctgctcttcccccaccatttggatcacaggaagtggaggagccagaggtgcctttgtggaggacagcagtggctgctgggagagggctgtggaggaaggagcttctcggagccccctctcagccttacctgggcccctcctctagagaagagctcaactctctcccaacctcaccatggaaagaaaataattatgaatgccactgaggcactgaggccctacctcatgccaaacaaagggttcaaggctgggtctagcgaggatgctgaaggaagggaggtatgagaccgtaggtcaaaagcaccatcctcgtactgttgtcactatgagcttaagaaatttgataccataaaatggtaaagacttgaaaaaaaaaaaaaaaaaaaaaaaaaaaaaaaaaaaaaaaaaaaaaaaaaaaaaaaaaaaaaaaaaaaaaaaaaaaaaaaaaaaaaaaaaaaaaaaaaaaaaaaaaaa

SEQ ID NO: 30444 - DNA, 2893 bp, Homo Sapiens
aagaaacttctctcctcttttctcacaatgtgcgctcacctagacggccgggcagttaggatcgtctattggatgtgaaaccagagatgcccgccaacctggaatagagaggaagagagcaagcagatttgaacctatctgctttcaagctggtcatcatgatgaaacttagacacaaaaataaaaagccaggtgaaggttccaagggccacaagaagataagttggccctaccctcagcctgcaaagcaaaatgggaagaaagcaacctccaaagtgccctctgcacctcattttgttcaccccaatgatcatgccaatcgagaggctgaattaaagaagaagtgggttgaggagatgagggagaagcagcaagccgcccgggagcaagaaagacaaaaacgcaggaccattgagagctactgtcaggatgtcctaagacgccaggaggagtttgagcataaggaggaagttttgcaggaattaaatatgtttcctcagctggatgacgaggccacgaggaaggcttattacaaggagttccgtaaggtggtggaatactctgatgtgattctggaagtcctggatgccagagacccattaggctgccgctgcttccaaatggaggaggctgtcctgcgagcacaaggcaacaagaagctggtcctggtcttgaacaagattgacctggtccccaaggaggttgtggagaaatggctggattaccttcggaatgagttgccaaccgtggctttcaaggccagtacccagcatcaggtcaaaaacctgaatcgttgcagtgtgccagtagatcaggcctctgagtcactgctgaaaagcaaagcctgctttggagctgaaaacctcatgagggttctggggaactattgccgccttggtgaagtgcgcacccacattcgtgtgggtgttgtgggtcttcccaatgttgggaagagcagcctgatcaatagcctgaagcgcagccgcgcatgcagcgtgggagctgttcctggaattaccaaattcatgcaggaggtctacctggacaagttcatccggctcttggatgctccaggcattgtcccagggcccaactcagaggtgggcaccatcctgcgtaactgcgtccacgtgcagaagctggcagaccctgtgaccccagtggagaccatcctgcagcgctgcaacctggaggagatttccaactattatggcgtctctgggttccagaccactgagcactttctgacggcagtggcccaccgtttggggaagaagaagaagggaggcttatatagtcaggaacaggcggccaaagctgtcctagctgactgggtgagcgggaagatcagcttctatataccaccaccagccactcacactctgcccacccatctcagtgctgagatcgttaaggaaatgaccgaggtctttgacatcgaggatactgagcaggccaatgaagacaccatggaatgcttggccaccggagaatctgatgagctgttgggtgacacggacccacttgaaatggagatcaagttgctccattctccgatgacgaaaatagcagatgccattgaaaataaaaccaccgtgtataagattggagatctcactgggtattgcaccaatccgaaccgtcatcagatggggtgggctaaacgcaatgtggaccaccgccctaagagcaacagtatggtggatgtctgctcagtggaccgccgctcagtgctgcagaggatcatggagacggaccccctgcaacagggccaggctctggcatctgccctgaaaaataagaagaagatgcagaaacgtgcagataaaatcgccagcaagctgtctgattccatgatgtctgctctcgacctctctggcaatgctgatgatggtgttggtgactaatcgactgatctcacttcccttccgctccaagcaccagttccggtggtacgggggaataccagtgaaatagtttggttctccctgaagcatctgcatattgaaagaacgctttccccactgtgtgtcttctccccctcctcgggtgatccgctcgcttcggcctcccggggtgctgggattataggcgtgagccactgtgcccagcctcacagctgcatcttaaccttacctttgcctctgcctctcaagctggtacctcctaatttacatcctaagagtggaaccatgtgacaaggactggagtgccattggctgtggactgttcaggcagggaagtacgagaccactcttgtattcaggggcaaccaaaggagagaattacgtacttgttgagtacaaactgcaccaagccctggagacccattaccaccgttaaccctcaatacagctctgctagtaagggattcgtctccccaaatgaaaaaaaaaagtaatctcagaatgttggccgggcatggtggctcacacctgtggtctcagcctcccgagtagctgggattatgggcgcccgccaccacgcccagctaatttttgtatttttggtagagatggggtttcactgttttggccaggctggtctcgaactcctgacctcatgatcctcctgcctcggcctcccaaagtgctgggattataggcatgaaccaccgtgtccggccatatattttcgtcttttgaagactgttatatacatgaaattatatggtatgtagcattttgagagcgacttcttttgctatgagtaatacatttgagattcatccatatttctcagtatattaatagttcttatttctgagtcactccattgtgtggatttactactgtttgttccccagttgaaggatgtttaggatctttgcagttttggacaattacaagtaaagctgctataaacatttgtatgcaaaaaaaaaaaaaaaaaa

SEQ ID NO: 30445 - DNA, 2650 bp, Homo Sapiens
tggggtctacggcctaggggccggggaagtttgcgccgccgcgaccagtgctgcgatcccgagccgggctccagccccgaggaccaggggtcgggcgggcctgcctacggaaccccgcgggccagcagcagtcgtctcgcgtcctcctgcttggaaaagtgtttaagcttctaaaatgtcatctatcaagcacctggtttatgcagttattcgtttcttacgggaacaaagtcagatggacacttacacctcggatgaacaagaaagtttggaagttgcaattcagtgcttggagacagtttttaagatcagcccagaagatacacacctagcagtttcacagcctttgacagaaatgtttaccagttccttctgtaagaatgacgttctgcccctttcaaactcagtgcctgaagatgtgggaaaagctgaccaattaaaagatgaaggcaataaccacatgaaagaagaaaattatgctgctgcagtggattgttacacacaggcaatagaattggatcccaataatgcagtttactattgcaacagggctgctgctcagagcaaattaggtcactacacagatgcgataaaggattgtgaaaaagcaatagcaattgattcaaagtacagcaaggcctatgggagaatggggctggccctcactgccttgaataaatttgaagaagcagttacaagttatcaaaaggcattagatcttgaccctgaaaatgattcctataagtcaaatctgaaaatagcagaacagaagttaagagaggtatccagtcctacaggaactggactgagctttgacatggctagcttgataaataatccagccttcattagtatggcggcaagtttaatgcagaaccctcaagttcaacagctaatgtcaggaatgatgacaaatgccattgggggacctgctgctggagttgggggcctaactgacctgtcaagcctcatccaagcgggacagcagtttgctcagcagatacagcaacaaaatcctgaacttatagagcaactgagaaatcacatccggagcagatcattcagcagcagcgctgaagagcattcctgatttaaccaggggctcaagcccaagatacaaatggtttatggctatgaatgaagtatttgttgtagatagtaccccctccctccttcaaaaaaccaaacaccatatctgatgtgtgaaaataatggaggaaaacctcttgtgtatattcttaaagaataaatctgtttagacaataggtttatcacaaacaaactcaaaacataacatgactccttttgaaatgatcactagccatgttacgtgccaatatagcactgggataaggttccattttcaaacttctatcatatttgtatattagacttaatagcaaagtatatttattgaactctagtagggctatttgttggtaagctctttagctccaatttcccttaagcaaagttttttgagaagggaaatgacccaaaggaaaggtttcctatgctggttgagaagaagtgtacttgccactgagcagtatgtcaggaaagaaggaatattatctaggtttagctttgataagtgctattagtaatgaatatataacatgggaaccaatgttatctttaatgttgcttgttctggtgaacagagaatcttaagagctgttagaaagtagcacttgatgcaagggatgttttgaaaagaaaaaattggtaatgcgaatgtatagaaagtaaaggtaggatgctcaggttttctgcatagttcttaactaatcttgtctgcagtttggtattgataatattagcatggccacttatgctaaatacacaataagatacatttagaaatccttaatgtactggttaggtcagtggtacaactgtttgacttaattatcacaatttccccaatggtaaccttaccttggaaactatcaaatataaatatactttaactaagccagtgacctggtcctaagttaaggattttctaaatggtatttaattctgtgcccataaacactgattttttttaaaaagaaaacttagtaattatttgatggataacaaaaagcatctatcactaacattgcttgttcatgtaatcttctgtgataatttggcttggcatgccagtcttataattaacataatttaaatttgatgcaatttaaatataacaggagacttaaaatattttattataaattagatgccatattagttagtggagaaaaggggcattaggtattaattgcatgggtctaactacattgatgatgagagtttaattccaactagagtatattttttgtttattaataatgaaattggtgctgacatgtaatgacttcacaagttttacgagggaaaactgaaaaaggaagtaatataaattttgtggggtttttttgagatggagtcttgctcttttgccaggctagagtggtgttgcagtgtcagctcactgcaacctccacctcctggattcgagtgattctcgagccttaagctcccaggtagctgggattacgggcgcccaccaccatgcccagctaatttttttttttttttttcttgagatggagtctctctgcactccagcctgggtgacagagcaagactccatttc

SEQ ID NO: 30446 - DNA, 3129 bp, Homo Sapiens
agaattatggcgacctccgcgacgtcgccgcacgcgcctggttttccagctgagggtagatgcggttactatgtggaaaagaagaaacggttctgcaggatggtggtggccgcagggaaaagattttgtggtgaacacgctggagccatggaggaagaagatgctcggaaaagaatcctgtgtcctttagatccaaaacacacagtatatgaagatcaactagcaaagcatttgaaaaaatgtaactcaagagagaaaccaaaacctgatttctatattcaagatattaatgcaggcttaagagatgaaacagaaatacctgaacaattagttccaatttcttctctatctgaagagcagttggaaaagttaattaagaaattgagaaaagcaagtgaaggcttgaattctacacttaaagatcatattatgtcccatccagcattacacgatgcacttaatgaccctaaaaatggcgattctgcaaccaagcacctgaaacagcaggcttctattttaggtaacattgaaaatttaaagttacttggtccaagaagatgctttgttgagtttggagcgggaaagggaaaattatctcattgggttgatattgccttaaaagatgctgaaaaagttcacttcatcctagtggaaaaggtgaccacaagattcaaggtggatggaaaacacagaaagaaaaattcagtgtttgaaagacttcaaattgatattcaacacttgtgtttgaacaagattcctgtgctaagagaagaaaaactacctgtggtaggaattggaaagcatctgtgtggtatggcaacagatcttgcattacgatgtttggttgaaacctatgctgccagttttgaggaaaggaatgaagaacctttagccaaacgcataaagaatgataaaacagaaaaagaaatttacactttggccaaggaaggaaatgaaaaaaatgtcccagagaagtggaaccctgtggctggcattgttattgcactctgttgtcaccacaggtgtgattggagacattatgtgggcaaagaatatttcagggctctaggccttggagcagtggaattccattatttccagcgaatgagtagttgggcaacttgtgggatgcggaaaacatctttggaaacctcaaatagtaccacaaagaggcaagataatcagaatgatgatagtgaagagcatgatgatggaggatacagaatcacagatgatggcgctgattgtttgcctgggcttcttagtgttgaagaaaagaagaaaatagggcatctttgtaaattgctgattgaccaaggtcgaatccagtatttgcagcagaagggattcagtcctgctttgcagtactatacagaccctctggtgtctttggaaaatgttttgttaactgctttaccaaatcattcttcatcaccagaaacaactgcttaatggaaaagaaatttgagcatcatctgtcttccaccaaaaaaaattttttaattatatttttatatcaaaaaaatatatactttaaatagcaaataatatgaactttaaaaaatgctgtggcctcattaaactttggtaatagcttttctttttacttcagaaatccaaacattagagaattcaccaaagtaatcctctttagaagggcatcttgaattatattatccatccgtatttatggagattggtaaagtagttgaaccgttgacttggtgatctgaaacatacataacatgtcaacacataattagcgtatttctgtttgtattaattttggaaatttatcttcctttgattttatttaatattttttatttcttaagttcaagaggtagtgattgattgtaacaagggccaatctgagaatttgacttatatgtggacatttttccctacagatctggaaagcacaattgtgattttctcaaatgcagacaattcagagatattcacaattaataaacacaattaattaatgaagtcaccttcaaatttccagagccatacatgtatatattgtcagaatctgtccatgacaaacacaaaactgaagagctgttttcaaagaaaaaagattatttcacttaattattttgttggataattgtctagttagaacttccaaaaagatacttacaaacataattcacaaatttgaaataatttctgaagttgattagctatctcatatcttttatcaggtcattttttatatatgtaggcacaaacaataagtatgttctcttctgtttgggaaaataatttggaataaaatagaaattagataatgaaaccaaaaaccttctcaaatttaggccttatttaactcatgactggtttctatgcacaagaaaatactaaaccaaatatatggtaggactgttattctcttctgcatcttatccctattttgtttctgcctttatttgtaaaaattgtcttaattgatggtacatttgccaagacaaaggttcagaattactaattttagatattatgatattctgaaataactatttttatcctgtagttctatgattatatgatttgtaaataagaagcctaaccaatttaaaattcctgactttagtctcatatatcttgtcagactgtctcggttcaaattccaaacctaccatcttcagttgtgcgaccttgggcatgctacctaatctctttgtgcctcaatttcctccttttaaaatggggatgatgatgataacaataatacctacctcacaaggttgttgtgagcatcaaatgagataacacaagtaaaatgcatagaacagttccaagcacagagtaattcaataaatattaactagtaatagtagtggtagtaactcgtgaatctttttaataacataataggctttgattttattatctctttaagttgttaacttttttcccttgttataagttttatgtcaagtaaggtagtttgtttaagttagttacccatgtccccaatcaagggaacctaaatgaagatatatcattaaataattaacctttttttattgtgtcaagcaatactaatttgtgtcataaaatttgttttgcatcattcaacaatttatgcccagaaataaacaatattctacaacaggc

SEQ ID NO: 30447 - DNA, 4126 bp, Homo Sapiens; identical to SEQ ID NO: 27459

SEQ ID NO: 30448 - DNA, 3330 bp, Homo Sapiens; identical to SEQ ID NO: 27876

SEQ ID NO: 30449 - DNA, 2501 bp, Homo Sapiens
gttgctggctttttcaggagctgctcgctcgcagccagagacgctgctttttttttccgggttcggagccgttccggatgctttaggctgccggatgtctgatctccgaataactgaggcgtttctgtacatggattatctgtgttttagagcactttgctgcaagggaccaccacctgcacgaccagaatatgacctggtttgcataggcctcacaggttctggcaaaaccagtctgttgtccaaactctgcagtgaaagccccgataacgtcgtgtcgaccacaggttttagtattaaagcagtgccattccagaatgccatcttgaatgtaaaagaacttggaggggctgataacatccggaaatactggagccgctactaccaaggatctcaaggggtaatatttgtattagacagtgcctcttcagaggatgatttagaagctgctagaaatgagctgcactcagctcttcagcatccacagttatgcactttaccctttttaatattggccaatcatcaagacaagccagcagctcgctcagtacaagagatcaaaaaatattttgaacttgaaccacttgcacgtggaaaacgctggattctacagccctgctcactggatgacatggatgcactgaaagacagcttctctcagctgattaatttgttagaagaaaaagaccatgaagctgtaagaatgtgaaatctggcaaagaaaacaggctcccaaaaggccttgaacctatcatgttagtttctcattttaattttattttggtatcaagactatattggcttcagtatctattttcctctggtcatttcagactctcatctctctattaaagtgaatattctgtagatcagatgaattatcatcggcattaacgtcaagtacacactactgagagagaatttattctctgtttaccactaattatcttccccgcatgtctcttccttctgttgttctaagcatctcttctatactctgtgctgaaacggatggaattcatggcttatggaaatcaaatcccttttgaaggactcagaaagactcacaagaccttgatcattttctctgggtttgggagtggagtattatgtgactgggactccacaaaatatttatattattttcaagacctattgggggttttgttttattttatctaatttttttttttttttggtatactgagcttatagactatgagagaaaagtgagcaccaaaaacttcattaatcaccttatcaggaaggaatatcctgccatagtaaaattggctctgaagagcttagaggcaagttacacaatgttttcttgattacatctgaagtctcttctcttttaagagcaaagacattgtttcagtttctgagagtggttagaggaaatttaggtacaatgcatgcatcacagactgtatttgattgattcgagtcttcaaatattgtttaatggaatgatgagcctgcataaagtgaagctgcaatgtaacataggtatctttttctaaaaacttcaagtgtttgattaaaatagagaaaataatttttaaaataatagataaaaattttaaaaacagccagaaaaagtataatttatactggttagggtttaagatggcatggatttgacaaagataacaaagacagaatcatctatatattcattcattacgtgttactgtagtttattggaatctgttaatgccttcctctagtagttaaaggtttatcagtatttctattataaacctctattttcaggggtttcaatgtgcccttaaaattgtgctggggctgcagcaaataaataatattgggactcatattcagtctttggaactagttttttttccatttaatttaaatgacaaaattgcatagggataaatgtacagttttactaaggtttagcacctttgatcttttctaaatcaggaaaaaaatctatgcatattgaggttcacagatgaaatattctttggcatactttgtagactttgaccacttaaaatactaagtggccaaatgataaaaaaaactgctccctgcacatgagtgtaaaaacatgtttgtaattttaagtaaaatggactgatacccaaataccacagactcacactatattacagaatgatgtaatacctggtaattctccagaagatagacttcagacccttaatgccatttaaatatagtttttgtggtttaatcttatgagtagattgtaatgaaatcattacctttgaaacatcaaacacttctttaagctttttttttttaatgtcatgaatcaggaaggatacatagtgattcgtatacaattttgtctgcagcattcttgaatatttttaacactgtgtaatccctgagcagcacaaaacttttattccgatgaccagttacacaattcctgtttttattttgtcctgttgtgctcatcttctatgaaaaataaatgattattaggcaaaaaaaaaaaaaaa

SEQ ID NO: 30450 - DNA, 2164 bp, Homo Sapiens; identical to SEQ ID NO: 25161

SEQ ID NO: 30451 - DNA, 7836 bp, Homo Sapiens
gtcgccgcggtgctgctgctcagtgggagcgggtcttcgcaactgtctccgcgtggcgcgcgcctctagccgcccttcccctggcggctacggccggagggagcggaggcgagcgggagtcgggctccatggagagcggcggacaactgggcagaggcggagctttcatctcggcaccctggttccagtgacccgcgctagcgtcccgtcccgcccgcgtcggagcggccgccggccccgggactgaccggcctcgccgcacctcccgcaccgactagcgctcccgggcgctcctgcgcccgactcgccctcgcccccactccccggcggggtggcggcggccgggcccccacggcggcggccggagcagcagcagcagcagcaggagcccgcctctatgatgaagttcaagcccaaccagacgcggacctacgaccgcgagggcttcaagaagcgggcggcgtgcctgtgcttccggagcgagcaggaggacgaggtgctgctggtgagtagcagccggtacccagaccagtggattgtcccaggaggaggaatggaacccgaggaggaacctggcggtgctgccgtgagggaagtttatgaggaggctggagtcaaaggaaaactaggcagacttctgggcatatttgagaaccaagaccgaaagcacagaacatatgtttatgttctaacagtcactgaaatattagaagattgggaagattctgttaatattggaaggaagagagagtggttcaaagtagaagatgctatcaaagttctccagtgtcataaacctgtacatgcagagtatctggaaaagctaaagctgggttgttccccagccaatggaaattctacagtcccttcccttccggataataatgccttgtttgtaaccgctgcacagacctctgggttgccatctagtgtaagatagagagaactgggtaggcctctcccaccatgtgcagtctcatggggagaggcttctttcgtttcctcgtcaaacatctgattgacgcttgcaaactgtctgaatttgccatgcaaggttttcaaacaatttgcatgtttttcagatgctttcaaatctttttttaaaaaaatagtgtaaaatattttaataagccaaagccatgtggaatttttgtttagatgccttaactgtgccacaccccacaaccccctatattattttggttgtctatttctcacagcatattttcagttttttgtccatttgacatcagtctgtggtttattttgtcatcagattacttgtgggtatacctaccccaaaattgttttctcattcacagcattagcatattcagcaaatccatctgtggtgggaattaaaaatattattggtattaaagaaatccattcaccccaaaacttgttttacaggattacaattttaattcaaaatttccagatttgggctatttctgtatgatccaataacttattttgtcacagggcttaatttgccatttttggggatttgtcgactcattttgtctgaattttcacaactggtattatgtcactagctacctgatacggctatttcccttataactcaatagtaccttaacacaaagtataactctgtagagttggtgaatattttagggaaatattagcaaaatgcatgtagtaaagacatcttatgaaaactgtattcatggaatttgatttagcatgctcagttgccagttcccattatcgatactctttctttgcagaataccttagaaccgttatttccctcagtgtagattgctcttaaaatgtattcagttatttagtggcccccacaggagtggagtcttgaaatctaattctaaatgccagtcagtgatgatcgcatcacagttgagtgaaatggccttcctgttcagctgttagagactgaagattgttagggcaccttagaatgtctcatcttttctaggttgtcaacaggtactatttgtcacataactaactttcgaggcactggaacatacctgaactaagaattaaatcttttactttatactcacttaaaatcaagaatcccatctaaaacacataggtaccttatctgaaactcttgcacttccccaaccagggcagaaatgaggtgggagaagtttgactaaaatgagggatgggggaaagtaaaagatgtttttttttttttgagactcgctttgtcacccaggctggagtgcaatggcacaatctcaactcaccgcaacctccgcctcccgggttcaagcgattctcctgcctcagcctcccgagtagttgggattacaggcgcctgcctccatgcctggctaattttgtatttttagtagagacagggtttcttcatgttggtcaggctggtctcaaactcctaacctcgtgatccgcctgcctcgacctcccaaagtgctgggattacaggcatgagccaccatgcccagccaaagatcatttttttatatagacttcagccctttgtaaatattgtaactggggagtatagagtagaaaaaaagtatagttaaaacatttgttctacaaattaacctttaaaaatataattactgctaaaaatagagtgctgttacacttaaggaaaattagtgccattttggaaatgagatcttgtgccataaatacagctgaactgaatataaatgttcacaaattaatgctgtcaaaggaatgagtaaagcagaaaaacttttaaccagcaacatttcaagtacgtagtgtgatcaaacatgatcatccagaatttttatatttttttctttgtacagaggttacatattctgggtgttcttttataaaggaaacattttaaatcccacaaattgacactttctatcttcaatggactaagatttttttggtcagtaatctctgaaatttccttaaattatatacttaacatagcagagaaactggattgtttttgtatataagactgcttccacctgaaatgctgtcataagtactgggggggtgggggagtgcccatcttgtacatgatattcttagaggtaataaggtaatgatgcatgaatttattttataaactcttggactatgtatttgacatgtaaaatatgtacagtattaacgtcaaccatctctttaaagttagcctataaatattgttgtataattttctttggtcagaaacacttggactgaatagtgacactcggtaaggattttcagtgccatttagcaaaacgtctttagtctatgcaactagcaaaaatctgcataatgcaacaacacagttttcacacttcaaattttacatgaggggttcttcacgattctcctggaacccagtctagcaaaatgagaggaaaggccctagggagatttatttctgttaaatagttaactctgctgagtatgacaaatagtgtctactatctcaaccctccaaaatttgcagagtgttgggactgtcatttgtgattttttttttttttttttggtggggtagttgaataaaattgggcagctaaatttttcagttccatgtgcctcccaaataaaaaacagaaaataagtagtttttgtgaattgacttgcagacaaagtagaaactgtgctgcatgatgttattttgtaaacagatgacattttctgaccaggcacatgccatccaattttctgtcaatcacactgttgtataaagcagcagaactgaaggggaaaaatgattgttgtatacactgaattgctttgcatggtctcatttgagataattgatgtaagaatcctgacttttttatatttggaaacatcaaataaaaatggaaaaaatgatcatggctttaaaaaaaaaacaaaaacacacacacatgaactcagatttgcaaaccaggtttctgaaactttgggtaaggtgtatgcttttaactttgaaatgtataaacacccagcggaaacgtatacctttcagtgcatagtgcattgtgtgcttaccctgggttgtttaaacttgtgttcaaatattccccctccaagtgaaagcctgtcgggaattccacagtaacacctttactgttctcccattgatgatcatatacgttacctcttcctagcggtacatttgtatgatccttactactggaattaccgggttaaaaggaaatgcttaccactaagatgtcagtattctcctcatggatattttcagtctcaatgttgccagtctaatagtatagtatgtggttgctttactgctgttctccccacccccgtggagttgtgtcattattttaatgaatgtgagctcttgacttactctagaattctaatacagatactttctgcactagtatcacttttattattgcagttccatttaaaagcataactggctaagtcaccgccccacccgccgcattacatttcctaaaacatactgctgccaaagaccaactgtagaatccttaagtcctgttcaagtgtcacttcattttttattaggggtttcttagttggagggcatgagaaacttggccctttccaatgttgtcttcacattggagtataagaattctctataggactctttaatttttttttttttttggtagagatggggtcttgctgtgttgcccaggctggtctcaaactcctaggcttaagcagtcctccagcctcagccttctcaaagtgctaggatgattggcatgagccacctcgtctggcctgcaggtctttttaagcatttgctgttcaataataagcatcttctttatgcctagtatttgtgataagagcacaaaacaattttctaatctcaaagagcttatattctagtggggtagagataagtgatttatcttggtgtagttttggcttttttgtttgtttttttgagacagcatctcacactgtcgcccaggctggagtgcagtggtgcaatctcagcttactgtaacctccgcctgccaggttcaagcgattctcctgcctcatcctcccgaggagctgggatcacaggcgcctgccaccacgcccggctaatttttttgtatttttagtagagacggggtttcaccatattggccaggctggtctcaaactcctgacctcgtgatccgcctgcctcggcctccctaagtgctgggattatgggcgtgaaccaccgcacctggcctatcttggtgtttttacatccttcagtatttttcaaggttttacagcttttttatctatagacttataccatcttcaaaagcaatacaattttatttgtagacgtgatttcccccaccaaatgcacattttatggagctctaggacaaaagtcaggatgaaaagtaatctatcgctggtgctactttaataccttcctgactggtgccactggctaaattctagcagtacgatgagagggccattaaggcctatcttagcaagcaagacattatagcaaagacctaaacactcaaaggttcaacgtcttctagccagggaactattctctaattcttccaccttgatatgatttcagcaaattctgataacccggtattactcttaatgcatttttgtaacatttgacaaacatctcccaatatgtagactcccactctcctgatgctaatcagtatcagacaatggaagtaaattttcctgcttttctcaacttttcctcaaattcatgttagtgaagtactttcatttggccatcattatttatcaaccttaagaaacatgcctattgacgaagtaaatatactaggaattcaacgtatctacgggaatgtggacaaagacatataccaagacaaggcactagagtgaaaagccattaaaataaaatgctcagcagcaaaggatttgtaatggttaacttgcaatatatccatatggtgtaatattacagtcattagaaatgacatttgcgtaaggatctgagtggaaactgatacagcctgtcggagagctactgagtagtattttatcacagctgcatacataccctttcacccaacagttccactcctgggagtctagtcaacaaatggacaagttgcacaaccaagctatggtcaaatatgtgtgttgtaggatttatgaaactggtaccaatttaatattcaaatgtgattaagtcatggcaatctatttactggatactttgtggttaccaaagagctatgtgctgccacagggagtcctttcaatagtgattgaaaaaggcagaacactactagacagaactacctgttttatgcatgtattggcatacactgaaaaagcttagtcacttaaaatgaggttgtacagattgtagattttgtttttaaacgcctgtatggtttaaaaaatgttttgggaaatagacatgagcagggcagagaactacaacctacaggccaaaccccaccccactgcctgtttgtacggccaacaagtttaaaatttttttaatgttttaggtttttttttttttaaaaaaaatactatgcccatttgtttacaaatcgtctgtgggtgctttctcactacaatggcagaattcagtagttgagacagacctatggtccacaaaggccgaaatatttactgttttaggagaaaaaaacaacatgaattgtaataacttggacttacttggttgctcagtcctgatgtgtcctgttaaaacctaagagaaacagcaccaagttcaatctagtgcaatcagcctatcacatctaagctgcttttgccagatctgatatctactcccgaccttaagccaggagactttgtaaacttactaggttataataaaacttaagaactatcgatatttactaatctacatcatggaactatttcaaaagcagtcatatggtaagatggatcaggagtctttaaaaataaaactgagaaagaaaaatcatgtgatcaattcagtagtagagacagaggttggtatcaagtctatgttcatacacttaccagtgccacccagcagggccatacaagacacatgaaatgagatcagctcaagggtgacaagatgaaactgggagagggccggggagacccgaactcttaatattggattccacacaagaggaaaaattttagtccagctcccagcatggcagctaatggcaagttagtaccataaagccaactcttggaatatacctgacttccacgataaaatggagatgagtgcaggggtgagtgtatagttaagaaaacaaacaatatattactagtccaggtggtagatgacagatttttattatttacacttctctcaaattattacattcagcatgttttgctttttatgttatttaaagtataaaccctcatataattccctaagatgggtggcatgccaagtagctaaatgaaatatcatcccagcccaaaagtacttattcgaatgaaatattacatttttcttaaataaagcaataaattaggtaccctattatcatggtattttcttttttggccagcttttctagataaggttgtattgctactgcaactaacaaaaaagatgtggcagggctgggcacggtggctcacgcctgtaatcccagcactttgggaggccgaggcgggcagatcacgaggtcaggagatggagaccatcctggcccaacatggtgaaaccccgtctctactaaaaatacaaaaaattggccaggtgtggtggcaggtgtctgtagtcccagctcctcgggaggctgaggcaggagaatcgcttgaacgcgggaggcagaacctgcagtgagccaagatcatgccacagcactccagcctaaactacagagctagaaagtggctagagcagcc

SEQ ID NO: 30452 - DNA, 3970 bp, Homo Sapiens
ggaagttctgccttgtctccgccgcgggtcaggggtgagagctggaatctctgcacgggccttggaaaacgactgtcttcttctgccaaaatgtcaggaattggaaataaaagagcagctggagaacctggcacctccatgcctcctgagaagaaggcagctgttgaagattcagggaccacagtggaaacaattaagctaggaggtgtctcttcaacggaggaactagacattagaacactgcaaaccaaaaatcgcaagctggcagaaatgttggatcagcggcaggccattgaagatgaacttcgtgagcacattgaaaaactggaacgacgacaggccactgatgatgcctcactattgattgtcaaccgatactggagtcagtttgatgaaaacatccgtatcatccttaaacgttatgatctggagcagggcttgggagacctactcacagaacgaaaagcccttgttgtgcctgaaccagaaccagactctgatagcaatcaggagcgtaaagatgaccgagagagaggggaagggcaagagccagctttctctttccttgctactttggccagcagttccagtgaagagatggagtctcagctgcaggaacgtgtggagtcttcccgccgagccgtgtcccagattgtgactgtttatgataaattgcaagaaaaagtggagctcttatcccggaagctaaacagtggagataatctgatagtggaggaagcagtgcaggagctgaactctttcctcgcacaggagaatatgaggctacaggaattgacagatcttcttcaggaaaagcatcgcaccatgtctcaggagttctccaagttgcagagtaaagtggagacagccgaatcacgagtgtctgtcctggagtccatgattgatgacctgcagtgggatattgacaaaattcgaaagagggaacagcgactcaaccgacacttagcagaagtcctagaacgggtgaattccaaaggttataaggtgtatggagcggggagcagtctgtatggcggcacaatcactatcaatgctcggaagtttgaggaaatgaatgcagagcttgaggagaacaaagagttggctcagaaccgtctctgtgagctggagaaacttcggcaagactttgaggaggtcactacacaaaatgaaaagctgaaggtggaattgcggagtgcagtggagcaagtcgttaaggaaactccagaatatcgctgcatgcagtcacagttctccgtcttgtataatgagagcctacagttgaaagcacacttggatgaggctcggaccctgcttcatggcaccagaggaacccaccagcaccaggttgagcttattgagcgagatgaggttagtcttcataagaagctgaggactgaagtaattcagctagaagatacattggcccaggtccgcaaggagtatgaaatgctgaggatagaatttgagcagacccttgctgccaatgaacaagcaggccctataaacagggagatgcgccacctcatcagtagcctccagaatcacaatcaccagctgaaaggggaggtcctgagatataagcggaaattgagagaagcccagtctgacctgaacaagacacgcctgcgtagtggtagtgccctcctgcagtcccagtctagtactgaggacccgaaggatgagcctgcggagctaaaaccagattctgaggacttatcctcccagtcctcagcttcaaaggcatctcaggaggatgccaatgaaatcaagtctaaacgggatgaagaagaacgagaacgagaaaggagggagaaggagagggaacgagaaagagaacgggagaaggagaaggagagagaacgagagaagcagaagctaaaagagtcagaaaaagagagagattctgctaaggataaagagaaaggcaaacatgatgatggacggaaaaaggaagcagaaattatcaaacaattgaagattgaactcaagaaggcacaggagagccaaaaggagatgaaactattgctggatatgtaccgttctgccccaaaggaacagagagacaaagttcagctgatggcagctgagaagaagtctaaggcagagttggaagatctaaggcaaagactcaaggatctggaagataaagagaagaaagagaacaagaaaatggctgatgaggatgccttgaggaagatccgggcagtggaggagcagatagaatacctacagaagaagctagccatggccaagcaggaagaagaagcactcctctctgaaatggatgtcacaggccaggcctttgaagacatgcaggagcaaaatatccgtttgatgcagcaattgcgggagaaggatgatgcaaatttcaagctcatgtcagagcgtatcaagtccaatcagatccataagttgcttaaagaagagaaggaggagctggcagaccaggtgttgactctgaagactcaggttgatgcccagctacaggtagtaaggaaactggaagagaaggagcatctgttacagagcaacattggcacaggggagaaagagctgggtcttaggacccaagccttagagatgaataaacgcaaggcaatggaggcagcccagcttgcagatgacctcaaagcacaactggagttggctcagaagaagctacatgattttcaggatgagatcgtggagaacagtgttaccaaagaaaaggacatgttcaatttcaaacgagcccaggaggacatctctagacttcgcaggaagctggagaccacaaagaaaccagacaatgtacccaagtgtgatgagattctgatggaagagattaaggattacaaggcacgcttgacctgtccgtgctgtaacatgcgtaaaaaggatgctgttcttactaagtgttttcatgtcttctgctttgagtgtgtgaagacacgctatgacacccgccagcgcaaatgtcccaagtgtaatgctgcttttggtgccaatgattttcatcgcatctacattggttgatctaagtcaagagaagaagaggagctggctagtcaggaacttattcattaaccaccaaacctctacctcttctctccttgactgtcacctgtaggacagtttatcagtcaactacctttcctccagactttacttccaggctctcctcttcagtagctggatgactttagcagaaaggactggtaaatacaagccttgggtttcagaatgaattagaaacaaataactcttactgtcttccctcccagctttgtttattttgtgcttttagacttttcagtgttttctttttccagcccactgtataaacttggattgtccattcctcctgaagaaatcaagttggtatttttgatgtggaaaagggaacaaaagtggaaacatggctacttttggggagtgatattttaaaaaataagttgtctatgggcacaaagttttcttcatttgtgtagcaaacttcttgtgaatgtggattacaaaatggtataattgtgctactctcccctgggtggtttgcagccctaatgaaattatgtctaggatgattcagtctatttcccatttactagcagagtaacttgttaagatcagctggctttcttgttaaagttatttaagttttgaatgctctactacttcaagtctttaaatttcttgagactagaataattttaaataatatgaccctttgtcttctaatgaaataaagattgaagaggttgagtcaggactgagctggtgaagaaatcttgtgggtattctggaaatttgatacggagagaacttggtgagctatgaattactctcagtctcctttttacagggttgttgtgatccctcttttccagaaaattctgtggaatgtttctgtaggactttgttctccacaagcttgaattaaagcaggattcagtttgcaaaaaaaaaaaaaaaaaaaaaaaaaaaaaaa

SEQ ID NO: 30453 - DNA, 3401 bp, Homo Sapiens
gcaagccaaggcgctgtttgagaaggtgaagaagttccggacccatgtggaggagggggacattgtgtaccgcctctacatgcggcagaccatcatcaaggtgatcaagttcatcctcatcatctgctacaccgtctactacgtgcacaacatcaagttcgacgtggactgcaccgtggacattgagagcctgacgggctaccgcacctaccgctgtgcccaccccctggccacactcttcaagatcctggcgtccttctacatcagcctagtcatcttctacggcctcatctgcatgtacacactgtggtggatgctacggcgctccctcaagaagtactcgtttgagtcgatccgtgaggagagcagctacagcgacatccccgacgtcaagaacgacttcgccttcatgctgcacctcattgaccaatacgacccgctctactccaagcgcttcgccgtcttcctgtcggaggtgagtgagaacaagctgcggcagctgaacctcaacaacgagtggacgctggacaagctccggcagcggctcaccaagaacgcgcaggacaagctggagctgcacctgttcatgctcagtggcatccctgacactgtgtttgacctggtggagctggaggtcctcaagctggagctgatccccgacgtgaccatcccgcccagcattgcccagctcacgggcctcaaggagctgtggctctaccacacagcggccaagattgaagcgcctgcgctggccttcctgcgcgagaacctgcgggcgctgcacatcaagttcaccgacatcaaggagatcccgctgtggatctatagcctgaagacactggaggagctgcacctgacgggcaacctgagcgcggagaacaaccgctacatcgtcatcgacgggctgcgggagctcaaacgcctcaaggtgctgcggctcaagagcaacctaagcaagctgccacaggtggtcacagatgtgggcgtgcacctgcagaagctgtccatcaacaatgagggcaccaagctcatcgtcctcaacagcctcaagaagatggcgaacctgactgagctggagctgatccgctgcgacctggagcgcatcccccactccatcttcagcctccacaacctgcaggagattgacctcaaggacaacaacctcaagaccatcgaggagatcatcagcttccagcacctgcaccgcctcacctgccttaagctgtggtacaaccacatcgcctacatccccatccagatcggcaacctcaccaacctggagcgcctctacctgaaccgcaacaagatcgagaagatccccacccagctcttctactgccgcaagctgcgctacctggacctcagccacaacaacctgaccttcctccctgccgacatcggcctcctgcagaacctccagaacctagccatcacggccaaccggatcgagacgctccctccggagctcttccagtgccggaagctgcgggccctgcacctgggcaacaacgtgctgcagtcactgccctccagggtgggcgagctgaccaacctgacgcagatcgagctgcggggcaaccggctggagtgcctgcctgtggagctgggcgagtgcccactgctcaagcgcagcggcttggtggtggaggaggacctgttcaacacactgccacccgaggtgaaggagcggctgtggagggctgacaaggagcaggcctgagcgaggccggcccagcacagcaagcagcaggaccgctgcccagtcctcaggcccggaggggcaggcctagcttctcccagaactcccggacagccaggacagcctcgcggctgggcaggagcctggggccgcttgtgagtcaggccagagcgagaggacagtatctgtggggctggccccttttctccctctgagactcacgtcccccagggcaagtgcttgtggaggagagcaagtctcaagagcgcagtatttggataatcagggtctcctccctggaggccagctctgccccaggggctgagctgccaccagaggtcctgggaccctcactttagttcttggtatttatttttctccatctcccacctccttcatccagataacttatacattcccaagaaagttcagcccagatggaaggtgttcagggaaaggtgggctgccttttccccttgtccttatttagcgatgccgccgggcatttaacacccacctggacttcagcagagtggtccggggcgaaccagccatgggacggtcacccagcagtgccgggctgggctctgcggtgcggtccacgggagagcaggcctccagctggaaaggccaggcctggagcttgcctcttcagtttttgtggcagttttagttttttgttttttttttttttaatcaaaaaacaattttttttaaaaaaaagctttgaaaatggatggtttgggtattaaaaagaaaaaaaaaacttaaaaaaaaaaagacactaacggccagtgagttggagtctcagggcagggtggcagtttcccttgagcaaagcagccagacgttgaactgtgtttcctttccctgggcgcagggtgcagggtgtcttccggatctggtgtgaccttggtccaggagttctatttgttcctggggagggaggtttttttgtttgttttttgggtttttttggtgtcttgttttctttctcctccatgtgtcttggcaggcactcatttctgtggctgtcggccagagggaatgttctggagctgccaaggagggaggagactcgggttggctaatccccggatgaacggtgctccattcgcacctcccctcctcgtgcctgccctgcctctccacgcacagtgttaaggagccaagaggagccacttcgcccagactttgtttccccacctcctgcggcatgggtgtgtccagtgccaccgctggcctccgctgcttccatcagccctgtcgccacctggtccttcatgaagagcagacacttagaggctggtcgggaatggggaggtcgcccctgggagggcaggcgttggttccaagccggttcccgtccctggcgcctggagtgcacacagcccagtcggcacctggtggctggaagccaacctgctttagatcactcgggtccccaccttagaagggtccccgccttagatcaatcacgtggacactaaggcacgttttagagtctcttgtcttaatgattatgtccatccgtctgtccgtccatttgtgttttctgcgtcgtgtcattggatataatcctcagaaataatgcacactagcctctgacaaccatgaagcaaaaatccgttacatgtgggtctgaacttgtagactcggtcacagtatcaaataaaatctataacagaaaaaaaaaaaaaaa

SEQ ID NO: 30454 - DNA, 2769 bp, Homo Sapiens
gcagagctgcgcgcgcactcgggaaaggggggaagggagcagggtccaggcagggggggttaggccccctgatccccctcgttaccccgactggcacggaataaggggaggaaatgatcgagatggcggcggagaaggagccgtttctggtgccggccccgccgccgccgctcaaagatgagtcgggcggagggggcggccccacggtgccaccgcaccaagaggccgcctctggggagctccgcggcgggacggagcgtggtccgggtcgttgcgcgccatctgcggggtccccagccgctgcggtcggtcgggaaagccccggggccgcggccacctcctccagtggtccccaggcgcagcagcaccgagggggcggcccccaggcgcagtcgcatggggaggcccgcctgtcggatcccccggggcgagccgctcccccggacgtgggggaggagcgccggggagggggcgggacagagctgggtccccctgctcctcctcgaccccgcaatggctatcagccccaccggccacctggggggggcgggggcaagaggagaaatagctgtaatgtagggggaggcgggggaggcttcaaacatccggccttcaagaggcgcaggcgggtgaattcggactgtgactctgtgttaccctccaacttcctcctggggggcaatatctttgatcccctgaacctgaatagcctcctggatgaggaagtgagccgcactctcaacgcggagacccctaagtcatccccccttccggccaaagggcgagatccggtggagatcctcatccccaaagatattactgacccgctcagtctcaatacttgcactgatgagggccatgtagttcttgcttcgccactcaagactggtcggaagcggcatagacaccggggacagcaccaccagcagcagcaggcagccggagggagtgagagtcaccccgtgccgcccacagcccctctcacccccttactccacggggagggcgcctcacagcagccgcggcacaggggccagaaccgggatgccccccaaccctatgaactcaacacagccatcaactgcagggatgaagtggtgtctccccttccatctgctctgcagggtccctcaggctccctatcagcccctccagctgcctcagttatctctgcacccccatcttcctcctcccgacatcgcaaacgtcgcaggacttccagcaagtcggaggcaggggctaggggtggaggccagggttccaaggaaaagggccgagggagttggggaggccgccaccaccaccaccacccactgcctgcagcaggcttcaaaaagcaacagcgcaagttccagtatgggaattattgcaaatactatgggtaccgcaatccttcctgtgaggatgggcgccttcgggtgttgaagcctgagtggtttcggggccgggacgtcctagatctgggctgcaatgtgggccatctgaccctgagcattgcctgcaagtggggcccgtcccgcatggtgggcctggatatcgattcccggctcatccattctgcccgccaaaacatccgacactacctttccgaggagctgcgtctcccaccccagactttggaaggggacccgggggcagagggtgaggaagggaccaccaccgttcgaaagaggagctgcttcccagcctcgctgactgccagccggggtcccatcgctgccccccaagtgcccttggatggagcggacacatcagtcttccccaacaatgttgtcttcgtcacgggtaattatgtgctggatcgagatgacctggtggaggcccaaacacctgagtatgatgtggtgctctgcctcagcctcaccaagtgggtgcatctgaactggggagacgagggcctgaagcgcatgtttcgccggatctaccggcacctacgccctgggggcatcctggtcctagagccccaaccctggtcgtcgtatggcaagagaaagactcttacagaaacgatctacaagaactactaccgaatccaattgaagccagagcagttcagttcctacctgacatccccagacgtgggcttctccagctatgagcttgtggccacaccccacaacacctctaaaggcttccagcgtcctgtgtacctgttccacaaggcccgatcccccagccactaagtggccccctaaacagaaagtgtgaagaggctgccctcgctgctcataaggacctgggggaagaggaaagtgtcccaaggtctttcctttctgactccaaaaatagtttcctttcttggatctgcaaagaaagcttttcttccgtcgctgcctcagcctcctccctatgcctctggcacctgcgcagcaaggctggctgtgctggagtcaccatcatcttcctctcccccagcctcccaggctggatggcatggactgtttgctgacctctgttctcttagggcatgggaggtgggaggatatcaaattctctagccctttcctcctattctcccaaggagagagattcccatttctcctcggccattgtacctagctcttgtccctagctgcatttcagtggaccatggatagagggactgagggttagacggggaagactggcagggaggcacgcaggtactgtgaaaatccttccctttgccctcccccagtgggagagggggttgggttttcaatgtgagaacagcacaataaacttgatgtctagggcagtggcccccaaaaaaaaaaaaaaaaaaaaaaa

SEQ ID NO: 30455 - DNA, 2562 bp, Homo Sapiens
gccgccgtccccagcgagaggcatgcagcgctgaggagcggcgacccagcacggcggcgccatgaacctcctgccgtgtaaccctcacggcaacgggctgctctacgccggcttcaaccaggaccacggatgctttgcgtgtgggatggaaaatggattccggcgccatgaacctcctgccgtgtaaccctcacggcaacgggctgctctacgccggcttcaaccaggaccacggatgctttgcgtgtgggatggaaaatggattccgagtctataacactgatccactaaaagaaaaagagaaacaagaatttctagaaggaggagttggccatgttgaaatgttatttcgctgcaactatttagctttagttggtggtggaaaaaagccgaaataccctcccaacaaagtaatgatctgggatgacctgaagaagaagactgttattgaaatagaattttctacagaagtcaaggcagtcaaactgcggcgagatagaattgtggtggttttggactccatgattaaggtgttcacattcacacacaatccccatcagttgcacgtcttcgaaacctgctataaccccaaaggcctctgtgtcctttgtcccaatagtaacaactccctcctggcctttccgggcacgcacacgggccatgtgcagcttgtggacctggccagcacggagaagccacccgtggacattcctgcacacgagggtgtcctgagctgcattgcactcaacctgcagggaacaagaattgcaactgcatccgagaaagggacgcttataagaatatttgatacttcatcagggcatttaatccaggaactgcgaagaggatctcaagcagccaatatttactgcatcaacttcaatcaggatgcgtccctcatctgcgtatccagcgaccacggcacagtgcatatttttgcagctgaagatccaaaaaggaataaacagtccagtttggcctcagccagtttccttccaaaatacttcagttccaagtggagtttctccaagtttcaggttccctcaggctctccgtgcatttgtgcctttggaacagagccaaacgccgtcattgcaatttgtgcagacggcagctactacaaattcctgttcaaccccaagggggagtgcatccgagatgtctacgcgcagtttctagagatgaccgatgacaagctgtgactccagctgggggcgccacagcacccaccacctgccgccttcagactctcggggctggtgccagtgccccaggggcctcctgggccacgggctggaggggctgcccagggaccttggtctcgaagccatacgtggttgtctgctttcctaaggactcccatttccagtattaaagagagaatcatcatcaaggcaccgtaggtaactcagtggctgtgaccagctcgactggcggccactggctgttcccatgagttcagctgtgacgttagcttcagtggctccgccgcatcctcacactgacgggggctccatacggacctggggactgggctgagagggtggacgagttcaggtttgtttttgcagcagattccgtcgttcttactgagtctgcagcgggggagtgaacaagtgtgcagatgtaagttcttacatgataagcagattgaatacaacaccagcagcttgccttagaaaaggagaaaggaattccttttcccgcccgaacatgaagaaaaacgacctgaccctgtagagagaacacagtgtgaatgtttcccctcgtgtgagcccagcctgtggtcttctccgtacccgcaacgtggtcatctgtgcccgtgacgtcacctgtgcccgtgcgtggcgtccccgtctccgttggggccattagaatgaggcagacaccaggccactctagaagccgagccgtcacacctcaggcgtgtgcggggcggggacggggggtctcctggttacattttggattaaacctgtttcccggttatgtgtagggaacagcagagtgatgcacgaactttgaacattcgttatggggaaaacatcctttaacttcggggtcgtctgccagagcagggtctgggagggtccatgcagttcccgctggtgtggagggaaatgccctggtctggcctccgagcccccaggtccaccgtctcccctcccctcatttgtaagaatagctacacactaacattttgggaaggagaggcacataattttttttaacatttggtaactaggttatgggctctacattgtcagctacttgggatatatatttaattttcttaaattcccgttaaactctattttatggttttgatttcagattgcaaacatgtaaaacctgcatagcagcgagttctcggttttgccggtttctttagttctttactgtcactgtcatgtaatcagctaattctctgtggatgttgctgtaaagtatgcatgttcctttcatgtgtatttaatcatgatgtttaattttgcacacttatttgtaatgtttcttttaaataaaagtgactaattttgttgtaaaaaaaaaaaaaaaaaa

SEQ ID NO: 30456 - DNA, 2412 bp, Homo Sapiens
agtcccatggggaatgtcaacaggcaggggcagcactgcagagatttcatcatggtctcccaggccctcaggctcctctgccttctgcttgggcttcagggctgcctggctgcagtcttcgtaacccaggaggaagcccacggcgtcctgcaccggcgccggcgcgccaacgcgttcctggaggagctgcggccgggctccctggagagggagtgcaaggaggagcagtgctccttcgaggaggcccgggagatcttcaaggacgcggagaggacgaagctgttctggatttcttacagtgatggggaccagtgtgcctcaagtccatgccagaatgggggctcctgcaaggaccagctccagtcctatatctgcttctgcctccctgccttcgagggccggaactgtgagacgcacaaggatgaccagctgatctgtgtgaacgagaacggcggctgtgagcagtactgcagtgaccacacgggcaccaagcgctcctgtcggtgccacgaggggtactctctgctggcagacggggtgtcctgcacacccacagttgaatatccatgtggaaaaatacctattctagaaaaaagaaatgccagcaaaccccaaggccgaattgtggggggcaaggtgtgccccaaaggggagtgtccatggcaggtcctgttgttggtgaatggagctcagttgtgtggggggaccctgatcaacaccatctgggtggtctccgcggcccactgtttcgacaaaatcaagaactggaggaacctgatcgcggtgctgggcgagcacgacctcagcgagcacgacggggatgagcagagccggcgggtggcgcaggtcatcatccccagcacgtacgtcccgggcaccaccaaccacgacatcgcgctgctccgcctgcaccagcccgtggtcctcactgaccatgtggtgcccctctgcctgcccgaacggacgttctctgagaggacgctggccttcgtgcgcttctcattggtcagcggctggggccagctgctggaccgtggcgccacggccctggagctcatggtgctcaacgtgccccggctgatgacccaggactgcctgcagcagtcacggaaggtgggagactccccaaatatcacggagtacatgttctgtgccggctactcggatggcagcaaggactcctgcaagggggacagtggaggcccacatgccacccactaccggggcacgtggtacctgacgggcatcgtcagctggggccagggctgcgcaaccgtgggccactttggggtgtacaccagggtctcccagtacatcgagtggctgcaaaagctcatgcgctcagagccacgcccaggagtcctcctgcgagccccatttccctagcccagcagccctggcctgtggagagaaagccaaggctgcgtcgaactgtcctggcaccaaatcccatatattcttctgcagttaatggggtagaggagggcatgggagggagggagaggtggggagggagacagagacagaaacagagagagacagagacagagagagactgagggagagactctgaggacatggagagagactcaaagagactccaagattcaaagagactaatagagacacagagatggaatagaaaagatgagaggcagaggcagacaggcgctggacagaggggcaggggagtgccaaggttgtcctggaggcagacagcccagctgagcctccttacctcccttcagccaagccccacctgcacgtgatctgctggccctcaggctgctgctctgccttcattgctggagacagtagaggcatgaacacacatggatgcacacacacacacgccaatgcacacacacagagatatgcacacacacggatgcacacacagatggtcacacagagatacgcaaacacaccgatgcacacgcacatagagatatgcacacacagatgcacacacagatatacacatggatgcacgcacatgccaatgcacgcacacatcagtgcacacggatgcacagagatatgcacacaccgatgtgcgcacacacagatatgcacacacatggatgagcacacacacaccaagtgcgcacacacaccgatgtacacacacagatgcacacacagatgcacacacaccgatgctgactccatgtgtgctgtcctctgaaggcggttgtttagctctcacttttctggttcttatccattatcatcttcacttcagacaattcagaagcatcaccatgcatggtggcgaatgcccccaaactctcccccaaatgtatttctcccttcgctgggtgccgggctgcacagactattccccacctgcttcccagcttcacaataaacggctgcgtctcctccgcacacctgtggtgcctgccaccc

SEQ ID NO: 30457 - DNA, 2123 bp, Homo Sapiens
gagctcgcgggcgactgcctgccaggcagacgctgcagctaagctgcgcggtggctgtggcaggtgagagcctccggaagggaggcggcctctggccccgaccctgctccgcgatcgcccactcgggcgcccggccgggcctggcagggaagggccgccgccgccgccgcgcgtttgcgaggcctggcggggccgcggggcccaggaatggcgtaaggggcccccccagactccgagacggcccgagcgggtcgccggctgtgggacggcggcgtgcccttcctttcctccctcccaggttcgcgcccgagctctgctagccacccgtccgacaacttccggactcccagggacagccctgccatcaaggaagacagcacaggactgggacccacccatgaacccttctcaggacaacccaacagcaccagtggggatgttctcctaagccgcagagggcctgggcacgccatccgtcctccaggaagagccatggtgttaatgcaggacaagggcagctctcagcagtggcctggtctggggggcgagggtggtggcacaggtcccttaagcatgctcagagctgccctgctgctcatcagcctgccatggggggcccaagggacagccagcaccagcctcagcactgctgggggtcacaccgtgccaccgactgggggccgctacttgagcattggagatggctctgtgatggagtttgagtttcctgaggacagtgagggcatcatcgtgatctccagccagtacccaggccaggccaacaggacggcgcctggccccatgctcagggtcacctccctggacacagaggtgctgaccatcaagaacgtgagtgctataacctggggaggcgggggtggctttgtggtgagcatccactcaggcctggctgggctggccccactccacatccagctcgtggacgcccatgaggccccgcccacactgattgaggagcggagagacttctgcatcaaggtctcacctgctgaagacacgcctgccaccctcagcgccgacctggcccacttctcggaaaacccaatcctctacctgctcctgcctcttatctttgtcaacaagtgttcgtttgggtgcaaagtggaactcgaggttctgaaggggctcatgcagagcccccagcccatgctgctgggcctcctgggccagtttctggtcatgcccttgtacgctttcctcatggccaaggtcttcatgctgcccaaggccctggctctgggcctcatcatcacctgctcgtcgcctggcggcggggggagctacctcttcagcctccttcttggaggggacgtcaccctggccatctccatgactttcctctctacggtggctgccactggcttcttgcctctgtcttcggccatctacagccgcctgctcagcatccatgagacgctccacgtgcccatctccaagatcctggggaccctgctgttcattgccatccccatagccgtgggcgtgctgatcaagtccaagctccccaagttctcccagctgctgctgcaggtcgtcaagcccttcagctttgtgctcctcctgggcggcctcttcctggcctatcgcatgggggtcttcatcctggcaggcatccggctacccatcgtactggtgggtatcacggtgcccctggttggcctgttggtgggctactgcctagccacgtgtctgaagctgccagtggcccagcggcggacggtcagcattgaggtaggggtgcagaacagcctgctggccttggccatgctgcagctatccctccgccgccttcaagctgactatgcctcccaggcccccttcattgtggcgctgagcggcacctccgagatgctggccttggtcattggccacttcatctacagcagcctgttcccagttccctgaggcctctgggtcaagctttcatcagccccagcccccacactccaccaaagttctcatgcactatgcactcagaaaaatccaggcttatttttttactgattttttattctccagctttcagtgccaaagaggccatgctgagttaggtaggtgggcgctgcccagaaaatatatttcaataaaagagagaagcaagc

SEQ ID NO: 30458 - DNA, 3177 bp, Homo Sapiens
caggacgaagtttttggctgtgggctctctgggacagagtggagcgcctgtggatttagccggggacacaccatcctgctcgcaggtgcctggacaggacaggggacgagggaggaacactctctgaggaagcccaactcctatgagctcctctctggcagcactcaaaccagtgaagcttgggaaagtcattgacctccagtcgttctgctgagaaacatctggctctatttccatggagaccagggaatctgaagatttggaaaagacccggaggaaatcagcaagtgatcaatggaacactgataatgaaccagccaaggtgaaacctgagttactcccagaaaaagaggagacttctcaagctgaccaggatatccaagacaaagagcctcattgccacatcccaattaagagaaattccatcttcaatcgctccataagacgcaaaagcaaagccaaggccagagacaaccccgaacggaacgccagctgcctggcagattcacaggacaatggaaaatctgtaaatgagcccctgaccttgaatatcccctggagcagaacgcctccttgcagaacagcaatgcagacagacccaggagcccaggaaatgagtgagtcgtcctccaccccgggaaatggggccacgcccgaggagtggccggccctggccgacagccccaccacgctcaccgaggccctgcggatgatccaccccattcccgccgactcctggagaaacctcattgaacaaatagggctcctgtatcaggaataccgagataaatcgactctccaagaaatcgaaaccaggaggcaacaggatgcagaaatagaagacaataccaatgggtccccggccagtgaggacaccccggaggaggaagaagaagaggaggaggaggaggagccggccagcccaccagagaggaagactctgccccagatctgcctgctcagtaacccccactcaaggttcaacctctggcaggatcttcccgagatccggagcagcggggtgcttgagatcctacagcctgaggagattaagctgcaggaggccatgttcgagctggtcacttccgaggcgtcctactacaagagtctgaacctgctcgtgtcccacttcatggagaacgagcggataaggaagatcctgcacccgtccgaggcgcacatcctcttctccaacgtcctggacgtgctggctgtcagtgagcggttcctcctggagctggagcaccggatggaggagaacatcgtcatctctgacgtgtgtgacatcgtgtaccgttatgcggctgaccacttctctgtctacatcacctacgtcagcaatcagacctaccaggagcggacctataagcagctgctccaggagaaggcagctttccgggagctgatcgcgcagctagagctcgaccccaagtgcagggggctgcccttctcctccttcctcatcctgcctttccagaggatcacacgcctcaagctgttggtccagaacatcctgaagagggtagaagagaggtctgagcgggagtgcactgctttggatgctcacaaggagctggaaatggtggtgaaggcatgcaacgagggcgtcaggaaaatgagccgcacggaacagatgatcagcattcagaagaagatggagttcaagatcaagtcggtgcccatcatctcccactcccgctggctgctgaagcagggtgagctgcagcagatgtcaggccccaagacctcccggaccctgaggaccaagaagctcttccacgaaatttacctcttcctgttcaacgacctgctggtgatctgccggcagattccaggagacaagtaccaggtatttgactcagctccgcggggactgctgcgtgtggaggagctggaggaccagggccagacgctggccaacgtgttcatcctgcggctgctggagaacgcagatgaccgggaggccacctacatgctaaaggcgtcctctcagagtgagatgaagcgttggatgacctcactggcccccaacaggaggaccaagtttgtttcgttcacatcccggctgctggactgcccccaggtccagtgcgtgcacccatacgtggctcagcagccagacgagctgacgctggagctcgccgacatcctcaacatcctggacaagactgacgacgggtggatctttggcgagcgtctgcacgaccaggagagaggctggttccccagctccatgactgaggagatcttgaatcccaagatccggtcccagaacctcaaggaatgtttccgtgtccacaagatggatgaccctcagcgcagccagaacaaggaccgcaggaagctgggcagccggaatcggcaatgacccccacccagggggccagcgggagcagggcctgcatgagaccccgacagaaggtggggggggggcctctgggaagcacaggccagcacctccccaggtggcaggatctggcttggggtgcccggccctcatccctgcccacgcagtgagtgctcatgtgtcttggccccttgcttgcaaactggataaagggtgcccaagcctctcctgatgcatttgtaaacaagaaggtttcagcagtattacaccacctccctcatgcctccgagggggtggaagggggtgggcacactccagggccccccatgcccctggcccccagggactggaagaggctcccaacccagagtgtccctgtgggaggcaggcagaaggtgacaattgacacgatttcctgcacgcgtcctcctctaccttggaagcagttagaatctaccaggcacagatgaggccgcccttgcctgacggagcttgatgagcagcccttggtctccggttccaggactgagagcccagctgcctctgcccacccttccccaggcctctgccagcctctggctgcacggtcaggccctgccccatggcaggcctgccagagcttggctggggacccctcccgcctctggctccctgatgggctggatgtaacttgtgtcttctagccgcttaaggagcccaggtgttttaaggaatgaattggtcactgcatcttgtatcgattatggttctgagaaaagcaaatatcacttttggctgcattaaaagaagcatcatatataaaataaaaaaaaaaaaaaaaaaaaaaaaaa

SEQ ID NO: 30459 - DNA, 3844 bp, Homo Sapiens
aaaggcaggcattctctttccttttccttctctcctgagcgctcctgcagttcctggggcgtagtaggggatccacaagcgtttgtgaccagtgaagttctttacaagggtgagatctgcacgggaggacccgagcgagggtctcggcttgccaggaagccggggttccccgggaagcgtggagttcacccgcgcactcgaagtgcctttgcaaaattatatctgggtgttggcacccagccactattctgccaatgaagtacatcctggtcacgggtggggtcatctcaggcattggtaaagggatcattgccagcagcattggaacgattctaaaatcatgtggactccgagttactgccataaaaatcgacccctatattaacatcgatgctggcactttttcaccttatgaacacggtgaagtcttcgtcttaaatgatggtggagaagttgatttagaccttggaaattatgaaagatttttggatattaatctttataaagacaacaatatcaccacggggaagatatatcagcatgtgatcaataaagagaggcgtggtgattacctggggaaaacagtgcaagttgtccctcacattactgatgctgtccaggagtgggttatgaatcaagccaaggtgccggtggatggtaataaggaagagccccaaatatgcgttattgagctgggaggcaccattggagacatcgaaggaatgccgtttgtggaggcgtttagacaattccagtttaaggcgaaaagagagaatttctgtaatatccacgttagccttgtcccacagctcagtgctaccggagaacaaaaaaccaaacccacccaaaacagcgtccgcgcactgaggggtttaggcctgtctccagatctgattgtctgccgaagttcaacgcccattgagatggccgtgaaggagaagatttctatgttttgtcacgtgaaccctgaacaggtcatatgtatccatgatgtttcttccacataccgagttcctgtgcttttagaggaacaaagcattgtgaaatattttaaggagagattgcacctgcccatcggtgattctgcaagtaatttgctttttaagtggagaaatatggctgacaggtatgaaaggttacagaaaatatgctccatagccctggttggcaaatacaccaagctcagagactgctacgcctctgtgttcaaagccctggaacactcagccctggccatcaaccacaagttgaatctgatgtacatagactccattgatctggagaagatcactgaaaccgaggaccctgtgaaatttcatgaagcttggcagaagctatgcaaagctgatggtattcttgtgcctggaggctttggaatcagaggaacattgggaaaactccaggcgatttcttgggcaaggacaaagaagattccttttctgggagtttgtcttgggatgcaactagcagtgatagagtttgcaagaaactgccttaacttgaaagatgctgattccacagagtttaggccaaatgccccagttcctctggtgattgatatgcccgagcacaaccctggcaatttgggaggaacaatgagactgggaataagaagaactgttttcaaaactgaaaattcaatattaaggaaactttatggtgatgttccttttatagaagaaagacacagacatcggttcgaggtaaaccctaacctgatcaaacaatttgagcagaatgacttaagttttgtaggtcaggatgttgatggagacaggatggaaatcattgaactggcaaatcatccttattttgttggtgtccagttccatcctgagttttcttctaggccgatgaagccttcccctccgtatctggggctgttacttgcagcaactgggaacctgaatgcctacttgcaacagggttgcaaactgtcttccagtgatagatacagtgatgccagtgatgacagcttttcagagccaaggatagctgagttggaaataagctgaaatgaatacatgactgggaataatggggactgcctgtgaggcctctgaaataattgaaggcaagatgaaggaactatctgaagaaatcactacactcttagagaatccctctgttctccagcaaacatgggatgtaaagcctcacagggaatctgataatacatacttctgtcaaccagaaccagaggggtagttttcttttccctccagaggcagcctttggtacttaaaatatctgtagctgattaaatttttcccaacaacctcactggggagaaagtgtgttcatgttttgtccagcggatcaggatgttaggatgacgagcaagagtccaggtcactgtgcctttgctgtgttgtatggaaaggatggcagggaacatgctgtaagtaattttgagtaagaaaatgagtcactgtgttacctggaactcagccacagatttgtgtgtggtccaagatcattgcagtttctcaccctgtttatttcctggtaaaagtaaaattgaataggtccaagacttgggggtggcaagtaaggctttgcctcaggcacaaaatttaagggggctccaaaaaactcaggaatcaagatcagcaatacagtctgagtatcccttatgtgaaatgcttggggctagaagtgttttgaatttcagattttggaatatttgcatatacatgcgatatcttggggatgagactcaagactaaacatgaaattcatttatgcttcatatacaccttatatacatagcctaaaggtaatttgatacaatattttaaataattttgtgcatgaaacaaagtttcgactgcattttgactgtgatttctggcatgagatcagttatggaattttccacttctagcgtcatgttggcattcagaaattttgaaattttggagcattttggattttcagattagggatgctcaacctgtatatatattttttaatcgacgtgaaattcacgtaacatagaattaaccattttgaagtgaacaatttggttgcattcactgatgttgagcaaccaccacctttaactatttccaaaacattttcatcactccaaaataaatgcctgtacacactagcagtcactccctatcttcccctccacctgtccgctggcaaccactgatctcctttttatttctgtggctttttctattctggatatttcatataagtggaattacacaatatatgtggtcttttgtgtctggcttcttctgagacagtaggaagggggcttggctttggctcacccccactagagcattttttcatgcattcccactgatcacaaaacccatactactacctcattgacaccatacctgctaacctcgaggctttagtcatacaaagaaaatggcctttctgtattgttcttctgtgctctcataatgcttaaccatgtcttttacttaaacaattccaggaactggccttaggagatccaaatagggaaccaagattgcagagtgtcccatcttgggagggaatgctgaataattaattgatttacagccttgttgccgctggccagaccaccaggtggcccattactcgagatgatcatcacaaccagatgatgctaacctatatcctctacccttcgcgtgctttgtctgggaagtcttttggccccatgtcagtttctattgcattgagagcccaagagcccctggtcagtcaggcttccatttagcatggcgtttgcaaggtttacccatgttgtagcatgtgtcagaatttcattcctttctatggctgaataaaattccattgtatgaatataccacaaaaaaaaaaaaaa

SEQ ID NO: 30460 - DNA, 5780 bp, Homo Sapiens
ccaggcggcgttgcggccccggccccggctccctgcgccgccgccgccgccgccgccgccgccgccgccgccgccgccagcgctagcgccagcagccgggcccgatcacccgccgcccggtgcccgccgccgcccgcgccagcaaccgggcccgatcacccgccgcccggtgcccgccgccgcccgcgccaccggcatggcgctccggggcttctgcagcgccgatggctccgacccgctctgggactggaatgtcacgtggaataccagcaaccccgacttcaccaagtgctttcagaacacggtcctcgtgtgggtgccttgtttttacctctgggcctgtttccccttctacttcctctatctctcccgacatgaccgaggctacattcagatgacacctctcaacaaaaccaaaactgccttgggatttttgctgtggatcgtctgctgggcagacctcttctactctttctgggaaagaagtcggggcatattcctggccccagtgtttctggtcagcccaactctcttgggcatcaccacgctgcttgctacctttttaattcagctggagaggaggaagggagttcagtcttcagggatcatgctcactttctggctggtagccctagtgtgtgccctagccatcctgagatccaaaattatgacagccttaaaagaggatgcccaggtggacctgtttcgtgacatcactttctacgtctacttttccctcttactcattcagctcgtcttgtcctgtttctcagatcgctcacccctgttctcggaaaccatccacgaccctaatccctgcccagagtccagcgcttccttcctgtcgaggatcaccttctggtggatcacagggttgattgtccggggctaccgccagcccctggagggcagtgacctctggtccttaaacaaggaggacacgtcggaacaagtcgtgcctgttttggtaaagaactggaagaaggaatgcgccaagactaggaagcagccggtgaaggttgtgtactcctccaaggatcctgcccagccgaaagagagttccaaggtggatgcgaatgaggaggtggaggctttgatcgtcaagtccccacagaaggagtggaacccctctctgtttaaggtgttatacaagacctttgggccctacttcctcatgagcttcttcttcaaggccatccacgacctgatgatgttttccgggccgcagatcttaaagttgctcatcaagttcgtgaatgacacgaaggccccagactggcagggctacttctacaccgtgctgctgtttgtcactgcctgcctgcagaccctcgtgctgcaccagtacttccacatctgcttcgtcagtggcatgaggatcaagaccgctgtcattggggctgtctatcggaaggccctggtgatcaccaattcagccagaaaatcctccacggtcggggagattgtcaacctcatgtctgtggacgctcagaggttcatggacttggccacgtacattaacatgatctggtcagcccccctgcaagtcatccttgctctctacctcctgtggctgaatctgggcccttccgtcctggctggagtggcggtgatggtcctcatggtgcccgtcaatgctgtgatggcgatgaagaccaagacgtatcaggtggcccacatgaagagcaaagacaatcggatcaagctgatgaacgaaattctcaatgggatcaaagtgctaaagctttatgcctgggagctggcattcaaggacaaggtgctggccatcaggcaggaggagctgaaggtgctgaagaagtctgcctacctgtcagccgtgggcaccttcacctgggtctgcacgccctttctggcgagtgtctccctcaaacgcctgaggatctttctctcccatgaggagctggaacctgacagcatcgagcgacggcctgtcaaagacggcgggggcacgaacagcatcaccgtgaggaatgccacattcacctgggccaggagcgaccctcccacactgaatggcatcaccttctccatccccgaaggtgctttggtggccgtggtgggccaggtgggctgcggaaagtcgtccctgctctcagccctcttggctgagatggacaaagtggaggggcacgtggctatcaagggctccgtggcctatgtgccacagcaggcctggattcagaatgattctctccgagaaaacatcctttttggatgtcagctggaggaaccatattacaggtccgtgatacaggcctgtgccctcctcccagacctggaaatcctgcccagtggggatcggacagagattggcgagaagggcgtgaacctgtctgggggccagaagcagcgcgtgagcctggcccgggccgtgtactccaacgctgacatttacctcttcgatgatcccctctcagcagtggatgcccatgtgggaaaacacatctttgaaaatgtgattggccccaaggggatgctgaagaacaagacgcggatcttggtcacgcacagcatgagctacttgccgcaggtggacgtcatcatcgtcatgagtggcggcaagatctctgagatgggctcctaccaggagctgctggctcgagacggcgccttcgctgagttcctgcgtacctatgccagcacagagcaggagcaggatgcagaggagaacggggtcacgggcgtcagcggtccagggaaggaagcaaagcaaatggagaatggcatgctggtgacggacagtgcagggaagcaactgcagagacagctcagcagctcctcctcctatagtggggacatcagcaggcaccacaacagcaccgcagaactgcagaaagctgaggccaagaaggaggagacctggaagctgatggaggctgacaaggcgcagacagggcaggtcaagctttccgtgtactgggactacatgaaggccatcggactcttcatctccttcctcagcatcttccttttcatgtgtaaccatgtgtccgcgctggcttccaactattggctcagcctctggactgatgaccccatcgtcaacgggactcaggagcacacgaaagtccggctgagcgtctatggagccctgggcatttcacaagggatcgccgtgtttggctactccatggccgtgtccatcggggggatcttggcttcccgctgtctgcacgtggacctgctgcacagcatcctgcggtcacccatgagcttctttgagcggacccccagtgggaacctggtgaaccgcttctccaaggagctggacacagtggactccatgatcccggaggtcatcaagatgttcatgggctccctgttcaacgtcattggtgcctgcatcgttatcctgctggccacgcccatcgccgccatcatcatcccgccccttggcctcatctacttcttcgtccagaggttctacgtggcttcctcccggcagctgaagcgcctcgagtcggtcagccgctccccggtctattcccatttcaacgagaccttgctgggggtcagcgtcattcgagccttcgaggagcaggagcgcttcatccaccagagtgacctgaaggtggacgagaaccagaaggcctattaccccagcatcgtggccaacaggtggctggccgtgcggctggagtgtgtgggcaactgcatcgttctgtttgctgccctgtttgcggtgatctccaggcacagcctcagtgctggcttggtgggcctctcagtgtcttactcattgcaggtcaccacgtacttgaactggctggttcggatgtcatctgaaatggaaaccaacatcgtggccgtggagaggctcaaggagtattcagagactgagaaggaggcgccctggcaaatccaggagacagctccgcccagcagctggccccaggtgggccgagtggaattccggaactactgcctgcgctaccgagaggacctggacttcgttctcaggcacatcaatgtcacgatcaatgggggagaaaaggtcggcatcgtggggcggacgggagctgggaagtcgtccctgaccctgggcttatttcggatcaacgagtctgccgaaggagagatcatcatcgatggcatcaacatcgccaagatcggcctgcacgacctccgcttcaagatcaccatcatcccccaggaccctgttttgttttcgggttccctccgaatgaacctggacccattcagccagtactcggatgaagaagtctggacgtccctggagctggcccacctgaaggacttcgtgtcagcccttcctgacaagctagaccatgaatgtgcagaaggcggggagaacctcagtgtcgggcagcgccagcttgtgtgcctagcccgggccctgctgaggaagacgaagatccttgtgttggatgaggccacggcagccgtggacctggaaacggacgacctcatccagtccaccatccggacacagttcgaggactgcaccgtcctcaccatcgcccaccggctcaacaccatcatggactacacaagggtgatcgtcttggacaaaggagaaatccaggagtacggcgccccatcggacctcctgcagcagagaggtcttttctacagcatggccaaagacgccggcttggtgtgagccccagagctggcatatctggtcagaactgcagggcctatatgccagcgcccagggaggagtcagtacccctggtaaaccaagcctcccacactgaaaccaaaacataaaaaccaaacccagacaaccaaaacatattcaaagcagcagccaccgccatccggtcccctgcctggaactggctgtgaagacccaggagagacagagatgcgaaccacccaaaacacgcacaccctgcccctggtgccctgagacagacacacagcctcacgcccccaggaatgcaagtggtttcctggtgcttcccacggaggagttttggcagccagacttctggaggaattggttgtatagaagatcctagtgaccaaattcagcctactgcctcggatctctccagccgaagtctgtggactgcaagtctttgagatgcttctggctcccatcacctctaacatccttgtctgggtctaccaggaacgcttcatttccttggggctgcagttttgtggttgaggggcctggagaaaatcattttctccccttggcagtgtcccagggccctggatggtcctcttaccaacatctggtcttccaggcactcaaaagctgggaaccagcatctcagcgccagctctaccagttctcgttttgggccagaggcagcctctgcactcccacgcctgtcctcctggaagggacctggttggactaacggctaacctggacctggaactgtagggccaggggattgtctcagggccgacgttccacctggggcttccctccccacccaccccgactccaggctttcccttttttcttttgttcaacattgtaagaacaatcaatgctgttattactgatcccaccatgattgatgtggggtaaatattaaggagatggcctcatgggaatttgaccttgactagaaatagagactgagagtgagcaaccagctggaaggtactatgccagtcctagcagaaaaatgtgttaggggcctggcccaaagcagtgttggttgcttacagtgttgattgattttgttcttttttcttaccacctcttttctttccctctcatggtacctgctcatggttatgaagctttcaaagtaaagaacacgaaatac

SEQ ID NO: 30461 - DNA, 5325 bp, Homo Sapiens
ctccggcgcccgctctgcccgccgctgggtccgaccgcgctcgccttccttgcagccgcgcctcggccccatggacgccctgtgcggttccggggagctcggctccaagttctgggactccaacctgtctgtgcacacagaaaacccggacctcactccctgcttccagaactccctgctggcctgggtgccctgcatctacctgtgggtcgccctgccctgctacttgctctacctgcggcaccattgtcgtggctacatcatcctctcccacctgtccaagctcaagatggtcctgggtgtcctgctgtggtgcgtctcctgggcggaccttttttactccttccatggcctggtccatggccgggcccctgcccctgttttctttgtcacccccttggtggtgggggtcaccatgctgctggccaccctgctgatacagtatgagcggctgcagggcgtacagtcttcgggggtcctcattatcttctggttcctgtgtgtggtctgcgccatcgtcccattccgctccaagatccttttagccaaggcagagggtgagatctcagaccccttccgcttcaccaccttctacatccactttgccctggtactctctaccctcatcttggcctgcttcagggagaaacctccatttttctccgcaaagaatgtcgaccctaacccctaccctgagaccagcgctggctttctctcccgcctgtttttctggtggttcacaaagatggccatctatggctaccggcatcccctggaggagaaggacctctggtccctaaaggaagaggacagatcccagatggtggtgcagcagctgctggaggcatggaggaagcaggaaaagcagacggcacgacacaaggcttcagcagcacctgggaaaaatgcctccggcgaggacgaggtgctgctgggtgcccggcccaggccccggaagccctccttcctgaaggccctgctggccaccttcggctccagcttcctcatcagtgcctgcttcaagcttatccaggacctgctctccttcatcaatccacagctgctcagcatcctgatcaggtttatctccaaccccatggccccctcctggtggggcttcctggtggctgggctgatgttcctgtgctccatgatgcagtcgctgatcttacaacactattaccactacatctttgtgactggggtgaagtttcgtactgggatcatgggtgtcatctacaggaaggctctggttatcaccaactcagtcaaacgtgcgtccactgtgggggaaattgtcaacctcatgtcagtggatgcccagcgcttcatggaccttgcccccttcctcaatctgctgtggtcagcacccctgcagatcatcctggcgatctacttcctctggcagaacctaggtccctctgtcctggctggagtcgctttcatggtcttgctgattccactcaacggagctgtggccgtgaagatgcgcgccttccaggtaaagcaaatgaaattgaaggactcgcgcatcaagctgatgagtgagatcctgaacggcatcaaggtgctgaagctgtacgcctgggagcccagcttcctgaagcaggtggagggcatcaggcagggtgagctccagctgctgcgcacggcggcctacctccacaccacaaccaccttcacctggatgtgcagccccttcctggtgaccctgatcaccctctgggtgtacgtgtacgtggacccaaacaatgtgctggacgccgagaaggcctttgtgtctgtgtccttgtttaatatcttaagacttcccctcaacatgctgccccagttaatcagcaacctgactcaggccagtgtgtctctgaaacggatccagcaattcctgagccaagaggaacttgacccccagagtgtggaaagaaagaccatctccccaggctatgccatcaccatacacagtggcaccttcacctgggcccaggacctgccccccactctgcacagcctagacatccaggtcccgaaaggggcactggtggccgtggtggggcctgtgggctgtgggaagtcctccctggtgtctgccctgctgggagagatggagaagctagaaggcaaagtgcacatgaagggctccgtggcctatgtgccccagcaggcatggatccagaactgcactcttcaggaaaacgtgcttttcggcaaagccctgaaccccaagcgctaccagcagactctggaggcctgtgccttgctagctgacctggagatgctgcctggtggggatcagacagagattggagagaagggcattaacctgtctgggggccagcggcagcgggtcagtctggctcgagctgtttacagtgatgccgatattttcttgctggatgacccactgtccgcggtggactctcatgtggccaagcacatctttgaccacgtcatcgggccagaaggcgtgctggcaggcaagacgcgagtgctggtgacgcacggcattagcttcctgccccagacagacttcatcattgtgctagctgatggacaggtgtctgagatgggcccgtacccagccctgctgcagcgcaacggctcctttgccaactttctctgcaactatgcccccgatgaggaccaagggcacctggaggacagctggaccgcgttggaaggtgcagaggataaggaggcactgctgattgaagacacactcagcaaccacacggatctgacagacaatgatccagtcacctatgtggtccagaagcagtttatgagacagctgagtgccctgtcctcagatggggagggacagggtcggcctgtaccccggaggcacctgggtccatcagagaaggtgcaggtgacagaggcgaaggcagatggggcactgacccaggaggagaaagcagccattggcactgtggagctcagtgtgttctgggattatgccaaggccgtggggctctgtaccacgctggccatctgtctcctgtatgtgggtcaaagtgcggctgccattggagccaatgtgtggctcagtgcctggacaaatgatgccatggcagacagtagacagaacaacacttccctgaggctgggcgtctatgctgctttaggaattctgcaagggttcttggtgatgctggcagccatggccatggcagcgggtggcatccaggctgcccgtgtgttgcaccaggcactgctgcacaacaagatacgctcgccacagtccttctttgacaccacaccatcaggccgcatcctgaactgcttctccaaggacatctatgtcgttgatgaggttctggcccctgtcatcctcatgctgctcaattccttcttcaacgccatctccactcttgtggtcatcatggccagcacgccgctcttcactgtggtcatcctgcccctggctgtgctctacaccttagtgcagcgcttctatgcagccacatcacggcaactgaagcggctggaatcagtcagccgctcacctatctactcccacttttcggagacagtgactggtgccagtgtcatccgggcctacaaccgcagccgggattttgagatcatcagtgatactaaggtggatgccaaccagagaagctgctacccctacatcatctccaaccggtcagaagccgcctccctcgctccctgctcctccaggaattcccagcaggctctctggtgttcagggtccttgtccctcctttcccctaagcagaaaactggccctgccctgcccctgccccatttcctcctcatctgatcccccataggcggctgagcatcggagtggagttcgtggggaactgcgtggtgctctttgctgcactatttgccgtcatcgggaggagcagcctgaacccggggctggtgggcctttctgtgtcctactccttgcaggtgacatttgctctgaactggatgatacgaatgatgtcagatttggaatctaacatcgtggctgtggagagggtcaaggagtactccaagacagagacagaggcgccctgggtggtggaaggcagccgccctcccgaaggttggcccccacgtggggaggtggagttccggaattattctgtgcgctaccggccgggcctagacctggtgctgagagacctgagtctgcatgtgcacggtggcgagaaggtggggatcgtgggccgcactggggctggcaagtcttccatgaccctttgcctgttccgcatcctggaggcggcaaagggtgaaatccgcattgatggcctcaatgtggcagacatcggcctccatgacctgcgctctcagctgaccatcatcccgcaggaccccatcctgttctcggggaccctgcgcatgaacctggaccccttcggcagctactcagaggaggacatttggtgggctttggagctgtcccacctgcacacgtttgtgagctcccagccggcaggcctggacttccagtgctcagagggcggggagaatctcagcgtgggccagaggcagctcgtgtgcctggcccgagccctgctccgcaagagccgcatcctggttttagacgaggccacagctgccatcgacctggagactgacaacctcatccaggctaccatccgcacccagtttgatacctgcactgtcctgaccatcgcacaccggcttaacactatcatggactacaccagggtcctggtcctggacaaaggagtagtagctgaatttgattctccagccaacctcattgcagctagaggcatcttctacgggatggccagagatgctggacttgcctaaaatatattcctgagatttcctcctggcctttcctggttttcatcaggaaggaaatgacaccaaatatgtccgcagaatggacttgatagcaaacactgggggcaccttaagattttgcacctgtaaagtgccttacagggtaactgtgctgaatgctttagatgaggaaatgatccccaagtggtgaatgacacgcctaaggtcacagctagtttgagccagttagactagtcccccggtctcccgattcccaactgagtgttatttgcacactgcactgttttcaaataacgattttatgaaatgacctctgtcctccctctgatttttcatattttcctaaagtttcgtttctgttttttaataaaaagctttttcctcctggaacagaagacagctgctgggtcaggccacccctaggaactcagtcctgtactctggggtgctgcctgaatccattaaaaatgggagtactgatgaaataaaactacatggtcaacagtaaaaaaaaaaaaaaaaaaa

SEQ ID NO: 30462 - DNA, 1874 bp, Homo Sapiens
gaaatgccttggcagagtctggggtccctggactgagccatcagctgggtcactgagacccatggcaaggaaacaaaataggaattccaaggaactgggcctagttcccctcacagatgacaccagccacgccgggcctccagggccagggagggcactgctggagtgtgaccacctgaggagtggggtgccaggtggaaggagaagaaaggactggtcctgctcgctcctcgtggcctccctcgcgggcgccttcggctcctccttcctctacggctacaacctgtcggtggtgaatgcccccaccccgtacatcaaggccttttacaatgagtcatgggaaagaaggcatggacgtccaatagacccagacactctgactttgctctggtctgtgactgtgtccatattcgccatcggtggacttgtggggacgttaattgtgaagatgattggaaaggttcttgggaggaagcacactttgctggccaataatgggtttgcaatttctgctgcattgctgatggcctgctcgctccaggcaggagcctttgaaatgctcatcgtgggacgcttcatcatgggcatagatggaggcgtcgccctcagtgtgctccccatgtaccttagtgagatctcacccaaggagatccgtggctctctggggcaggtgactgccatctttatctgcattggcgtgttcactgggcagcttctgggcctgcccgagctgctgggaaaggagagtacctggccatacctgtttggagtgattgtggtccctgccgttgtccagctgctgagccttccctttctcccggacagcccacgctacctgctcttggagaagcacaacgaggcaagagctgtgaaagccttccaaacgttcttgggtaaagcagacgtttcccaagaggtagaggaggtcctggctgagagccgcgtgcagaggagcatccgcctggtgtccgtgctggagctgctgagagctccctacgtccgctggcaggtggtcaccgtgattgtcaccatggcctgctaccagctctgtggcctcaatgcaatttggttctataccaacagcatctttggaaaagctgggatccctccggcaaagatcccatacgtcaccttgagtacagggggcatcgagactttggctgccgtcttctctggtttggtcattgagcacctgggacggagacccctcctcattggtggctttgggctcatgggcctcttctttgggaccctcaccatcacgctgaccctgcaggaccacgccccctgggtcccctacctgagtatcgtgggcattctggccatcatcgcctctttctgcagtgggccaggtggcatcccgttcatcttgactggtgagttcttccagcaatctcagcggccggctgccttcatcattgcaggcaccgtcaactggctctccaactttgctgttgggctcctcttcccattcattcagaaaagtctggacacctactgtttcctagtctttgctacaatttgtatcacaggtgctatctacctgtattttgtgctgcctgagaccaaaaacagaacctatgcagaaatcagccaggcattttccaaaaggaacaaagcatacccaccagaagagaaaatcgactcagctgtcactgatggtaagataaatggaaggccttaacaagtttcctcctccacgttggacaattatgtcaaaaacaggattgtctacatggatgatctcacttttcaggaaacttaaaatttacccattattgggaagcttaaatgaattgaagctatgcaagtcttttatattattaaatatttaaaagtaaacctgtactaatctaaaaaaaaaaaaaaaaaaa

SEQ ID NO: 30463 - DNA, 7190 bp, Homo Sapiens
cttttagtttctcttctttctaaagaaggctcgcggagcccggctggagaacctcaccctcgccgagcctagaaccgagagggggccaccccaggcggtcaccagcagatttgcccgcgcgttctctttctttccacccagttgcccttgcggccggctgtaaacctgccactaggacccggtcggtgagatctagcctcttgacctgagagccgagagtggatcgctgggctgggctaacggcgacggagagcgcgccctcgctgactccgggcgcgcccagcagtagcaccgcccgcgcccgcccctggacacttgtaagtttcgatttccgatttccgcggaaccgagtcccgcgccgcggcagagccagcacagccagcgcgccatggcggacccggaggtgtgctgcttcatcaccaaaatcctgtgcgcccacgggggccgcatggccctggacgcgctgctccaggagatcgcgctgtctgagccgcagctctgtgaggtgctgcaggtggccgggcccgaccgctttgtggtgttggagaccggcggcgaggccgggatcacccgatcggtggtggccaccactcgagcccgggtctgccgtcgcaagtactgccagagaccctgcgataacctgcatctctgcaaactcaacttgctgggccggtgcaactattcgcagtccgagcggaatttatgcaaatattctcatgaggttctctcagaagagaacttcaaagtcctgaaaaatcacgaactctctggactgaacaaagaggaattagcagtgctcctcctccaaagtgatcctttttttatgcccgagatatgcaaaagttataagggagagggtcggcagcagatttgtaaccagcagccaccgtgttcaagactccacatctgtgaccacttcacccgagggaactgtcgttttcccaactgcctccggtcccataacctgatggacagaaaggtgctggccatcatgagggagcacgggctgaaccccgacgtggtccagaacatccaggacatctgcaacagcaagcacatgcagaagaatcccccagggcccagagctccttcttcacatcgtagaaacatggcatatagggctagaagcaagagtagagatcggttctttcagggcagccaagaatttcttgcgtctgcttcagcgtctgctgagaggtcctgcacacctagtccagatcagatcagccacagggcttccctggaggacgcgcctgtggacgatctcacccgcaagttcacgtatctggggagtcaggatcgcgctcggcctccctcaggctcgtccaaggctactgatcttggaggaacaagtcaggccgggacaagccagaggtttttagagaacggcagtcaagaggacctcttgcatggaaatccaggcagcacttaccttgcttccaattcaacatcagcccccaactggaagagcctcacatcctggacgaatgaccaaggcgccaggagaaagactgtgttttctcccacgctacctgccgcccgctcttctcttggctctctgcaaacacctgaagctgtgaccaccagaaagggcacaggcttgctttcctcagactacaggatcatcaatggcaaaagtggaactcaggacatccagcctggccctctttttaataataatgctgatggagtggccacagatataacttctaccagatccttaaattacaaaagcactagcagcggtcacagagaaatatcatcacctaggattcaggatgctggacctgcttcccgagatgtccaggccactggcagaatcgcagatgatgctgacccaagagtagcacttgttaacgattctttatctgatgtcacaagtaccacatcttctagggtggatgatcatgactcagaggaaatttgtcttgaccatctgtgtaagggttgtccgcttaatggtagctgcagcaaagtccacttccatctgccttaccggtggcagatgcttattggtaaaacctggacggactttgagcacatggagacgatcgagaaaggctactgtaaccccggaatccacctctgttctgtaggaagttatacaatcaattttcgggtaatgagttgtgattcctttcccatccgacgcctctccactccttcttctgtcaccaagccagccaattctgtcttcaccaccaaatggatttggtattggaagaatgaatctggcacatggattcagtatggagaagagaaagacaaacggaaaaattcaaacgtcgactcttcatacctggagtctctctatcaatcctgtccgaggggagttgtgccatttcaggcgggctcacggaactatgagctgagtttccaagggatgattcagacaaacatagcttccaaaactcaaaaggatgtcatcagaagaccaacatttgtgcctcagtggtatgtgcagcagatgaagagagggccagaccatcagccagcaaagacctcgtcagtgtctttaactgcgacctttcgtcctcaggaggacttttgcttcctatcctcaaagaaatataagttgtcagagatccatcacctacatccagaatatgtcagagtaagtgagcattttaaagcttccatgaaaaatttcaagattgaaaagataaagaagatcgagaactcagagctcctggataaatttacatggaagaaatcgcagatgaaggaagaaggaaaactcctattttatgcgacaagccgtgcctatgtggaatctatctgttcgaataattttgacagtttcctacatgaaactcatgaaaacaaatacggaaaaggaatttactttgcaaaagatgccatctattcccacaaaaattgcccgtatgatgccaaaaacgtcgttatgtttgtagcccaagttctggttggaaagtttactgaaggaaatataacgtacacgagccctcctccacagttcgacagctgtgtggataccagatcgaatccctccgtttttgtcatctttcagaaagatcaggtttacccacaatatgtgattgaatatactgaagacaaagcctgcgtgattagttagaaccgatgaatacagcgtcagaaggatgccataaccattctgttcctttacagaactaaattgccgcagacaggagttaaagttttatattttcctgctcagttatctaatgtcttagatcagtggtccccaaattttgctacatattagaatcatctgggaggttttaaacaaattctgatgcccaggttgcaccccatgccaatgaaatcatttctgggcgtcagcgccaggcagttgtatttttttttttttttttttttttgagactgaatctcactccatcgtccaggctggagtgcagtggcgcgatctcggctcactgcaacctctgcctcccgggttcaagcaattctcctgcctcagcctcccgagtagctggaactacaggcacacactgccgcgcccagctaattttttgtattttttagtagagacagggtttcactgtgttgcccaggctggtctcaaactcctgagctcaggcaatctgcccgccttggcctcccaaagtgctaggattacaggtatgagccaccatgcccggctggcagttgtattttttaaagcccttctgatgattccaatgtgttggaaagtttaccttgtctcagatgtaactggtaaaggctgatttctaaattttctgtaattgcagcaacctttctctcctgtctacccttttagtttactgtatgccatggttttgttttggttacattgaaagaaagttaatttggaaaatttgggagaaatctaatcatgcctattaaggatgtaagacattacagccttagaagaaagattgtgaaaagctggggagaaaatgcttaaggacatgctaggggaaaaaaaagtaaaattgaagtgctattgcagacatggctgcagtactgtaccttatcattctgatgaaactgatttggagcacccttttctttatcgctacatttatttaggggacaaactccatccaggttgactctctctggaatgcggtaataagagctggcaagtaaggctcagagagaagcaaccaactggagttaattgcccatttgggctctttgtataattatggcaaagtagacatttatgttctaattaatatgattacagagaaggctttttctcaggtcaggcttttcatgaaagtattttgagaacaatgaattgcaataaccagcttcacacaagcataactgataaacgcgagtgctattgtagtcttggcaagtgagccaagaacctaggagcagggccattcctactgaaggacgggccccctacggagatgaaatttgtttcctggtgagcacagaatcagaacaaagaacaatatcccaaagaggccctgtgtctaccaggagcttctttttccaaatgtaatggattatgtggaattgtagtgccatcggtttttacttagagcccttgacgtgcttggaccaatatttccttccttcttatgaaccaggtttttccttctgattttcccttttcaacattccttaccagtcaccaaagtttcctgttataatttcttttagcagacaagttataagtcagatttaattagcatcagagttgattttatattagtcagattttggatcatcacagagatctccacaactccttggcttaaacagctccaccggtaaaaaaaaaaaaaaaaaaaaaaaaaaaaaatagtttttttagagtagagttattttctgggagagttactacaaatgcttattctcattgacttatttctttcatggtaactttcgttttggagtgttcattttctgaacttgaccctcacattgtaggggtgcagtttgtccaactctttccaacagcccattagacaccactagctggatatttcacaggcatctttgattcaatatgtccaaagtggaactctccatctacctccctcacatgaacctgttcctctctcaggatctgtatgtaagtgaaaagcatcaccatctacccattggctcaagcagaaatctggaagtcatctttgactccttcctctccctcctgataaacatctaagcagtttctaagtctagttttacctcttaaatatctctgttcccttctaagttgtttgctgtgttttcttcagagcaagaaggttatattttttaaaatttacttagtaatgcacattcaaaacacacatcaagtcttcaggataaagttcaaaaccgctgtcatggccccatgtgatctctccctcccctacccctctatcatttagtttcttctgcgcaagccactctggcttcctttcagttttgtggttcccatttttagctagttcagtggttttcaatgggcatttctgcctttttttttctaaacgacaaatagaaatacatcttctttattatcctccaaatccaattcagaggtaatatgctccacctacacacaattttagaaataaattaaaaattaaataaaactaatatgaacataaagaggaaataaaaggtacctaacttgggcacagctgtaactgaagacctaatgaagtagtcagatgcttacaactatttataatgcatcaatttgaacttagaaggtaggagatcagatcatatgtgggaaaatgtaaaagcagggatatcagtgggcattagaataaaaactagggatacaataacttctttgcatatgacaatacttatttgtatataagagaaagaacgaaataacctttattgaaataaagatactatgcaagaaaatgtacagttgtcgaagtggagaaaatgaggatatattcttgcagacgagctataggtcatacatgaatgtctagtgagacattcaaaattcgtatagggtgcagagtaatttcttattgtgaggaactgtccaatgtattgcaagatgttctgcatacttggctctcacatactaaatgctagtagcgcccccacccccacgcccagtcacggtgacaaccacaaaccctatcagatctattcacctttttcagagcagatattttgtaacattctctttgctgacctgaaatgactcatagataatacaatctacttacacacatgaatttcttaaaaaaatcaatttaatgccctaactctcttattaaggagaaatagaaaagaagaaatttataatgaaaagaagatgaatttcattatgtaaacgctcaggcatgactacgctgtttgaaacagacagatgtttactcttccttgtaatgagtaggtttggatttaagagccgattagaggctacttcctgtaaacaagtacaggaaaatgaaactagacgggtgggggacactagaatgaaaaccagtgttagggtaaagacaaaacagactatgtacataatctgtatatgggaaaagaaagagcgaaattaccttacttaaggataataggacaagacaaattacagattgtctcagagaaaacaaatgagttactctctcggacaagctgtaggtcctacctaaatgtccagcaggacattagacagtcgtacagggtacagaataattcttcgttgtgtggcactaacccacacactgcaggacatcgttctccctggctgcatccactcagtgctgggagtagtccccagttattatgaaaccaccaataacccactgaccacagtgagaaccactgattttttccactgacctactgaatatctagcatccttagattggctcaactgttactttcctaaggagtccttctacagaataggtcagatcttggcctcccaaaccccttatttttaaaatactttgcgccttgctttgataatttgtattatgtatccaaactgaaattatctgctttctgcattagaatgtaagccccctgagggttgagtcagtctgtcttgtttgctgtgccacgcctgatgcccagcccagcagcatgctttgtacactgatatattgggtaaattttgttgaataaattaagctcaactatttgtatttcaatagttgagttgtattgcttcctgttcttcaagcttaatttgaactgtctaataaaaagaagtaattaaaaaaaaaaaaaaaaaaaaa

SEQ ID NO: 30464 - DNA, 4927 bp, Homo Sapiens
tgtctctggcactgtggcggactgaccacggcccgggcatgggctgcaagggagacgcgagcggtgcgtgtgccgcgggtgcgctgccggtgacaggagtttgctataaaatgggagttctggttgtactcactgttctgtggctgttctcctcagtaaaggccgactcaaaagccattacaacctctcttacaacaaaatggttttccactccattgttgttagaagccagtgagtttttagcagaagacagtcaagagaaattttggaattttgtagaagccagtcaaaatattggatcatcagatcatgacggtaccgattattcctactatcatgcaatattggaggctgcatttcagtttctgtcacccctccagcagaatttgtttaaattttgtctgtcccttcgttcttactcagctacaatccaagccttccagcagatagcagctgatgaacctccaccagaaggatgtaattcgtttttttcagtgcatggaaagaagacttgtgaatctgatacccttgaggctcttctactgacagcctctgaaagacccaaacctttattgttcaaaggagatcacagatatccctcgtctaatcctgaaagccctgtggtgattttctactctgagattggctctgaggaattttccaattttcaccgccagcttatatcaaaaagcaatgcaggcaaaatcaactatgtattcagacattatatatttaatcccaggaaggagcctgtttacctctctggctatggcgtggaattggccattaagagcactgagtacaaggccaaggatgatactcaggtgaaaggaactgaggtaaacaccacagtgattggtgaaaatgatcctattgatgaggttcaggggttcctctttggaaaattaagagatctgcaccccgacctggagggacagttgaaagaactcagaaagcatcttgtagagagcaccaatgaaatggcacctttaaaagtttggcagttgcaagatctcagtttccagactgctgctcgaatcttggcttctcctgttgagttggctttggttgtcatgaaggatcttagtcagaattttcctaccaaagccagagcaataacaaaaacagctgtgagctcagaacttagaaccgaagtggaagagaatcagaagtatttcaagggaactttaggattacaacctggagattcagccctcttcatcaatggacttcacatggatttagatacacaggatatattcagtctgtttgatgtgttgaggaatgaagctcgggtaatggagggtctgcatagattgggaatagaaggcctttctctgcataatgttttgaagctgaacatccagccctctgaggcagactatgccgtagacatccggagtcctgctatttcatgggtcaacaacctggaggttgatagcagatataattcgtggccttctagtttacaagagttgcttcgacccacctttcctggtgttattcggcagatcaggaaaaacttacataatatggttttcatagttgatcctgcacatgagaccacagcagagttgatgaacacagctgagatgttccttagtaatcatataccactaagaattggttttatctttgtggttaatgactctgaagatgttgatgggatgcaagatgctggagtggctgttcttagagcatataattatgttgcccaagaagtggatgattatcatgccttccagactctgacacatatctataacaaggtgaggactggagaaaaagtgaaagttgaacatgtggtcagtgtcctggagaagaaatatccgtatgtagaagtgaatagcattttggggattgattctgcttatgatcggaatcggaaggaagcaagaggctactatgagcagactggagttggacctctgcccgttgtgctgttcaatggaatgccctttgaaagggaacagctagaccctgatgagttagaaaccatcacaatgcataaaatcctggagaccaccaccttcttccaaagagcggtgtacttgggtgaactgccccatgatcaagatgtggtagagtatatcatgaatcagccaaatgttgttccacgaatcaattctaggattttgacagctgaacgagactacctggatttaacagcgagtaataacttctttgtggatgattatgctagatttactatcttggattcccaaggcaagactgctgctgtagccaatagtatgaactatctgacaaagaaaggaatgtcctccaaggaaatctatgatgattcttttattaggccagtaactttttggattgttggggattttgatagcccttctggacggcagttactgtatgatgccatcaaacatcagaaatccagtaacaatgttagaataagcatgatcaataatcctgccaaagagataagctatgagaacactcagatctccagagcaatctgggcagctctccaaactcagacttccaacgctgctaagaacttcatcaccaaaatggccaaggagggggctgcagaggccctggctgcaggagctgacattgcggagttctctgttgggggaatggatttcagtctttttaaagaggtctttgagtcttccaaaatggatttcattttgtctcatgccgtgtactgcagggatgttctgaagctgaagaagggacagagggcagtgatcagcaatggaaggatcattgggccactggaggatagtgagctctttaatcaagacgatttccacctcctcgaaaatatcatcttaaaaacctcaggacagaaaataaaatctcatattcaacagcttcgggtagaagaagatgtggcaagcgacttggtaatgaaggtggatgctcttctgtcagcgcaaccaaaaggagatccaagaatcgagtaccagttttttgaagacagacacagtgcaatcaaactgaggccgaaggaaggggagacatactttgatgttgtggctgtcgttgaccctgtcaccagagaagcacagagacttgctcctttgctcttggttttggctcagctgataaacatgaatctgagagtatttatgaactgccaatccaaactttctgacatgcctttaaaaagcttttaccgttatgtcttagaaccagagatttctttcacttcagacaatagttttgctaagggtccaatcgcaaaatttttggatatgcctcagtctccactgttcactctgaatttgaacacacctgagagctggatggtagaatctgtcagaacaccatatgatcttgataatatttatttagaagaggtggacagtgtagtggctgctgagtatgagctggaatacctgttactggaaggtcattgctacgacatcaccacaggccagcctccacggggactacagtttaccttaggaacttcagccaacccggtcattgtggacaccattgttatggccaatctgggctactttcagctgaaagccaacccaggagcttggatcctcagacttaggaagggacgctctgaagatatttatagaatttacagccacgatggcaccgattctccccctgatgctgatgaggtggttatcgtcctcaacaacttcaaaagcaaaattattaaagtgaaggttcagaagaaggcagatatggtgaacgaagacttgctgagtgatggaacgagtgagaatgaatctggattttgggattccttcaaatggggctttacaggacagaagactgaggaagtgaagcaagataaagatgacataattaatattttctccgttgcatctggtcatctctacgaaagatttcttcgcataatgatgctatccgtgctgaagaataccaagactcctgtgaaattctggttcttgaagaattacttgtcccccacatttaaggagtttataccttacatggcaaatgaatacaatttccagtatgagcttgttcagtacaaatggccccggtggcttcatcaacaaactgaaaaacagcgtatcatctggggttacaagatcctcttcctggatgtacttttcccactagttgttgacaagttcctgtttgtggatgctgatcagattgtacgaacagatctgaaagagttaagagatttcaatttggatggtgctccttatggttacactcctttctgtgacagccgaagagaaatggacggctacaggttctggaagtcagggtactgggccagtcatttagccgggcgaaagtatcatatcagtgcactatatgttgtggatctgaagaagtttaggaaaatagctgctggtgacagactcaggggacagtaccaaggtctgagtcaggaccctaacagcctttcaaatcttgatcaagatctgcccaataacatgattcatcaggtgccaattaaatccctccctcaagaatggctttggtgtgaaacgtggtgtgatgacgcctctaagaaaagggcaaaaaccattgatttgtgtaataatccgatgaccaaagagccgaaactggaagcagctgtgcggattgtcccggagtggcaggactacgaccaagagatcaaacagctacagatccgctttcagaaggagaaagaaacgggagcactgtacaaagagaagacaaaagaaccaagccgagaaggtcctcagaaacgtgaagaattatgatctctggagaaggacaggaaatcaccccatttgaaaaacagtttttataataaatgctagttttttctgatctgtctatacagctgctgataagccggctgggcaggagtgccacaccttttgattctgagcatttgattctgacttctgtactctggtggccactggatctttgggattaaagctctgttggatttgtacctcaaaaaaaaaaaaaaaaa

SEQ ID NO: 30465 - DNA, 3649 bp, Homo Sapiens
cccgacgcagggccgggccgggcccagggccgaggagcgcggcggccagagcggggccgcggaggcgacgccggggacgcccgcgcgacgagcaggtggcggcggctgcaggcttgtccagccggaagccctgagggcagctgttcccactggctctgctgaccttgtgccttggacggctgtcctcagcgaggggccgtgcacccgctcctgagcagcgccatgggcctgctggccttcctgaagacccagttcgtgctgcacctgctggtcggctttgtcttcgtggtgagtggtctggtcatcaacttcgtccagctgtgcacgctggcgctctggccggtcagcaagcagctctaccgccgcctcaactgccgcctcgcctactcactctggagccaactggtcatgctgctggagtggtggtcctgcacggagtgtacactgttcacggaccaggccacggtagagcgctttgggaaggagcacgcagtcatcatcctcaaccacaacttcgagatcgacttcctctgtgggtggaccatgtgtgagcgcttcggagtgctggggagctccaaggtcctcgctaagaaggagctgctctacgtgcccctcatcggctggacgtggtactttctggagattgtgttctgcaagcggaagtgggaggaggaccgggacaccgtggtcgaagggctgaggcgcctgtcggactaccccgagtacatgtggtttctcctgtactgcgaggggacgcgcttcacggagaccaagcaccgcgttagcatggaggtggcggctgctaaggggcttcctgtcctcaagtaccacctgctgccgcggaccaagggcttcaccaccgcagtcaagtgcctccgggggacagtcgcagctgtctatgatgtaaccctgaacttcagaggaaacaagaacccgtccctgctggggatcctctacgggaagaagtacgaggcggacatgtgcgtgaggagatttcctctggaagacatcccgctggatgaaaaggaagcagctcagtggcttcataaactgtaccaggagaaggacgcgctccaggagatatataatcagaagggcatgtttccaggggagcagtttaagcctgcccggaggccgtggaccctcctgaacttcctgtcctgggccaccattctcctgtctcccctcttcagttttgtcttgggcgtctttgccagcggatcacctctcctgatcctgactttcttggggtttgtgggagcagcttcctttggagttcgcagactgataggagtaactgagatagaaaaaggctccagctacggaaaccaagagtttaagaaaaaggaataattaatggctgtgactgaacacacgcggccctgacggtggtatccagttaactcaaaaccaacacacagagtgcaggaaaagacaattagaaactatttttcttattaactggtgactaatattaacaaaacttgagccaagagtaaagaattcagaaggcctgtcaggtgaagtcttcagcctcccacagcgcagggtcccagcatctccacgcgcgcccgtgggaggtgggtccggccggagaggcctcccgcggacgccgtctctccagaactccgcttccaagagggagcctttggctgctttctctccttaaacttagatcaaattttttggtttttaatcagttatcttgggaacttaacctggcccctcacctcttctgcaccccccgcccccgaaactgtctcgtaatgaatttctgctgtcctcctgggagtggacggccgggtcccgtcccccgggagcatcgctcggctcagcaccttggctcccagtgggggccccgtggagggcgcccgtagtgataagcacaccggcacgaacgtcaggtccattcctcgaagtcggagccctcactctgccctgtcctggggctggctgagggcgaacgccccacctcactttctagagccctgtctgtcctagctcctatctgaccttgtgtgtaaatacgtacatctgtttttaaagtggatgggcccctgagaactcagtgaaatgcagagttctccatgcacctaaagctcctttgtcgctctcatggctgtcagatcctggtccctccacactgggtgctggggagggaggaccctcggggctaccgcgcgcccccccatcccacagatcaggagccaaggagggagaacagggcagcctgtgggactctaggatgcttcagaagaagcgacggcaccgtcaaccctctgttttttaaaggtggttggagactgttaacactgagctcattgacttctagagattttatttttactggttgatctcttggtggttttcaacttcctgctggaaactagaggtggggcaccccccaccccccagcctcgcactgtgtccttggggaaggcccgcccccatcctggccggtgtcactgtggcccggccacccctgagcgcccagctccctacctcctggacgtctctgagagtccaggcagagcagagggcagcgctcggccggtcatgctggctcccttggccttgcagcgagcccctggcccacgccgagcgagggatgcttctccctacagcatgtccactcccccggcatggccaggtggggcccctggggcaatggcagtggtagaacgctcaacttggttgcggtaccatcagcccacctgcatttggctttcgacttgcttgttctaagtcacagcgccctcatctttttagcaaggtaaaaaaaccaaaatgggtgttatctctgatatcttgaaaccagcgttctgaatagaggtaggttgagttttctaggggaaaacaaatggagaaaagaggcatgaagaaaagtaaaccgagaacataattaggcatcgggcctaagtgtcctggggagattggaggggacggcagcgttctgcatgatggaggcgctgccgggccccgggtctgtgggggccgtgctctcagggcgtgtgcgggacgccacctgtgcacacctgctcagagcacggctcctcgcaggggtgaaggggcagaccaacgaaaccagatgagaccaacgacaccatgcgagacacgcttgcagacactgttgttttggaaatgtgcttccctccatctgaaatctcatccctccacccgcccactcgggcagctgtgccgtgggcagggcatgcgctcccctggctgagcaccccagagattctcctgcaccttcctcatgccgcacgctgctcatccgtctccatgtgtgtttagatccatgccattcactgactcactaacacctgcaaaatctttaaggaaaaaagctgaagggtacgaccatgcacatatgtgacctggaaaatgcaaatttagatcttttatgatttaattattattgtttcccatagaagttccctccctttgaaattaatatataatgtataaattctgcactgagccatggcggagctgggcagcccctaggttagagtggagacggaggcccaggcgcaggggtcacacctcatctggtttccttcccatctcacagcttagcttgtgcttctcaacaccaagtctttaagagcaataaaaactacaccatgaaaaaaaaaaaaaaaaa

SEQ ID NO: 30466 - DNA, 5079 bp, Homo Sapiens
ctgcacggagtgtccactgttcacggaccaggccacggtagagcgctttgggaaggagcacgcagtcatcatcctcaaccacaacttcgagatcgacttcctctgtgggtggaccatgtgtgagcgcttcggagtgctggggagctccaaggtcctcgctaagaaggagctgctctacgtgcccctcatcggctggacgtggtactttctggagattgtgttctgcaagcggaagtgggaggaggaccgggacaccgtggtcgaagggctgaggcgcctgtcggactaccccgagtacatgtggtttctcctgtactgcgaggggacgcgcttcacggagaccaagcaccgcgttagcatggaggtggcggctgctaaggggcttcctgtcctcaagtaccacctgctgccgcggaccaagggcttcaccaccgcagtcaagtgcctccgggggacagtcgcagctgtctatgatgtaaccctgaacttcagaggaaacaagaacccgtccctgctggggatcctctacgggaagaagtacgaggcggacatgtgcgtgaggagatttcctctggaagacatcccgctggatgaaaaggaagcagctcagtggcttcataaactgtaccaggagaagggacgcgctccaggagatatataatcagaagggcatgtttccaggggagcagtttaagcctgcccggaggccgtggaccctcctgaacttcctgtcctgggccaccattctcctgtctcccctcttcagtttcgtcttgggcgtctttgccagcggatcacctctcctgatcctgactttcttggggtttgtgggagcagcttcctttggagttcgcagactgataggagtaactgagatagaaaaaggctccagctacggaaaccaagagtttaagaaaaaggaataattaatggctgtgactgaacacacgcggccctgacggtggtatccagttaactcaaaaccaacacacagagtgcaggaaaagacaattagaaactatttttcttattaactggtgactaatattaacaaaacttgagccaagagtaaagaattcagaaggcctgtcaggtgaagtcttcagcctcccacagcgcagggtcccagcatctccacgcgcgcccgtgggaggtgggtccggccggagaggcctcccgcggacgccgtctctccagaactccgcttccaagagggagcctttggctgctttctctccttaaacttagatcaaattttttggtttttaatcagttatcttgggaacttaacctggcccctcacctcttctgcaccccccgcccccgaaactgtctcgtaatgaatttctgctgtcctcctgggagtggacggccgggtcccgtcccccgggagcatcgctcggctcagcaccttggctcccagtgggggccccgtggagggcgcccgtagtgataagcacaccggcacgaacgtcaggtccattcctcgaagtcggagccctcactctgcctgtcctggggctggctgagggcgaacgccccacctcactttctagagccctgtctgtcctagctcctatctgaccttgtgtgtaaatacgtacatctgtttttaaagtggatgggcccctgagaactcagtgaaatgcagagttctccatgcacctaaagcttctttgtcgctctcatggctgtcagatcctggtccctccacactgggtgctggggagggaggaccctcggggctaccgcgcgcccccccatcccacagatcaggagccaaggagggagaacagggcagcctgtgggactctaggatgcttcagaagaagcgacggcaccgtcaacccctctgttttttaaaggtggttggagactgttaacactgagctcattgacttctagagattttatttttactggttgatctcttggtggttttcaacttcctgctggaaactagaggtggggcaccccccaccccccagcctcgcactgtgtccttggggaaggcccgcccccatcctggccggtgtcactgtggcccggccacccctgagcgcccagctccctacctcctggacgtctctgagagtccaggcagagcagagggcagcgctcggccggtcatgctggctcccttggccttgcagcgagcccctggcccacgccgagcgagggatgcttctccctacagcatgtccactcccccggcatggccaggtggggcccctggggcaatggcagtggtagaacgctcaacttggttgcggtaccatcagcccacctgcatttggctttcgacttgcttgttctaagtcacagcgccctcatctttttagcaaggtaaaaaaaccaaaatgggtgttatctctgatatcttgaaaccagcgttctgaatagaggtaggttgagttttctaggggaaaacaaatggagaaaagaggcatgaagaaaagtaaaccgagaacataattaggcatcgggcctaagtgtcctggggagattggaggggacggcagcgttctgcatgatggaggcgctgccgggccccgggtctgtgggggccgtgctctcagggcgtgtgcgggacgccacctgtgcacacctgctcagagcacggctcctcgcaggggtgaaggggcagaccaacgaaaccagatgagaccaacgacaccatgcgagacacgcttgcagacactgttgttttggaaatgtgctcccctccatctgaaatctcatccctccacccgcccactcgggcagctgtgccgtgggcagggcatgcgctcccctggctgagcaccccagagattctcctgcaccttcctcatgccgcacgctgctcatccgtctccatgtgtgtttagatccatgccattcactgactcactaacacctgcaaaatctttaaggaaaaaagctgaagggtacgaccatgcacatatgtgacctggaaaatgcaaatttagatcttttatgatttaattattattgtttcccatagaagttccctccctttgaaattaatatataatgtataaattctgcactgagccatggcggagctgggcagcccctaggttagagtggagacggaggcccaggcgcaggggtcacacctcatctggtttccttcccatctcacagcttagcttgtgcttctcaacaccaagtctttaagagcaataaaaactacaccatgaatgtttgaatttttttttttttgggggggggagggtggattttgcttttcatccagaaggaaaaggggaggagagctcctttacattttttaaattaaattcataaatcccagaacagtctttttttttctttttcctttacaccctacttctgagcttaattcagttgatgttatgtccaaattcaggctgagtgctcaggctgaagcaactctgtagcccacagtccgtgctggccactgtcggggtgaggcacattctaggcctggcatcgctgatgccctctgcacccagtccttgagccaggccgaggacaggaagggcattgctggcctgtagctcctgttacccacccagagccaggcgccacactggaggctcccaggcgggagggcccaggcccacccacgggcgtctggccggtcaagctcccagcctgggccgtggtctcctggggacgccgctggcctcccagcttaggcccaggtgccaggtgtcatggggtctcctgcccatcttcccaaggatgccattgctgtcttcatcgtcttcccccgtgtgagacactggttgtctggtactcggcgacagtgtaccagacgcgcaccctatgtgaggtgctttaaggtccctgtcctcaggaagcgcagtctggtggaagagatgagcgctgaacaaatcactaaataacacaaaacaacaatgtaagcagcactttcttgtgtaaaaaaaaaaaaaaaagcacgtcctgtcgatgaattttgagtctctctgccttgcctgtcccgactccctttcgcgcaccgtggcatgagaatctttcctcacgctgttcgttgcggtattgctgagcattgatgttgatttgaaggaaaagccgtggttggacccagctgtgtgtttcactcacgtgcaattgagtagctgttgccaggctgtccatgcctgttgtgactaccggttggggtcagatttggggtgaagaatgagtaagtttctgcatgctttgtctctacctgagacacttctacaacaagccaagtataatctctccagccctgcagattttcacctgacttgttcagccccatgcgtagactcccgctgcaggcctctggcctgtggctcactgcatgcagcccctggcgtgcaatactagtgctccacggcgcgatgtgcttctagcccttgcactgcacctaggctcagggttcaaacggccagcccgaaaagcctgcctgccttctttctggaaacagcacgtccccggccgtgtgcctgcccctttctctactgagctagtccccaaaccaaaggcaagccccctcgggcctcgggggatggggccggccacacccctgactccgccctggctctgccccatacccctgccgtggggccgacctgggggatgcagacatccggctccgtattcctgcctatcggggccaggatgcaaaaacaatttttgcgtaaaagatgtcacactgatctgctggagtggggtggacacatgaattcagttttatcatgaacactcgccactggctgcttgttaattcagggataatggtggcattcttacaaactgctcgggaaatagaatgacgggaacacttttagggagcccaggaagttaccagggacattggtgtcgccggcccaggcaacagcagcgtacgcttttcaaagatcattgagttgtcttagaatttgaagctgtgtaatgacaatgtcacctggagttcgtctccatttcttaactttttgttgcacaagtatttggacagaagtcgaactgtgaatgagatactgaaatgcactaaattgtattacattaaactggagttacttgatacaataaaaaaaaaaa

SEQ ID NO: 30467 - DNA, 1774 bp, Homo Sapiens
tgaacccagccggctccatctcagcttctggtttctaagtccatgtgccaaaggctgccaggaaggagacgccttcctgagtcctggatctttcttccttctggaaatctttgactgtgggtagttatttatttctgaataagagcgtccacgcatcatggacctcgcgggactgctgaagtctcagttcctgtgccacctggtcttctgctacgtctttattgcctcagggctaatcatcaacaccattcagctcttcactctcctcctctggcccattaacaagcagctcttccggaagatcaactgcagactgtcctattgcatctcaagccagctggtgatgctgctggagtggtggtcgggcacggaatgcaccatcttcacggacccgcgcgcctacctcaagtatgggaaggaaaatgccatcgtggttctcaaccacaagtttgaaattgactttctgtgtggctggagcctgtccgaacgctttgggctgttagggggctccaaggtcctggccaagaaagagctggcctatgtcccaattatcggctggatgtggtacttcaccgagatggtcttctgttcgcgcaagtgggagcaggatcgcaagacggttgccaccagtttgcagcacctccgggactaccccgagaagtattttttcctgattcactgtgagggcacacggttcacggagaagaagcatgagatcagcatgcaggtggcccgggccaaggggctgcctcgcctcaagcatcacctgttgccacgaaccaagggcttcgccatcaccgtgaggagcttgagaaatgtagtttcagctgtatatgactgtacactcaatttcagaaataatgaaaatccaacactgctgggagtcctaaacggaaagaaataccatgcagatttgtatgttaggaggatcccactggaagacatccctgaagacgatgacgagtgctcggcctggctgcacaagctctaccaggagaaggatgcctttcaggaggagtactacaggacgggcaccttcccagagacgcccatggtgcccccccggcggccctggaccctcgtgaactggctgttttgggcctcgctggtgctctaccctttcttccagttcctggtcagcatgatcaggagcgggtcttccctgacgctggccagcttcatcctcgtcttctttgtggcctccgtgggagttcgatggatgattggtgtgacggaaattgacaagggctctgcctacggcaactctgacagcaagcagaaactgaatgactgactcagggaggtgtcaccatccgaagggaaccttggggaactggtggcctctgcatatcctccttagtgggacacggtgacaaaggctgggtgagcccctgctgggcacggcggaagtcacgacctctccagccagggagtctggtctcaaggccggatggggaggaagatgttttgtaatctttttttccccatgtgctttagtgggctttggttttctttttgtgcgagtgtgtgtgagaatggctgtgtggtgagtgtgaactttgttctgtgatcatagaaagggtattttaggctgcaggggagggcagggctggggaccgaaggggacaagttcccctttcatcctttggtgctgagttttctgtaacccttggttgccagagataaagtgaaaagtgctttaggtgagatgactaaattatgcctccaagaaaaaaaaattaaagtgcttttctgggtcaaaaaaaaaaaaaaa

SEQ ID NO: 30468 - DNA, 1275 bp, Homo Sapiens
gtctccgcctgcaggtgcagacatctggaggagagagtcggagagcagaaaccacttggctcccagacaattcccctacaggctttgggcctggaattgaggagaaagtgagctaagttggggtggggtgagtccaaagaagcacgggctgggccaagctaagctgctctgggctgggctgatccctccccactcaggggcgggaccccaggaggagggagaggacagagccactgcagaggaccagactgggaaaacaacgatatggcaggagccagtcttggggcccgcttctaccggcagatcaaaagacatccggggatcatcccgatgatcggcttaatctgcctgggcatgggcagcgctgcgctttacttgctgcgactcgcccttcgcagccccgacgtctgctgggacagaaagaacaacccggagccctggaaccgcctgagccccaatgaccaatacaagttccttgcagtttccactgactataagaagctgaagaaggaccggccagacttctaagccaggctgggctgccagtgccatgcaagccacagccagccagcccatccacttcttccactcctccccgcaggccccaaggcatcactccggccaccctgtcccgctactgcttacacaggccgggttcccacgcagaggggaggctgctccacccctactctcctcccttgctcccagcagcggaagcgcctctgacccttggcttgagtcccacgtgggggaggaggaggcaggcagcaccagcaggggtccaccaagagcccagaccagcccctctgccctcctacccgggcctcgaagggtgtggcacaggctacgtgttgagcgtggcctacgtgagccaacaagaagcaggggcctctgagtgccaagcgacgtggcgggctccacgttagcccaggctctgagagccagcccaggggcggcgctgctcagcttgggctggtccagggcctgcccaggctggggcacctttgcctcctgaggcgcagcgcactcctcccctgcccaagcctactgcctcccgctgccgccagtaccccctccagccccacacctgggcctccccctgccactcccctcccttgctcccctctgtccccagggatcaaacagaagcagccgtgggcaaaatacaatttcatttaacaaattgaaaaaaaaaaaaaaaaaaaaaaaaaaaaaaaaaaaaaaaaaaaaaaaaaaaaaaaaaaaaaaaaaaaaaaaaaaaaaaaaaaaaaaaaa

SEQ ID NO: 30469 - DNA, 1994 bp, Homo Sapiens
tggcttctgcgtggtgcagctgcgcacgtgtttcagccggcagcgctttaagatttccggggatggaatccgaaatggaaacgcagagcgccagggcagaggagggctttacccaggtcacccgcaagggtggccgacgggcgaagaaacgacaggctgaacagctgtccgcagcaggagagggcggggatgcgggccgcatggacacagaggaggccaggccggcgaagaggcccgtcttcccacccctctgtggggacgggctcctgagtgggaaagaagaaacaaggaaaattccagtcccagctaacagatacacaccattgaaagaaaactggatgaagatatttactcctattgtggaacatttgggacttcagatacgctttaacttgaaatcaaggaatgtagaaatcaggacttgtaaagaaaccaaggatgttagtgctctgacaaaagcagctgattttgtgaaagcttttattctcggctttcaggtggaggatgcacttgccctcatcaggttggatgacctcttcctagagtcttttgaaattacagatgttaaacccctaaagggagaccatctatccagggcaataggaagaatcgctggcaaaggaggaaaaaccaaattcaccatagagaatgtgacacggacaaggatagttttggctgatgtgaaagttcacatccttggctccttccaaaatatcaagatggcaagaactgccatttgcaacctaatcttgggaaatcctccttccaaggtttatggcaatattcgagctgtggctagcagatcagcagatcgattctgatttcaagtcagagactttttatcttgcctttggactctggtgaaaaatactttacagtggtcggtcacaagaaaccagctgaacaatttcagtcatttgaagcctccgtcccttcttccattctcagccagaagcataaacagaaaagaaagatttaagaggattcacactcaacaggttttaggataatttaaatatcaaaaattgattgttatacttaacacattaggtataatttatcatttatctgaaatcacatgtagcagattgcatagtctgtaatcctctcagagggaaacttcttgtttaaacagctctatatggatttatacttttatatttataaatttataacttcatacaaatttataaacatttctttataaattgtaatttaatagattatctcagaaaaacctctctgaatgatgacccttccttaatactgggtgatgtgtgaatatttgtttgttggcagacagggtctcactttgtcacccaggctagagtgcagtggtgcaatctcagctcactgcagcctctgcctcctgagttcaagtgatcctcctgcttcagcctccctagtagctgggactacaggtatgcaccaccatgcctggctaattttttgtattttttgtagagatggggtttcgccatgttgaccaggctggtcttgaactcctggcctcaagggatccgtccgcctcagcctcccaaagtgctgggattacaggcataagccactgcgcctggccttgatgtgtgaatatttgagaggtcataagcagtggttttggccataccgtattataccatatacatcagtaagagctcatcttggaacctgttttgcagtttcttgcagtttcaaaaattaaagacctacatcacagggttaatgtgaagaaagctttatttttcaaatgagtatttaatgaaagtatacataaccaatgttgggtatacagatgcttctcaacttatgatgggtttaggtccagataagcccactgtgagttgaaaataccaaaagtcaaacatcatagcttagcctaccttaaaagggctccgaacactacattagcctacagttgggcaaaatcgtctaatacaaagcctattttataataaagtatgttgaatatctcatgtaaaaaaaaaaaaaaaaaa

SEQ ID NO: 30470 - DNA, 4075 bp, Homo Sapiens
acatgccggaggaggcgggcttcccgccggccaagagattccggccaggctctggacctccgagccgcgctgggtccttccctcccgggaggcaagtggtgatgctgctgactgcgggcagcggcggcagaggaggaggaggaggccggaggcagcagccgcccctggcccagccctcggccagtccctaccctgaagctgtggagctgcagcgccggagtctgcccatcttccaagcgcgggggcaactgttggcccagctccgaaacctggacaacgcggtcctcatcggggaaactggctctgggaagacaactcagatccctcagtacctgtatgaaggagggatcagccgccagggcatcattgctgtgacccagcctcgtcgagtagctgccatctctcttgctactagagtctcagatgagaagagaactgaacttgggaagctggttggctatacagtgcgctttgatgatgtcacctcagaagacaccaggatcaagtttctgacagatggcatgcttctgcgtgaagcaatttcagactctttgcttcggaaatacagctgtgtcattttggatgaagctcacgaacggactatccacacagatgtgctctttggagtggtgaaagctgcacagaagaggagaaaggaactcgggaaacttcctctgaaagtgattgtgatgtcagctacgatggatgtggacctgttctctcagtatttcaatggcgcccccgtcctctacctagagggtcggcagcatccgatccaggtgttttacaccaaacagcctcagaatgattacctgcacgccgcgcttgtctccgtcttccagatccaccaggaagccccttcttcacaggacatcctggtgttcctcactgggcaggaggagatcgaagccatgagcaagacgtgccgagacattgcaaagcacctcccagacggctgccctgcgatgctggtccttcctctgtacgcctccctgccctatgcacagcagctccgagtcttccaaggggccccaaagggctatcgcaaagtgatcatttcaaccaacatcgctgaaacctccataaccattacaggaataaaatatgtagttgacacgggcatggttaaagcaaagaagtataaccctgacagtggtcttgaggtgttagcagtgcagcgggtatcgaagacgcaggcttggcagcgcacagggagggctggcagagaggacagtggcatctgctaccggctctacacggaggacgagtttgagaagtttgataagatgaccgtgccagagatccagaggtgtaacctggccagtgtgatgcttcagcttctagcaatgaaagtcccaaatgtgctcacctttgacttcatgtcgaagccatctccagatcacattcaggcggccattgcccaactggacctgttaggtgctcttgaacataaggatgaccagcttaccctgactccaatgggaagaaagatggcagcatttcctttagaacccaaatttgccaaaaccatcctcatgtcccccaaattccactgtacagaggagatcctgaccattgtctccctgctgtctgtggacagcgtcctccacaaccctccttcccggcgagaggaagtgcaaggggtccgcaagaagttcatatccagcgagggggatcacatgaccctgctcaatatctatcggaccttcaaaaacctaggcggaaataaggattggtgcaaagagaattttgtcaacagcaagaatatgacgctggtagcagaagtcagagcacagctgagggacatctgcttaaagatgtcaatgccaatcgcatcatcccgaggagacgtggagagtgtccgccgctgcctggctcacagcctcttcatgagcaccgccgagcttcagccagatggcacctatgccaccacggacacccaccagccagtggccatccacccgtcgtctgtcctcttccactgcaagccggcctgcgtcgtgtacactgagctgctctacaccaacaagtgctacatgcgggacctctgcgtcatagatgcacagtggctgtacgaggctgcccctgagtactttaggaggaagctgagaaccgccagaaactgagccgccccaggatgccgccagaatcactggtccctgggagcttggactacagttgtccttacagcaggcttccaggttggcgcttagagaagccttggaatcagctgaaggtgcctgacttccaggagcgtgaaagcatctttgctcaactcctgggactgaaccatatagacatggacatatcatttgtacctggaaacctcaaaattatgcttttggttcttactgggtgactttgacttaatttaacacctgagcctcagttttctcatctgccaaatgggagtaataataataatccttataaaattgggttcataaagtttagagaaaaggaatggaaagtacccagaactatgcctggagcacgcacgacacacgtacagtgagttgggagccgttaggctgaatgttactgcttgccatatgatgtgaagtacagcaatatcccaagttcttgtgactgagggagattttctggaagggccacaggaggttgcggagcttggatgttgcccttagttcttgtttaatgtctctctgaatgcagttttaaaatagaaaacaaaactgacttctgtagaagtttccagagggaggtgctgttatctcgtacctcctgggatggcgatccctactgaacgcttgtgtctcagggtggaccactctgtgtctgtctccaagcagagaccagtaaaggagcctcctggtcctcagtgcgtgaccctgtcagtgctttcaggagacatgtaagcttcctgggtgaaggttgatttgtaccttctgaatcctgtcacgtgtagacatgggaaactgacctatcagtgttttgtgtgtgtaggtgactcccacatacacagttgccatttttctctctaactgggcaccagtgaacatgcgggcatgaggagtgactgtgtaccatttcagctgtttcttttcgggcagtcccctggtcagagggggtgggggtgggggaggggagaggggtacctagaacccagagaacattggcttatgccagataccacaccacatctgggcttacattcttgtatcttttttggtgtgtgggcggggggggtggggggcagttcagtgaagtctagaagacctgctggacaaattctaaaagagctagagctgtaacacttattcttgcatcttattaattttctatgatattttttccttcttcgtagggacttgggacaatctggctttgctgctttctactgctaggcacctctctctaaccctcattgtcagagggaattggaggatatccacagtctgttcctgttctgatattctgagcagagaaaaggcactaacggttcctcttagctatttaattatcagaagcaagtaatctttccccagataatattttgccctagaagaagccgtgatttagctcttttattgtgcttacttggtccaaatacatctgtggggtgttttgtcatttcttaatgaatgaatcatagttataaccaggggccaagctgcccaagaggctcttcagagatcatggatgctctctttctggaagctgtggcctgatggagcagccccattccagggtcccatctgtccggagttgtgtatgtcaagtccggctcagtctttatttccaacactagccgtggtcctgtgcagtcaagctctcagctagtgtttagggctgtctgtcagaaatggttatacgtgggcaaaagaagatctgacagctcctatataccttatcttactgaattcttaaactttgaaccagttcttccacttactgacttgttaccactgctgactttctgaaaagttttccagtttttgttttttgttttttgttttccagtaggggattagaatgtttagtcctacttagtaagaaaaatattgtatttttaatcattcatagtgctggtaaaaaaaaaaaaaaaaaaaaa

SEQ ID NO: 30471 - DNA, 2057 bp, Homo Sapiens
cactcactctctcccagccttccttacgaagcctgtgactttcgtgactgctttctcttttttgttttccttttttctttttttttttttttcctggctcagcttgaaacagagcctcgtaccaggggaggctcaggccttggattttaatgtcagggatggaaaaacttcagaatgcttcctggatctaccagcagaaactagaagatccattccagaaacacctgaacagcaccgaggagtatctggccttcctctgcggacctcggcgcagccacttcttcctccccgtgtctgtggtgtatgtgccaatttttgtggtgggggtcattggcaatgtcctggtgtgcctggtgattctgcagcaccaggctatgaagacgcccaccaactactacctcttcagcctggcggtctctgacctcctggtcctgctccttggaatgcccctggaggtctatgagatgtggcgcaactaccctttcttgttcgggcccgtgggctgctacttcaagacggccctctttgagaccgtgtgcttcgcctccatcctcagcatcaccaccgtcagcgtggagcgctacgtggccatcctacacccgttccgcgccaaactgcagagcacccggcgccgggccctcaggatcctcggcatcgtctggggcttctccgtgctcttctccctgcccaacaccagcatccatggcatcaagttccactacttccccaatgggtccctggtcccaggttcggccacctttacggtcatcaagcccatgtggatctacaatttcatcatccaggtcacctccttcctattctacctcctccccatgactgtcatcagtgtcctctactacctcatggcactcagactaaagaaagacaaatctcttgaggcagatgaagggaatgcaaatattcaaagaccctgcagaaaatcagtcaacaagatgctgtttgtcttggtcttagtgtttgctatctgttgggccccgttccacattgaccgactcttcttcagctttgtggaggagtggagtgaatccctggctgctgtgttcaacctcgtccatgtggtgtcaggtgtcttcttctacctgagctcagctgtcaaccccattatctataacctactgtctcgccgcttccaggcagcattccagaatgtgatctcttctttccacaaacagtggcactcccagcatgacccacagttgccacctgcccagcggaacatcttcctgacagaatgccactttgtggagctgaccgaagatataggtccccaattcccatgtcagtcatccatgcacaactctcacctcccaacagccctctctagtgaacagatgtcaagaacaaactatcaaagcttccactttaacaaaacctgaattctttcagagctgactctcctctatgcctcaaaacttcagagaggaacatcccataatgtatgccttctcatatgatattagagaggtagaatggctcttacaactcatgtacccattgctagtttttttttttttaataaacgtgaaaactgagagttagatctggtttcaaaacccaagactgcctgatttttagttatctttccactatcctaactgcctcatgccccttcactagttcatgccaagaacgtgactggaaaggcatggcacctataccttgattaatttccattaatggaaatggttcgtcctgagtcatctacgttccgagtcaggctgtcactcctactaccaatggccactgtgagccacagaaggaagacatgtacgtgctgttctactttatatgatgtgagaagccaacatcagtgtcccttggcagcagtctacaggcataacttgttttattgtgctgaattttattgtgcttctcaaatattgcacttttaaaaaaattgaaagtttgtggcaatgctgttgagcaaatctgctggcatctttcttcccaaaggcatgtgctcacttcatgtctctgtatcaattgtcataattttcgcaataaacttgattattattaaaaaaaaaaaaaaaaaa

SEQ ID NO: 30472 - DNA, 4559 bp, Homo Sapiens
catgaggctggcgagctgcaacaagtcgtgtgggacgaacccggatggcatcatcttcgtgtccgagggcagcaccgtgaacctgaggctgtacggctacagcctgggcaacatctccagcaacctgatctccttcaccgaggtggacgatgccgagaccctccacaagtccaccagctgcctcgagctcaccaaggacctggtcgtccagcagctggtcaacgtgagccgcgggaacacgtccggcgtgctggtggtgctcaccaagttcctccggaggagcgagagcatgaagctgtatgcactgtgcacccgggcccagcccgacgggccctggctgaagtggacggacaaggactcactgctcttcatggtggaggagcctgggaggttcctgcctctctggctgcacattctcctaattacggtgctgctggtgctgtcgggcatattttctggcctcaacctcgggcttatggccctggaccccatggagctgcgcatcgtgcagaactgtggcaccgagaaggagaggcgctatgcccgcaagattgagcccatccggcgcaagggcaactaccttctctgctcgttgctcctagggaacgtgctggtcaacacctccctcacaatccttctagacaacctcatcgggtccggcctcatggcggtggcctcctccaccattggcattgtcatctttggggagatcctacctcaggccctgtgctcccgacatgggctggctgtgggtgccaacaccatccttctcaccaaattctttatgctactcaccttccccctcagttttcccattagcaagctcctggacttttttctgggccaggagattcgcactgtttacaaccgggagaagctgatggagatgttgaaggtgacggagccctataatgacctcgtgaaagaggagctcaatatgatccagggtgccctggaactacggaccaaaactgtagaggatatcatgacccagctccaggactgcttcatgatccgcagcgatgccatcctggacttcaacaccatgtcggagataatggaaagcggctatactcgcatcccggtgttcgaagacgagcagtccaatattgtagatattctctacgtcaaagacttggcctttgtggaccccgatgactgcacccccctcaagactatcactcgcttctataaccacccggtgcactttgtcttccatgacaccaagttggatgccatgctggaggagttcaagaaggggaagtcccacctggccatcgtgcagaaggtaaacaacgagggtgagggtgaccccttctacgaggtcctgggcctggtcaccctggaggacgtgatcgaggagatcatcaagtcggagatcctggacgagtccgacatgtacactgacaaccgaagccggaagcgggtgtctgagaagaacaagcgtgacttctctgccttcaaggatgcggacaatgagctcaaagtgaaaatctccccgcagctcctcctggccgctcatcgcttcctagccacagaggtctctcagtttagcccctccctgatatcagagaagatcctgctgcggctactcaagtacccagatgtcattcaggaactcaagtttgacgagcacaataagtactacgcccgccattacctgtacacccgaaataagccggccgactacttcatcctcatcctgcaggggaaggtggaggtggaggcagggaaggagaacatgaagtttgagacgggcgccttctcctactatgggactatggccctgacctcggtcccctccgaccgttccccagcacaccccaccccactcagccgctcagcctccctcagttacccagaccgcacagacgtctcaactgcagcaaccttggcaggcagcagcaaccagtttggcagctctgtcctgggccagtacatctctgacttcagcgtccgggcactcgtggacttgcagtacatcaagatcactcggcagcagtaccagaacgggctgctggcttctcgcatggagaacagccctcagtttcccatagacgggtgcaccacccacatggagaacttggccgagaagtctgagctgcctgtggtggacgagaccacaactcttctcaacgagcgtaactccttgctgcacaaagcctcccacgagaatgccatctgacaggagggcccggggccccctgcccaccctgcgggggcctccccagtgggcccacatgaagagagggaacctgttagtccagaaaggatacggatagatagcctgtctgactgaacagccagatggcccccagcctatgggggatctggcctctgccagggacctctgagtagctctgaggtggcactgtccagccctggatagggggggcagtgggccagctaccgtaagcaaaggctgttttttactgagagaatttctaaagtaggctcatcacttttttttaaatatcattttgggaagggaagacagggttaaggaactttatttaaaaaaaaaatatttttttcctaaaaactataaaagaggaagggtttcttgtcccgggaagcaacggacataatctgttcccagccatggccttccagcttgtgtccctgattcagggagctctcccttcctcctcctcctcctcctccggaggtgggatcccagagcctgccagtggaggcttatctgttgggaggaagacagctcttcacagaagcaaagaacaaaatggcatggagatcagctgcctgagcacctgcgctgtagcttatctgacaacgctgaggccacgagctcctgggtagctgtgatcagggacatgataatctgagctatgcagaggagcacatctgttgtcaactgctgtacccagaaatctagaactctgccgacagcctctcctggtgagtcgggactcagctgaggacacatccccaccctgcctcccatctggccctttggacaactggccctttgtgacagggctgactcaagtgttaggcagggtctcaggcctttgattgctcacccctgctccccaggccctgccctcacttttaccaaaggttctccctcggcgggagggcatctgtgttggaggtgatttgtctgggttcttccttttggttccagaaggaactgtcagtcatcagcatctgcgttgttagcagtcagtaccacccccgccccacaatgacagtcaaggctgacttgttgactgaagcctttttcccagaccccttatttcgaatccccaagcttcagtccctcttgggggtggagacaagaggacatgtgggaagccacggaagcaggttctttatgtcctctcctctgtggctggcaaggctcacctggccttatccacccacttatggaacctcaggagaggagggctcctcctaaaggcatgcagcttgcagcccctctttctcacacgtgtgatcctagcgtgagaggtcatcctgcccttgctgaagttagtagtactgtactaagagctctgccctcatgtgaattcctgccctggcgcctcttccctggggctgaatcaggccctgctgcaaaactccaggcttcccagggttggggaggctgtgggaccaaggtccatgttggtccttccactgggtgcagcaggagctgggtcccgagagcctggcaggtgaaactctgcaggccttccgcctgattattatttattcactcctttcctcaccccaagtgccctgctctccaggtgcctagagtatcctaactcttaggaccagggattgtcttgcaccaagtatgcctacccctggccagtctgaggtctcctagccatagaactgactcctggaagcctggagagaaggtggtgacacccatgggttctcaactgtaaggaaaaaagacaccagacttttgttccctagtgggggaaagcccttagtcttgtacaggagcagcttgctcccaagtccttttggaagctggcagagctatattcctgacagccctgactgccaggtagagcaaaagacattggtgggggtatgtgaagcaaaaggggcaggtgcacacacctccacagtgacctctgtgcacacggttaccaccaactggctggccctcctcctcttccctggcccattgatcatcccttctcacagagggtcatcattatttccaaatattgtttgtctgatgacttcctcttcccagtgcaatttttcccttcctatttcaacctctggttcctgggatgagccataccctggaactggcccacccactgtgtcttccacgtaagggagacctttgcaaagggcatccaaatgggtaggcaggtgacagccgccgtatttattttgcataatattttaatttgtatatttttgtgatttattttggcgttatgagtttgactctcggggagttttgttgttatgactcttgtgtcttttgtcacaaaacaatgatatttgctaaacgatatatggaatttatttttgattggtaataaaaaatcaaatatgtataaaaaaaaaaaaaaaaaaaa

SEQ ID NO: 30473 - DNA, 1926 bp, Homo Sapiens
cttcccttcccgcgttccccgggagaaacatggccgggagcagcgaggaggcgccagactacgggcgaggcgtcgtgattatggatgattggccagggtatgacttgaatttattcacgtacccacagcactattatggagacttggagtatgtcctcatccctcatggtatcattgtggacagaattgagcggctggccaaggatattatgaaagacataggatatagtgacatcatggtcctgtgtgtgcttaaaggaggttacaaattctgtgctgatctcgtagaacaccttaagaacatcagccgaaattcagatcgatttgtctcaatgaaggttgatttcatcagactaaaaagttacaggaatgaccagtccatgggtgagatgcagataatcggaggcgatgatctttcaacgctggctggaaagaatgttctcattgttgaggatgttgtcggaactgggaggaccatgaaagcactactcagcaatatagagaaatacaagcccaacatgattaaggtagccagtttgttggtgaagagaacatccagaagtgacggctttagacctgactatgctggatttgagattccaaacttatttgtggtgggatatgccttagattacaatgaatacttcagagatctgaatcacatatgcgtcatcaatgagcacggtaaagaaaaatatcgagtctaaagacatgaattctcaccactaaagtcccagatagcatcatatttacgcctgtacttgggaagccagctgtcaagtttgtccccccaggcatcttcactcagcaggatataaaagaaaaaaatgttcaaatgagagagctttcttttctgaggttaatataaagagtatcaaaggttcctaaggaaaagaaagcagtgcttttatttgacttgttccaaattaaacactccgccttgtgactcagcaatgctatctaccttcacactcctgagctccgccttcctttgttttgatacagtcattatatttgattagtattcccaggaatacccccacctagttactcaaatatttttcacttaactttttatactcttattttggtaataagcttacaatattaagaagctggggacttttttttaactgaagacttgagtcccctataccgggaatgcagctattaatagattcccatattttaaaaggagggaaaggacaatttaatataaatttctgtttgtgcatttctgacaggccattattatctgctttgacaaagcctttctgaaacgcagtgtacaatgaatcttaatgatgttatgaaacgagctttgctcggggctcttgattggagcttccggtatgtgatgacggtatgtcatgtatgcatggatgtactcaactgtgtttaatactctgaattttaattagaaaaaaatacaatagcagcaaggccctggtttctaagctgtatccttttattcatgtgggacatgagcaaatggcagaattaggggcgagtgctttcaatgctcgaaactaagcaagtataaatttttcctcttatttgcatgaaaggacaagacactgttatgccctgtcctaaatgtgaagacagaggttgaattttttaaaaaatatctttaaaagactgatcacaaaatccaaggtgctacaggaaacaagcacactcaagaaagtttttttctgaataacatttttttccaatttctccgttttataagacatttcctaatttatggggattttaattgaaaataaacttgagtcccaatagagctgtttttttctcacttcctacaaaatgcaaatgcaaaataaataactaagcagcttttgtttggttctgaaccgtatgtggcgtattgttattaggttctagcttcctttaaactaataaagaataagaagactt

SEQ ID NO: 30474 - DNA, 5350 bp, Homo Sapiens
actgccgtgccggacccccgagccggagccgagcgcgccgaggccggggccatggagaaagcgcggccgctgtgggccaactcgctacagttcgtgttcgcctgcatctcgtacgccgtgggcctgggcaacgtgtggcgattcccgtacctgtgccagatgtacggcggaggtagtttcctggtcccctacatcatcatgcttatcgtggagggaatgccgctcttgtacctggaactggctgtggggcagcgcatgcggcagggcagcatcggcgcctggaggaccatcagcccgtacctcagtggtgtcggggtcgccagcgtggtggtctctttcttcctctccatgtactacaacgtcatcaacgcctgggccttctggtacctcttccactccttccaggatcccctgccgtggtctgtctgcccactgaatggtaaccacacgggctacgatgaggagtgtgagaaggcgtcctccacacagtacttctggtacaggaaaaccctcaatatctcgccgtccctccaggagaacgggggtgtgcagtgggagccggcgctgtgcctcctcctggcctggctggtggtgtacctgtgcatcctgcgtggcaccgagtccactggcaaggtggtgtatttcacggcgtcactgccctattgcgtgctcatcatctacctcatcaggggcctcacgctccacggagccaccaatggcctcatgtacatgttcactcccaagatagagcagctggccaaccccaaggcctggatcaatgcagccacccagatcttcttctcacttggcctgggcttcggcagcctgatcgccttcgccagctacaatgagccatccaacaactgccagaagcacgccatcatcgtgtccctcatcaacagcttcacctccatatttgccagcattgtcaccttctccatctatggcttcaaggccaccttcaattatgaaaactgcttgaagaaggtgagtctgctgctgaccaacacttttgaccttgaagatggctttttgacagccagcaacctggagcaggtgaagggctacctcgcatctgcctacccaagcaaatacagcgagatgttcccgcaaatcaaaaactgcagcttggaatcggagctagacacggccgtccagggcactggcctggcattcatcgtctacacagaggccattaaaaacatggaggtgtcccagctgtggtcggtgctctacttcttcatgctgctgatgctgggcattgggagcatgctggggaacacagcggccatcctcacccctctgacagacagcaagatcatctccagccacctgcccaaggaggccatctcaggtctggtgtgccttgtcaactgtgccattggcatggtgttcacgatggaggctgggaactactggtttgacatattcaacgactacgcggccacactgtccctgctgctcatcgtgctggtggagacgattgccgtgtgctacgtgtacgggctgaggagatttgaaagtgaccttaaggccatgaccggccgagctgtgagctggtactggaaggtgatgtgggctggcgtaagcccactgctgattgtcagcctctttgtcttctacctgagcgactacatcctcacggggaccctgaagtatcaagcctgggacgcctcccagggccagctcgtgaccaaagattacccggcctatgcactggctgtcatcgggctgcttgtggcctcctccaccatgtgcatccccctggcggccctggggacttttgttcagcgtcgcctcaagaggggagacgcagaccccgtggcctgagatgtgggcttcccagccgctcacggttttacagatactatttacaggcggaaactcctcggctgctttttcaaatgcttaagccaggagtgctcagcccatcaacttcctgagtgtctaaagaagatgaggaaggtgtgcaggaagaaaactcccttgggagaacgcacaccctcccgtggtggctgttcctccctgtcacctgcctcctcatcatggaagggggtgggctatgaaagccggtctcaaagataactgcatccttcattccaggaaagccctagaattagggcacattgcaaactgaaatatgactataattcttatgggaccaaatttaagcaatttttgtttttggctgaagagacaccaaaatattagaggacaaatatttttagatccatttaaggagttttgaagtgcctaagatgacctatttgtcagtggtgcaaaattaattctcttcttttttgagttgtagtgaatatgcaatttctgtgttccccttccaccctttaaatcttaggatgacaagttataaagaaagaagatctttgtctgggacccccaaagggatcctttctctaaggtctctgacagtgggtccaggaccagacctctctacaaaaaattgccccaactacagtttgcaaccccaaaccacattagaagtctgtgcagacatccctccgtggtgtgtgtcttggtgcattggaaaaggagtcaggagccactgtgaggtgagaatgaaagtggatctcagctgggcacggtggctcacgcctgtaatcctagcaccttgggggtcaaggtgggtggatcacttgaggtcaggagtttgaggccagcctggccaacatggcgaaaccccatttctactaaaaatacaaaaaaattagctgggagtggtggcataggcctgtaattccagctactctggctgctgaggcacaagaatcatttgaacctaggaggtggcggttgctgtgagccaagatcatgccactccactccagtctgggcgacagagcaagactctgactcaaaaaaaaaaaaaagtggctctgactttcccataggcttaatattacatttggacatcgtggccaactctatcaagaccacaaataccacttacaattaattttaaattattcatctgtacatagttttctaaaatgtatataattcaaacagagcatcttgtaactgaagacacaccatatctatgatatcgcattagtccatgtggggaaaagaaagatcagattgttactgtgtctgtgtagaaaaggaagacataagaaactccattttgatctgtactaagaaaaattgtttctgctttgagatgttgttagcctataactttagccccaactctgtgctcacagaaacatgcgctgtaatgaatcaaagtttaatggatttagggctgtgcaggatgtgccttgttaacaatatgtttgcaggctgtatgcttggtagaagtcatcgccattctccattctcgattaaccagggacacaatgcacagcagaaagctgcagggacctctgcccaagaaagcctgggtattgtccaaggtttcccccccactgagacagcctgagatatggcctcatgggaagggaaagacctgactgtcccccagcccgacacctgtaaagggtcggtgctgaggaggaatagtgaaggagggaggcctctttgcagttgagataagaggaaggcttctgtctcctgcttgtccctggtaatggaatgtctcggtgtaaagctgaccattcccattcgttctattctgagataggagaaaaccgccctgtggctggaggtgagatatgctggcagcaatactgctctgttactccttgctacactgagatgtttgggtaaagagaaacataaatctagcctacgtgcacatctgggcacagtacctttccttgaacttattcgtgatacagattcctttgctcacatgtttccctgctgaccttcttcccacctgttgccctgctacactcccctcgctaagacagtaaaaataatgatcaataaatactgagggaactcagaggccagcgccggtgcgggtcctccacatgctgagcgccggtcctgggcccactgttctttctctatactttgtctctgtgtcttatttcttttctcaaaaaaatttttctttttttaactgcaataaagtaggtcgttacccctaaagtgagcgagtcccttcctgctctaacgtccagtgcttccttgagatcatggaattctggagagtttctgtggatatatttgcacagatatctttgaagacacaaacactcacctgggacgttggccggagatgtctttttatttttgtgctgtaaaattctcttacagcaaaaataggctttagaaaggtcttctactgtcttcagcaaccatctcatcttccagcttcacctgattgtccagttatcatacatttgactttcaaatgtatgaaccagcatgtaccccatggatttaatcttatctaccccgtggattcaatcttcttatcagaaggttcttttatgtcaaaaaacctgctgtcaaggcttgaagagccggcacactcaatggcaaacacagcaccgagtctgctctgaatcctggaggatctggccctcctctcaacccccactcacagtcaccgtcttacaactcagggccacctgggatcagtcatcagtcagggtgcgtaagccttgaataccaggtagcctcaggagtgaaaagataaatgtcctagatcattaccttattcagtgtccccaccttgcagcgcattccaaccacctgggagcatttaaaactccagatgcccacaccacaccctggggccacccatcagaccttctggaagcaagacctgggcctccatggccccaaaaactccctaggtgatccgatgtgcagccaaatctgagaggccccatttaaaaaagaaagaacatgggtggtacattgaggagtatttacattttataaaatgacttaaaaatttgaaggcatttttgagcatttccaattatatggaagagttacttctacggaatagtttttgctcatggaactcaaacagatgaagcaccactgttacagaataatgtgctccagatgaaaatgtctcgtttctgtgaatttcatgaagagcagaacatttctcaagaatcctcttgagccagtaatcaatcctgtctcaaaaaatgttctttgccatttcctagatactgcacaaaagtggccatgtcgacatttgtccacccaccctccaataagctggagcgacaaagggacattccatccctgtacccttagtggtagccatgacacgatggccagatcatggactccggaaagctttctgtttttactggaaacatagcaaaccttgatttagctccaagaaattgagtagggaaatatttgttttttagcaattgtcatagtaaataaaactctaagcaagtgtgtgtac

SEQ ID NO: 30475 - DNA, 1863 bp, Homo Sapiens
cctctgtctgtgctcccatcccagggagtataggtggagcctccagagcccatggacagggcatgctggggctgggccagccccagcggtgtctctaaggcacccctgggatccccactgagctggcctacttcagacagccagggcccacccctctggcccccttagtgtccagctcgtggccccttggcatttccacaagacgccaagatggagattcccatggggacccagggctgcttctcaaagagcctcctgctctcagcctcaatcctggtcctctggatgctccaaggctcccaggcagctctctacatccagaagattccagagcagcctcaaaagaaccaggaccttctcctgtcagtccagggtgtcccagacaccttccaggacttcaactggtacctgggggaggagacgtacggaggcacgaggctatttacctacatccctgggatacaacggcctcagagggatggcagtgccatgggacagcgagacatcgtgggcttccccaatggttccatgctgctgcgccgcgcccagcctacagacagtggcacctaccaagtagccattaccatcaactctgaatggactatgaaggccaagactgaggtccaggtagctgaaaagaataaggagctgcccagtacacacctgcccaccaacgctgggatcctggcggccaccatcattggatctcttgctgccggggcccttctcatcagctgcattgcctatctcctggtgacaaggaactggaggggccagagccacagactgcctgctccgaggggccagggatctctgtccatcttgtgctcggctgtatccccagtgccttcagtgacgcccagcacatggatggcgaccacagagaagccagaattgggccctgctcatgatgctggtgacaacaacatctatgaagtgatgccctctccagtcctcctggtgtcccccatcagtgacacaaggtccataaacccagcccggcccctgcccacacccccacacctgcaggcggagccagagaaccaccagtaccagcaggacctgctaaaccccgaccctgccccctactgccagctggtgccaacttcctgatgggtcctgggccaggccagccagggagaagacaaggccccagccctcctctgggagcctcacacctgagaccagcaggacaaggccattgggggctgtggggccgatgaggtggactcagccaaagactcagcagcacatggggcaggtgtcctggcagggggacaggagactgtaacaggcccaggtccttgtgcagcccctgaatgcacgcccgccttcggtctgttccttcaagcaagctggcctgggccatgtgcctgtgaaaggcaggctctggcccctttccatgccaaagtcccccaagatctggatatctggggacaagatggtggcctcaggcctgcctcccaggcagttggctgggctcccaactgtctgtcctcaatgccctaccccaactccactagtgaccctcagagtcttctccccttaggacaaggcagacaccccaccatgcgggcctcaggtggcagagaggcccagcctcacaggcctgtggccccacacaccagtcccagcaaggtgaccacggctgctggaccccttccctgttcaggcaggcccagcccctctcagaacctgctgccagctgctggtcttggcccccaccctgaatcttactgagtccctctgggcagcagctcccttctccaccccaccccagcacccgtcccaaatgtggcctcagcttgtcctccccttccccaaactatgcattcattcagcaataaatgagcctttgctgca

SEQ ID NO: 30476 - DNA, 2632 bp, Homo Sapiens; identical to SEQ ID NO: 27263

SEQ ID NO: 30477 - DNA, 3536 bp, Homo Sapiens; identical to SEQ ID NO: 23478

SEQ ID NO: 30478 - DNA, 4775 bp, Homo Sapiens; identical to SEQ ID NO: 22462

SEQ ID NO: 30479 - DNA, 11127 bp, Homo Sapiens
gaaattttaatttattattcccccctttttttcctgcatctataggataatattgtaaaatagcaattgaaaccaataatcattaaataaatatcaaggaaaatccaagcaaagctttctttttgttggactagtggtgtggtgtttggagacagtctctgaatgtgaacaggaaagcacccatcagcaaaacacgatcactctctagggagacagctgggggaatctgactctggcttctgcttttgttttaagggattaacttccctgtcaagtccaagaagacttgcgtatgagaagattacctgatggacttaattctaagattagcttttttcatcaagatggaaaaagatctttaggagcagaaaaggggagtgctaactgggggagcgagaagggagacgagcaaaagaaacaaaatcttgccacgtggctctgttttgtcagcaagaggatttaagactcacccagggcaaacactgggaccactgtaagagcgctggaacattctgcctcttgagtgaaggggccttctttctagcctctatggcactgaggggtgcgccggctggtggaggagtagtccgatggagccctgcgttccccggggacacagggccaagctttgaggtggaaagtttctggttctgaaacaacaaggagagagtctgtttttcttcctaaaatttggactcttgtctgcacaaactctggtctgttttgcacggtttgtgtgcctttttttccctttatgcaatctttttcagctttagcagcagaaatttgtctagttcaggaaacatgctagagggtggcttcagaaggaagatgatcctgtgtattctgtctctgcatccgaacttttgaagagaaaaattcgagctagagggattcttaaagccttaagttacttgaaatctatgtatttgcaaccctttgtctctggaatcatattacactaaactggaatctcaggctgaatgagaataaccaagtggagtaaaaagaagaaaaccgtttcttgatcaccacttaattaacgatgctctttctccaaaggatcagcacgttcttcctctgagaacttgaaaatacaaatggaccccatgtttttttaagcattaccttttcttagaagactgccatcatcttttatagaggaattttttcactatgcattcagtggatctttataaaatactgaccttctaattagattcaggtcagtcttaattaaagggggaaaaaagcaacgcaagccaaccacaaaaacacatataccaatgaaagaaattggtttaaatttcacagcattaacattactttttaagtaaaacagttcattgaagaaagtatgtatgcagcagtggaacatgggcctgtgctttgcagtgactccaacatcctgtgcctgtcctggaaggggcgtgtccccaagagtgagaaggagaagcctgtgtgcaggagacgctactatgaggaaggctggctggccacgggcaacgggcgaggagtggttggggtgactttcacctctagtcactgtcgcagggacaggagtactccacagaggataaatttcaacctccggggccacaatagcgaggttgtgctggtgaggtggaatgagccctaccagaaactggccacgtgcgatgcggacggaggcatattcgtgtggattcagtacgagggcaggtggtctgtggagctggtcaacgaccgcggggcgcaggtgagtgatttcacgtggagccatgatggaactcaagcacttatttcctatcgagatgggtttgtcctggttgggtctgtcagtggacaaagacactggtcatccgaaatcaacttggaaagtcaaattacgtgtggcatatggactcctgacgaccaacaggtgctgtttggcacggccgatgggcaggtgattgtcatggattgccacggcagaatgctggcccacgtcctcttgcacgagtcagacggtgtcctcggcatgtcctggaactacccgatcttcctggtggaggacagcagcgagagcgacacggactcagatgactacgcccctccccaagatggtccggcagcatatcccatcccagtgcagaacatcaagcctctgctcaccgtcagcttcacctcgggagacatcagcttaatgaacaactacgatgacttgtctcccacggtcatccgctcagggctgaaagaggtggtagcccagtggtgcacacagggggacttgctggcagtcgctgggatggaacggcagacccagcttggtgagcttcccaatggtccccttctgaagagtgccatggtcaagttctacaatgttcgtggggagcacatcttcacactggacactctcgtgcagcgccccatcatctccatctgctggggtcaccgggattcgaggctgttgatggcatcaggaccagccctgtacgtggtgcgtgtggagcaccgggtgtccagcctgcagctgctgtgccagcaggccatcgccagcaccttgcgtgaggacaaggacgtcagcaagctgactctgcccccccgcctctgctcctacctctccactgccttcatccccaccatcaagcccccaattccagatccgaacaacatgagagactttgtcagctacccatcagccggcaacgagcggctgcactgcaccatgaagcgcacagaggacgacccggaggtgggcggcccgtgctacacgctctacctggagtacctgggcgggcttgtgcccatcctcaaagggcggcgcatcagcaagctgcggccagagttcgtcatcatggacccgcggacagatagcaaaccagatgaaatctatgggaacagcttgatttctactgtgatcgacagctgcaactgctcagactccagtgacattgagctgagtgatgactgggctgccaagaaatctcccaaaatctccagagctagcaaatcacccaaactcccaaggatcagcattgaggcccgcaagtcacccaagctgccccgggctgctcaggagctctcccggtccccacggttgcccctgcgcaagccctctgtgggctcgcccagcctgactcggagagagtttccttttgaagacatcactcagcacaactatcttgctcaggtcacgtctaatatctggggaaccaaatttaagattgtgggcttggctgctttcctgccaaccaacctcggtgcagtaatctataaaaccagcctcctgcatctccagccgcggcagatgaccatttatctcccagaagttcggaaaatttccatggactatattaatttacctgtcttcaacccaaatgttttcagtgaagatgaagatgatttaccagtgacaggagcatctggtgtccctgagaacagcccaccttgtaccgtgaacatccctattgcaccgatccacagctcggctcaggctatgtcccccacgcagagcatagggctggtgcagtccctactggccaatcagaatgtgcagctagatgtcctgaccaaccagacgacagctgtagggacagcagaacatgcaggtgacaggtgccacccagtaacccaggtctccaaccggtactccaatcctggacaggtgattttcggaagcgtggaaatgggccgcatcattcagaacccccctccactgtccctgcctcccccgccgcaggggcccatgcagctgtccacggtgggccatggagaccgagaccacgaacacctgcagaagtcagccaaggccctgcggccaacaccgcagctggcagctgagggggacgcagtggtctttagtgccccccaggaggtccaggtgacgaagataaaccctccacccccgtacccaggaaccatccccgctgcccccaccacagcagcacccccgccccctctgccgcccccacagcccccagtggatgtgtgcttgaagaagggcgacttctccctctaccccacgtcagtgcactaccagacccccctgggctatgagaggatcaccaccttcgacagcagtggcaacgtggaggaggtgtgccggccccgcacccggatgctgtgctcccagaacacctacaccctccccggcccgggtagctctgccaccttgaggctcacggccactgagaagaaggtccctcagccctgcagcagtgccaccctgaaccgcctgaccgtccctcgctactccatccccaccggggacccacccccgtatcctgaaattgccagccagctggcccaggggcggggggctgcccagaggtccgacaatagcctcatccacgctaccctgcggaggaacaaccgtgaggctacgctcaagatggcccagctggccgacagcccgcgggcccccctgcagcccctggccaagtccaagggcgggcccgggggggtggtgacacagctcccagcgcggcccccacctgccctgtacacctgcagtcagtgcagtggcacagggcccagctcacagcccggagcctccctggcccataccgccagcgcctccccgttggcctcccagtcctcctacagcctcctgagcccacccgacagcgcccgcgaccgcaccgactacgtcaactcggccttcacggaggacgaggccctgtcccagcactgtcagcttgagaagcccttgaggcaccctcccctgcctgaagctgctgtcaccctgaaacggccacccccttaccagtgggaccccatgctgggtgaggacgtttgggttcctcaagaaaggacagcacagacttcagggcccaaccccttaaaactgtcctctctgatgctgagtcagggccagcacctggacgtgtcccgactgcccttcatctcccccaagtctcctgccagccccactgccactttccaaacaggctatgggatgggagtgccatatccaggaagctataacaacccccctttgcctggagtgcaggctccctgctctcccaaagatgccctgtccccaacgcagtttgcacaacaggagcctgctgtggtccttcagccgctgtacccacccagcctctcctattgcaccctgccccccatgtacccaggaagcagcacgtgctctagtttacagctgccacctgtcgccttgcatccatggagttcctacagcgcctgcccgcccatgcagaacccccagggcactctccccccaaagccacacttggtggtggagaagccccttgtgtccccaccacctgccgacctccaaagccacttgggcacagaggtgatggtagagactgcagacaacttccaggaagtcctctccctgaccgaaagcccagtcccccagcggacagaaaaatttggaaagaagaaccggaagcgcctggacagccgagcagaagaaggcagcgttcaggccatcactgagggcaaagtgaagaaggaggctaggactttgagtgactttaattccctaatctccagcccacacctggggagagagaagaagaaagtgaagagtcagaaagaccaactgaagtcaaagaagttgaataagacaaacgagttccaggacagctccgagagcgagcctgagctgttcatcagcggggatgagctcatgaaccagagccagggcagcagaaagggctggaaaagcaagcgctccccacgggccgccggcgagctggaggaggccaagtgccggcgggccagtgagaaggaggacgggcggctgggcagccaaggcttcgtgtacgtgatggccaacaagcagccgctgtggaacgaggccacccaggtctaccagctggacttcggggggcgggtgacccaggagtccgccaagaacttccagattgagttagaggggcggcaggtgatgcagtttggacggattgatggcagtgcgtacattctagacttccagtatccgttctcagccgtgcaggcctttgcagttgccctggccaacgtgactcagcgcctcaaatgaagagactggtgtggggaggagagagatgcagagagcctttggaagaggtcttcggagatgccagaggagccctctaggggtccgatgcctgggaggaccagaagccaacagcaaaactggaaaagcccggcaggcccaggagagggcgctgacctgtggtcgtcatttatttggttgggttttattaccttttattgtctgttcttcttttcttctttcatttcagtggcatttggaagcaaagagtgctaggcacctgcagttctttcaggaaacagcttggctgtggtaatgctctactgggcccttcagaatgaagacagtctgccttagagcctgctattcttttagacatagggaggatgcattatcctgtattctcctccaacatcaccactagcgtaaaagcaaaaagcttttacaaaacacagccaaaaattctcaagatgcaggttcttggggaatgggatggggacagcatttgatttacactgattatgttactccccaaaaggtgacttaattaataaagggcatttgggcagacacactgtgttggaccaacaaagtaggctctttacaggggtgttctcaccaggtagaaatgcgatttgctcactgaggatgttggggaagggacgaagggtaaagaagaaactgcaccgtatacacaggttcacatcactctgcagacagcaatgtgactcagcgtgtgacttgtagcagcagtacgagggctacactcctctgctgaggatgtctacattgaaagcctccactagtttcatcgtttgtcaagttccgtagatcagtgatggtcattcagcatgactggttctgggagaaggtgagagacaaaaatggaaagatcctggcctgtggtagtggtagcagttttctcaaataatgtggtgacagtcactagatcctcacatgctgagaaacagcctctactctctctgccccttttactttttaatctggaatgcattactgtaaacatgatctttcccatgagataccatgttctatgccttcccattctaaaagtgtggacaacgcttgatttgaaaccactccttttctcctcttggctacattaaaattcagttgactacaaatgctttctatcaaattagaaatgtaaccaaaaaaatgttaagtgttcaccagggtattaaaatacagagggagtatggtcaaatcttttgacaaaattttcatgatcttctctaacaaaaaaagttgtttattaactgtacagactgtttactaaggagctaaaccactgagaaaacgttattaaaattgtaatacctaggtagttggttgatcacagtttgttaattgtataaaaaaaaattacctagaatatctcttcccacttcctcgtcctcgtgagaacctgtgggcagtattcaagccctgatgacaaaacccagtgttttttgttgttgttttttgttgttgttttttgtttttgtttttgtttttctcagtcttacctgtgatgttgtttaggatcaggcccctctcctgggcctgctgtgcaggagcacaggaactatctgctggcgttgggttccaaatttgcattttatttggaaacagacaagtagaagatgctacagaaaagtattttcaaatttaaacgttttttaatcccctgttttagttaaaaaattggaaaagaaaccgacccatttttttcccagatcaagatgacatgacatcactcccaattctctccaaaccccagagaaatactgacgaagttttctgatgtggcaaaggatatttcccatctaataccagtttctcatttatatttaacgtattggacctgatatttttagtgggtgcattcttccagaaagaattcagcaatgttatcagaattaattcttttatatgagtttatgtagcttgatatggtgtttcagtgcttattggttgtgcaataatggttatagcctgttagataatctaaatgcaattcccctgttttgtcgtttaggagataattatttatcttgcttttcatagtgttcttaggaattattttgttgttacgttttggtgagttatacccattttatttatttagaaaaatagtatctttgttaacgacttacatggtcacagtatattttgctgcaagaaataaagaggatatgatagaaggtttttttttttttttttttttttttttgagacggagtcccactcttgtcgcccaactagagtgtagtggcacaatctcggctccccacaacctctgactccagggttcaggtgattattttgcctcagcctcccaagcagctgggattatagacacccgccaacacgccaggctaatgtttttgtatttttaatagagatggggttttgccatgttggccaggctggtcttgaactcctgacctcaggtgatccgcccgcctcggcctcccaaagtgctgggattacagacgtgagccaccactcccggcccatagaaggttttttgctggataatttgtaacttttctaattgggaaaaaattcctattaatcacttaaaaatttttttttgtattttgtgttattgattatatacaaaggagactttttttttgagataacactcaaatagtattctcttcttttgaaaattttatttttatctgaaaataacagttgatctgaaataaaaaggggagacctattagaatgagagtagccaaggaaagagttactaggtaataagcttcactttttgtgttctaattgtttttgagatataaagaccctgaaaaagcccattttagaacctgtttaataagagcaaatataggggaaaatctttgaaatgaaagctacaaatacatgtgagaagaaaaaaatggatttttttagcaaataattaactaagcttctaaatgcctagctccctcccccaaaggcgctttcccccgatggaggcacaggcttctgtctcggatgtttggcgcacgtgagtttgtatgagtttgtaccggagtgaccccggcagccactgcccacctcccctctacccaggggcctgaaaagaggggctgccctcctgcgccaaggcagacacaagctgcgggctgtgcggtcctagtagtgtgacgtttcagttaatagtggtggtcttattttcaactatgctttcattcagtcagtctctgttgactaaatacgacgaaaattcatactttatgcaggagatttctaaaaatttaatgtttattaatagtttatgaatatcaagatacctcattgaatccctaaatttaaaagcagtccagtaaaaggttaactgtataaagaatctatgactttttgagggaagtgtgatatattaacaaatataaccaattctaaatttgttttagctctaacctcatcaaaccaaaggcacagatttgtgtacaatatacccattgaatgtatatcctgagaaaaattggggccaaagaagcaggaaaatctcaaagctctaatggcagcataaatcaaagaatttcacaggctagtgtttttatccatagccattgctcccttgtcaagtgtctcacaaggacatggaagaatgtgttatgttcatcttgtaatcatagcaaaaagtctgcaaaccccagggtcaagcctgctctgccacagggttggatggtgaccttgggcaagtccctggggctggctaggcctccacttgtccatctgtgaaatgaaaggatcagcctggacagccctctaaactcccttacagctctcagcctaagagcgcagcactgaacagcctcatcattccacttttcatgggaaatatatttcacaccattgcctttgtgtagagaaatatttcttttcctgtgttaatgagctatgtactgaatataaaccagtgcatttaaagtaatatcttttgtgcacctctaaatgtgtttggaattgtgtttgttctcatagaatatacaaaagtactgattctaggtaagaaggagtctccacgggtgtgccctgctcagctggatgtccatgagaacagccatgaaataagtcactacttgtccccaaaaccacaggaatatatacctaggtcacctcaaattcctgagtgtgctctgccatgttacacggtcttcaaattgaaaaggtttcttgaaaaggaaagtttggcccagcaactggagaaggagtccatggtgtcgctgtgtgcctgtatcatttggccaagtcaatggttgtaagcaaagttagtggagacaaaaatgtgtccaaaatgtcgtttgagttcctgggatttctgtaatagcacacaactcagaactcttcagcatttgtgtgattccttacctctggctgataaaactctaatgggttgtggcttactttgtttccattttctttggctttgtgcaatttttgtgtaactttacttgtacctatattttctgtttacagttctttttaaggggaggggtagggttctaagatcttgttgtttattgtagataaaaattttttcgtgttgtagaaaagcatgggttatgcgtttgactgaaaaagacactgtattatttaccaaaggggtattgtttttgcatttgtttataaatgcattattttggtactgtaaatttggacataatttctgagtttattactactggcattttctttttcccttttttttttttttaaccgtaagtgcacgatgcaggtgcataggccccagaccaaactagaccaccagcatgttcatgtccagacctcggcagtggcgtgcactgcttgtgcacctcagttcctccagtgttggtttgtttgttttttaattcagcatcctgctggttttactttccaagcaagatctgttgcgactcccaaatgcgttttaatgagctcatccttatttgcctttcttcttacgtattttgtgtattagattgtgcaggagatattctagaaggcattaatggtttgcattcaaaacgatgtggtttgtccaagttattttctgtctttattactgagacggattaatctccttatttttttcttgatgatttgaagttgtaagagttgtccagctattgcttaataaaattttgcagatcaaaaaa

SEQ ID NO: 30480 - DNA, 4858 bp, Homo Sapiens; identical to SEQ ID NO: 27602

SEQ ID NO: 30481 - DNA, 8658 bp, Homo Sapiens
ctggcccaacatgctttggcagggatgcagaagcttctgtcggaagagaggtttgtatccatggaaacagattctgatgagaagcagctgctcaatcagatactgaatgccgtgaaagtgacgccttcgctcaacgaggacctgcaggtggaagtgatgaaggttttactatgcatcacctacacgccaacatttgatctgaatgggagtgccgtgctgaagatcgcggaggtgtgcattgagacgtacataagcagctgtcaccagcgtagcataaacactgctgtgcgggcaactctcagtcaaatgctgagtgacttgactttacagttacgacagaggcaggagaatacgataattgaaaacccagatgtcccacaggatttcgggaatcaagggtcaacagtagagtccctctgtgatgatgttgtctctgtactcaccgtcctgtgtgagaagctgcaagccgccataaatgacagccagcagctgcagcttctctacctggagtgcatcctgtctgtgctcagcagctcctcctcctccatgcacctgcacaggcgcttcacggacctgatctggaaaaacctctgccctgctctcatcgtgatcttggggaatccaattcatgacaaaaccatcacctctgctcacaccagcagcaccagtaccagcctggagtcggactctgcgtctccgggagtgtctgaccacggccgaggatcaggctgctcctgcactgcgccggccctgagcggacctgtggctcggactatctattacatcgcagccgagctggtccggctggtggggtctgtggactccatgaagcccgtgctccagtccctctaccaccgagtgctgctctaccccccaccccagcaccgggtggaagccatcaaaataatgaaagagatacttgggagcccacagcgtctctgtgacttggcaggacccagctccactgaatcagagtccagaaaaagatcaatttcaaaaagaaagtctcatctggatctcctcaaactcatcatggatggcatgaccgaagcatgcatcaagggtggcatcgaagcttgctatgcagccgtgtcctgtgtctgcaccttgctgggtgccctggatgagctcagccaggggaagggcttgagcgaaggtcaggtgcaactgctgcttctgcgccttgaggagctgaaggatggggctgagtggagccgagattccatggagatcaatgaggctgacttccgctggcagcggcgagtgctgtcctcagaacacacgccgtgggagtcagggaacgagaggagccttgacatcagcatcagtgtcaccacagacacaggccagaccactctcgagggagagttgggtcagactacacccgaggaccattcgggaaaccacaagaacagtctcaagtcgccagccatcccagagggtaaggagacgctgagcaaagtattggaaacagaggcggtagaccagccagatgtcgtgcagagaagccacacggtcccttaccctgacataactaacttcctgtcagtagactgcaggacaaggtcctatggatctaggtatagtgagagcaattttagcgttgatgaccaagacctttctaggacagagtttgattcctgtgatcagtactctatggcagcagaaaaggactcgggcaggtccgacgtgtcagacattgggtcggacaactgttcactagccgatgaagagcagacaccccgggactgcctaggccaccggtccctgcgaactgccgccctgtctctaaaactgctgaagaaccaggaggcggatcagcacagcgccaggctgttcatacagtccctggaaggcctcctccctcggctcctgtctctctccaatgtagaggaggtggacaccgctctgcagaactttgcctctactttctgctcaggcatgatgcactctcctggctttgacgggaatagcagcctcagcttccagatgctgatgaacgcagacagcctctacacagctgcacactgcgccctgctcctcaacctgaagctctcccacggtgactactacaggaagcggccgaccctggcgccaggcgtgatgaaggacttcatgaagcaggtgcagaccagcggcgtgctgatggtcttctctcaggcctggattgaggagctctaccatcaggtgctcgacaggaacatgcttggagaggctggctattggggcagcccagaagataacagccttcccctcatcacaatgctgaccgatattgacggcttagagagcagtgccattggtggccagctgatggcctcggctgctacagagtctcctttcgcccagagcaggagaattgatgactccacagtggcaggcgtggcatttgctcgctatattctggtgggctgctggaagaacttgatcgatactttatcaaccccactgactggtcgaatggcggggagctccaaagggctggccttcattctgggagctgaaggcatcaaagagcagaaccagaaggagcgggacgccatctgcatgagcctcgacgggctgcggaaagccgcacggctgagctgcgctctaggcgttgctgctaactgcgcctcagcccttgcccagatggcagctgcctcctgtgtccaagaagaaaaagaagagagggaggcccaagaacccagtgatgccatcacacaagtgaaactaaaagtggagcagaaactggagcagattgggaaggtgcagggggtgtggctgcacactgcccacgtcttgtgcatggaggccatcctcagcgtaggcctggagatgggaagccacaacccggactgctggccacacgtgttcagggtgtgtgaatacgtgggcaccctggagcacaaccacttcagcgatggtgcctcgcagccccctctgaccatcagccagccccagaaggccactggaagcgctggcctccttggggaccccgagtgtgagggctcgccccccgagcacagcccggagcaggggcgctccctgagcacggcccctgtcgtccagcccctgtccatccaggacctcgtccgggaaggcagccggggtcgggcctccgacttccgcggcgggagcctcatgagcgggagcagcgcggccaaggtggtgctcaccctctccacgcaagccgacaggctctttgaagatgctacggataagttgaacctcatggccttgggaggttttctttaccagctgaagaaagcatcgcagtctcagcttttccattctgttacagatacagttgattactctctggcaatgccaggagaagttaaatccactcaagaccgaaaaagcgccctccacctgttccgcctggggaatgccatgctgaggattgtgcggagcaaagcacggcccctgctccacgtgatgcgctgctggagccttgtggccccacacctggtggaggctgcttgccataaggaaagacatgtgtctcagaaggctgtttccttcatccatgacatactgacagaagtcctcactgactggaatgagccacctcattttcacttcaatgaagcactcttccgacctttcgagcgcattatgcagctggaattgtgtgatgaggacgtccaagaccaggttgtcacatccattggtgagctggttgaagtgtgttccacgcagatccagtcgggatggagacccttgttcagtgccctggaaacagtgcatggcgggaacaagtcagagatgaaggagtacctggttggtgactactccatgggaaaaggccaagctccagtgtttgatgtatttgaagcttttctcaatactgacaacatccaggtctttgctaatgcagccactagctacatcatgtgccttatgaagtttgtcaaaggactgggggaggtggactgtaaagagattggagactgtgccccagcacccggagccccgtccacagacctgtgcctcccggccctggattacctcaggcgctgctctcagttattggccaaaatctacaaaatgcccttgaagccaatattccttagtgggagacttgccggcttgcctcgaagacttcaggaacagtcagccagcagtgaggatggaattgaatcagtcctgtctgattttgatgatgacaccggtctgatagaagtctggataatcctgctggagcagctgacagcggctgtgtccaattgtccacggcagcaccaaccaccaactctggatttactctttgagctgttgagagatgtgacgaaaacaccaggaccagggtttggtatctatgcagtggttcacctcctccttcctgtgatgtccgtttggctccgccggagccataaagaccattcctactgggatatggcctctgccaatttcaagcacgctattggtctgtcctgtgagctggtggtggagcacattcaaagctttctacattcagatatcaggtacgagagcatgatcaataccatgctgaaggacctctttgagttgctggtcgcctgtgtggccaagcccactgaaaccatctccagagtgggctgctcctgtattagatacgtccttgtgacagcgggccctgtgttcactgaggagatgtggaggcttgcctgctgtgccctgcaagatgcgttctctgccacactcaagccagtgaaggacctgctgggctgcttccacagcggcacggagagcttcagcggggaaggctgccaggtgcgagtggcggccccgtcctcctccccaagtgccgaggccgagtactggcgcatccgagccatggcccagcaggtgtttatgctggacacccagtgctcaccaaagacaccaaacaactttgaccacgctcagtcctgccagctcattattgagctgcctcctgatgaaaaaccaaatggacacaccaagaaaagcgtgtctttcagggaaattgtggtgagcctgctgtctcatcaggtgttactccagaacttatatgacatcttgttagaagagtttgtcaaaggcccctctcctggagaggaaaagacgatacaagtgccagaagccaagctggctggcttcctcagatacatctctatgcagaacttggcagtcatattcgacctgctgctggactcttataggactgccagggagtttgacaccagccccgggctgaagtgcctgctgaagaaagtgtctggcatcgggggcgccgccaacctctaccgccagtctgcgatgagctttaacatttatttccacgccctggtgtgtgctgttctcaccaatcaagaaaccatcacggccgagcaagtgaagaaggtcctttttgaggacgacgagagaagcacggattcttcccagcagtgttcatctgaggatgaagacatctttgaggaaaccgcccaggtcagccccccgagaggcaaggagaagagacagtggcgggcacggatgcccttgctcagcgtccagcctgtcagcaacgcagattgggtgtggctggtcaagaggctgcacaagctgtgcatggaactgtgcaacaactacatccagatgcacttggacctggagaactgtatggaggagcctcccatcttcaagggcgacccgttcttcatcctgccctccttccagtccgagtcatccaccccatccaccgggggcttctctgggaaagaaaccccttccgaggatgacagaagccagtcccgggagcacatgggcgagtccctgagcctgaaggccggtggtggggacctgctgctgccccccagccccaaagtggagaagaaggatcccagccggaagaaggagtggtgggagaatgcggggaacaaaatctacaccatggcagccgacaagaccatttcaaagttgatgaccgaatacaaaaagaggaaacagcagcacaacctgtccgcgttccccaaagaggtcaaagtggagaagaaaggagagccactgggtcccaggggccaggactccccgctgcttcagcgtccccagcacttgatggaccaagggcaaatgcggcattccttcagcgcaggccccgagctgctgcgacaggacaagaggccccgctcaggctccaccgggagctccctcagtgtctcggtgagagacgcagaagcacagatccaggcatggaccaacatggtgctaacagttctcaatcagattcagattctcccagaccagaccttcacggccctccagcccgcagtgttcccgtgcatcagtcagctgacctgtcacgtgaccgacatcagagttcgccaggctgtgagggagtggctgggcagggtgggccgtgtctatgacatcattgtgtagccgactcctgttctactctcccaccaaataacagtagtgagggttagagtcctgccaatacagctgttgcattttccccaccactagccccacttaaactactactactgtctcagagaacagtgtttcctaatgtaaaaagcctttccaaccactgatcagcattggggccatactaaggtttgtatctagatgacacaaacgatattctgattttgcacattattatagaagaatctataatccttgatatgtttctaactcttgaagtatatttcccagtgcttttgcttacagtgttgtccccaaatgggtcattttcaaggattactcatttgaaaacactatattgatccatttgatccatcatttaaaaaataaatacaattcctaaggcaatatctgctggtaagtcaagctgataaacactcagacatctagtaccagggattattaattggaggaagatttatggttatgggtctggctgggaagaagacaactataaatacatattcttgggtgtcataatcaagaaagaggtgacttctgttgtaaaataatccagaacacttcaaaattattcctaaatcattaagattttcaggtattcaccaatttccccatgtaaggtactgtgttgtacctttatttctgtatttctaaaagaagaaagttctttcctagcagggtttgaagtctgtggcttatcagcctgtgacacagagtacccagtgaaagtggctggtacgtagattgtcaagagacataagaccgaccagccaccctggctgttcttgtggtgtttgtttccatccccaaggcaaacaaggaaaggaaaggaaagaagaaaaggtgccttagtcctttgttgcacttccatttccatgccccacaattgtctgaacataaggtatagcatttggtttttaagaaaacaaaacattaagacgcaactcattttatatcaacacgcttggaggaaagggactcagggaagggagcagggagtgtggggtggggatggattatgatgaaatcattttcaatcttaaaatataatacaacaatcttgcaaaattatggtgtcagttacacaagctctagtctcaaaatgaaagtaatggagaaagacactgaaatttagaaaattttgtcgatttaaaatatttctcctatctaccaagtaaagttaccctatgtttgatgtctttgcattcagaccaatatttcaggtggatatttctaagtattactagaaaatacgtttgaaagctttatcttattatttacagtatttttatatttcttacattatcctaatgattgaaaactcctcaatcaagcttacttacacacattctacagagttatttaaggcatacattataatctcccagccccattcataatgaataagtcaccctttaaatataagacacaaattctacagtattgaaataaggatttaaaggggtatttgtaaactttgccctccttgagaaatatggaactaccttagaggttaagaggaaggcagtgttctgacttctttaggtgatctgaaaaaaacacccttatcatccagtgtaccatctagagatcaccacagaatccatttttttcccagttccacaaaacactctgtttgccttcagtttttactcactagacaataattcaagtttagaaacaggtaatcagctatttgatcttaaaaggcaatgaattgttgggatatcagtgaactatgttgtatacttttgaatttttacattttataaatggaattgaaagttggataactgctttttttaaattttccaacagaagtaacaccacagttgctttgtttctttttatagcttacctgaggttcagttcttctttgtgaacctgtgagtactccacagtttactgggggaaaaggcttcagtaaagcagaggctagaattacagtatttatacatagcaacttttcataaagtagaaaaattcaaaggaagctgtctcaatttgagaataccagctgggcacggtggctcacgcctgtaatcccagcacttactttgggaggccaaggtgggcagataacctgcggtcaggagtttgagaccaggctggacaacatggtgaaacctcgtctctactaaaaatacaaaaattagccaggtgtggtaggatgcacctgtaatcccagctacttaggaggccgagacaggagaatcgctcgaacccaggaggcggacgttgcagtgagccaagattgcaccattgcactccagactgggtgacaagagtgaaactccatct

SEQ ID NO: 30482 - DNA, 1546 bp, Homo Sapiens
taactgtccaccagaaaggactgctctttgggtgagttgaacttcttccattatagaaagaattgaaggctgagaaactcagcctctatcatgtggaacagctctgacgccaacttctcctgctaccatgagtctgtgctgggctatcgttatgttgcagttagctggggggtggtggtggctgtgacaggcaccgtgggcaatgtgctcaccctactggccttggccatccagcccaagctccgtacccgattcaacctgctcatagccaacctcacactggctgatctcctctactgcacgctccttcagcccttctctgtggacacctacctccacctgcactggcgcaccggtgccaccttctgcagggtatttgggctcctcctttttgcctccaattctgtctccatcctgaccctctgcctcatcgcactgggacgctacctcctcattgcccaccctaagctttttccccaagttttcagtgccaaggggatagtgctggcactggtgagcacctgggttgtgggcgtggccagctttgctcccctctggcctatttatatcctggtacctgtagtctgcacctgcagctttgaccgcatccgaggccggccttacaccaccatcctcatgggcatctactttgtgcttgggctcagcagtgttggcatcttctattgcctcatccaccgccaggtcaaacgagcagcacaggcactggaccaatacaagttgcgacaggcaagcatccactccaaccatgtggccaggactgatgaggccatgcctggtcgtttccaggagctggacagcaggttagcatcaggaggacccagtgaggggatttcatctgagccagtcagtgctgccaccacccagaccctggaaggggactcatcagaagtgggagaccagatcaacagcaagagagctaagcagatggcagagaaaagccctccagaagcatctgccaaagcccagccaattaaaggagccagaagagctccggattcttcatcggaatttgggaaggtgactcgaatgtgttttgctgtgttcctctgctttgccctgagctacatccccttcttgctgctcaacattctggatgccagagtccaggctccccgggtggtccacatgcttgctgccaacctcacctggctcaatggttgcatcaaccctgtgctctatgcagccatgaaccgccaattccgccaagcatatggctccattttaaaaagagggccccggagtttccataggctccattagaactgtgaccctagtcaccagaattcaggactgtctcctccaggaccaaagtggccaggtaataggagaataggtgaaataacacatgtgggcattttcacaacaatctctccccagcctcccaaatcaagtctctccatcacttgatcaatgtttcagccctagactgcccaaggagtattattaattattaataaatgaattctgtgcttttaaaaaaaaaaaaataaaaaaagaaaaaaaaaaaaaaaaaaaaaaaaaaaaa

SEQ ID NO: 30483 - DNA, 3717 bp, Homo Sapiens
ccaggctccttctctataaagtgggatctatcatgaccagcctaccttatcaatataggagagaaaatcttcatgcctgaagatatacccctgctccctggctccccacgccggctgagccctcaggcagggtccagagggggccagggccccaaacatggacagcagtgtctcaagatgccaggtccccgggccccaggtctgcagggcggttccaacagagatcctggccagccctgcggtggagagagcacccgcagcagctctgtcatcaacaactatctggatgccaatgagcctgtgtccttggaggcccgtcttagccgcatgcacttccatgacagtcagaggaaggtcgactatgtacttgcctaccactaccggaaacgcggggtgcacctggcccaaggcttccctggccactcgctggctatcgtctccaatggggagacaggcaaggagcctcatgctgggggcccaggtgacattgagctgggaccgctcgatgccctggaggaggagaggaaggagcagcgggaggaatttgagcacaatctgatggaggctggactggagcttgagaaggacttggagaataaaagccagggatccatctttgtccggatacacgccccgtggcaggtgctggccagagaggcagaattcttgaagatcaaagttcctaccaagaaagagatgtacgagatcaaagcaggaggcagcattgcaaagaagttcagcgcggctctgcagaagctgagctcgcacctgcagccccgagttccagaacacagcaacaacaagatgaaaaacctctcctacccattctccagggagaagatgtacctgtacaacatccaggaaaaggacaccttctttgataatgccacccgtagccgcattgtgcacgagatcctgaagcgcacagcctgctcccgagccaacaacacgatgggtattaactctctgatcgcaaacaatatctatgaggctgcctaccctcttcatgacggtgaatacgatagtccagaggacgatatgaatgacaggaagctgctatatcaagaatgggcgcgctatggagtgttctataagttccaacctattgacctcatcagaaagtattttggagaaaaaattggactgtattttgcctggctgggattatatacatcattcctcatcccatcttctgtaattggagtgattgtgtttctttatggatgtgcaacaattgaagaagatattcccagcagagagatgtgtgaccagcagaatgccttcaccatgtgtcccctgtgtgacaagtcctgtgattactggaacctcagctcagcctgtgggaccgcgcaggccagccacctgtttgacaaccctgccaccgtcttcttctctatcttcatggctctgtgggctaccatgttcctggaaaactggaagaggctacagatgcgactgggctacttttgggacctgactggcatagaagaggaagaagaacgtgcccaggaacattccaggcctgagtatgaaaccaaagttcgagagaaaatgctaaaggagagcaaccagtctgctgtccagaaattggaaacaaacacgacggagtgtggcgatgaggatgatgaagataaactgacctggaaggatcgtttcccaggttacctgatgaactttgcctccatcttattcatgattgccctgacattctcaatcgtctttggggtgatagtgtatcgaataacaactgcagccgctctgtctctcaataaggctacacgctccaatgtccgggtgacagtgacagcaacagcagtcatcatcaacctcgtggtcatcctcatcctggacgagatctacggcgctgtggccaagtggctcaccaaaattgaggttccgaaaacagaacagacttttgaagagcgcctgatcctcaaagctttcttgctcaagtttgtcaatgcctactcccccatcttctatgtggcctttttcaaagggaggtttgtgggcaggcctggaagctacgtctatgtattcgatggttaccgcatggaagagtgtgctccagggggctgtctcatggagctctgcattcagctcagcatcatcatgttggggaagcagttgatccagaacaacatctttgagattggagtcccgaagctaaagaaactatttcgaaagctgaaagatgagaccgaagctggagaaactgactctgcccattcgaaacatccagagcagtgggacctagactacagcttggaaccatacacaggactgactccggagtacatggaaatgatcatccagtttggttttgtcaccctcttcgtggcctcctttcccctggcacctgtgtttgccctcctcaacaacgtcattgaagtgcggctcgatgcaaagaagtttgttacagagctgagacggccggatgctgtaagaaccaaagatatcggaatctggtttgacattctctctggaattggcaagttctctgttatcagcaacgcttttgtcattgcgatcacctccgactttatcccccgcctggtgtaccagtactcctacagtcacaatgggactctgcacggctttgtcaaccacaccctctcctttttcaacgtcagccagctgaaggaggggacgcagccagaaaactcacagtttgaccaggaggttcagttctgcaggtttaaggattaccgagagccgccatgggccccgaacccttatgagttttcgaaacagtactggtttattctgtctgcccgtctggcttttgtcataatcttccagaacctcgtgatgttcctgagcgtcctcgtggactggatgattccagacatccccacggacatcagcgaccagatcaagaaagagaagagcttattagtggatttcttcctgaaagaggagcatgagaagctcaagctgatggatgagccggctctgaggagcccaggaggtggggatcgaagcaggagccgggcagccagctcagcaccttcaggccaaagccagctgggcagcatgatgtcgtcaggctctcagcacaccaatgtgtgagcagttcagcctgcagcagaggagggcacggcagcagagacacgcacatgcacgtaagcatgttcctacacccacatggcgtgctgtctgtctgcaggggcctggcttgatggggtcttgaagagggggcagtgtgtaaaaagaaagagcctgacagaatgagtgtaggaaggaagagaaatgatgctacatctcagaaacttcaagcttaagtttcttttaggtccccttttaagctgcatccttttgagggattggaaccccactggggtctctccaccccagagtctcaggcaccgcgagcattcccatgtaccctggggcaccctcttgtacttcaccatcatttctgactttgaccagctgtaagagaaatgcagtcaggagcacagcatcccctacttactatcactacaagaaaactgagtcacttgcagtggggctgccacagtctcagcagatgcaaattaagttacaaggctgaatggtgcagccgctggacctgatagtaaggtgcaaaggtccaaacctgggcttgtctccacttcacgtcacaaaaacgtttggagctaaatgcagataaccatcattttatgaaagttcagatttaaaataataaaataaatggacacattctttataaag

SEQ ID NO: 30484 - DNA, 3830 bp, Homo Sapiens
ccagtgcaggacgcgctgacagctcgagtgagcggactgcccaggacttcggaactagacgagttctgtagaaatcctgtcaaagaatatgaagaaaaacagagaaagattctgcaatagagagagagaatttgtatataaatttaaagtaggaagtcagtgcttagaactgagagtgccactcaaatttcctgttcaagagaatgccagtcatttgcatggacgtctgatgctgctgcacagtttaccgtgctttatagaaaaagacttaaaagaagctctgactcagtttatagaagaagaatccctcagcgattatgatagagatgctgaagcatccctggcagctgtgaaatcaggtgaagtagatttacatcagctggcgagtacatgggccaaagcttatgctgagaccacgttagagcatgcaaggcctgaagaacccagctgggatgaagattttgcagatgtgtaccatgacttaattcattctcctgcctctgaaactctcttaaatttggaacataattactttgttagtatctcagaactgattggtgaaagagatgtggagctgaaaaaattacgagagagacaaggtattgaaatggaaaaagtcatgcaggaattgggaaaatcactgacagatcaagatgtaaattcactggctgctcagcattttgaatcccagcaagacctagaaaataaatggtcgaatgaattaaaacaatcaactgccatccaaaaacaagagtatcaagaatgggtaataaaacttcaccaagacctaaaaaaccccaacaacagctcccttagtgaggaaattaaagttcagccaagtcagttcagagaatctgtagaagcaattggaaggatttatgaggaacagagaaagttagaagaaagttttaccattcacttaggagcccagttgaagaccatgcataatttgagattgctgagagcagatatgctggacttctgtaagcataaaagaaatcatcgaagtggtgtgaaacttcatcggctccaaacagctctgtcactttattctacatctctctgtggcctggttttactagtagataatcgaattaattcatatagtggtattaaaagagattttgccacagtttgccaagaatgcactgacttccatttcccccgaattgaagagcaattagaagttgtccaacaggtggtactttatgctagaacccagcgcaggagtaaattgaaagaatcacttgattctggaaaccaaaatggaggaaatgatgataagactaagaatgctgagaggaactatttaaatgttttacctggggaattttatattacacggcattctaatctctcagaaatccatgttgctttccatctctgtgtggatgaccatgtgaaatcgggaaacatcactgctcgtgatcctgccattatgggactccgaaatatactcaaagtttgctgtacccatgacatcacaacaataagcattcctctcttgctggtacatgatatgtcagaggaaatgactataccctggtgcttaaggagagcggaacttgtgttcaagtgtgtcaaaggtttcatgatggaaatggcttcatgggatggaggaatttctaggacagtgcaatttctagtaccacagagtatttctgaagaaatgttttatcaacttagtaacatgcttccccagatcttccgagtatcatcaacactcactctgacatccaagcactaaacccttatagattgacatgctggcagaagatgattgttaaactctccaggaacttgtgctatgctgggaatctgtcaagcaaaagatgcccagaaagagaacttgcagctcaatccacaaatcaagatacatgtgtgtgaaaccattccaaaaatttatatactgcacaaactggtgatcaacccctaacttaaacacttaaagtctctttatgaatttctctttttttcttctctgtgttacctgtgaatattagtaatctaaaactttttatttatcacacatggacacttgggaaaggaaacttgattatatttacatggaggcatttgactttttcaagaggcttgactcgtctcaggtgcaatccttaattaaacatacaaacaaaattttccttttactttctttgccaaaacaaaatgtaaaagcactgaaatatacattgcaagtacaaatttcctgtgaaaatctttttatagaaacacaaatgtataagacaaatgtgcttgttcttttaaattctcctgtttcagaatctctttttaatctactcctaaggatgtacaagttagagtcagaagacgttttagattttttccctctctctcatcctcccgctgtgcccttgcacttgcatattaataacatttcatggactgggaaatagtgttcttttttgcaagcttgatgtcaagttagtctaaaccagcacctggcagtattttagtgctcatcaacattgtgacaatcacacaaggaagatcatttctacatttctgtcctccctgcgttctcagcttgcttaaccattcctctacctcttgcatttttttgcggataaatgtatccccatttctgcttctctgtttcccctccttttccattgtttttccttatggtactactttctcaggtgctacatatcatatatttgtcccatctataacatatttaaatgctataagtagtaactccattaaacaaaggcatttacaaaagcacacaggtgtttagaaaagcaatagtttcatcaattccaagttatgtggatattgtaactggccacaagaatgaaatggagggcatttggtgtcataagatggcatgtcttgatgacaagaaacaaaacgcccttcattaatatgcctcagtgtaataactattatagaaactgttggcaagcagagtgctttcctataacagaatgtgtcttaattttctactcgagggaaaggtttgtccaggtaacaacactaaagacaaccctaagaacacccactccagcagtatgtccattagacactaaaactctccaaattatttgtcagggagcctggcgattctgccaagaaggcaggtgttttgcccttagagcctatacagttctcttggagaaattgtctttcaggcaccactgttaatcactgagactgattctaatgcaaagcagggaagacagaggcagaaaccaggagagtggtagatcagtgcagcccagatatcggaatggaggagcaaagtttcattcacggatgtttgttgaatgctgctgcccaactcttcctttgtcacctctaggctattccactaagttacttataaactggtggctttaactgagggctgtgtaaaggtactatttggcatgtgaagtcaggataaatttatcgaatgtccgttttccacatgcaactgtgttacagaagtagtaaaattggaagaatcatgtttatggtgttaccactgatggaaacacacaaacaccaagctaataataaatatataacttaaaaagctaattatatgcactgaaatggtgggaattttagtgatgcagtaattgaggagtctggagttttgtatttggaccaagaattatgagatgaggatctttttctgagtgttctaaagggcttcttgagggggagtggtttaaagcacttcatgaatgatgtgaagaaggtaccttgggctgagacagcattctaggtacagatggcactctgttcaaccaactgtggatggaaaatattctgaaaaaaaatacaataaaaattttaaaaatacaaaaaaaaaaaaa

SEQ ID NO: 30485 - DNA, 2959 bp, Homo Sapiens
agatggattttgcaaagctgtggttaacgattagaaatcctttatcacctcagcccgtggccccttgtacttcgctcccctccctcaggatccctttctccctctccaggggcatctccccctccaaggctctgcaaagaactgccctgtcttctagatgccttcttgaggctgcttgtggccacccacagacacttgtaaggaggagagaagtcagcctggcagagagactctgaaatgagggattagaggtgttcaaggagcaagagcttcagcctgaagacaagggagcagtccctgaagacgcttctactgagaggtctgccatggcctctcttggcctccaacttgtgggctacatcctaggccttctggggcttttgggcacactggttgccatgctgctccccagctggaaaacaagttcttatgtcggtgccagcattgtgacagcagttggcttctccaagggcctctggatggaatgtgccacacacagcacaggcatcacccagtgtgacatctatagcacccttctgggcctgcccgctgacatccaggctgcccaggccatgatggtgacatccagtgcaatctcctccctggcctgcattatctctgtggtgggcatgagatgcacagtcttctgccaggaatcccgagccaaagacagagtggcggtagcaggtggagtctttttcatccttggaggcctcctgggattcattcctgttgcctggaatcttcatgggatcctacgggacttctactcaccactggtgcctgacagcatgaaatttgagattggagaggctctttacttgggcattatttcttccctgttctccctgatagctggaatcatcctctgcttttcctgctcatcccagagaaatcgctccaactactacgatgcctaccaagcccaacctcttgccacaaggagctctccaaggcctggtcaacctcccaaagtcaagagtgagttcaattcctacagcctgacagggtatgtgtgaagaaccaggggccagagctggggggtggctgggtctgtgaaaaacagtggacagcaccccgagggccacaggtgagggacactaccactggatcgtgtcagaaggtgctgctgaggatagactgactttggccattggattgagcaaaggcagaaatgggggctagtgtaacagcatgcaggttgaattgccaaggatgctcgccatgccagcctttctgttttcctcaccttgctgctcccctgccctaagtccccaaccctcaacttgaaaccccattcccttaagccaggactcagaggatccctttgccctctggtttacctgggactccatccccaaacccactaatcacatcccactgactgaccctctgtgatcaaagaccctctctctggctgaggttggctcttagctcattgctggggatgggaaggagaagcagtggcttttgtgggcattgctctaacctacttctcaagcttccctccaaagaaactgattggccctggaacctccatcccactcttgttatgactccacagtgtccagactaatttgtgcatgaactgaaataaaaccatcctacggtatccagggaacagaaagcaggatgcaggatgggaggacaggaaggcagcctgggacatttaaaaaaataaaaatgaaaaaaaaacccagaacccatttctcagggcactttccagaattctctcatatttgtgggctgggatcaagcctgcagcttgaggaaagcacaaggaaaggaaagaagatctggtggaaagctcaggtggcagcggactctgactccactgaggaactgcctcagaagctgcgatcacaactttggctgaagcccctgcctcactctagggcacctgacctggcctcttgcctaaaccacaaggctaagggctatagacaatggtttccttaggaacagtaaaccagtttttctagggatggcccttggctgggggatgacagtgtgggagctgtggggtactgaggaagacaccattccttgacggtgtctaagaagccaggtggatgtgtgtggtggctccagtgggtgtttctactctgccagtgagaggcagccccctagaaactcttcaggcgtaatggaaaatcagctcaaatgagatcaggcccccccagggtccacccacagagcactacagagcctctgaaagaccatagcaccaagcgagccccttcagattcccccactgtccatcggaagatgctccagagtggctagagggcatctaagggctccagcatggcatatccatgcccacggtgctgtgtccatgatctgagtgatagctgcactgctgcctgggattgcagctgaggtgggagtggagaatggttcccaggaagacagttccacctctaaggtccgaaaatgttccctttaccctggagtgggagtgaggggtcatacaccaaaggtattttccctcaccagtctaggcatgactggcttctgaaaaattccagcacacctcctcgaacctcattgtcagcagagagggcccatctgttgtctgtaacatgcctttcacatgtccaccttcttgccatgttccagctgctctcccaacctggaaggccgtctccccttagccaagtcctcctcaggcttggagaacttcctcagcgtcacctccttcattgagccttctctgatcactccatccctctcctacccctccctcccccaaccctcaatgtataaattgcttcttgatgcttagcattcacaatttttgattgatcgttatttgtgtgtgtgtgtccgatctcacaagtatattgtaaacccttcggtgggtgggggccatatcctagacctctctgtatcccccagactatctgtaacagtgccaggcacacagtaggtgatcaataaacacttgttgattgag

SEQ ID NO: 30486 - DNA, 9348 bp, Homo Sapiens
cagctgccacttttcaccgttagaagtagagctttttccagacctcctaccttttagtctactttgaaaggtgaaagaaagaacatcgtttcaggaataaaaatgcacagtagtagttatagttaccgtagcagtgattctgtgtttagtaacactaccagcactcgaaccagtcttgattcaaatgaaaatcttctcttggttcattgtggtccaacactgatcaactcttgcattagcttcggcagtgaatcctttgatggacacaggttagaaatgttgcaacagattgccaacagagttcagagggacagtgtcatctgtgaagacaaactgattcttgctggaaatgctcttcagtctgattctaaaagattagaatcaggagtgcagtttcagaatgaagcagaaattgctgggtatatacttgaatgtgagaaccttttacgccagcatgtaattgatgtacagattcttattgatggaaaatactaccaggcagatcaattggtacagagggttgcaaaactgcgtgacgaaattatggccttaaggaacgaatgttcttctgtgtacagcaaaggacgcatactgacaacagaacagacaaagctcatgatatcaggaatcactcaaagtttaaactcaggatttgcacagaccttacaccctagtctgacctcagggctgacccagagtttaacaccttccctaacctcttctagtatgacttctggcctgtcatcagggatgacttcccgcctgactccatctgtcactccagcttatacacctggtttcccatcaggattagttccaaatttcagttcaggagtagagccaaattcattgcaaactttgaagttgatgcagatccgaaaaccccttctaaagtcttctttgctggatcaaaatttaacagaagaagaaatcaatatgaaatttgttcaggatcttttgaattgggttgatgagatgcaggtacaactggaccgcactgagtggggctcagatttgccaagtgttgaaagccatttagaaaatcataaaaatgttcatagagctattgaagaatttgaatctagtctcaaagaagctaaaatcagtgagattcaaatgacagcacctcttaaactgacttatgcagaaaagttgcacagattagagagtcagtatgcaaaactcttgaatacatccaggaatcaagaacggcaccttgatacactccataattttgtaagtcgtgcgactaatgaacttatttggttgaatgaaaaagaagaggaggaagttgcttatgactggagtgagagaaacaccaacatagctaggaaaaaagattatcatgctgaattaatgagagaacttgatcaaaaggaagaaaatattaaatcagttcaggagatagcagagcagctacttctagaaaatcatccagcccggttaactattgaggcctacagagcggcaatgcagacgcagtggagctggatcttacagctctgccagtgtgtggagcagcacataaaggagaacacagcgtatttcgagtttttcaatgatgccaaagaagctactgattacttaaggaatctaaaagatgccattcagcggaagtacagctgtgatagatcaagcagcattcacaagctagaagaccttgttcaggaatcaatggaagagaaagaagaacttctgcagtacaaaagcactatagcaaacctaatgggaaaagcaaaaacaataattcaactgaagccaaggaattctgactgtccactcaaaacttctattccgatcaaagctatctgtgactacagacaaattgagataaccatttacaaagacgatgaatgtgttttggcgaataactctcatcgtgctaaatggaaggtcattagtcctactgggaatgaggctatggtcccatctgtgtgcttcaccgttcctccaccaaacaaagaagcggtggaccttgccaacagaattgagcaacagtatcagaatgtcctgactctttggcatgagtctcacataaacatgaagagtgtagtatcctggcattatctcatcaatgaaattgatagaattcgagctagcaatgtggcttcaataaagacaatgctacctggtgaacatcagcaagttctaagtaatctacaatctcgttttgaagattttctggaagatagccaggaatcccaagtcttttcaggctcagatataacacaactggaaaaggaggttaatgtatgtaagcagtattatcaagaacttcttaaatctgcagaaagagaggagcaagaggaatcagtttataatctctacatctctgaagttcgaaacattagacttcggttagagaactgtgaagatcggctgattagacagattcgaactcccctggaaagagatgatttgcatgaaagtgtgttcagaatcacagaacaggagaaactaaagaaagagctggaacgacttaaagatgatttgggaacaatcacaaataagtgtgaggagtttttcagtcaagcagcagcctcttcatcagtccctaccctacgatcagagcttaatgtggtccttcagaacatgaaccaagtctattctatgtcttccacttacatagataagttgaaaactgttaacttggtgttaaaaaacactcaagctgcagaagccctcgtaaaactctatgaaactaaactgtgtgaagaagaagcagttatagctgacaagaataatattgagaatctaataagtactttaaagcaatggagatctgaagtagatgaaaagagacaggtattccatgccttagaggatgagttgcagaaagctaaagccatcagtgatgaaatgtttaaaacgtataaagaacgggaccttgattttgactggcacaaagaaaaagcagatcaattagttgaaaggtggcaaaatgttcatgtgcagattgacaacaggttacgggacttagagggcattggcaaatcactgaagtactacagagacacttaccatcctttagatgattggatccagcaggttgaaactactcagagaaagattcaggaaaatcagcctgaaaatagtaaaaccctagccacacagttgaatcaacagaagatgctggtgtccgaaatagaaatgaaacagagcaaaatggacgagtgtcaaaaatatgcagaacagtactcagctacagtgaaggactatgaattacaaacaatgacctaccgggccatggtagattcacaacaaaaatctccagtgaaacgccgaagaatgcagagttcagcagatctcattattcaagagttcatggacctaaggactcgatatactgccctggtcactctcatgacacaatatattaaatttgctggtgattcattgaagaggctggaagaggaggagaagtcactggaagaagaaaagaaagaacatgttgaaaaagccaaagaattgcaaaaatgggtatcaaatatcagcaagacattgaaagatgcagagaaggctggaaaacctcccttctctaagcaaaagatttccagtgaggaaatatcaaccaagaaggaacaattatcggaagcacttcaaactatacagctttttttggcaaaacatggagacaaaatgacagatgaagaaagaaatgaattggaaaaacaagtgaaaactcttcaggaaagttataatttattattcagtgaatctctgaaacagctacaagaatcacaaacctcaggagatgtaaaggtagaggagaagctggataaagtgattgcaggcaccattgatcagacaactggagaagtcctttcagtctttcaagcagttttaagaggcctcattgactatgacacaggaattaggttgcttgagacacagctaatgatttctggtctaatttcaccagaattaagaaagtgctttgaccttaaagatgccaaaagtcatggccttattgatgaacaaattctgtgccaactcaaagaactaagtaaagctaaggagattatttctgctgcgtcacctaccacaattccagtactggatgctctagctcaaagcatgataacagaatccatggccatcaaagttcttgagatactgctttctacaggctctctggttattccagccacaggagaacagttgaccctacagaaggctttccaacagaacttggtttcctcagcattattttctaaagttctggaaaggcaaaatatgtgcaaagatcttattgacccctgcacctctgagaaggtttctttaatagatatggtacaaagaagtactttacaggaaaacacagggatgtggcttctacctgtgagaccacaagaaggaggtagaataacattaaaatgtggaagaaacataagcattttaagagcagctcatgaaggtctcatagaccgtgaaaccatgtttaggttgttaagtgcacagcttctttctggaggtctgatcaattccaactctggccaaagaatgactgttgaagaagctgtcagagaaggggtgattgacagggacactgctagcagtatcctcacatatcaggttcaaactggtggaatcatccagtcaaaccctgccaagcgtttaactgtagacgaagcagtacagtgtgatttaataacttccagcagtgctcttctggtcctggaagctcagcgaggctatgttggactcatttggccccattctggtgaaatatttcccacatcatcttccttgcagcaagaattgattacaaatgaattggcctacaaaatcctgaatggcagacaaaaaatagctgctctttatattccagaaagttctcaagtcattggtttggatgctgctaaacagctaggaattatagacaacaacacagcatcaattttaaaaaatataacactgcctgataaaatgccagatttaggagatttagaagcttgtaaaaatgccagaagatggctctctttttgtaaatttcaaccctccacagttcatgattacagacaagaagaggatgtttttgatggagaagaacctgtcactactcagacctcagaagaaactaaaaaattatttctatcttatttaatgataaatagctatatggatgcaaacacagggcaaaggcttttgctgtacgatggagacttggatgaggctgttggcatgctactggaaggctgtcatgcagaatttgatggaaacacagccataaaagaatgtctcgatgtcttaagctcatctggtgtatttcttaataatgcttcaggtagagaaaaggatgaatgtacagctacaccaagtagtttcaataaatgtcactgtggagaacctgaacatgaagagactcctgaaaatagaaagtgtgctatagatgaagaatttaatgaaatgagaaatactgttatcaatagtgaattttctcagtcaggaaaactggcaagtacaatatcaattgatcctaaagttaacagttcacccagtgtgtgtgttcccagtctcatatcatatttaacacagactgaacttgcagacattagcatgcttagaagtgactctgaaaacatacttacaaactatgaaaatcaaagccgagtggaaacaaatgaacgtgcaaatgaatgtagtcattctaaaaacattcaaaactttccaagtgatttaatagaaaatcctattatgaaatcaaaaatgagtaaattctgtggtgtgaatgaaacagagaatgaagataatacaaacagggattcacctatctttgactattcccccaggctaagtgccttgttaagtcatgataaattgatgcacagtcagggaagttttaatgatacacacaccccagagagcaatggaaataagtgtgaagccccagccttatcattcagtgacaaaaccatgttgtcaggtcaaagaataggagaaaaatttcaagaccagtttctgggaattgcagctattaacatcagtttaccaggagagcagtatggacagaaatctttaaatatgatttctagtaatcctcaagtacaatatcacaatgataaatacatttcaaatacttctggtgaggatgaaaaaacacatccaggttttcagcagatgcctgaagacaaggaagatgagtctgaaatagaagagtattcctgtgctgtgactccagggggtgatactgataatgccattgtgtctcttacttgtgctacaccattgcttgatgaaaccatcagtgctagtgactatgaaacgtcactgctgaatgatcagcagaataacacaggaacagacactgatagtgatgatgatttttatgatactcccttgtttgaagatgatgaccatgattctttgcttcttgatggtgatgatcgtgattgcctgcaccctgaggactacgacacactgcaagaggaaaatgatgagacggcttctcctgctgatgttttttatgatgtctcaaaagagaatgaaaattccatggttccccagggggcaccagttggtagcttaagtgtgaagaacaaagcacattgtcttcaggatttccttatggatgttgagaaagatgaattagattctggtgaaaaaatacatttaaatcctgttggctcagataaggtgaatggacagtcactggaaactggatcagaaagggaatgcacaaatatccttgaaggtgatgaatctgactcattgactgattatgatattgtaggaggaaaagagagcttcactgcatcattaaaatttgatgacagtggcagttggagaggaagaaaggaagagtatgtaactggacaggaatttcactccgatactgatcatttagattctatgcaaagtgaagaaagttatggggattatatatatgacagtaatgatcaggatgacgatgatgatgatggcattgatgaagaaggaggaggtataagagatgagaatggaaagcccaggtgccaaaatgtggctgaagatatggatatccagttgtgtgcctctattttaaatgaaaacagtgatgaaaatgaaaatattaatacaatgattcttctggataaaatgcacagttgtagctctttagaaaaacagcaaagggtaaatgttgtacagctagcatcacctagtgaaaataacttagttactgaaaaaagcaaccttccagaatatacaactgagattgctggaaaaagcaaagaaaatctgttgaaccatgagatggtacttaaggatgtattgccgcctatcattaaagacactgaatctgaaaaaacttttggccctgcaagtatttcacatgataataataatatcagttcaacttctgaattaggtactgatctagcaaacacaaaggttaagttgattcaagggtcagaattgccagaattgactgattctgtgaaaggtaaagatgaatattttaagaatatgacaccaaaagttgactcatctcttgatcacatcatttgtactgagcctgatttaataggaaaacctgctgaggaaagccatttgtcattgatagcctctgtaactgacaaagatcctcaaggaaatggaagcgatctcattaaagggagagatggcaaaagtgatattctaatagaagatgaaacatcaattcagaaaatgtacttgggtgaaggagaagtgcttgtagaaggtctagtagaagaagaaaataggcatctcaaacttttgcctggtaaaaatacaagggatagtttcaagttaattaatagtcagtttccatttccacaaatcacaaacaatgaagaacttaatcagaaaggaagccttaaaaaagcaactgtaactcttaaagatgaaccaaataatctacaaataatagttagtaaaagtcctgttcagtttgagaatcttgaagaaatttttgacacatcagtttccaaagagattagtgatgacattacttcagacattacatcgtgggaagggaatacacattttgaggagtcattcactgatggacctgagaaagagcttgatctgtttacttacttaaaacattgtgctaaaaatataaaagcaaaagatgtagccaaaccaaatgaagatgtcccaagccatgttttaataactgcccctcccatgaaagaacatttacaattaggagttaataatacaaaagagaagtccactagtacccaaaaagactcacctcttaatgacatgatccaaagcaatgatctttgtagtaaagaaagcatctcaggaggaggaacagaaatttctcagttcacaccagaaagtattgaagccacactttcaatattatctcgtaaacatgtagaagatgttgggaaaaatgattttctgcagtcggagcggtgtgcaaatggattaggaaatgataactccagtaacactttaaatactgactattcattcttagaaattaataataagaaagaaagaattgagcaacagctaccaaaagaacaagccttgtctccaagatcccaagaaaaggaggttcagattcctgaattgtctcaggtatttgtggaggatgtaaaggatatcttaaaaagcaggttgaaagaaggtcatatgaaccctcaagaggttgaagaaccttcagcctgtgcagacactaaaattttaattcaaaatttaattaaaaggattaccacatcacagttggtaaatgaggcatctactgtgcccagcgactctcaaatgagtgactcttctggagtttcccccatgactaactcatcagaactaaagccagaaagtagagatgatcctttctgtattggaaatcttaagtctgagcttctccttaatatattgaagcaagatcaacatagccaaaaaattacaggagtatttgaattgatgagagaattaactcatatggagtatgacctagagaaaagaggcattacgtctaaagtacttccactgcagcttgaaaatattttctacaaactgcttgctgatggatattcagagaaaatagaacatgttggagactttaatcaaaaagcatgttctacatctgagatgatggaagaaaagccacatattcttggtgatattaaaagcaaagaaggaaactactattctcctaatttagaaactgtaaaagaaattggactagaaagctctactgtgtgggcatcaacattgccaagagatgagaagctcaaggatctgtgtaatgatttcccaagccatttggaatgtacttcagggtctaaagagatggcttctggagatagctcaaccgaacaagtaagttgacctatacattttatacagaaaaagctgcatgaaccatgtgagaataatcccatacat

SEQ ID NO: 30487 - DNA, 3131 bp, Homo Sapiens
gttttagggacagactgcttccgggtcgaagggcttgcttccggagagcgggaaggctaaaacgcggtagctaaactgcagccaactttggttgtgtgtggaaaaggctttagccatggacaggagtggctttggagagatatcatcccctgtaatccgggaggcagaggtgacacggactgcacggaaacagagtgctcagaaaagagttttacttcaggcatctcaagatgaaaattttggtaatactacaccaagaaaccaggttatccctcgaactcctagctcatttcgacagccttttaccccaacaagccgaagcttactaaggcagccagatatttcctgcattcttggaacaggagggaagtcgccccgacttacgcagtcttcagggttctttggaaatctctccatggttactaatctggatgacagtaactgggcagctgcattttcatcacagcgttccgggctgttcacaaacacagagccccacagtataacagaagatgtaactatcagtgctgttatgttacgtgaggatgatcctggagaagctgcatccatgagtatgttttctgatttcctgcagtcttttctgaagcactcttcgagtacagtttttgatcttgtggaagagtatgaaaacatctgtggtagtcaggtgaatatactgagtaaaatagtgagtcgagcaacacctggacttcaaaaattttcaaaaacagccagtatgctctggcttcttcaacaggagatggtcacatggaggctgctggcttctttgtatagagacagaatacagtctgcattagaagaggaaagtgtattcgcagttactgctgttaatgccagtgaaaaaacagttgtggaagcgttatttcagagggattcacttgttcgacaaagtcagctggtggtagattggttagagagtattgccaaagatgaaattggagaattttctgataatattgagttttatgcaaaatcagtatattgggaaaatactctgcataccttaaaacaacggcagctgacttcttacgttggaagtgttcgtccgcttgtcactgaattggaccctgatgctcccataagacagaaaatgccccttgatgatctggatagagaagatgaagttagattactcaaatatctctttactctaatccgtgctggaatgacagaagaggcacaacgactctgtaaacgctgtggtcaagcatggagagctgcaacacttgaaggctggaaactgtaccatgaccctaatgttaatggaggaacagaattagaacctgttgaagggaatccatatagacgcatttggaaaataagttgctggagaatggcagaagatgagctttttaatagatacgagagagcaatttatgcagctttaagtgggaatcttaagcagctgcttcctgtctgtgacacctgggaagacacagtttgggcctacttccgggtgatggtggacagtctggtagaacaggagatccagacatcagtagcaactctggatgaaactgaagaactccctagagaatatctgggagcaaactggacgttagaaaaggtttttgaggaacttcaagctactgacaaaaagagagttctggaagagaatcaagaacattatcatatagttcaaaagtttcttatcctgggagacattgatggtttgatggatgagtttagcaaatggctttccaaaagcagaaacaatctacctggacacctgcttcgctttatgactcaccttattttgtttttccgtactctgggactacagaccaaggaggaagtttctattgaagttttaaagacatacatacagcttttaataagagagaaacatacaaatcttatagcattttatacctgtcatttgcctcaagacctagctgttgcccagtatgcattatttttggaaagtgttacagaatttgaacagcgccaccattgcctggagttggctaaagaagcagatttggatgttgcaacaataacaaaaactgtagttgagaatattcgaaagaaagataatggtgaatttagtcatcatgacctggccccagccctagatactggcactactgaggaggatcgtttaaaaattgatgtaattgactggttggtatttgacccagcgcagagggcagaagcactgaaacaaggcaatgcaattatgagaaaattcttggcatcaaaaaagcacgaagctgcaaaagaagtatttgtgaaaattcctcaggattctatagcagaaatctataatcagtgcgaggaacaaggaatggaaagtccacttcctgctgaagatgataatgctatccgagaacatttgtgcatcagagcttatttggaagcccatgaaacctttaatgagtggtttaagcatatgaattcagttccacaaaaacctgctttgatacctcaaccaacttttactgagaaagtggctcatgaacacaaagaaaagaaatatgaaatggattttggtatttggaaagggcatttggatgccctaactgctgatgtgaaggagaaaatgtataacgtcttgttgtttgttgatggagggtggatggtggatgttagagaggatgccaaagaagaccatgaaagaacacatcaaatggtcttactgagaaagctttgtctgccaatgttgtgttttctgcttcatacgatattgcacagtactggtcagtatcaggaatgcctacagttagcagatatggtatcctctgagcgccacaaactgtacctggtattttctaaggaagagctaaggaagttgctgcagaagctcagagagtcctctctaatgctcctagaccagggacttgacccattagggtatgaaattcagttatagtttaatctttgtaatctcactaattttcatgataaatgaagtttttaataaaatatacttgttattagtaattttttcttttgcattaccatgtaaaatttagacatttgaattttgtacttttcagaatattatcgtgacactttcaacatgtagggatatcagcgtttctctgtgtgcttgttaataaaactatataaaaattaaaattttctgtttttacaaaaaaaaaaaaaaa

SEQ ID NO: 30488 - DNA, 2967 bp, Homo Sapiens
ccggaactgcagttgctgctgcagctgaggtacagcggcggtttctgaggttcttcactcgcgactgacggagctgcggtggcgtctccacacgcaaccatgaagttgaaggacacaaaatcaaggccaaagcagtcaagctgtggcaaatttcagacaaagggaatcaaagttgtgggaaaatggaaggaagtgaagattgacccaaatatgtttgcagatggacagatggatgacttggtgtgctttgaggaattgacagattaccagttggtctcccctgccaagaatccctccagtctcttctcaaaggaagcacccaagagaaaggcacaagctgtttcagaagaagaggaggaggaggagggaaagtctagctcaccaaagaaaaagatcaagttgaagaaaagtaaaaatgtagcaactgaaggaaccagtacccagaaagaatttgaagtgaaagatcctgagctggaggcccagggagatgacatggtttgtgatgatccggaggctggggagatgacatcagaaaacctggtccaaactgctccaaaaaagaagaaaaataaagggaaaaaagggttggagccttctcagagcactgctgccaaggtgcccaaaaaagcgaagacatggattcctgaagttcatgatcagaaagcagatgtgtcagcttggaaggacctgtttgttcccaggccggttctccgagcactcagctttctaggcttctctgcacccacaccaatccaagccctgaccttggcacctgccatccgtgacaaactggacatccttggggctgctgagacaggaagtgggaaaactcttgcctttgccatcccaatgattcatgcggtgttgcagtggcagaagaggaatgctgcccctcctccaagtaacaccgaagcaccacctggagagaccagaactgaggccggagctgagactagatcaccaggcaaggctgaagctgagtctgatgcattgcctgacgatactgtaattgagagtgaagcactgcccagtgatattgcagccgaggccagagccaagactggaggcactgtctcagaccaggcgttgctctttggtgacgatgatgctggtgaagggccttcttccctgatcagggagaaacctgttcccaaacagaatgagaatgaggaggaaaatcttgataaagagcagactggaaatctaaaacaggagttggatgacaaaagcgccacctgtaaggcatatccaaagcgtcctctgcttggactggttctgactcccactcgagagctggccgtccaggtcaaacagcacattgatgctgtggccaggtttacaggaattaaaactgctattttggttggtggaatgtccacgcagaaacagcagaggatgctgaaccgtcgtcctgagattgtggttgctactccaggccggctgtgggaattaattaaagaaaagcattatcatttgaggaaccttcggcagctcaggtgcctggtagtggatgaggctgaccggatggttgagaaaggccattttgctgagctctcacagctgctagagatgctcaatgactcccaatacaacccaaagagacaaacgcttgttttttctgccacactcaccctggtgcatcaggctcctgctcgaatccttcataagaagcacaccaagaaaatggataaaacagccaaacttgacctccttatgcagaaaattggcatgaggggcaagcccaaggtcattgacctcacaaggaatgaggccacggtggagacgctaacagagaccaagatccattgtgagactgatgagaaagacttctacttgtactacttcctgatgcagtatccaggccgcagcttagtgtttgccaacagtatctcctgcatcaaacgcctctctgggctcctcaaagtccttgatatcatgcccttgaccctgcatgcctgtatgcaccagaagcagaggctcagaaacctggagcagtttgcccgtctggaagactgtgttctcttggcaacagatgtggcagctcggggtctggatattcctaaagtccagcatgtcatccattaccaggtcccacgtacctcggagatttatgtccaccgaagtggtcgaactgctcgagctaccaatgaaggcctcagtctgatgctcattgggcctgaggatgtgatcaactttaagaagatttacaaaacgctcaagaaagatgaggatatcccactgttccccgtgcagacaaaatacatggatgtggtcaaggagcgaatccgtttagctcgacagattgagaaatctgagtatcggaacttccaggcttgcctgcacaactcttggattgagcaggcagcagctgccctggagattgagctggaagaagacatgtataagggaggaaaagctgaccagcaagaagaacgtcggagacaaaagcagatgaaggttctgaagaaggagctgcgccacctgctgtcccagccactgtttacggagagccagaaaaccaagtatcccactcagtctggcaagccgcccctgcttgtgtctgccccaagtaagagcgagtctgctttgagctgtctctccaagcagaagaagaagaagacaaagaagccgaaggagccacagccggaacagccacagccaagtacaagtgcaaattaactggtcaagtgtgtcagtgactgcacattggtttctgttctctggctatttgcaaaacctctcccacccttgtgtttcactccaccaccaaccccaggtaaaaaagtctccctctcttccactcacacccatagcgggagagacctcatgcagatttgcattgttttggagtaagaattcaatgcagcagcttaatttttctgtattgcagtgtttataggcttcttgtgtgttaaacttgatttcataaattaaaaacaatggtcagaaaaaaaaaaaaaaaaaaaa

SEQ ID NO: 30489 - DNA, 5737 bp, Homo Sapiens
ggcagcggcggaagcggcgagggcggcgggcgtccggctctgaggtggtggaggcggcggaggcggcggcggaggcggcggcggctcgggactgggctcggctggaagcagcgagggtcagagcgccgcagcaagcgccgatctcccggctcgaccatccgcctgccgcccggacgcctgggccgcggagtttgtgtcccggctcggaccccggcgcccagcccggagccgtaaccttgaggcggcggcggcggggccgggccgggccgggctggggggcggtggcgctggatccgcggctgcccgatcgttggcgggagatgtcgaaccccgggacacgcaggaacggctccagcatcaagatccgtctgacagtgttatgtgccaagaaccttgcaaagaaagacttcttcaggctccctgacccttttgcaaagattgtcgtggatgggtctgggcagtgccactcaaccgacactgtgaaaaacacattggacccaaagtggaaccagcactatgatctatatgttgggaaaacggattcgataaccattagcgtgtggaaccataagaaaattcacaagaaacagggagctggcttcctgggctgtgtgcggctgctctccaatgccatcagcagattaaaagataccggataccagcgtttggatctatgcaaactaaacccctcagatactgatgcagttcgtggccagatagtggtcagtttacagacacgagacagaataggaaccggcggctcggtggtggactgcagaggactgttagaaaatgaaggaacggtgtatgaagactccgggcctgggaggccgctcagctgcttcatggaggaaccagccccttacacagatagcaccggtgctgctgctggaggagggaattgcaggttcgtggagtccccaagtcaagatcaaagacttcaggcacagcggcttcgaaaccctgatgtgcgaggttcactacagacgccccagaaccgaccacacggccaccagtccccggaactgcccgaaggctacgaacaaagaacaacagtccagggccaagtttactttttgcatacacagactggagttagcacgtggcacgaccccaggataccaagtccctcggggaccattcctgggggagatgcagcttttctatacgaattccttctacaaggccatacatctgagcccagagaccttaacagtgtgaactgtgatgaacttggaccactgccgccaggctgggaagtcagaagtacagtttctgggaggatatattttgtagatcataataaccgaacaacccagtttacagacccaaggttacaccacatcatgaatcaccagtgccaactcaaggagcccagccagccgctgccactgcccagtgagggctctctggaggacgaggagcttcctgcccagagatacgaaagagatctagtccagaagctgaaagtcctcagacacgaactgtcgcttcagcagccccaagctggtcattgccgcatcgaagtgtccagagaagaaatctttgaggagtcttaccgccagataatgaagatgcgaccgaaagacttgaaaaaacggctgatggtgaaattccgtggggaagaaggtttggattacggtggtgtggccagggagtggctttacttgctgtgccatgaaatgctgaatccttattacgggctcttccagtattctacggacaatatttacatgttgcaaataaatccggattcttcaatcaaccccgaccacttgtcttatttccactttgtggggcggatcatggggctggctgtgttccatggacactacatcaacgggggcttcacagtgcccttctacaagcagctgctggggaagcccatccagctctcagatctggaatctgtggacccagagctgcataagagcttggtgtggatcctagagaacgacatcacgcctgtactggaccacaccttctgcgtggaacacaacgccttcgggcggatcctgcagcatgaactgaaacccaatggcagaaatgtgccagtcacagaggagaataagaaagaatacgtccggttgtatgtaaactggaggtttatgagaggaatcgaagcccagttcttagctctgcagaaggggttcaatgagctcatccctcaacatctgctgaagccttttgaccagaaggaactggagctgatcataggcggcctggataaaatagacttgaacgactggaagtcgaacacgcggctgaagcactgtgtggccgacagcaacatcgtgcggtggttctggcaagcggtggagacgttcgatgaagaaaggagggccaggctcctgcagtttgtgactgggtccacgcgagtcccgctccaaggcttcaaggctttgcaaggttctacaggcgcggcagggccccggctgttcaccatccacctgatagacgcgaacacagacaaccttccgaaggcccatacctgctttaaccggatcgacattccaccatatgagtcctatgagaagctctacgagaagctgctgacagccgtggaggagacctgcgggtttgctgtggagtgaaaagcaaccaaaggcaacagagtctagctcatggccaccagaccaaaagcatccagcttctgtgcacctcctgcaaagctggcagaggccctggaattccagatcacctgaggggaaagggttgtctctctcctttctgttgggggagggggatgggggacttttgttggtggctcccacccatatatccctcctttaccatagtactcccacccacttccatcacccatccaataaaatgcagccaggtttagcctttggctttggtcacacaggatattctgctgtgttgcaacccatgtggtgataaggctcacagccctgagctctttacgggagcatcaactcacagttaggggactgggcgtggctgattgagggtttggaactggtggctatgccagctattccatctcaaaacagccttgaggccccttttcaatttgagcagctgctagatatcttatcagagctcagattccagatttcacatcccagcagccggttctgggtagcagatcaatttccaactggaaaataactatataatgtatgcttattggaattctgccacagcaggaagcttgagtcaaaatgtgtttcccctttgaaaggagaaggaattggagcagcttttcctggaggcccaggatatttcttttctgggtatcttggctgaaaattttgttttacatagagaaaaacgatcttttaagggtcccttttgctgcattatctgtccagtttgacttttttttcagtgaaaacaccatgtcatggagtgtaggaaagagcagaccaaaatcagccctagagccaaccagtcagtcccaaagctgtgacctctgtgccactgttgtccatagaagagcatcgactgtgtcacttaaaatattagtaaaccatgatgcagcaactgctaagagctaaactaacaaaattgtgtcatcatagctgctggcttggtgtgaactcgcttaaaagcaatggtgaaaggataacctcgatgatgtaaatccacccaaagatactgttctacaaaaagtagggtgtggacgcaaacctgtgacagcagagggggacgacttcacactcactgcctcatgtggcccctttcccagtggcagctggtgacactaacgattgctactcggttcacttgcccagatgtcttcatatgatgagcaaggccagaagcaaggctagattcgaagtttctgacaccatttccagtttgcacaaaagtcagtattttatcttaaagtggcttgatttccaatagctgaacttgggcagaaaacagcaggccaatgttcctatgtggtttctttgttgttgtttttgtttggggtgggggcaagtacagggtaattcatgagcaagacatttcactgctgtcgaagtctctgggatcccgctgtgggtctgagatggcctgggaaggaccttgtggacaatggttttatctgttctttttgtcactgttaatttctgggctgctgaggttctagaatagaagggctgccaaatgaggtttgctgcaggaggaaagtttaatcccccattccaaaagtccaggccaaatggtgggcttagcctctttgaaaagttctgccttgcccccacaggtgggcacatcctgtgtctcattcaccatgatgcttcctgagggtgttctagaagcccgttccccagtggctgtatccagcctttccttgcatcatcttcctcttgaaggtgaggaagtgaaaactacagacctcccccggacagcccactctctatcacgagcctaacccgcgggaggcggaagagacatccattcgagaactgaagcggcctccgggatgaggtcagaggccccacctgattttcctggtggtggtatccaaaatcttcagtaactaggaaggaaaccagggtctcatggtttaaaagactttgaagcaggaatgttgcatttgacgcctttaaaactacctttttgctgttgggaggagtcgggggcgagccttagcagctgcaccgccatccccatgctggttggtgctgccctgcctctcgtgccgggtgttgcttcagcccagagccagagggctgggtcccgggtcctccacaggtgaccccggtggacacacgcgttcccatcctggcctccgtctctgcttttccacttctacctgcgtgtgggtttgccgccttgtcatcggttgtgtgagtgtcgcagacctttccagagctccggttcactctttccaaacaggcctccctgtcggtggcactgcactcctagaaccttcagtttctacgatggtttgtttggtccttttgaaccaccccaaagaactcaacatggcaaagcaaatggtaaaagcttcccgactgttctactttgggtccgcgcgaagcccactcacgtgtgatctgtgttgcccctctcggtggtcccaggcgatccagccatgccccctgcccctctgcccagatgcttcaggggcccggcttttcaggcttgccctcaccagcggccgtcagccgacactcagggatgtagctaacaccactccgccagtgctttcagtaggaagagctgaggctgcctgggaggcccggggcgaccggaaaagggctctctcaagttctgaaaagagaatctgccaccagatcgaatttcgacccctgagcttgttcggacgtatggtccaaattcagattaaggtggtcacccaacccgagatgtcaggaaaggccttctgcagagaaaatgtccccccacccgccatctgcagccaggtgtgtgccacacggcagccttcccgaaacatagtatggattttaaaaatgtgtttatttttgtttctcaaccactttataacgtattttttaatttattttgtaatgtcttgttttgaagtattgctgctatccttgttatccttcccactgtttttatcactgatttattttgtgaaagttgtacactaatgttctatgtcaaaatcaaaagtatttaatgaaatactagttctatttaatgtggttatggaaccagctggaaacacaaaacaaacagtgattgtacagcaggctgggcccaggaggtcaggttcattttgttacatatgcaataaactcacgacttt

SEQ ID NO: 30490 - DNA, 4802 bp, Homo Sapiens
tgggaaataaagtcatttgtatgtttttctctcttgcacagcctaaaatgaccaatgtgtgatttcagtggaataaatggcgcccaaagtcacagatgctatagtctggtatcaaaagaaggagtttctctctgtggccaccaccgccccaggcccacagcaagtactgcctggctactgccagtgttcactcaaggaccaagggctcttcattcagtgtttgattggagcatatgatcaacaaatatgggaaaaatctgttgaacagagagaaatcaagtttattaaactggggctaaggaataaaccaaagaaaacagcacatgtgaaaccagacctcatagatgttgatcttgtaagagggtctgcatttgcaaaggcaaagcctgaaagtccttggacttctctgaccagaaagggaattgttcgagttgtatttttcccctttttcttccggtggtggttacaagtaacatcaaaggtcatctttttctggcttcttgtcctttatcttcttcaagttgctgcaatagtattattctgctccacttctagcccacacagcatacctctgacagaggtgattgggccgatatggctgatgctgctcctgggaactgtgcattgccagattgtttccacaagaacacccaaacctcctctaagtacagggggtaaaagaagaaggaaattaagaaaagcagcccatttggaagtacatagggaaggagatggttctagtaccacagataacacacaagagggagcagttcagaaccacggtacaagcacctctcacagcgttggcactgtcttcagagatctctggcatgctgctttctttttatcaggatcaaagaaagcaaagaattcaattgataaatcaactgaaactgacaatggctatgtatcccttgatgggaagaagactgttaaaagcggtgaagatggaatacaaaaccatgaacctcagtgtgaaactattcgaccagaagagacagcctggaacacaggaacactgaggaatggtcctagcaaagatacccaaaggacaataacaaatgtctctgatgaagtctccagtgaggaaggtcctgaaacaggatactcattacgtcgtcatgtggacaggacttctgaaggtgttcttcggaatagaaagtcacaccattataagaaacattaccctaatgaggacgcccctaaatcgggtactagttgcagctctcgctgttcaagttccagacaggattctgagagtgcaaggccagaatctgaaacagaagatgtgttatgggaagacttgttacattgtgcagaatgccattcatcttgtaccagtgagacagatgtggaaaatcatcagattaatccatgtgtgaaaaaagaatatagagatgacccttttcatcagagtcatttgccctggctccatagttcccacccaggattagaaaaaataagtgctatagtatgggaaggtaatgattgtaagaaagcagacatgtctgtacttgaaatcagtggaatgataatgaacagagtgaacagccatataccaggaataggataccagatttttggaaatgcagtctctctcatactgggtttaactccatttgttttccgactttctcaagctacagacttggaacaactcacagcacattctgcttcagaactttatgtgattgcatttggttctaatgaagatgtcatagttctttctatggttataataagttttgtggttcgcgtgtctcttgtgtggattttcttttttttgctctgtgtagcagaaagaacttataaacagcgattactttttgcaaaactctttggacatttaacatctgcaaggagggctcgaaaatctgaggttcctcatttccggttgaagaaagtacagaatataaaaatgtggctatctctccgttcctatcttaagcgtcgaggtcctcagcgatcagttgatgtaatagtttcatctgctttcttattgactatctcagttgtatttatctgttgtgcccagctacttcatgtacacgagatcttccttgattgtcactacaattgggaattggtaatctggtgcatctcgttaacactttttctcctaagatttgttacccttggatcagaaacaagtaaaaaatatagtaatacctcaatattacttactgaacagataaacctctacttgaagatggagaaaaaacctaacaaaaaggaggaactgacactagtgaataatgttttaaaactggctactaaactgctaaaggagttggacagtccttttagattatatgggcttacaatgaatccgctgctttataacatcacccaggttgttatcctgtcagctgtttctggtgttatcagtgacttgcttggatttaatttaaagctatggaagattaagtcatgacaattcaaagaaaagaagatgtagcctcttttccagaataagagtactgactaagctgcctgaaagcttgtcactgattctttgcttcaggagtctcagctagggagttgaagtgtttacatcagactgtcttgtgcaattcttatatttattttactggttcacttttttttacatttattttagtctttatatttttatttttaagcattgatgtacttagttgttgaaagggtgatgaaactgatatccagatacttgagatcctggtaattggtcataaataattggcaaaataacaaattgtgaaaatagaagccattgctcagcaccgtttctccatcaatgccgtgaacttgccttacttgaggaaaaattctttaactttggaatattgcattgaactcagctatacacataaaacattttctttggtaaatcaagatccagtcagggtttctcttgaattattttggaacaatgccaggatccaaactgattaagttacagtttaagcacccttcagtattaatatatacggtattatataacaggtcaacaagtgctctttgatgttaaaacttgtaatagagcaataattgtaaatggttaccatactgtaagatattttgataaaaattaactagtagtacttgtatttatttgaaacactgggctgtttgcacagctccaactgtgcatgctcaaaatgtgcactttttaaaattgttacttttaatgcgtatctttatatgggatctgttatagtatactagggcatgatatggtatccttttgagtgaggtatatactcatctcacaagtgaagtgcctactgatattactaaagtacattatgtttactcaagtaaataattttctccccatggtacactctagtgtaggctattcataccacactgaaatgaacaactgaagaataaggctaagaaccaataaaatatttctctaattgctagttgtaaaactgtatccaaattttcagaaaagacagcttcagcttgcaaattctatcctctaaacttatctggtgcattctccccaccccacccccattatataagggctattttagatgcttttaacctccccaacaaataatttgccaagtgtccaatgagaacttatcatgttggtgtgttaggtaaatcgggcaaatatgatagtgtcttacattgggccttgattttaagttgttatatttgtacaatcgagtattttagaaattacatgaaacatgaaacagtttttgcaatttttttttaaactgggcatctggtttctaaaaatttatttgaaacaatctagaattttcttggtgcaaagtgtatcatgtggaatatcctcatatttttaccatattttaagaactttaagacgattaattgtaaataatttatttgattggtgcagttctaatccctaaatcataatcttaaaatcaggaatgtgtggagaacagagccatgtcatatcactttgctcttaccattccttttgatcagcctcaattcagcctcattgtgtagtatgttttttctttctatgaaaaacaacagaaagcatttcattttatttgcctatgttcaaatatgtttaataatgaccaaagtgcattctgagttttttcaaggaatgtaatactggagctttaagaacatacttagtttctcatgtgaaaacttaggctttgtctgatgtttttccttcctctattgtctaatgttgaggttgtttttaggaattatgttttataaactttttcaatataaggtacatgcctatacagaacttaacattttgcacagaatatatcaaatatattttgagaaaaaaagtacggcatgagttctgttaggaataaaagatgaaactattgtatctcacaaaaaatcttatttcagaatggaaatatttttgagaaaagtagctgagcatactggtttaagaaaatgcttgttttagattgaggttaacttagagttgggagttgatttattaagtacagtatacctctcaacagtttataaataatatgttgaattatgtcagtgtgggcagcagtagaatactaaaaggaaaatgtcatgttaagcaatttcagaacattaactgaactattttcaaagcagaaaaattgacattgctgcctttaagaataccatgaatgtaagaaattgaaagaaattgtaaaatatcacataatatagaaatggcagttcaaagagaattgtggcagatgttgtgtgtgaactgttgtttctttgccacatgtgttgtatttgaaagttttacagtaagtttaaaataaaacattctgtgaccaaaaaaaaaaaaaaaaaaaaaa

SEQ ID NO: 30491 - DNA, 4809 bp, Homo Sapiens
ggattttcagtgttccaggactgggtgttctgctggtctccctctcccctcccttccccgattccccggtgccctccctgcgcgcagacccaggggactctgagaatggaagggagctctcattcccgggaggaaaagacaccaggttccctgggctgcctgcactcagttctcagcctccttcctcatgcctccagccactgcccgggtctgcggcacgggcgcgatttgaaatacccctccttcccgctttgaagaaggctgggctggctgggggttattttgggagcagcttctgagatccaatggccttgttagggcaacactgacctttccgtcccagaaggagggcaggattggagaagggggcggggcagcggcggggagaccgacagccccgcacacccactggggtggagaagggggccagcgggctgcgggaattcagcctccggcgggggctgccaccgaggggaatttcccctctttgaaaaggctggggacccctccaccccaccctttcactgggcttcttaaagagatcacaccgttttcccttggacttcttggaaggcagacttgggacgctttgtggggactttgaacctttccttcctgctttctttccagcaggcagccttgctctggctggtggagtcggggctcccgggcatggcactgactagccgacccggtgctgacttggcgccggggctctttcagcctctgctggcatcctgcttcccccctcctggggtgcagtggtgagtctgggggcctgcccccgagggcactggaggagtgttgcaggcatcacccacgccctctgcacccacgctggaggacggggaggttgtcaggggctatgatgagatgagtgggggccgcttcgactttgatgatggaggggcgtactgcgggggctgggaggggggaaaggcccatgggcatggactgtgcacaggccccaagggccagggcgaatactctggctcctggaactttggctttgaggtggcaggtgtctatacctggcccagcggaaacacctttgagggatactggagccagggcaaacggcatgggctgggcatagagaccaaggggcgctggctctacaagggcgagtggacacatggcttcaagggacgctacggaatccggcagagctcaagcagcggtgccaagtatgagggcacctggaacaatggcctgcaagacggctatggcaccgagacctatgctgatggagggacgtaccaaggccagttcaccaacggcatgcgccatggctacggagtacgccagagcgtgccctacgggatggccgtggtggtgcgctcgccgctgcgcacgtcgctgtcgtccctgcgcagcgagcacagcaacggcacggtggccccggactctcccgcctcgccggcctccgacggccccgcgctgccctcgcccgccatcccgcgtggcggcttcgcgctcagcctcctggccaatgccgaggcggccgcgcgggcgcccaagggcggcggcctcttccagcggggcgcgctgctgggcaagctgcggcgcgcagagtcgcgcacgtccgtgggtagccagcgcagccgtgtcagcttccttaagagcgacctcagctcgggcgccagcgacgccgcgtccaccgccagcctgggagaggccgccgagggcgccgacgaggccgcacccttcgaggccgatatcgacgccaccaccaccgagacctacatgggcgagtggaagaacgacaaacgctcgggcttcggcgtgagcgaacgctccagtggcctccgctacgagggcgagtggctggacaacctgcgccacggctatggctgcaccacgctgcccgacggccaccgcgaggagggcaagtaccgccacaacgtgctggtcaaggacaccaagcgccgcatgctgcagctcaagagcaacaaggtccgccagaaagtggagcacagtgtggagggtgcccagcgcgccgctgctatcgcgcgccagaaggccgagattgccgcctccaggacaagccacgccaaggccaaagctgaggcagcggaacaggccgccctggctgccaaccaggagtccaacattgctcgcactttggccagggagctggctccggacttctaccagccaggtccggaatatcagaagcgccggctgctgcaggagatcctggagaactcggagagcctgctggagccccccgaccggggcgccggcgcagcgggcctcccacagccgccccgcgagagcccgcagctgcacgagcgtgagacccctcggcccgagggtggctccccgtcaccggccgggacgcccccgcagcccaagcggcccaggcccggggtgtccaaggacggcctgctgagcccaggcgcctggaacggcgagcccagcggtgagggcagccggtcagtcactccgtccgagggcgcgggccgccgcagccccgcgcgtccagccaccgagcgcatggccatcgaggctctgcaggcaccgcctgcgccgtcgcgggagccggaggtggcgctttaccagggctaccacagctatgctgtgcgcaccacgccgcccgagcccccaccctttgaggaccagcccgagcccgaggtctccgggtccgagtccgcgccctcgtccccggccaccgccccgctgcaggcccccacgctccgaggccccgagcctgcacgcgagacccccgccaagctggagcccaagcccatcatccccaaagccgagcccagggccaaggcccgcaagactgaggctcgagggctgaccaaggcgggggccaagaagaaggcgcggaaggaggccgcactggcggcagaggcggaggtggaggtggaagaggtccccaacaccatcctcatctgcatggtgatcctgctgaacatcggcctggccatcctctttgttcacctcctgacctgaccgtcgcttaccagagccagaagttcctgctgaggacatgaggacccgtctttttgcagtgccaggcagggtggccaaagaggactggactctggacctggagccccgtggtccagttcacattcaccccacaagagtttcaggaggcctcccacggtgcctgtgctgggtggcggtggtggtgccaagaggaatggaatgtcctgggctccttcaggagctctctacccaggggcaaggagagcccagagagaagcgccctggtctcttgagcttcctgatctgctcctgtcccccgctctcctccactcccttgcctttccctaggttgtcccctccctgggcttttgtgtgttttgggagatgtcacctaaccaggacattgatattcaatcccatcccccttcctcccaccctgccccactttgatttaatcctttggctgtgggctgaggcctcccagggaagctgggtggggtgggtgttgagaccccctcagaccagcacagagacctgtccttgtgcagtctgcaccctgcactccctcccttgcctgtagatgttctggatgacagtagaggaaatggacaaggtcagtttgaatatcccagaacacagtgctctgtctcctcccaccagtccagttagcttcccttctggaccaatagacgaggggagaccccatggatcctctggctgggaagccactgaccaggtggccagggggcagggtgggaagaggggttaaggtgcagtgatgatggcctgttttggagtgtgtctgagactgggattgcatttggggtttcccgtgtgcttgggatgctagagggtcacctgcaggaggcctggggccggcgagaaatctcctgtgatgccctgtgaaatggcttgtctcctcccccatcagggcccaccgaaagctcaggggagcacagaagcccatggaagcccagggagatgtccctggggcagacactaaggcaggtgttgaagacaagctgcttgtcaagaagcatttcccggcaagagaggggcaagtctggggctccaactgggtacagcctgggtgcagttataagcccctttggcttacttggtagaagatggctacttggatgtacctcacttaaagatgttttgtaccacactaggtctctgggcccttgtgcttcctgtgggtggggtgagggccaaaggctatggtttcctgcctccaggagaatggagagaaagggcttccaggcccctccaagcctggggaaggacgtggcatccaagctgagccagagggaactgctgctgtcctcccttcatttctgtggaccttggaggctttggctttgtggcagggcctccccaggcagctctgggacctaggagtttgcttctgatagggtcagctttcccatttcccttcaatgcttgggaaccttctcccttagcttcacacttgccgtttcaagccctgctgggaccttgtggcttggctggaatccaggactgtattttcatggagaagaacctgcagattcttccatcctcagctggccatggcccacagctctgcatctgcatctgagcttctcaagactcctggagcatgaggggaatggggcggggccactgctctgtgctgacgggctccgtctcggagattcttgtcctgttttttttctgttgtttttttttggctggtgctggggacaagcctgtgcctgccaaagctcccaggccaagtttgggggctggtgtttggggttgggtttggggttcaggatgctgcagtctgtgcaataataaacccgcatctgctcacggaaaaaaaaaaaaaaaaaaaaaaaa

SEQ ID NO: 30492 - DNA, 1931 bp, Homo Sapiens
ggctcgggctccggctcgggctcccgcggcgtgggctgggcagcagccgggcggcggctccgcggcgccgggcaggggccgtccgcgggtccgcgccctcgggcggcggcgtctcctgggtcccggcagccgtccgcgcgcccgggcgcaggtttggttttcctaaacaaatcctttcacagggaccgacggcacttgataatgtgacaaaaaccagcctcttccaccccactgcagtgacttttgccggaaagtggagcagtgggcacggccaaccttgtcgttcatcaatgccgcccctggcagtatctgaggatcggtggcagccatgcctccccctgccccagccgctccttcccccccacgctaatctgcatggtgtgggcgcccttgggacccccgaggactgattgtctgaccttgcttcacacgcccagtaaggactcccccaagatgtcgctcgagtggctggtggcctggagctggtcgctggatggcctgagggactgcatcgccaccggcatccagtccgtgcgggactgcgacaccaccgctgtcatcactgtggcctgcctcctggtcctcttcgtgtggtactgttatcacgtgggcagggagcagccccggccctacgtctccgtcaactccctcatgcaggctgccgatgccaacgggctgcagaatggctacgtgtactgccagtcccctgagtgcgtgcgctgcacccacaacgagggcctcaaccagaagctgtaccacaacctgcaggagtacgccaagcgctactcctggtccggcatgggccgcatccacaagggcatccgcgagcagggccggtacctcaacagccggccctccatccagaagcccgaggtcttcttcctgcccgacctgcccaccacgccctatttctcccgggacgcacagaaacatgatgtggaagtgctggaacggaacttccagaccatcctgtgtgagtttgagaccctctacaaagctttctcaaactgcagcctcccgcaaggatggaaaatgaacagcacccccagcggggagtggttcaccttttacttggtcaatcagggggtttgtgttcccaggaactgtaggaagtgcccacggacgtaccgcttgctcggaagccttcggacctgtattgggaacaatgtttttgggaacgcgtgcatctctgtgctgagccctgggactgtgataacggagcactatggacccaccaacatccgcatccgatgccatttaggtctgaaaactccaaatggctgtgagctggtggtggggggagagccccagtgctgggcagaagggcgctgccttctctttgatgactctttcctgcatgctgcgttccatgaaggttcagcagaggatggcccacgggtggttttcatggtggatttgtggcatccaaacgtcgcagcggccgaacggcaggctcttgatttcatctttgctccgggacgatgagagtatttcccatgctggagtcggcgagaagggccgaggcggggcctgggcagactgtggtccggtccagtccctaccggtgttgtttccatgctcagaaacctgcctcagcggaaagctcttatttgggattttatatcatgtcgggtccctctttcccttggttattgtaaatggaaacttttcggcttgtatttccttagattttttttttttccttccaatcatttgcttcagagactcctttctggcctaacagcgcattcctttgattggtccttgagtgaccagagacttagtgcccttgtaagtctgtcttctgttgctacttgtttttttcagtgctctgaaatagagtaactaaatggttatttgtctgaatataataatgtaaaacttaaaaaaaaaaaaaaaaaaaaaaaaaaaaaaaaaaaaaaaaaaaaaaa

SEQ ID NO: 30493 - DNA, 6160 bp, Homo Sapiens
ctcgcgaggagagcggagcaggcgcgcggcccaggcggaggagcgccgactctggagcagccggagctggaagaggaggaggaggagaggcggcggggaaggaggaggagggggagagtcgctcccgccgggcgagcatggggcgcctggcctcgaggccgctgctgctggcgctcctgtcgttggctctttgccgagggcgtgtggtgagagtccccacagcgaccctggttcgagtggtgggcactgagctggtcatcccctgcaacgtcagtgactatgatggccccagcgagcaaaactttgactggagcttctcatctttggggagcagctttgtggagcttgcaagcacctgggaggtggggttcccagcccagctgtaccaggagcggctgcagaggggcgagatcctgttaaggcggactgccaacgacgccgtggagctccacataaagaacgtccagccttcagaccaaggccactacaaatgttcaacccccagcacagatgccactgtccagggaaactatgaggacacagtgcaggttaaagtgctggccgactccctgcacgtgggccccagcgcgcggcccccgccgagcctgagcctgcgggagggggagcccttcgagctgcgctgcactgccgcctccgcctcgccgctgcacacgcacctggcgctgctgtgggaggtgcaccgcggcccggccaggcggagcgtcctcgccctgacccacgagggcaggttccacccgggcctggggtacgagcagcgctaccacagtggggacgtgcgcctcgacaccgtgggcagcgacgcctaccgcctctcagtgtcccgggctctgtctgccgaccagggctcctacaggtgtatcgtcagcgagtggatcgccgagcagggcaactggcaggaaatccaagaaaaggccgtggaagttgccaccgtggtgatccagccatcagttctgcgagcagctgtgcccaagaatgtgtctgtggctgaaggaaaggaactggacctgacctgtaacatcacaacagaccgagccgatgacgtccggcccgaggtgacgtggtccttcagcaggatgcctgacagcaccctacctggctcccgcgtgttggcgcggcttgaccgtgattccctggtgcacagctcgcctcatgttgctttgagtcatgtggatgcacgctcctaccatttactggttcgggatgttagcaaagaaaactctggctactattactgccacgtgtccctgtgggcacccggacacaacaggagctggcacaaagtggcagaggccgtgtcttccccagctggtgtgggtgtgacctggctagaaccagactaccaggtgtacctgaatgcttccaaggtccccgggtttgcggatgaccccacagagctggcatgccgggtggtggacacgaagagtggggaggcgaatgtccgattcacggtttcgtggtactacaggatgaaccggcgcagcgacaatgtggtgaccagcgagctgcttgcagtcatggacggggactggacgctaaaatatggagagaggagcaagcagcgggcccaggatggagactttattttttctaaggaacatacagacacgttcaatttccggatccaaaggactacagaggaagacagaggcaattattactgtgttgtgtctgcctggaccaaacagcggaacaacagctgggtgaaaagcaaggatgtcttctccaagcctgttaacatattttgggcattagaagattccgtgcttgtggtgaaggcgaggcagccaaagcctttctttgctgccggaaatacatttgagatgacttgcaaagtatcttccaagaatattaagtcgccacgctactctgttctcatcatggctgagaagcctgtcggcgacctctccagtcccaatgaaacgaagtacatcatctctctggaccaggattctgtggtgaagctggagaattggacagatgcatcacgggtggatggcgttgttttagaaaaagtgcaggaggatgagttccgctatcgaatgtaccagactcaggtctcagacgcagggctgtaccgctgcatggtgacagcctggtctcctgtcaggggcagcctttggcgagaagcagcaaccagtctctccaatcctattgagatagacttccaaacctcaggtcctatatttaatgcttctgtgcattcagacacaccatcagtaattcggggagatctgatcaaattgttctgtatcatcactgtcgagggagcagcactggatccagatgacatggcctttgatgtgtcctggtttgcggtgcactcttttggcctggacaaggctcctgtgctcctgtcttccctggatcggaagggcatcgtgaccacctcccggagggactggaagagcgacctcagcctggagcgcgtgagtgtgctggaattcttgctgcaagtgcatggctccgaggaccaggactttggcaactactactgttccgtgactccatgggtgaagtcaccaacaggttcctggcagaaggaggcagagatccactccaagcccgtttttataactgtgaagatggatgtgctgaacgccttcaagtatcccttgctgatcggcgtcggtctgtccacggtcatcgggctcctgtcctgtctcatcgggtactgcagctcccactggtgttgtaagaaggaggttcaggagacacggcgcgagcgccgcaggctcatgtcgatggagatggactaggctggcccgggaggggagtgacagagggacgttctaggagcaattggggcaagaagaggacagtgatattttaaaacaaagtgtgttacactaaaaaccagtcctctctaatctcaggtgggacttggcgctctctcttttctgcatgtcaagttctgagcgcggacatgtttaccagcacacggctcttcttcccacggcactttctgatgtaacaatcgagtgtgtgttttcccaactgcagctttttaatggttaaccttcatctaattttttttctcccactggtttatagatcctctgacttgtgtgtgtttatagcttttgtttcgcggggttgtggtgaggaaggggtgatggcatgcggagttctttatcttcagtgagaatgtgcctgcccgcctgagagccagcttccgcgttggaggcacgtgttcagagagctgctgagcgccaccctctacccggctgacagacaacacagacctgtgccgaaggctaatttgtggcttttacgaccctaccccaccccctgttttcaggggtttagactacatttgaaatccaaacttggagtatataacttcttattgagcccaactgctttttttttttttttttttgcttctctgccccttttccatttcttttgtatttgttttctgtgagagcactgaaatggcagccctggaatctacaatttggctctccactgagcaccttatcttgccaccttagccttaagaatgaatatgaagaaaaatacacagccacctctgtccagggcagtaagaagggctgcaaggaaggggaggatggggacaaggaaaggatcagatacctgctccagtagttgtgaggccactgtgtctcaggggactccaggaggagcagaagagggatcccacgaagttattcttacgcagctggggccaggagggtcagagtggtgccaggtgcaagttaggctaaagaagccaccactattcctctctcttgcccattgtggggggcaaaggcattggtcaccaagagtcttgcagggggacccacagatatgccatgtccttcacacgtgcttgggctccttaacctgaaggcaaattgctacttgcaagactgactgacttcaaggaatcagaaattacctagaagcaccatgttttttctatgaccttttcagtccttcaggtcattttaaggtccactgcagggggttagtgagaaagggtatactttgtggtatgttttgctttcctaatagggacatgaaggaaacccagcaatttgctgttatgtgaatggcctgtagagcagagtcaagagcggtgtgctttgcccgactgctcccatcaggaataggagagtagacagagatcttccacatcccaggcttctgctgctgctttaaaagctctgtccttggagcctcccgctccctgaagtgtctcgccccctgcacagcactggcctttcggaagcatcccagtagggttttctgaggctcgctggtgactcatgccctaattgcaatcctctgcttttatcttgactttgaaggatctaacactgctctctcttccaaaggggaaaaaaagattcatttgttttgagcaataaactaatacaaaatgatggccattcatgtgcagctctttgtcaccatgggccggatgagttgtgctcctcctggctcaccatttccccctgctcccccacagccggttctgcacttatcaccgagtcgcccctggaagcagattcccattgagttttccccaccaaggggaccatgcacatggtagaaacattagattctgcattgacagtagcctttccttggcccgggcctgtggtgggaagacgggcaacaagtataccccaccagggcctgagtgactagaggaagaggacgaggccttgttggcactagatttgggtattttctgcatgtcataacatatcctaactgctatttcagaagaggcagcttgtaggtgattgtacaagtgagaattaaagagagaacagatatttaaacaggtgctgtattagtaacagccagtgccctttcagcccttgcatctattaaaaggagattcaggattttattggcacaggcccttcttagtaggaagaaagggtgcttagctttggacctgaccgggtgtgtgtaaaaccatggactgagtcacagcagacactcgatggtggtaaatgtgatgggtgcttacacactgtaccttttcctttcatactgatgctgcagttcagggctggagttgttaaggcattgacctccacccacctgccccatgtccactgggctgcccaagctgcatgtcacctgagggctggcaggaaggggcgagaaatcccagggcattgtaccaaggacctagttccttctagggatataaatttccaggaatgtgtatttttaatgtggtgagatgcactcttttgttgtaccaaatagggctccccaccccacccctgcgacaagtgctcttctagaacaggttcctaccagcagcactggtgtgaatgaaagagagacccagccgcgtctcacacaggtggaattgcacttcttaacaaaaaggaactttataaaagtttgggattttttttcctaatcataaaaatagccccagaaagagcctaagctatgttcagatagaagcctcgaaattcctgtaaattgtttactttatgatgtttacatacacgtttcactttgaaaaaaaatgcaaatcgactttttaacaactgttgagatgtttcatgggacagtagaactctgactcaccaactgggctaaattttaatttaaaaatgtatttatttgagtgtctttccccccctcaccctcaccatctgaggggctccctgagatcttggtagaggaggcccctcctgcccagaccttcgtttgtttccccggtggcccttgcttcttgctttgcagactgcctgcagccatgattttgtcactgacatctgtgagccaaagactgagcctttttggcaggaataataagcaatactacacaacttgctactttcagaaaacttttttttagcttcaccgatgacaacagaggaagaagggaactgggatttgggtaagttctcctccactgtttgaccaaattctcagtgataaatatgtgtgcagatccctagaagagaaaacgctgactttctttttaagtgtggcacataaggatctgcagaattttccgtagacaaagaaaggatcttgtgtatttttgtccatatccaatgttatatgaactaattgtattgttttatactgtgaccacaaatattatgcaatgcaccatttgttttttatttcattaaaggaagtttaattt

SEQ ID NO: 30494 - DNA, 4427 bp, Homo Sapiens
gatttatcggctcgcgaggagagcggagcaggcgcgcggcccaggcggaggagcgccgactctggagcagccggagctggaagaggaggaggaggagaggcggcggggaaggaggaggagggggagagtcgctcccgccgggcgagcatggggcgcctggcctcgaggccgctgctgctggcgctcctgtcgttggctctttgccgagggcgtgtggtgagagtccccacagcgaccctggttcgagtggtgggcactgagctggtcatcccctgcaacgtcagtgactatgatggccccagcgagcaaaactttgactggagcttctcatctttggggagcagctttgtggagcttgcaagcacctgggaggtggggttcccagcccagctgtaccaggagcggctgcagaggggcgagatcctgttaaggcggactgccaacgacgccgtggagctccacataaagaacgtccagccttcagaccaaggccactacaaatgttcaacccccagcacagatgccactgtccagggaaactatgaggacacagtgcaggttaaagtgctggccgactccctgcacgtgggccccagcgcgcggcccccgccgagcctgagcctgcgggagggggagcccttcgagctgcgctgcaccgccgcctccgcctcgccgctgcacacgcacctggcgctgctgtgggaggtgcaccgcggcccggccaggcggagcgtcctcgccctgacccacgagggcaggttccacccgggcctggggtacgagcagcgctaccacagtggggacgtgcgcctcgacaccgtgggcagcgacgcctaccgcctctcagtgtcccgggctctgtctgccgaccagggctcctacaggtgtatcgtcagcgagtggatcgccgagcagggcaactggcaggaaatccaagaaaaggccgtggaagttgccaccgtggtgatccagccatcagttctgcgagcagctgtgcccaagaatgtgtctgtggctgaaggaaaggaactggacctgacctgtaacatcacaacagaccgagccgatgacgtccggcccgaggtgacgtggtccttcagcaggatgcctgacagcaccctacctggctcccgcgtgttggcgcggcttgaccgtgattccctggtgcacagctcgcctcatgttgctttgagtcatgtggatgcacgctcctaccatttactggttcgggatgttagcaaagaaaactctggctactattactgccacgtgtccctgtgggcacccggacacaacaggagctggcacaaagtggcagaggccgtgtcttccccagctggtgtgggtgtgacctggctagaaccagactaccaggtgtacctgaatgcttccaaggtccccgggtttgcggatgaccccacagagctggcatgccgggtggtggacacgaagagtggggaggcgaatgtccgattcacggtttcgtggtactacaggatgaaccggcgcagcgacaatgtggtgaccagcgagctgcttgcagtcatggacggggactggacgctaaaatatggagagaggagcaagcagcgggcccaggatggagactttattttttctaaggaacatacagacacgttcaatttccggatccaaaggactacagaggaagacagaggcaattattactgtgttgtgtctgcctggaccaaacagcggaacaacagctgggtgaaaagcaaggatgtcttctccaagcctgttaacatattttgggcattagaagattccgtgcttgtggtgaaggcgaggcagccaaagcctttctttgctgccggaaatacatttgagatgacttgcaaagtatcttccaagaatattaagtcgccacgctactctgttctcatcatggctgagaagcctgtcggcgacctctccagtcccaatgaaacgaagtacatcatctctctggaccaggattctgtggtgaagctggagaattggacagatgcatcacgggtggatggcgttgttttagaaaaagtgcaggaggatgagttccgctatcgaatgtaccagactcaggtctcagacgcagggctgtaccgctgcatggtgacagcctggtctcctgtcaggggcagcctttggcgagaagcagcaaccagtctctccaatcctattgagatagacttccaaacctcaggtcctatatttaatgcttctgtgcattcagacacaccatcagtaattcggggagatctgatcaaattgttctgtatcatcactgtcgagggagcagcactggatccagatgacatggcctttgatgtgtcctggtttgcggtgcactcttttggcctggacaaggctcctgtgctcctgtcttccctggatcggaagggcatcgtgaccacctcccggagggactggaagagcgacctcagcctggagcgcgtgagtgtgctggaattcttgctgcaagtgcatggctccgaggaccaggactttggcaactactactgttccgtgactccatgggtgaagtcaccaacaggttcctggcagaaggaggcagagatccactccaagcccgtttttataactgtgaagatggatgtgctgaacgccttcaagtatcccttgctgatcggcgtcggtctgtccacggtcatcgggctcctgtcctgtctcatcgggtactgcagctcccactggtgttgtaagaaggaggttcaggagacacggcgcgagcgccgcaggctcatgtcgatggagatggactaggctggcccgggaggggagtgacagagggacgttctaggagcaattggggcaagaagaggacagtgatattttaaaacaaagtgtgttacactaaaaaccagtcctctctaatctcaggtgggacttggcgctctctcttttctgcatgtcaagttctgagcgcggacatgtttaccagcacacggctcttcttcccacggcactttctgatgtaacaatcgagtgtgtgttttcccaactgcagctttttaatggttaaccttcatctaattttttttctcccactggtttatagatcctctgacttgtgtgtgtttatagcttttgtttcgcggggttgtggtgaggaaggggtgatggcatgcggagttctttatcttcagtgagaatgtgcctgcccgcctgagagccagcttccgcgttggaggcacgtgttcagagagctgctgagcgccaccctctacccggctgacagacaacacagacctgtgccgaaggctaatttgtggcttttacgaccctaccccaccccctgttttcaggggtttagactacatttgaaatccaaacttggagtatataacttcttattgagcccaactgctttttttttttttttttttgcttctctgccccttttccatttcttttgtatttgttttctgtgagagcactgaaatggcagccctggaatctacaatttggctctccactgagcaccttatcttgccaccttagccttaagaatgaatatgaagaaaaatacacagccacctctgtccagggcagtaagaagggctgcaaggaaggggaggatggggacaaggaaaggatcagatacctgctccagtagttgtgaggccactgtgtctcaggggactccaggaggagcagaagagggatcccacgaagttattcttacgcagctggggccaggagggtcagagtggtgccaggtgcaagttaggctaaagaagccaccactattcctctctcttgcccattgtggggggcaaaggcattggtcaccaagagtcttgcagggggacccacagatatgccatgtccttcacacgtgcttgggctccttaacctgaaggcaaattgctacttgcaagactgactgacttcaaggaatcagaaattacctagaagcaccatgttttttctatgaccttttcagtccttcaggtcattttaaggtccactgcagggggttagtgagaaagggtatactttgtggtatgttttgctttcctaatagggacatgaaggaaacccagcaatttgctgttatgtgaatggcctgtagagcagagtcaagagcggtgtgctttgcccgactgctcccatcaggaataggagagtagacagagatcttccacatcccaggcttctgctgctgctttaaaagctctgtccttggagcctcccgctccctgaagtgtctcgccccctgcacagcactggcctttcggaagcatcccagtagggttttctgaggctcgctggtgactcatgccctaattgcaatcctctgcttttatcttgactttgaaggatctaacactgctctctcttccaaaggggaaaaaaagattcatttgttttgagcaataaactaatacaaaatgatggcc

SEQ ID NO: 30495 - DNA, 3137 bp, Homo Sapiens
gagcaagccgagtggagggaggcaaaggccaggctgaggatcagggtggcccgggtggcagcggggaggcgctgcatgctggaggctgtgctgagtgcccggtgcaggtgagccggtcctgcggagttgtgccgagtgcctgctgcagtctcatttccagttcctccatgacgtggcaagtgaagacaggaatgaaaggaatgtaaagcagcttttctctgaagagaagaagagagagagacacagccaagaccgaggctgggccaagatggcgtctgtgtttcgaagcgaggagatgtgtttgtcacaactgtttctccaggtggaagctgcatattgctgtgtggctgagctcggagagctcggattggttcagttcaaagatttaaatatgaatgtgaacagctttcaaaggaaatttgtgaatgaagtcagaaggtgtgaatcactggagagaatcctccgttttctggaagacgagatgcaaaatgagattgtagttcagttgctcgagaaaagcccactgaccccgctcccacgggaaatgattaccctggagactgttctagaaaaactggaaggagagttacaggaagccaaccagaaccagcaggccttgaaacaaagcttcctagaactgacagaactgaaatacctcctgaagaaaacccaagacttctttgagacggaaaccaatttagctgatgatttctttactgaggacacttctggcctcctggagttgaaagcagtgcctgcatatatgaccggaaagttggggttcatagccggtgtgatcaacagggagaggatggcttcctttgagcggttactgtggcgaatctgccgaggaaacgtgtacttgaagttcagtgagatggacgcccctctggaggatcctgtgacgaaagaagaaattcagaagaacatattcatcatattttaccaaggagagcagctcaggcagaaaatcaagaagatctgtgatgggtttcgagccactgtctacccttgcccagagcctgcggtggagcgcagagagatgttggagagcgtcaatgtgaggctggaagatttaatcaccgtcataacacaaacagagtctcaccgccagcgcctgctgcaggaagccgctgccaactggcactcctggctcatcaaggtgcagaagatgaaagctgtctaccacatcctgaacatgtgcaacatcgacgtcacccagcagtgtgtcatcgccgagatctggttcccggtggcagatgccacacgtatcaagagggcactggagcaaggcatggaactaagtggctcctccatggcccccatcatgaccacagtgcaatctaaaacagcccctcccacatttaacaggaccaataaattcacagctggcttccagaatattgttgatgcctatggtgtcggcagctaccgggagataaacccagccccctacaccatcatcactttccccttcctgttcgctgtgatgtttggagactgtggtcatggaaccgtgatgctcctggctgcactttggatgattctgaatgagagacgcttgctctcccagaagacagacaatgagatttggaacaccttcttccacgggcgctatctgatcctacttatgggcatcttctccatctacacgggtttgatctacaatgactgcttctccaagtccttgaacatctttggctcttcttggagtgtccaacccatgttcagaaacggcacatggaatactcatgtaatggaggaaagtctatatctgcagctggacccagccataccaggagtgtattttggaaatccatacccgtttgggattgatccgatttggaacttggcttcaaacaaactcacatttctgaactcgtataaaatgaagatgtcggtgatcctgggaattgtccagatggtttttggtgtcatcctcagccttttcaatcacatatacttcagaagaactctcaacatcattctgcaatttatccctgagatgatttttatcctgtgtctgtttggatacctggttttcatgatcattttcaaatggtgctgctttgacgtccacgtatctcagcacgcccccagcatcctcatccacttcatcaacatgtttctgtttaactacagtgactcttccaacgcacccctctacaaacatcagcaagaagtccaaagtttctttgtggttatggctttgatttctgtgccgtggatgcttctgattaagccgtttattcttagagccagtcatcggaaatcccagctgcaggcatccaggatccaagaagatgccactgagaacattgaaggtgatagctccagcccttctagccgttctggccagaggacttctgcagatacccacggggctctggacgaccatggagaagagttcaactttggagacgtctttgtccaccaagccatccacaccatcgagtactgcctgggctgcatttcaaacacagcctcctacctgcggctctgggccctcagcctggctcatgcacaactgtctgaagtgctctggactatggtgatgaacagcggccttcagacgcgaggctggggaggaatcgtcggggtttttattatttttgccgtatttgctgtcctgacagtagccatccttctgatcatggagggcctctctgctttcctgcacgccctgcgactgcactgggttgagttccagaacaagttctatgtcggggatggttacaagttttctccattctcctttaaacacatcctggatggcacagccgaggagtaggctgagggctgcacctcccacggtggtcaccatgccaatgaaggaagttcagtcttgtctttgatatcagcccctgcaaggcgctcaatgggaaggttgttcttggctcacctgaagcatgaaactgtgtattatttggacgtcagcctgtggatttgatacgacttaaccacgtcagaggaaggactttggcaagtgatattgtcttcatgtggggtattaattctcaaataataaagtaattgacaaatgaggggagaatgctaaacagatgtcttcttgcaatattttaaatattgtatttgagaaaataaacatctgagtcattcaaaaaaaaaaaaaaaaa

SEQ ID NO: 30496 - DNA, 3693 bp, Homo Sapiens
cgcgccccgggctcggccgacccggcggggatctaggggtgggcgacttcgcgggaccgtggcgcatgtttcctgggagttactgatcatcttctttgaagaaacatgaagttacactatgttgctgtgcttactctagccatcctgatgttcctgacatggcttccagaatcactgagctgtaacaaagcactctgtgctagtgatgtgagcaaatgcctcattcaggagctctgccagtgccggccgggagaaggcaattgctcctgctgtaaggagtgcatgctgtgtcttggggccctttgggacgagtgctgtgactgtgttggtatgtgtaatcctcgaaattatagtgacacacctccaacttcaaagagcacagtggaggagctgcatgaaccgatcccttctctcttccgggcactcacagaaggagatactcagttgaattggaacatcgtttctttccctgttgcagaagaactttcacatcatgagaatctggtttcatttttagaaactgtgaaccagccacaccaccagaatgtgtctgtccccagcaataatgttcacgcgccttattccagtgacaaagaacacatgtgtactgtggtttattttgatgactgcatgtccatacatcagtgtaaaatatcctgtgagtccatgggagcatccaaatatcgctggtttcataatgcctgctgcgagtgcattggtccagaatgtattgactatggtagtaaaactgtcaaatgtatgaactgcatgttttaaagaagacaaatgcaaaccaaagcaacttagtaaaataataggtataaaaagttattctgtaagtctgttggttgtatcttgtatcagaatcccagtaagttaagttgtaaagactttggaataagtttcttttaaaaatatgacatagccagtgatgtgtttaattatataactgttcttactgattttattgccccctagcaataagccctttcctttgaatacatgtacaactttggtcatatgagaagcaggtgcgcagagaattccttgaaagatctgaggtttttaacataaagtctgatgtggttttcctctagcattccaaaaggtttttgctttgaaagtgttagcagaagcatgttgatgtgaattatgatttcttcatgtgctactgttagcacactgagtttttatagttgcacatcattcctcattgtgccttgttttatccattttataaatagagtagatatttgatataccactctgataactcatataaaaatatcatcataaaaagcttaatttcatcccttttatgttggttttaaaaggtaaatgcttaccatattttataattgagaactcttacatagtagaatccattctataatacatgtgttgacaaagctttagagaaagtttcctattctcttccatttcccctgcccaaagtgctgacataggcagtgatgaagaatctttaccaagattttcagggtgtacctatgaaattgctttaaatgcactgctggtgtaaataattagcaagcaaaagcgtttctgtgacttcaggtaccagcttaaagagcactagggatggggaacgaatgccaaatcagactccacctagagcaccaggaaacagcttgtaccctggtagggaaatggtgtcgctgaaaggggaggctgagccagtgcgagactgaacttgtgcagccttagccaagacaaagcagtgtttttcagcagacggctgatgggacaggaattgaagaagagaattgactcgtatgaacaggacagggtgaaaatgctgggaattataatgggaaacaaaactatctatgttcatattttgtaatatttcatttgttaagtttatatctggatataatgttctttttaaacaagtataatcatatcgtcggaggttaagattatgaaattttaaaatctctattcaagatgatgttcactccaaatacactacagaatttagtcaacattttatataatgtttcaataaatgtttctttcaataaagatactatgtgcccttcatagtaataaaatctcaatcttaaagcatgaatctaaaacataaatatttatattacagactcaattttacaaaattactaattgctctagtgcatatttgaactacaagcaactttttaggaatacctctttatacgtctacatattttagtatataaaaatagataatgctcttggacacattttgtattattcatgatctgaatagtagttagttaaaagatcatttgtaatattatgatcaactgttataaattaaggtcttaataccttttctgctctttcaaataactctaatgaatattcaagatattttagccttttaaaaagttgagatttagctcatggatatattttttggtagggaaacattagggtctccttttcttccttttacctagaatgcctcatttaaaagtgccttgaaaacatttagctccccttcttcatgagcatctgtagagctgaaagtattctggaactttagacagaaagctgaaaggaatctgcagtctcctgctgcagttcaactctgctgtttttcagtcatttcctactgtgagtggagtgatgtttgtgtgtgtgttggcaacatgcctaatgttttcttaatgatgacaacaaatattttaaaactgcatttatcattttttaggtcttcattaaattttaaaatgtaatatctgtttcccaccccctacattaggaggataatttcttaaaccacattgttttaattgatttttcttatcttgatttctttcattagaaactatccctaaatgtaaagatcttttgccttcaaatttggcttattttttctgatttatgagggtttgaaagaaagaattcacctaaaagattccatttccagttttataatgtatttcaggttctgaataacaatatttttccaaattgaaagtaaatattcaagaagttgatagcctggttaaaagttagatcctctattaccattctaagcacattcacttctatattgaagttttggtaaaaattcttttttcttttttaataaaaaattaggttattactttttttataaccagatttttaaagcactaggttttaaatcagtgggtatcataaaagccatatataaaagatcctttcttatagtaagacttgtgcttgttagcaggtttttctgttagtttttcccccataacatttaattattactaaaattgtatttacaatagtggtgccaaatcaaatggtaatttaaataaaatctattctgtgtttatgtagggtggtataaaaaagaggtcttcatttagacatgtgatttctaaaattccagaaagcaaaattgataagatgttagaaatttggaccgttatttataatcagggtagcattaaaatggagaaaagaaagttttctgaaaaaatgcagtaaatataagccacatttctaaagtttatttttatgaaagcttcttttaagattttgaaatctattctgcattcccaagagtttatgtttattgtattttatatgatctacaacatataaaattgtgtatttttctttggttgtccctattaacaaaaaagtattttaataaaaaattgaaatgaaaaaaaaaaaaaaaaaaaaaaa

SEQ ID NO: 30497 - DNA, 8702 bp, Homo Sapiens
aggtgacgcggccggcgtcccaagatggcggcggcggcggctcccggaaggccgcggcggcgtcccggctgctaaggcgggccccacgcggctggcagcggacaggccggacctacggccggaggacgggcggcagccgcctctgcgcggaccggggctgggccgtgcggcggcagcggcgccaggggatgctcttgctgggcctggcctctcccttctcaacttagggcggcggcgggcccgcgcccctggctcccgggccatggcgctgagggagctcaaagtgtgtctgctcggggatacaggtgtaggtaaatcgagtattgtgtggcggtttgtggaagacagttttgatccaaacatcaacccaacaataggggcatcttttatgaccaagactgtccagtaccaaaatgagctacataaattcctaatctgggatacagctggacaagaacgatttcgtgccttagcaccaatgtactatcgagggtcggctgcagctataatcgtttatgatatcacaaaagaagagacattttcaacattaaagaattgggtgaaagagcttcgacagcatggcccacctaatattgtagttgccattgcaggaaataaatgtgatcttatcgatgtaagagaagtcatggagagagatgcaaaggactacgccgactctattcatgcaatttttgtagagaccagcgcaaaaaacgcgataaacataaatgaactctttatagaaattagtcgaagaattccatccactgacgccaacctgccatctggcggtaagggcttcaaactccgaagacagccttcagagccaaagcggagctgctgctgaccgaacctcagcctctcagacttgatgatgaagtaggtggtcctgaaagttaacaggagggctggggtccctgccaccagttttcacctagccagtcttgagtcttctccgtgcaaaaaggattcacagaaatggaccagttctgttctccaaagactgcagcaatgatatttcagtctgtgaacttctattatgtaaagaatctctagtgtacaaagggactacatcgttggcttttgaccttgctgaaaaggaacatataattgtatggatggtaggattaagttgttgagtagttttgtaatcaagattttatgtaacatttgtaaagggaaaattagcacttttgtggttcttaagggaaaagaaacagaccttgtggagattataatttccttggtttctgttaccactgttagagggagttgtatcatttaacatatagtaggatagtttaagtgtagggaggacaattattgtctgaagctaaaatgggttatttataggactgatggaaatgatttcatctctgccatctctaaagcacttttcattgaacatgttagcctaggatacgtacagtaaattaacaatgatagcagcagatgcctagctcatcctgggtttgcttctgaccttgtcatgtgtgtgccaccaaacacgttattggcacctttttaaataagctctcatgatcaagatggtgatggtagagaagctgcccggaataaactgaatttcatatgttctaaaatgactagcaatggtttaaaaaggaagaagagtggaagtgaagaaggtggtataaatgctgtcaatttttttttaacccaagtattttggtggggaaaagcaagtatctattgcttagcatatgtaaagttgtagtctatatttatggggccattgcttaaagattataaattatgtaaatacattaataaattctaagtttcatttgacattccattgaatctcgcacccagtcttgcgtatgcctgcccagttttcagcctcttaacgggagactcaagcacattggtattgtataaaggtatagagcacttagcttacaatctttaaaggtttctctgccttcccttctacccacccgcctcccaccagatcccatctggaaatcataataaagacatatgccactttgacaaacctgactagtccttactagcctgagggtaaaagattaagctccaacctcaagtcatttacctggtcttggtaataagtttcttttagcttgtacagcatcctcagaccaactgaggagctttccttgttaacaatttagcttatctttctgtttcctttatttttcccctgcctctgttagtggttaacactcttttccctcagggagcctaatgaggtttttaatatcatctaaaaataaagcattgaagtgaagttggtgaaaatttgttcctggtctaatttggcacccttccaacctgagtattgtaggggaaggaaatttacaagatttaataggaaatgaaacagcttgaatttcaaactaaattgtattttcagagctatcctgaaactgaacagctgaaactttaaaaaataattggtattattttgtgccccccacttaatatggatagattttaatgggaaaattataattcagattaaataaaaaacaattcccttttccctgttgtatatcttaagcatttggaattttttttatcttctgaaatcatataaaaagaatgtcattagtaaaaattctaacttcgttttgtttaaaagacatgtggatgctccatgcccctaggattttgcttcctccccggtgctaaattagcaagctcctagagaagccatgtgattcccagagccaggcgctttacacctaaagtagtttgactttcttctgtatacatccagatggatcccaggcatccgggcaccaccctggtgtgtccctagaattcccactgctgggcctctatctccatgacaacaaaataaaaacagaggttgcttgactcattaccaaagaggcaaagcatgtgcgaccctttctgtcttattttaccaaaagatggtgcaaatctatgaccttcacattttttccaccacacccaccagtagctgttggtgattgcatggtgtctcggtgcatggggaaaggcaaggtcttctgagctcatcttaactggtgaggcatctggatgtgtctgatcttactgtgatgttttactgtaccgagcccaatgtgggtccatctcatcagccctttgctgatttcatgatttctcaccctccctcccatatgtagggtgtgattctgttttattatagccacatgttttattaacagaatgagtgatatgaagcttgtacttatgcatttctcgggcctcttccctcattttcatcagtctgtctaagaacttgactcggcactgtttctcgtgtaatatccttctaatgcttagcaacaacaacaaaaaattgctctctcagatccataatccatactcagtgaaagcagggaaaaaatattttcacttattttatttgcttctaaaatgcaaagatgaatactaaagtcagaagcagtgtttcattttgaacacattttggattattaagctgactaagcaatgatctaatacacatttcatattttctttataataatttcttatggagaagaggctatatttcaaaggaattgagacatactcccatctataaacatgtttggttttcttacgatacagggccatttttttaaaactctcaggactgaacagaagagaaaaattattaattagctgctactgtatgttgattcttttcggagaaattgaaataagctctttgcaggcgtccaatcctagaaaccaatggtctccagaactctcacacaagtgtttttctgattctatgataactaattaaccatcatctggtgattaaaagaacataaagtaagattatgattaagtgtccatcacctgcctgtcagccgtggtcagaataagttttacacgaagcaggtgaaagatttagttcttttcaaagtaacttattttcttgtgacccgtttatgatgttgtttgaagtccctgtttcccattgtgtacgcactttctggatgtctggaaggatcgggacttttgtgtgagaggcttgagcgcctcctctatgtgggctggtgtccttcttgaagttgtcaattcctcttattcttaaatatctaaagggaaaggaaaccaactttaatttcagaacttctctttacgtcttgtatgtatttcttttctgttctcaaggaggaaaattggtctaggaagccttctaaattaaactctgggaaatatagtaatgaaaatatcctttagctaactttcctgtaactgtcaaaccaaaatgtcagtatttttagggcattgtgttaaaataagcagtttagattccgacgacactgcactaattggcatgtcagcctccagctcagaaaggcatttgctcatggttacaggcatcttttagattctaagagtgagttacagaattctttttggtactttcacttattctttcagaatacatcaaggatgtgatttatgggcccttaagagtataagatataggtgcacagtatgttacttaagtaacggatgagcccccctaaacatccacgtgtctctgcaggaacctgtgtaagtattgtgaaaacccttttcttccagggaaaaattattggaaattccttaactgagctatacttggtacttgctctagaacatttgggaaatgacaaactcaggctggctctcctctctaacctcactgggctataaatgttccttctaactctgtaatgaaagttcagtgacaaactagatagtgaacctgtgaaagtcattatttacatttgctttaaagggacagttttaccgttcaacttcaagagtttttctacctctttaacagttaatattttttaaaggaagaaatggaatgtaccttcaggggtcaagctgttaactgtatacctgcctctagttagcttggtttatcaaaaggatttttaaatgattcaaggtaatgtttaggatatttgttttaactcctgctgtgctgtgatttaaaaaaaaatagtctaagaaacaaatttatccatgagataaacatcatattttatagttttagaaaaaagggttgggggtggaatttagcctagaacttaaagaaacaacctctgcgaatttctcttgacagcggagttgcttgtcttgacttctaataatataaatccaggcagtttgattatccgatttgcaagaaactttaatggaattctggggcatttgtcctgttttatgtgcaaatgaaagtctaaaaaatatgaggaagatattacatttttcaggagcctccattttttcagtctaagagaatgataagtgagaggcctattgtgatgaagttgcattggacataatgtgggaagtgaataaatagaaccaagaatcttcatctatctctgttggtctttcaggattctcttagcatataggaaaatgatttaccttccagatctcgaaggacttccaatagcatagatcaggtttaatttgatggtctataccatcagaaataactaatatctgttttctttccttttagagtataatcaattatggataggccagaatatttttggcttcaaaacaaaaggattcataagcttaaaaaaacaaaaatcccaaaccttccatctatcccttttattacgttgaacattttagatagtaagattaagatgtatcattagtatatggtgaaattaaaaccgtggtgtctaacagatttaacaaaaagtgtttaatttactgcaagttcatttttagatctgtatggtgcccagtactccacaaaatgcatcataattgaaacaacaaaattattttcatgagcaagaattcaagtatcaaggcctatcagccaattaaaagccgtaagatagtaatgattttttttctttttttttttttttctttttttagatggagtctcactctgtcgcccaggctggtatgcagtggcgcgatctcagctcactgcaacctgtctcctgggttcaagcagttctcctgcctcagcctcctgagtagctgggatgacaggcgtgcaccaccatacccagctaatttttgtatttttagtagagatggggtttcaccatgtttgccaggctggtctcgaactcctgacctcaggtgatctgcttgcctcggcttcgcaacattctgggattacagacgtgagccaccgcgcccaaccagtaacgatttttttaaagggcctttcttaattgacagttttaagctgtagacattaatattataacaaacaaaacatgccagttttactgattccgctttttgcttgattcaggaacttttcattgtttggggaagcttttgaatgcagtactgtggaggaaatcatccttaaaatagcatttcacacatagggccaaaattgaaattgtcaaggaaacccctcagcatctaacgtcatcttgtagaagagctgggcatacctcttcctctaggccaattcagaggccactggccacccaagtagagtggggcccactggcatgagtagtccctgtgcccatgcccatggtggtgcttgactttgctttggggcttaatcctagtatcatttggccattaatttttaattaagtttatacttgaataatcagttttactcctgaaaaattttgaagccagcactgactttgtttatattcacttaccttgtatatgaacttatgacattagagtttgtgaaactgtcttaacgtggctcatacacgtgatgtcagagggactggtcagttctttacagggtgaattaatcggcagctggctagtcagagcaactgatgggtggcttttttttctttttttttttgagacggagtctcgctctgtcacccaggctggagtgtaagggcgcgatctcggctcactgcaacctccgcctcccaggttcaagcaattctcctgcctcagccacctgaatagctaggattacaggcgcccgcccccacacccggctaatattttttgtatttttagtagagacagggtttcaccgtgttgatcaggctggtctcgaactcctgacctcacgatccgcccgcctcggcctcccaaagtgctgggattacaggcgtgagtggtggccctatttttaaaccattcgttacgctgtgtagacagagctttattgccctggaaaagattttttttttaactctcatgcagttcagtctttccatcatttcactttgtgagtcactcacataattgtcaatcattcctctgaccttcttaagaatttacaccttaccgtctctgtgattgaagcagacttctcgctttatttcccttaggctcatttttctgtgggctctcccttaaagacacatggccacagacacctccttcgcatatgtaatctgccttcccctgcggccttccgtggtcacagcaacagggactgctcaccccctccagctggggcttttctaacaagcacagtcagaaatgcgcaggcctggggttggggatgaacagaagttgattagtgggcacagaaatacagttagatagaaggaatagttccagcattcgatattacagtagggagactgcatttaacaataattgattgtatatttgaaaacagctagaagaataagaatattcccaacacaaagaaaagataagcgaggtgaaggaaatcccagttaccctcattcagtccattacacattcgatacaggtatcaaaatatcataggcacctcaaagacatgtacaactcttaatttaacatttttgaaagaaaaaaaaaccggccagagcattaaaacaaataaaataagaaacacagaggccagtgttaggtgaagaactccgctgcttcagaaagagaatagcagcgctcgcttaccgtgggaacacggccagttaacaaaatgggttttggttttttgttttgttttgttttaccattggtaataagatagttaacataagtggtcagaacttcgctgaatttgtaataaagcatttgttaagcgtgtaaaagtccaaattaaaagtcttgaagaaaaacagctatggcaatgagcctagacatttttcaaaaaaaaaagctaagccgtcctaccagcaatctctctttctcctaagaatgtcatgccttctcaagacctgatgaaaggaataagatatttgtgcctttttataaaagcatctattacgaaagtaaaattcagttgcttacagttttggccgctttgtagcactattataaacagcccaaatttatggccttggacttactgcatgacacatggcctggttacctgtcatggaatgctgcagtggtggtttgccaagcttctgtggatgtttgaagactttatttttgcagtcttaaccttgggctggacctaagtgtatgtaaaccatatgatgcctgtattgtttatagatgctgacaaaagaaaactagaccttttgttttttgttgtaagatttttgttttcatgcctatgctcatagtagatagtttgcaaatgaaagttgatttgccatacttttaaataatattgttttagcttgaatattctataatacacttttatagagtataacatgctaaatcactgttttgttgtaagaagggtgtaaacattttgttaataaaatgctatgtttacaaatataaaaaaaaaaaaaaaaaaaaaaaaaaaaaaaaaaaaaaaaaaaaaaaaaaaa

SEQ ID NO: 30498 - DNA, 4830 bp, Homo Sapiens
gggagtccggcgagtcgctgggggaagtcgagcagacacccagcgctgccggaactcggggcgcgcatcccgcaagtcggaacccggcggatcggatcccgcagatcggagacggggcctggagggtggcagcacgcaaagggtgtccctgtccctcaaggggtcatggcctccatgttgctcgcccagcgcctggcctgcagcttccagcacagctaccgcctgctggtgcctggatccagacacattagtcaagctgcagccaaagtcgacgttgaatttgattatgatgggcctctgatgaagacggaagtcccagggcctagatctcaggagttaatgaaacagctgaatataattcagaatgcagaggctgtgcattttttctgcaattacgaagagagccgaggcaattacctggttgatgtggacggcaaccgaatgctggatctttattcccagatctcctctgtccccataggttacagccaccccgccctgctgaaactcatccaacagcctcaaaatgcgagcatgtttgtcaacagacccgccctcggaatcctgcctccggagaactttgtggagaagctccggcagtccttgctctcggtggctcccaaagggatgtcccagctcatcaccatggcctgcggctcctgctccaatgaaaacgccttaaagaccatcttcatgtggtaccggagcaaggaaagagggcagaggggcttctcccaggaggagctggagacgtgcatgattaaccaggcccctggctgccccgactacagcatcctctccttcatgggcgcgttccatgggaggaccatgggttgcttagcgaccacgcactctaaagccattcacaagatcgacatcccttcctttgactggcccatcgcaccgttcccacggctgaaataccctctggaagagtttgtgaaagagaaccaacaggaggaggcccgctgtctggaagaggtggaggatctgattgtgaaatatcggaaaaagaagaagacggtggccgggatcatcgtggagcccatccagtccgagggtggagacaaccacgcatccgatgacttctttcggaagctgagagacatcgccaggaagcatggctgcgccttcttggtggacgaggtccagaccggaggaggctgcacgggcaagttctgggcccatgagcactggggcctggatgacccagcagacgtgatgaccttcagcaagaagatgatgactgggggcttcttccacaaggaggagttcaggcctaatgctccctaccggatcttcaacacctggctgggggacccgtccaagaacctgttgctggctgaggtcatcaacatcatcaagcgggaggacctgctaaataatgcagcccatgccgggaaggccctgctcacaggactgctggacctccaggcccggtacccccagttcatcagcagggtgagaggacgaggcaccttttgctccttcgatactcccgatgattccatacggaataagctcattttaattgccagaaacaaaggtgtggtgttgggtggctgtggtgacaaatccattcgtttccgtcccacgctggtcttcagggatcaccacgctcacctgttcctcaatattttcagtgacatcttagcagacttcaagtaaagaagccatttccactacagtgagaaagcccggatcccaacagttgtcaaattgattagtttgcctaattcatgttttcacttaaaagtatcagaggtgaatgcacagtgaagggtgatttgtggggagggagcatttttggtggtcttgggggaggggaggggagggaagggctggtgttgattttcctccctgcagagccaatggtgcacattggtttaagcccagagatcctgcttgagccctggactcatcttgggaagggccatgggaggtcctggctagagttctgcccaaccttgaccaaccccagcaatttttccaaaagccagtcaagggcattacatttgttcctgggactggcagctgggcctcctgggtgccagtccatctcaagtgccatattctgtgatcacggatgttggctccccctcgccctatgcaagcaaacacactctcacctcctctcccagcctcccggagctctgagcacgccccacgcatggtgcaggagggactggacagatctgaggaaggccgtaaaatggggacaggaggattcagctcaggagtaagggaagaggtcctctggccccctgaagatgagaatcacccctctcagtgcacctggggatccccctaaactgtgaattctgccctggacagggctttgcccttggaggatccccaggtggccttacccgtgattcttactcggcatcctccattccccaaactccctcctccctgttaaatgtcaacctagacctggacctgggtgggaggaaactgtagcctgagtgtccacagggacacacgtgagccacagggctagaagcacaggcccgtcaccccaggaggaaaagcccagggtctggggcagcagagccatcgcatcatgtttcccagggcaacttgaggtctgacttttggctccctcgccctaagaggctcttcctctcttttgctcatccaccttcacaccacttgtgagctgacccccaggaacagcttggctgttccaccagagcagagggaatcattgctggactggatttcttctggagggaagcaccatgaattaaaggtgccagagctccatgcatggaaaagtggcctgttggttcaacgtggtttccttgtacttgatcctcctgaaatgagagattttcctgagatgactgagtatggagattaccaggcagatgataccgaaatgcttaaaggggctgtggctgaggctgtagcatctctgctggaggtgagacactctgggaactgatttgacctcgaatgctcctaaaagagaacttgatagcctgacagcagagaagtattatttggtggggagtctgagaaagcctggcttgtattatctgtccaaaaggaagcctcttcatctcccggtgccttggttgactattttggaaataggcatatcaaggttcctgattcagcactttgctcttttaataacaaatcgtccaaagatctcaaagtaagggtttttttttttagcttccactcttccgcagacttggtcatcgacctatttttgttgaagaatgaaaggcaatgacaagtttaacatatacaaattcgtgaattcttgttcattttgcattcctgcagtcagtgctaatccgtcgttcttaatcaggagttctgccaggtttaaggtcacctgcactcccagccaagtggtgatgtatgcctcccactctctgcaaggttttcctcatttttatattcatttattcatcattcattcattcacctaactttcattaaatagctgcaccatcccaggccctgtgcggagcatcgggaatacaaagatgagataaaacattgtccctgcccccgggggctcacatgccactggaaacaacagactcttaaactaacaattcaagcaggcgccaagtgctacgacagaggtgtgaataaaagcatcaggaaatcggatggagaaccaccattcacccaagggtcagaggaggtttcaaagaaaaggtgtcattggagcagtgttttgcagaatgagccagagttcaccaagcaggcaaggcaaggaagggtgttgcagagagggaacagcatatgcaaaggcatatcagttcatggcatcacatctttcactggggaagccagtttccacaggcagcatcccaaggttcaataaggccttatttaacaagcaagcaaaatgcaaaccaaaccattattcatttattggcttaagtatgctttctcctgaaaactttagcattgggtgcaaatattcagtatggttctcggagtccaaagggttttaagccagggcacaaccagaaaagtggctctctttggtagggagaggggctccaatatttcgttctctccccatggggcactgacagagaaatgaaatagttttatctggaaaattccagagctattatttactccttaccaagggaagttacttcttgtaaaaacttttaagccatttatcaacaagttcttgttgactcagggcataatgagttcctgagacatgctcttttgggggctggggctttaggtagaagaatttcaaggaaaagaattctcagcagagctcaagattgtagaaactcagcagaagctggtaaaaacatggggagcccggaggacaggctgctgtccagggcagaggccatgaagaagtgcttccgtggccgacagtctggaaatgaatccatcatacattagtgccatagagtttagtaaccgtccagcaagtgtcatcacttttacagaaaacaaggtccagtaatagcaagtcttagtacatcctcacttttattataaatgggtgttttttcataatttttactgacgctcagtaaccatgcaaaattgtgtatagcattaatgtatctacatacctacacctatctatatataagctcatggtagaaaaccatagctaagtagcatcgcagacttaagcgtacaaagtgatcttgttcacaagtaatctgttgacagtgccaataaatgataaaaaaaaaattaacatgtcacaatgtaacggatgaccatatgcacaattccatgaattaaatctgtttcctgtgttagtcagtattcttaaataaaatttataattgaaacatgaaaaaaaaaaaaaaaaaa

SEQ ID NO: 30499 - DNA, 8319 bp, Homo Sapiens
agtggcgctgctgggacgggggaaaggagacgcttcttcctcttgctgctcttctcgttcccgagatcagcggcggcggtgaccgcgagtgggtcggcaccgtctccggctccgggtgcgaacaatgctgactgatagcggaggcggcggcacctcctttgaggaggacctggactctgtggctccgcgatccgccccagctggggcctcggagccgcctccgccgggaggggtcggtctggggatccgcaccgtgaggctctttggggaggccgggccagcgtcgggagtcggcagcagcggcggcggcggcagcggcagcggtacgggcggaggggacgcggcgctggatttcaagttggcggctgccgtgctgaggaccgggggtggaggtggtgcctctggcagtgacgaggacgaagtgtccgaggttgaatcatttattttggaccaagaagatctggataacccagtgcttaaaacaacatcagagatattcttatcaagtactgcagaaggagcagacttacgcactgtggatccagagacacaggcacgactagaagcattgctagaagcagcaggaattggcaaattgtcaactgctgatggtaaagcttttgcagatcctgaggtactccggagactgacatcctcagttagttgtgcactggatgaagctgctgctgcactgacacggatgaaagcagaaaacagccacaatgcaggacaagtggacactcgcagtctagcagaagcttgttcagatggggatgttaatgctgttcgtaaattgctagatgaaggcagaagtgtaaatgaacatacagaagaaggagaaagcctgctgtgtttggcttgttcagcagggtattatgaattagcacaagtattgcttgctatgcatgctaatgttgaagatcgagggaataaaggagacataactcccctgatggcagcttccagtggaggttacttagatattgtgaaattattacttcttcatgatgctgatgtcaactcccagtctgcaacaggaaacactgcgctaacttatgcatgtgctggaggatttgttgacattgttaaagtgctccttaatgaaggtgcaaatatagaagatcataatgaaaatggacatactcccttaatggaagcagccagtgcaggtcatgtggaagttgcaagagttcttttagatcatggtgcaggcatcaacactcattctaatgaattcaaagaaagtgctctaacacttgcttgctacaaaggccatttggatatggttcgctttctacttgaagctggtgcagatcaagagcacaaaacagatgagatgcacactgccttaatggaggcctgcatggatggacatgtagaggtggcacgtttgcttttggatagtggtgctcaagtgaacatgcctgcagattcatttgaatctccattgacgctagctgcctgtggaggacatgttgaattggcagctctacttattgaaaggggagcaaatcttgaagaagttaatgatgaaggatacactcccttgatggaagctgcccgggaaggacatgaagaaatggtggcactactcttagcacaaggagcaaatataaatgcccagacagaagaaactcaagaaactgctcttactttggcttgctgtggaggattttctgaagttgcagactttcttattaaggcaggggctgatatagaacttggctgctccacacctctgatggaggcatctcaggagggacacctggaattggttaaatatttgctggcttctggcgctaatgtgcatgctacaacagcaacaggagacacagccttaacctatgcttgtgaaaatggacatacggatgttgcagatgttttacttcaagcaggggctgatttagaacatgaatctgaaggtggaagaacacctttgatgaaagctgcaagagctggtcatttgtgcactgtgcagtttcttattagcaaaggtgccaatgttaacagggctacagccaataatgatcatacagtagtgtcgctggcatgtgcaggaggccacctggcagttgttgagcttctcttggctcatggggctgaccctactcatcgactcaaggatggttcaacaatgctcattgaagctgcaaagggtggccatactaatgtagtttcttatctgttggattatccaaataatgttctgtcagttcccaccacagatgtgtctcagctccctccaccttctcaagatcagtctcaggtgccacgtgtgccaacgcatacacttgccatggttgtacctccccaggaacctgacagaacttcacaggagaactctcctgcccttttaggagtgcaaaaaggtacatccaagcagaagtccagttccctccaggtagcagatcaggacctactgccatcttttcacccataccagcctttggagtgcatagtagaggagactgaaggcaagctgaatgaactgggacaaagaattagtgctattgaaaaagcacagcttaagtcactggagttaattcaaggtgaacctctgaacaaagataagatagaagaacttaaaaagaacagagaagagcaagtccagaagaagaagaaaatattgaaagaactgcagaaagtggaaaggcagttgcagatgaaaacacagcagcaatttaccaaagaatacttggaaaccaaaggtcagaaagacacagtgtctctacaccaacagtgctctcatagaggagtcttcccagaaggggaaggagatggtagtctcccagaggatcacttttcagagttacctcaggttgacacaatcttatttaaagataatgatgttgatgatgagcaacagtctccaccatcggcagaacagattgattttgtcccagtccagcctttatcatctccacagtgtaacttttccagtgacttaggttctaatgggacaaattctcttgaacttcagaaagtatcaggtaatcagcagattgtaggacagcctcagattgctattactggacatgatcaggggctgttagttcaagaaccagatggactaatggttgcaactccagctcagacgcttaccgacactcttgatgacctgatagcagctgtgagtaccagagtgcccactggttccaacagttcttctcagaccacagagtgtcttacacctgaatcctgttcgcagactacaagcaatgtggcttcccaatcgatgcctcctgtgtatccttcagttgacattgatgcacatactgagagcaatcatgacacagcattaacactagcttgtgcaggtggtcatgaagaacttgtatctgtgctcattgcacgggatgccaaaattgaacacagagacaaaaaaggtttcacaccactaatcctggcagcaacagcagggcatgttggagttgttgaaatccttttggataaaggtggagatatagaagcacagtctgaacgaactaaggatactccgctttcattggcatgttctggtggacgtcaggaggtggtagacttgctgctggctcgaggtgcaaataaagaacataggaacgtatctgattatacaccactgagtctagctgcgtctggaggatatgttaatatcattaagattctgcttaatgctggggcagaaattaattcaaggactgggagtaaactaggtatttctcccctgatgttggctgcaatgaatggacatgttcctgcagtaaaattgctgctcgatatgggttcagacattaatgcccaaatagagaccaatcggaacacggctctcaccctggcctgtttccagggccgagcagaagtagtgagtttgcttctggaccgaaaagccaatgttgaacatagggcaaagacgggtcttacccccttgatggaagcagcttctggagggtatgcagaggttggaagagttcttcttgataaaggagcagatgttaatgctccccctgtgccttcctcaagagatactgctttaacaatagcagcagacaaaggtcactacaaattttgtgaactcctgattcataggggagcccacattgatgttcgtaacaaaaagggaaatacgccactttggctggcatccaatggaggtcattttgatgttgtgcagttgctagtgcaagcaggtgctgatgtggatgcagcagataaccggaaaatcacacctcttatgtcagcatttcgcaagggtcatgtaaaagttgttcaatatttggtaaaggaagtaaatcagttcccttctgatatagaatgcatgagatacatagcaacaattacagataaggaactgttgaaaaaatgtcatcaatgtgtcgaaaccattgtgaaggctaaagaccagcaagctgcagaagcaaataagaatgcgagtattcttttaaaggaacttgatctggaaaagtcaagagaagagagcagaaagcaggctcttgctgctaaaagagaaaaaagaaaagaaaagagaaaaaagaaaaaagaggaacagaaaaggaaacaggaagaagatgaagaaaacaaacctaaggagaattcggaactaccagaggatgaagatgaagaggagaatgatgaagatgtggagcaagaagttcccatagaacctcctagtgcaaccaccaccactacgattggaatctctgcaacatctgcaacattcacaaatgtgtttgggaaaaaaagggccaatgtggtgacaactcccagcaccaatcggaaaaataagaagaacaaaacaaaagaaacccctcctacagcacatttaattttaccagaacaacatatgtctttagcccaacaaaaggcagataaaaataaaataaatggagaacctagaggtggtggtgcaggtgggaatagtgattcagataacttggacagcacagactgcaacagtgagagtagcagtggtggtaaaagccaagagttaaattttgtgatggatgtgaattcctctaaatacccctcactgctccttcattcccaagaagaaaagacaagtactgctacttccaaaactcagacacgacttgaaggtgaagtgactcctaattccttgtcaaccagctacaagacagtgtcattgccattaagctctccaaacataaagctgaatctcactagccctaaaaggggtcagaaaagagaagaagggtggaaagaagttgtacgaaggtcaaagaaattgtctgttccagcctcagtggtgtcgaggataatgggaagaggaggatgcaacatcactgcaatacaggatgttactggtgcccatattgatgtggataaacaaaaagataagaatggcgagagaatgatcacaataaggggtggcacagaatcaacaagatatgcagttcaactaatcaatgcactcattcaagatcctgctaaggaactggaagacttgattcctaaaaatcatatcagaacacctgccagcaccaaatcaattcatgctaacttctcatctggagtaggtaccacagcagcttccagtaaaaatgcatttcctttgggtgctccaactcttgtaacttcacaggcaacaacgttatctacgttccagcccgctaataaacttaataagaatgttccaacaaatgtacgttcttctttcccagtttctctacccttagcttatcctcaccctcattttgccctgctggctgctcaaactatgcaacagattcggcatcctcgcttacccatggcccagtttggaggaaccttctcaccttctcctaacacatggggaccattcccagtgagacctgtgaatcctggcaacacaaatagctctccaaagcataataacacaagccgtctacctaaccagaacgggactgttttaccctcagagtctgctggactagctactgccagttgtcctatcactgtctcttctgtagttgctgccagtcagcaactgtgtgtcactaatacccggactccttcatcagtcagaaagcagttgtttgcctgtgtgcctaagacaagtcctccagcaacagtgatttcttctgtgacaagcacttgtagttccctgccttctgtctcctctgcacctatcactagcgggcaagctcccaccacatttctacctgcaagtacttctcaagcacagctttcttcacaaaagatggagtctttctctgctgtgccacccaccaaagagaaagtgtccacacaggaccagcccatggcaaacctatgtaccccatcttcaactgcaaacagttgcagtagctctgccagcaacaccccgggagctccagaaactcacccatccagtagtcccactcctacttccagtaacacacaagaggaggcacagccatccagtgtgtctgatttaagtcctatgtcaatgccttttgcatctaactcagaacctgctccattgactttgacatcacccagaatggttgctgctgataatcaggacaccagtaatttacctcagttagctgtaccagcacctcgagtttctcatcgaatgcagcccagaggttctttttactccatggtaccaaatgcaactattcaccaggatccccagtctatttttgttacgaatccagttactttaacaccacctcaaggcccaccagctgcagtgcagctttcttcagctgtgaacattatgaatggttctcagatgcacataaacccagcaaataagtctttgccacctacatttggcccagccacacttttcaatcacttcagcagtctttttgatagtagtcaggtgccagctaaccagggctggggagatggtccactgtcctcacgagttgctacagatgcctctttcactgttcagtcagcgttcctgggtaactcagtgcttggacacttggaaaacatgcaccctgataactcaaaggcacctggcttcagaccaccttcccagcgagtttctactagtccagttgggttaccatccattgacccatcaggcagctccccatcttcctcttctgctcctctggcaagtttttccggcataccaggaacaagggttttcctgcaagggccagctcctgttgggactcctagtttcaacagacaacatttttctccccatccttggacaagcgcctcaaactcatccacttctgccccaccaacgttgggccaaccaaaaggagtcagtgccagtcaagatcgaaagatacctcccccaattggaacagagagactggcccgaattcggcaaggagggtctgttgcacaagccccggcggggaccagttttgtcgctcccgttggacacagtggaatctggtcatttggtgtcaatgctgtgtcagaaggcttatcaggttggtcgcaatctgtgatggggaaccatccaatgcatcaacaattatcagacccaagcacattctcccaacatcagccaatggagagagatgattctggaatggtagccccctctaacatttttcatcagcctatggcaagtggttttgtggatttttctaaaggtctgccaatttccatgtatggaggcaccataataccctctcatcctcagcttgctgatgttccaggaggccctctgtttaatggacttcacaatccagatcctgcttggaaccctatgataaaagttatccaaaattcaactgaatgcactgatgcccagcaggccagtctgcttccttcagtccctgctctcaaaggggaaatcccatcacctcagctaaccagaccgaagaagagaattggacggccgatggtggcctctcctaaccagaggcaccaggatcatctacgaccgaaagttcctgctggagtgcaagaactcacccattgcccggacacccccctgctgcctccctcagattcccggggtcacaactcctccaacagcccctctctccaagctggaggagctgaaggagcaggagacagaggaagagatacccgatgacgcacaatttgaaatggacatctaatccagtgcagatgacctggcatgtggagttacagagggatccctcatgccactgctgccaccacctcttcctggggcatccaaaggccagctggcctcatctaatctggaagggagtgacttgttagttccaggcctcctttagttctgaggcagctagaccagggataggagtgggcaacttgccaagcccttaactctacttcctcttcagtctgtggtactcctcctaaccctaaaccctctatgctcaggggctggaactggggaatggagtaagtcaccttctgactgcttagtaaacattcaaagaaatg

SEQ ID NO: 30500 - DNA, 4577 bp, Homo Sapiens
tccgtgaggcgcgggcggcggcgaccgcggcgccagtgagggggccctggggcccgggcggctccgggccggggccccgccgcgggacggaccatgctacgctccactggcttcttccgggccattgactgcccctattggtctggggcgcccggggggccctgccggcggccctactgccacttccggcaccgcggggcccggggccccggcgcgcccggtgacggcggagaggcgccccccgcagcagggctgggttacgacccctacaaccctgagctgcccaagccccccgcgcagagggagaatggcaccctgggcctgggggaggagccgcgcccggatgtgctggagttggagctggtcaaccaggccatcgaggccgtgcgcagtgaggtggagctggagcagcggcgctaccgggagctgctggagacgacccgtgagcaccgctccgccgaggcccccgccctggcgccccgcggccccaacgccagccccactgtgggcccggacgaggatgccttcccactggccttcgactacagccccggcagccacggcctattaagccctgatgccggctaccagcccaccccactggccgcccctgccgagccgggcagcaagtactcgctggcgtccctggacaggggtcagggcagaggtggagggggtggcggtgccctggaatacgtccccaaggctgtgagccagccccggcggcacagccgccccgttcccagtggcaagtacgtggtggacaactccaggccacccacagacctggagtatgaccctctctccaactactcggcccggcacctcagcagggccagctcccgggatgagcgggccgccaagcggccccggggctcccgcggcagtgagccctacacacctgctcccaagaagctctgtgacccctttggcagttgcgatgcaaggttctcagactcagaagatgaggccgccacggtcccaggtaacgagcccaccacggccagcacccccaaagccagggccgaccctgagatcaaggccaccgggcagccaccctccaaagagggcctggaggccgaggggggcggcctgcgggagaccaaggagacggccgtgcagtgcgacgtgggggacctccagccgcccccagccaagcccgcctccccagcccaggtccagtcctcacaggatgggggctgccccaaggagggaaaacccaagaagaaaaaaaccggggccccacctgcccccagctgcaaagacggggcccaggggaaggacaagaccaaggacaagggccgagggcggcctgtggagaagccccgtgcggacaagaagggcccgcaggccagcagcccccggcgcaaggcagagcggccggaagggaccaagaagaagccatcttcggccactcctgtggccacctcagggaaagggaggcctgaccggccagcgcggcggccgagccccacaagcggggactcccgaccggcggccggcagaggcccaccccgccccctccagctgcccgacaggaagagcaccaaggccccgtcggggaagctagtggagcggaaagcccgctcactagacgagggcgcctcccaggacgcccccaagctgaagaagcgggccctgagccacgccgacctctttggggacgagagtgaggacgaggccgcagggccaggggtgccgagcgtgtggccctctgccctccccagcctcagctcggactcagactccgactcagactccagcctgggcttcccggaggcgcaggggccgcccaagcggctcaaggcctccccgcccccctcccccgccccatcctcctcctcctcctcctcctcctccacctccagcgcgggggcggatgtggactactcggccctggagaaggaggtggactttgactccgaccccatggaggagtgcctgcggatcttcaacgagtccaccagcgtcaagacggaggacagaggccggctggcccggcagccccccaaggaagagaagagtgaggagaaggggctttcgggtctgaccactctgttccccgggcagaagaggaggatctcccacctttccaagcaaggccaggaggtggagcccccgaggaggggtcccgcggtgcccccggcccggcccccgacggcgcaggaggtgtgctacctgcgggcccagcaggcgcagagggcatcggcgagcttgctgcaggcccccgccaggctggcagagaagtcgccctccgtccacatttccgcccctggcgagaagaggaggatcgcccacatccccaacccccgcctggctgcagcccccacaggtgccaagaggacccttgcggccagcggcagccagccctccaacggccctgagccaggtggccagcagctgaaaacacgcacattgtcggggatggcgtccaagactaccaccaccatcatccctaagcgaatcgcccacagtccatccttacagagtttaaagaaacccattatccccaaagagtttgggggcaaagtccccaccgtcatccgccagcgctatctcaacctgttcatcgaggagtgtctcaagttctgtacctccaaccaggaggccatagagaaggcactgaacgaggagaaggtggcctatgaccgcagccccagcaagaacatctacctgaatgtggccgtgaacaccctcaagaagctcaggggcctggcccccagcgctgtgcccggcctcagcaaaaccagtggccgcagggttgtgtcccacgaggtggtgttggggggcaggttggccgccaagaccagcttctcgctcagccgtccaagcagcccccgggtggaggacctgaaaggggctgccctgtacagccgcctcagggagtacctgctcacccaggaccagctcaaggagaacggctaccccttcccgcacccagagcggcccgggggcgcaatcatcttcacagctgaggagaagaggcccaaggactcttcctgcaggacctgctgccgctgtggcaccgagtacctcgtgtcctcttcaggccgctgcatccgggacgaggagtgttattaccactggggacggctgcgccggaaccgggtggccggaggctgggagacccagtacatgtgctgctcggctgccgccggctctgtcggctgccaagtcgcaaagcaacacgtgcaggatggccggaaggagcgccttgagggcttcgtgaagacctttgagaaagagctctcaggagacacccacccggggatctacgccctggactgcgagatgtcctacaccacatatggcctggagctgacgcgcgtcacggtggtcgacacggacgtgcacgtggtttatgacaccttcgtgaagcctgacaacgagatcgtggactacaacaccaggttttcgggggtgacggaggctgaccttgccgacacaagtgtcacgctgcgtgacgtccaggccgttctgctgagcatgttcagcgctgacaccatcctcatcggacacagcctggagagcgacctcctggccctgaaggtcatccacagcaccgtggtggacacgtctgtgctcttcccccaccgcctgggcctcccctacaagcggtccctgcggaacctcatggccgactacctcagacagatcatccaggacaatgtggatgggcacagctccagcgaggacgccggcgcctgcatgcacctggtgatctggaaggttcgagaagacgccaagaccaagcgatgacgcctgcccgcctcccacccgcctctcctgccgtcccgctggtccttagccccatgcctcttccaaaacagtgcaataaatctccggtaacccgtccacctggccgaggcagcccagagcagcgggatgagctggcggccagagaacgcccagcccagcccacccccgctcacgtcctgccgcacccctccgccggtccccaccctctgccccccagccctctggcgtctctagaaactgctgctgatggagaccaggacagagcccgcccccacccggcccgcagcccctcctgcccctcctgccaggccctccctcccgggtggtggccggcacctctgctcctcacgtgggtcgcggggcgggcttgtcccaggtttgtttgagacagtctttttttattttgtattgttatttttattatttttaatttaaacctgatgacttgcacagcatctttcccaccgggaagagcgggcctgctgccttccctcctgcggggtgggggtgggacagaccccagtgggggccagggccacactcagcgcagtgtgggctggacccgcctctgtgctccaggggctggccggtcttcgggggcgccggcttccaccactcgccgccccacccctgcactccgtgacctctgagaacccagctggcccctcgttagccccagggtctgccgtctagagggagcccaccggcctccggacactgtcttcccgctagagccccgtcctcctctgcggggctctccggacccccttccccctcacctccaggcagggacagaataaatgtttgtatggatttta

SEQ ID NO: 30501 - DNA, 4727 bp, Homo Sapiens; identical to SEQ ID NO: 27307

SEQ ID NO: 30502 - DNA, 5348 bp, Homo Sapiens
acaccgccaccgccaggatggatagaatgacagaagatgctcttcgcttgaatctgttgaagcggagcttggacccagcagatgagcgagatgatgtcctggcaaagcgactcaaaatggaggggcatgaggccatggaacgtctgaaaatgttggcattgctcaaaaggaaggatttggcaaatcttgaggtgccacatgagttacccaccaaacaggatggcagtggtgtcaagggctatgaagaaaaacttaacgggaatctcaggcctcatggagacaacaggactgctggaaggccaggcaaagaaaacatcaatgatgagcctgtggatatgagtgctagacggagtgagccagagcgaggaaggctaactccctcaccagacatcattgttttgtctgacaatgaggcttccagtccccgttccagttccagaatggaagaaagactcaaagcagccaacttagagatgtttaaggggaaaggcattgaggagcggcagcagcttatcaagcagctgagggatgagctacgattggaagaagcccgactggtcctgttaaagaaactgagacagagtcagctacagaaagagaatgtggtccagaagactccagttgtacagaatgcagcatctattgttcagccatctcctgcccatgtgggacagcagggcctatctaagcttccctctcggcctggggcccaaggggttgaacctcaaaatttgagaacattacagggtcacagtgtcatccgttcagctaccaataccacccttccacacatgttgatgtctcaacgtgttattgcaccaaacccagcccagctacagggtcagcggggcccgcctaagcctggccttgtacgcaccacaacacccaacatgaatcccgccatcaattatcaaccgcagtcaagttcttctgttccatgtcagcgtacaacatcctctgccatctatatgaaccttgcttctcatatccagccagggacggtgaacagagtgtcctcgccacttcctagccccagcgccatgactgatgctgccaactcacaggctgcagccaaattggctcttcgcaaacagctggaaaagacactcctggagatcccaccccctaaacctcctgctcccttacttcatttcttgcctagtgcagccaatagcgagttcatctacatggtaggcttggaagaagtcgtacagagtgtcattgacagccaaggcaaaagctgtgcctcacttctgcgggttgaaccctttgtatgtgcccagtgccgcacagatttcacccctcactggaagcaagaaaagaatggtaagattctatgtgagcagtgtatgacctccaaccagaaaaaggctctaaaagctgaacacaccaaccggctgaaaaatgcatttgtgaaagccctacagcaggaacaggaaattgaacagcgattacagcagcaggcagccctctcccccactacggctccagctgtgtccagtgtcagtaaacaagagaccatcatgagacatcatacgcttcggcaggctccacagccccagagcagcctccagcgtggcatacccacatctgcccgctccatgctttcaaactttgcacaggcaccccagttgtctgtgccaggtggcctccttggtatgccaggtgtcaacattgcatacttgaatactggcatcggaggacacaaaggccccagtttggcagaccgacagcgtgaataccttttagacatgatccctccccggtctatatcgcagtccatcagtggacagaaataacgcctgttccacttgtactgccccatccttgaatcctttatccctttcctctttcattcccccaacttctgtcgcatgcagtgcctgtactggtgcctaccatacacggaaagcaaaacagaaaaacagaagacaaaaaatagagatcagcaagaaaacacacgccctgccctgccacctcccctttatttcacactgctgcgatctgttcttctgccgctctgtcttctctcttcagttttctttaacagtgaggtggatctttacctctgatagaggtcagaatgaggtcctggggagaatctaagccctccgatgtgtgtttctaaagttgttttatgctataattattaccatttttaatgatgttgtgtgtcctccctttgttcagtggacggttaaaccttcccccactcaaccaatctttttctttttccttttcttccttttttttttttttttttgtaaacacaaatgacattcagttcaatgatacgagcattgcagattgcagtaggggtcccagctgccaagtaggacatgactaggagtgttaggggcagaagttttgaatgcacttaaccggaggagggcgcagggtggggggtatcaaagaaggacgaatagcaccctacctgtgggtgtttgggggctggacaatttgggtggcagtgtttggtactgaagttgggctctaagaatgaggggaaagagcctggggaggagcttaaaactcaaccactctggaatttacccatagaagacgggaagaaagaggtatgaagatgggctcaattatgagccagggaggattgaaactaggtcctgcctttctgtatcttggggaaataagaccgatctcctgaccccattgggaacacggaagtctattccaggccaaccagcccaaaattatttcatcttgtattctttgtaaaattctccctcaccccaccctgcttttaaaaattctaatctatcccctctaaccatagccccatctataatacagaggaacggctgttccaaggctgtttgctgggtgtcccacaagttgggtggacataaatgagtcaagtgacaacaggaggaaatagacttagacgaaagaaaggatttctcttccaacagttgagattcgcatatttgcctattctttcaccctctgagtgccaggagatgagaggctgggggtacacaatcaggttggagtcctgtccttactctgctgcaccagctgcagaaccaactgctcaaagccaaacagctcatggcaaaaccagcttaggacctctgctgtacaaatagttgcttcccactgccccccgcccgcccccagaatgatattaattttgcctttttttttttttttttttttaagcgctactaatgtagagaatgaattgaattgtgcaatgttgctgttctggggactggggagattagcatcccatttgcccacactgtgggaagacggagtggaccaggctgtttttgaagtaagggaagccccttaaaggtacgggtttctgctcttctcatagtgtacacccacctgcctctctggctccagaagctgccagagtgcactggggggaatgttctcagcagagaagaatgaggagaagtttaatattttgcccttgaaagtcacctgaggaagtttccccacttttattttttaaaattaagtaattttttaaagaaggcacttttaaaattaacacacacatgaactgcacaccttccccataaaatttggaggtggggtgggagaaagagctaaaatcaggctcagttcccctactctggcctctactccccacaccccagtgccactgtgggtgactatactggccctacgggccttcctggcttttttctttcctcccttaccccaaattcattgagcacttaaaggagcagagatgcagccagtgtctgggctcccccagtggtgaaatgatctggaagctagatgctagtaacaggtagtgattgggttttttgagtatttttccggggaatgtggtacccctgactgtaagtggtgggagagggaggggggttaatggaactgggtctgggattattttaaaattatatatatatatataaagatatattcttacatcttttctttgccctctgtgctttgaaagcactggataaattgtttggttttgcttttctctcttccacaaaattggaagctttttttaaaaatgttttccccacaagtcatcttgccttgtggcatgtctgtctagcctcttcctccctccctcatgatgaagtgccatttctgttacgtctccctctccccaagctcagaggtgctcagaggtacgagatgcccaagtttgtcagttgagattaaaagtaaggaacagagaatgtgcaataccgtctggctgggggctgtccctgccctgccctgagctgagtcctttccctgggagccaggccaccttagaatggggtttggaagtaagatgtatagagttggggaatcatggagaaggaaagcctatagtcgagtgcctgcttaggtgctgaggtcacaggggagatggtggaatcttccctgtttttatcccctcagggtcagttacatagaagctgcttcttgactagtatagctcggtgaccctttgttcaaccgctgaggtttgatttcttaccctttcttctccccattttcatactcttcccagggattagtgatggaggtgaggtctccctaatcatggtaaagtgttaaccttccacctcctcccttccctcctccttcctcatccttctgtcttcctcaattctccgtctcttttttttcatcactgattgccttgtgtccctccaagtctacttgttactatccatctccaggctctgggccgtgtagacactaaacctcatgccctaaggacaggaggaaagaccctctgtttggagcattattagtagagtgaggatcccaccagttctgcctggcttcctccatccccagaggcactaaaagcagtattttaaggttggtgtcttactccctggaagcctgaaatgggtggaatagcggtaaggcttgagtaaaactaggggacagaggttcttatttgtcgattttattttataatttgaccacagcatctgaactccctctctccctggaataagtatttttcccacatttttggatatatgtatggtagacaatttttttttaagacacagagataaatgttttcctgctttggttacctttcctttcccctttaaaaggaattagctatagaactgctttgtaaagatgcttcttgatattttacttttgttccttttccctaatcattcccttttctccccactcctccagaaggcataacccttctctccacaccccctacccccacccccgtcctaggctcccatcctttccatcaagaccttcattagcttatgatatttgctgccgagatgttataacaaggactcgttcatgtatataagctatttcttgatccatttaaaaggaattgtacattgtgt

SEQ ID NO: 30503 - DNA, 6372 bp, Homo Sapiens
ccacgcgtccgctggtgccctccgtggacaattgtgttgaagcagaaattgttccggatctcgggtcggacacggaagtcttcctgcagtgtttctggatgcggggacagggatgcgcaggaattccagtctcagtttccagatggagcgacccctcgaggagcaagtccagagcaagtggtcgtctagtcaaggccgcacaggaacaggagggtctgatgtcctccagatgcagaacagtgaacaccatggacaaagcatcaagactcaaactgactccatctcccttgaggatgtggctgtgaacttcaccctggaggagtgggctttgctggatcctggccagaggaatatctacagagatgtgatgcgggcaaccttcaagaacctggcctgtataggggaaaaatggaaagaccaggatattgaagatgaacacaaaaaccagggaagaaatctaagaagtcctatggttgaagcactctgtgaaaataaagaagattgtccatgtggaaaaagcactagccagattcctgatcttaatacgaacctggaaactcctactggattaaaaccatgtgactgcagtgtgtgtggggaagtcttcatgcatcaggtctcccttaataggcacatgagatctcacactgaacagaaaccaaatgagtgtcacgaatatggagagaagccacataaatgcaaagaatgtgggaaaaccttcactcgcagctccagtattcgaacccatgaaagaattcacactggagagaaaccctatgaatgtaaggaatgtggcaaagccttcgcatttctcttttcctttcgaaaccatataagaattcatactggagagacaccctatgaatgtaaggaatgtgggaaggcattcagatatctcactgctcttcggcgccatgaaaaaaatcacactggagagaaaccctacaaatgtaaacagtgtggaaaagcctttatatattaccagccttttctaacccatgaaaggactcacactggagagaaaccttatgaatgtaagcaatgtgggaaagccttcagttgtcccacgtacttacggagtcatgagaaaactcatactggagagaaaccttttgtatgtagggaatgtgggagagccttcttttctcactcaagccttcgaaaacacgtgaaaacccacaccggagttcaaccttatacatgtaagaaatgtggggaagccttcaagtcatctagttcctgtgaagtgcacgaaagaactcattttggagaaaaaccctatgaatgtaaacaatgtggtaaagccttcaattcttcaagttaccttcagttgcacgaaagagttcacactggcgagaaaacttacgaatgtaaagaatgtggtaaagcctttctttattccactcactttcgaatccatgaaagaacccatactagagagaaaccctatgaatgcaaacagtgtggtcgggtcttcatttacttcagtcaccttcgaaggcacgaaagaagtcacactggagtgaaaccatgtgagtgtaagcagtgtggcaaagctttcacttgtttaaattccctgaaagtacacaaaagaattcatactggagaaagaccctttcagtgtagacaatgtggtaaagccttcagttactcaaagtctttgcacgtgcacgaaaggactcatagtagacagaagccctaagaaagtaaagtgtggtaatgctgtcagttgtattagttccttttggatgtatgagagtacttacgctggagagaaattcaaggaatgtaaacggtgtgattaagccttcagttatcctaattccctttgaagacgtgactcatgcggcaatgaaatatttaacaaatgggggaggaacttgcactctcctgcgggattgcagatatgtgaatggactccatggacagaaaagctacgaatgtatggagtgtaggaaagccttcacttcacgtaatcttttaaagacacctgagaatatatactggagagaaactataaagaaaattctatatccatcccatcttttgtggggtttgttttttgtttttgtttttgttgagatgtaattttgctcttgttgcccaggctggagtgcagtggtgcgatcgcggctcaccgcaacctccgcctcctgggttcaagcaattctcctgccgcagcctcccaagaagctgggattacaggcatgcgccaccacgcctggctaattttgtaattttagtagagatggggtttctccatgttggtcaggctggtctcaaactcctgacctcaggtgatctgcctgcctcggcctcccaaagtgctgggattacaggtgtgagccacagcacccaacctttttttccccgccgcaccccaagatggtgtctcactctgttgccccaggctggagtgcagtggtgtgatcctggctcactgtaacctctgggttcaagcaattcttctgcctcagccttccaagtagctgggattacaagtgcccaccaccatgcccagctaatttttatatttttagtagagacagtgtttcaccatgttgaccaggctgatcttaaactcttgacctcaaatgatccacccaccttggcctcccaaattgttcgttttactttttttttttttttttttgagctggagtcttactctgttgcctaggctggagtgaaagtggcgcaacctctgcctcccaggtcaaagcaatcctgcctcaggccccctagtagctggcattacaggcacatgccaccacgcccaactaatttttatatttttagtagagacggggtttcaccatgttggccaggctggtcttgaactcctgacctcaggtaatccacctgccttggcctcccaaagtgctgggattacaggcgtgagccaccacacccggcccccagttctttttttttttttgagacggagtccttgcccaggctggagtgcagtggcgcgatctcagcttactgcaagctccgcctcctgggttcacgccattctcctgcctcagcctcccgagtagctgggactacaggcgcccgccaccacgcccggctcatttttttgtatttttagtggagacggggtttcaccgtgttagccaggatagtcttgatctcctgacctcgtgatccgccctcctcggcctcccaaagtgctgggattataggcgtgagccaccgcgcccggcctccagttcattttaaaaccatgaaaccacccacactggagagccgccttcttaaatgtaagcaatatgggaacatcttcaatgacatctgcaaccattgtcgagattcttcgtaggaagaattaaaggaatggggaagaaggacttgggccccagcaggccttttgtggcatccagtcagaagttaggaaacaccctctagggcagtgcctgccctcagctctcacacatgactggagagaagtgagaagactcccagaatctgccttttaagtttccatcagtgtcctcgggtcagactgtgggaatgctgtacttctaagacaaaggttcgcatcttacagtttttccccaagtgggatctgcctatgcacatcctaattcacagacattgtcagcattgcattattccagggctgttttgaggtcatctccagctccatttcccatctcaaacctacactttggacacttgtttaaacattcacatctgaatttctctgtggcaaccgcaggtggctctgaggtgagagactgaagaagcagagcctgtatcatgggacacacaccccttgaccacacagcatccactctcctgcggttaccagccctgcaccaaccaccacagtcagaataatctcaaaactgctagtggagtcacagacacactctgccatgtcttagctgtaggacactcagaattcttacctcccctaacttgctttccctgttttctggcacattctaccctgagatattcagcggcatatgcactgatgatgctccggccttctcacgtcagtgcatgtcacatgcatcctgctccaggactggtttcctagcctcccgctaagactagcacttagctcttcttggaaaaggacccaccctgcagcgctccagctctgttgtgtatgggaggtgctggtgtcagggttcacaagccatggaactaccttgcttcacatcacaaggcaaggtgaactcaactcccaataaactgcttgctggagcctccgaattctccgttttctgaattgcataggcacgataggggtcgggtctgtcctttgttggagtcagtccccccttttcttagcaagtcagtgtgttttagaagggaggtggcagcattgagggaaaccaggtcaccatccaccctcgtaacaacagtctccctgggtgggtcccagaagtgatctttgtgtcgctcgggtcggaactctttaggcctctggcctccaccctcccccaacagcagggatgggtcaggtggcagcatccaaaaccacggtgaagatactagggtccagaggccgactggagcaaggtttgctggcagatgaggcctcagtggaagtgacggctactgtggagatgcagtggaggacctggtggctgagccaggagatgcacaccttcgcttctctcaccaggaacattcgcttctctcaccaggaacatttatggtagtatgaggggttggaacattattactcaacccatttcaggtcctttcacattcttgagctgccatgttgtgcttttgtagagagatgattattgtactgtgggaggtcaggaagttcgagattccttcactgtcagaatgggctcaaggagccatcttttgtgataggtattggggaactaaggggtatctctgctacaggaatgggagtgagaacattcactttttgaaggacaagtatatgtgggtctatgatgatgtttttgtaaaacccttttgtgtatgtgtctgtgtgagtcctaatattcagtaagtattttcctctgtgtaactccctctaataggtgtagtcaacaaagctgtgctaatatctctgtccccttgatcctggcattctggaagacacgaaagcaagcaaggatatataaggcactgtggtggttattcccgaggagccagagaaacctggagaagagatcagaacacctggggtccttctatttgggagaatcttttagtatctgggctgttacacctgtgggtttgtgaatttgtgtctgtccacctgtatgtacagtgataacgtgtgtgatttttgtatatttgtctagagggctgtgtgtatatatatttatatatatttttaaatatggaatgcttttaggtttttttttttttttttttttttgagatggattctcactgttgccaggctggagtgcagtggcacaatcttggctcactgcaacctccacttctcaggttcaagcaattctcctgcctcagcctcctgagtagctgggactataggcgcgtgccaccacaaccagctaaatttttttgtatttttagtagagatggggtttcaccatgttgaccaggatggtctcaatctcctgaccttgtgatccacccacctcggtctccccaaagtgctgggattacaggcgtgagccactgtgcctggctggttattttgtttgtttgttgtttttttgagacacagtctcgctctgtcaccaagctggactgcagtggcatgatctcggctcactgcaatctctgcctcccaggttcaagcaattctcctgtttcagcctcctgagtagctgggattacaggcgcgtgccaccataccgagctagtttttttatttttagtagagacggggtttcaccatgttggccaggatggtctcgccctcctgaccttgtgatctgcctgcctcggcctctcaaagtgctgggattagaggcttgagccaccaggcccggctggaatgcttgcattttcttgcctgatttccctgggagcaccccccttaacactgaatggagctggtgagagcaaatatccttgtttctgatattagatattaaaaatatggtttttcaccatcaaagattttattgagtttttcatatatgccttgtagcaatttgagtaaattatattccttgtttgttgcagatttttaatcataaatgggtgttgaattatgtcatgcttttttgcatcaattgagactgtcatttttccgtcatttcctaatgtggtgtattccactgatcaatttccatatggtgaaccatccttacattccagggacaaatctcacttggttatattgcataatgctttgaatatattgctttatatgctttgctggcaaaaaaaaaaaaaaaaaaa

SEQ ID NO: 30504 - DNA, 7370 bp, Homo Sapiens
atggaatcacagcggcagcggcggctgcggcgcgcgcgagccgagtgtgagcggaaaggggcccggcgtctgcctcgagactgaagaccgataaactcaagccatggagggattactgcattacatcaaccctgcacacgccatttctctcctaagtgccctgaatgaggagcgtctcaaaggacagctgtgtgatgtgctgctgattgttggagaccaaaagttccgagctcataaaaacgtcttggctgccagcagcgaatactttcagagtttattcacaaataaggaaaatgagtcacaaactgtatttcagcttgacttctgtgagccagatgcttttgataatgttttaaactacatttattcttcctctctatttgttgagaagagcagccttgctgctgtgcaagaacttggctatagtcttgggatttcctttctgactaacatcgtttctaaaacacctcaagccccctttccaacgtgtcctaatagaaaaaaagtgtttgtagaagatgatgaaaacagttctcaaaagagaagtgtcattgtttgtcaaagtagaaacgaagcgcaaggaaaaactgttagtcaaaatcaacccgatgtaagccatacttcccggccctctcctagcattgcagtcaaggccaataccaataagccacatgtcccaaaaccaatagaaccacttcataatttgtcattaactgaaaagagttggccgaaagatagttctgtggtatatgcaaagtctcttgagcattctggatctttggatgatcctaatagaatcagtttggtgaaaagaaatgcagtgttgccttcaaagcctctgcaagacagagaagctatggatgataaaccaggtgtgagtggtcagcttccaaaaggaaaagctctagagctggctttgaagagaccacggccacctgttttgtctgtttgtagctcatcagagactccctatctattaaaagaaactaacaaaggaaatggtcaaggtgaagatagaaacttgttgtactattcaaagttaggcttagtgatcccatccagtggatctggttctggaaaccaaagcattgacaggagtggcccacttgttaagagtctcctcagacggtcattgtcgatggatagccaggttcctgtctattcaccttccatagatttgaaatcttcccagggatcatcttcggtgtccagtgatgcaccagggaatgtgttgtgtgctttatctcagaagtcatctttaaaagattgtagtgaaaaaacagccctagatgacaggcctcaagtgctacaaccgcatcgcctcaggtcctttagtgcttctcagtcaacagacagggagggagcttcccctgtgactgaggtgcgcataaagactgagcccagcagcccgctgtcggacccctcggacatcatccgcgtcactgtgggagatgcggcaacaacagcagctgcctcatcttcgtcggtcacaagagacctgtctctgaaaacagaagatgaccaaaaagacatgagcagactcccagcaaaaaggaggttccaagcggaccgaagattgccgtttaagaagttaaaggtgaatgagcacgggtctcctgtgtcagaagataattttgaggaaggctcaagccctactctccttgatgcagattttccagattctgatttgaataaagacgaatttggtgagttggaggggacgagaccaaacaaaaaatttaaatgcaaacattgccttaagatctttagatcaacagcaggtcttcaccgtcatgttaacatgtaccataacccagaaaagccctacgcttgtgacatctgtcacaagaggtttcacaccaacttcaaagtgtggacacactgtcagacccaacacggcatagtgaagaacccatcaccagcctctagttcacatgctgttttggatgaaaaattccaaagaaagctgattgacatagtgagagagagagaaattaagaaggccctgatcattaagttaaggcgcggcaagcctggttttcagggacagagtagctcccaagcacagcaagtcatcaagaggaacttgagatctcgagccaaaggagcttacatttgtacttactgcggaaaagcgtaccgctttctctctcaatttaagcagcatataaaaatgcatccaggagaaaaaccccttggagtaaataaagttgctaaaccaaaagagcatgctcctcttgcaagtccagtagaaaacaaggaggtttaccagtgccgcctctgtaatgctaagctctcttctctcctagagcaaggaagccacgagcggctgtgccggaacgcggccgtctgcccttactgcagcctcaggtttttctcgcccgagctgaagcaagaacacgagagcaagtgtgagtataagaagctgacctgcctcgagtgcatgcgcaccttcaagtcctctttcagcatctggcggcaccaggttgaagtccataatcagaacaacatggcacccaccgaaaacttttctttgcccgttttggaccacaatggtgatgtgactggttcttcaaggccccaatcccagcctgagcccaacaaagtaaaccacatcgtcaccacaaaagacgacaacgtgttcagtgattcttcagaacaagttaacttcgactcggaagattcctcttgtcttcccgaagaccttagtctttccaagcaactgaaaatccaagtcaaagaggagcctgtggaggaggctgaagaagaggcacccgaggccagcacagcccccaaagaagcgggtcctagcaaagaagccagcctgtggccctgcgagaagtgtgggaagatgttcacggtgcataagcagctggagcgtcaccaggagcttctgtgctctgtgaaaccatttatttgtcacgtgtgcaacaaagcttttcgcactaattttcgactctggagtcacttccaatcgcacatgtctcaggcttcagaggaatcggcacataaggaatctgaggtgtgccctgttcccacaaactctccctctccaccacctctgccaccgccaccaccactgcccaagatccagcctctggagcctgacagccccacaggcctgtccgaaaacccaactccagccacagaaaaactgtttgtgccccaagaatcagacacccttttttaccatgccccacccctttcagcaatcacatttaaaagacagtttatgtgtaaactttgccacaggacattcaagactgcatttagtctttggagtcacgaacaaacacacaattgaaagaccaacactttttacctatgggaggcagtccccagatttcaacctgaattgtgaaatgtgtcataagaaacaaaatattttttaaacaagaataataaaggttggagattgttacgcttgaaattaagttggaggcaaattgataattacttagtaatgtccttaactttagaaatacagcttttaaaatattgtggttctggaccttacaagaacaagatggtttgatttcattaatgttgaaattggattagtcttgattgtgtgcatggttcctcattccatggtgtcagtataatcatttaattgaggtttttggttttttattgattagtggaatactgtcgaagtattccttcttttaattattttagacacttgagttctagttaaatcttaaccatgttcttaagtccaaaataggaagaagtggagtagtttgcagtattgatttatatcttagactactttagcaataaaagataaatctcaactttaataagttatcctgacacttgataaaaataaatatttggtattttgtggtcatgtaaaacttctttttgtatgaaaattgtgagaaatttaaatcagcaatagtaacacttagatttttataaactaacaaaaacttgctctcagtcaatataataaatgatagttaaactctaaggaagacctgggaaatgaaaacaatttatggaagtcccctacagtcagtttataagggcttcagtagtgatagacattgttataaaaacttgtaccatgttacatgtacactgcaccacagtctaaattcagaccagcatttgaaggactgcacatatttcatttcctctgatttatgctgtcacaaattgaaaatctgagtgtagttaggacaaaaaacaaagctaaccatatggcactaattttgattttaacattagtgtaacaaataaggtcgggacatatatttacatagatcccagacactcaagaattagcacagctgatgtaaaattctaaattaccatttacttccagatagagcagaggagaaacacctcactgcagtttcaacatgctttccaagaacaatatatacgacatatacattttcctgcctctctcttgtgacaatttctgttagaatttgttgggggtctgatggttaaaatcatgggcaaggccattctctacatcattgcttaatatttcaaaaataggtattagagcactatcagtggtccaaaattagttttagctacttattttgctccatgggttttgggcttttcaaagaatactatgtataatttgtaattgaaagcctttcagtaggatatccaaagttcaatgtgtttcaaaagggaaaacttttacttgtgggggtgggagttagatgtattaaaaaaacgaaactacaaaatccttttaagaaagtaataccaatttagactctagtttgtgttacgaggtattctttcaaattttttttaaaagccaactactgtcattaagaaataattttagatttgtgctctagcagaaaataactctgtacccatcaatcttattgccaacattccataccagtggtaggaaagatattctcattttttttattgaaccagacatttttataaaatactgattgactttgtacattatggatattatatatgaaattttgccttgtattctttcacttgaaaaaactccaaaattccacaatattttagtagttaacttcctattctttcttaaatttgatggagaagggaaaataaattgcagttattgattcttgccatctttgttttcttaaagaaatctatgcattttaaggataaaactaaagcatatgggtttacatgaaacatcaggatggattattgtacattgaattcattccgcgtataatgtggtatttcttactctgtccatcttggtagctgtcacttcaaaagaagacagtttccctgagtaatcatcacctacatggccattagagtatctatcggtgataattccatgatacagagtatcttggcattataaattcagtatcccaggacctaaacctttatgctacattttcgaagattttttaaaaataatattgttaatcagtaaaaaaaaaaaatatttttgatctaaacataggttctgcatatctgttagattttaaaaatgactggtgttttgtcttcacatttttgtctaagcaaggaatataagatttcaaataaaattttgaaccaaaaacatttataatgccgttctggtttttctattactttttatactgtactttaaaagcattaggctgaaagagtttattttggtggtcaaaaaaaatatgcttccactcatgtaactattttaaatgttaagaagtaaaataatgaaagatatgttaattactttattcagtaaagttttttaagaatgtttatctcagccagtaggcaaatacttggtgtaaaacaagttggtcttaaattgttgcaactcattagctagtgaagatattcatgtaaatatattttaggattgtaattaattttgaaaatgtagaaagctctttattccatgtaagtatgcaggatgcctgcttttttatgcagttgtggaaagaatgtaaaatgttttaatatattctttgttaatctgagaacttgatactgaatcgtttatgtgggagaaggaaggagtaacataaaacatgtttttatcactcaaagtaagcaatggaggtaacaaatattgtgcattttaacagtaatatttgaagatttgtagaatattcacctttaaaactagttagtatgcatttataattttaccagaatatacaactaacaattcaacagtgatgttctttgcatttgtggggagatgtgtgatgttcttggttttctggtttggaatggaacgtttatagccttgcctgtaaaaatgtgccccagcacttaatgagtgaccgtttgaatccatatgtagtcccattggtgctaatgagagtagctgctgtgaaacaggaataaaatgtgtctgttcacggaggtgcggtgtggatgcacctacaaggccaactctctgatcagggtgagggagagatggaagaattaacagatctaaagttggcctttgttgtctcaaattgggtttgtacacacatgcatgcatgtgtgtatacaactgtaatctggaacttcaggaagtaaaattatttgaagtttcttagtaaaaagtaattaggtataattccaaatagatttctgtataaattgtatctaactggattacaagtcagtttgacaatttacgatgtctcagtgatgtttctgcaataattgtgaaatgcattattgatttaaataatgctgacacgtactctttaaaagtgttctttaacactgactactaaactttaagttttaaaaaataggttttcatttatggctttttgtggttttagcactttaagaagtttaattttttgtaatttttaatatgctctttcagtgtatctcagcgggtactccagcttgtggcattcccatgtgactggggagaagacaaaattggtgtttagattctggaggagaaaaaatgagttacaatgtcaggtgtttttaaaaattccttttagagacagtcttttgggaaccaaagtattttactgtaaatctttaaaataacagaattcagtgctctttcatttgttaatgctgtccagatttttcacacagttatactcagttaatactagttttcagaacattagtccaaggctatttcaagttttccattgaatatatgcttatggttaaaagaaaaacgaatggttttataattctgtgtattttgtcatatgccttagcagagtaagtcatttttccattttacttaggaataagctttttcgaactgaaaattcatggtaaaataggatttctatctaatgttaatccattgcttatttgtattcaattccattgtctacagtttgcttaaatgttgactaagaatgattggagtcaataaatttgtactgtattttgcttcgaaa

SEQ ID NO: 30505 - DNA, 6213 bp, Homo Sapiens
cattggcgcccgagctgtgaccgccgccactggggcagccagcacaatcgggcggaggtggcgctgccccttcagacctgaaagatgtctgaaaattccagtgacagtgattcatcttgtggttggactgtcatcagtcatgaggggtcagatatagaaatgttgaattctgtgacccccactgacagctgtgagcccgccccagaatgttcatctttagagcaagaggagcttcaagcattgcagatagagcaaggagaaagcagccaaaatggcacagtgcttatggaagaaactgcttatccagctttggaggaaaccagctcaacaattgaggcagaggaacaaaagatacccgaagacagtatctatattggaactgccagtgatgattctgatattgttacccttgagccacctaagttagaagaaattggaaatcaagaagttgtcattgttgaagaagcacagagttcagaagactttaacatgggctcttcctctagcagccagtatactttctgtcagccagaaactgtattttcatctcagcctagtgatgatgaatcaagtagtgatgaaaccagtaatcagcccagtcctgcctttagacgacgccgtgctaggaagaagaccgtttctgcttcagaatctgaagaccggctagttggtgaacaagaaactgaaccttctaaggagttgagtaaacgtcagttcagtagtggtctcaataagtgtgttatacttgctttggtgattgcaatcagcatgggatttggccatttctatggcacaattcagattcagaagcgtcaacagttagtcagaaagatacatgaagatgaattgaatgatatgaaggattatctttcccagtgtcaacaggaacaagaatcttttatagattataagtcattgaaagaaaatcttgcaaggtgttggacacttactgaagcagagaagatgtcctttgaaactcagaaaacgaaccttgctacagaaaatcagtatttaagagtatccctggagaaggaagaaaaagccttatcctcattacaggaagagttaaacaaactaagagaacagattagaatattggaagataaagggacaagtactgaattagttaaagaaaatcagaaacttaagcagcatttggaagaggaaaagcagaaaaaacacagctttcttagtcaaagggagactctgttgacagaagcaaagatgctaaagagagaactggagagagaacgactagtaactacggctttaaggggggaactccagcagttaagtggtagtcagttacatggcaagtcagattctcccaatgtatatactgaaaaaaaggaaatagcaatcttacgggaaagactcactgagctggaacggaagctaaccttcgaacagcagcgttctgatttgtgggaaagattgtatgttgaggcaaaagatcaaaatggaaaacaaggaacagatggaaaaaagaaagggggcagaggaagccacagggctaaaaataagtcaaaggaaacatttttgggttcagttaaggaaacatttgatgccatgaagaattctaccaaggagtttgtaaggcatcataaagagaaaattaagcaggctaaagaagctgtgaaggaaaatctgaaaaaattctcagattcagttaaatccactttcagacactttaaagataccaccaagaatatctttgatgaaaagggtaataaaagatttggtgctacaaaagaagcagctgaaaaaccaagaacagtttttagtgactatttacatccacagtataaggcacctacagaaaaccatcataatagaggccctactatgcaaaatgatggaaggaaagaaaagccagttcactttaaagaattcagaaaaaatacaaattcaaagaaatgcagtcctgggcatgattgtagagaaaattctcattctttcagaaaggcttgttctggtgtatttgattgtgctcaacaagagtccatgagcctttttaacacagtggtgaatcctataaggatggatgaatttagacagataattcaaaggtacatgttaaaagaactggatactttttgtcactggaacgaacttgatcagttcatcaataagtttttcctaaacggtgtctttatacatgatcagaagctcttcactgactttgttaatgatgttaaagattatcttagaaacatgaaggaatatgaagtagataatgatggagtatttgagaagttggatgaatatatatatagacacttctttggtcacactttttcccctccatatggacccaggtcggtttacataaaaccgtgtcattacagtagtttgtaacatttgtagattggatagcatttttatgatttgatgagtttcttgtaaggttaccgtttctaagagttgtgctttatggccactgagagaattcagaataaattgaaagatggagtctaaaaattattagctgttacaaatggaacatttcattataacgtgatcactttgacttgagcaaatggtttaatttttatcttaaaaatcagttaagaatatataaaatcctactttggccaagtttgtttcttttcattatagtttatatgaaaagatcaccttaagtgaaattattttcctttaatcttttatgtatttattcacttttggaagctaggaatgagcaacacaaattttactctgaagtcagaagagctcatatataataattctaatgtcccacctattttcacttgtccattccatgtaccagcttagttatgatacttagtcacataattatctttgataaaggtagaggcacaaagaggcaaactaagcaagtcaaattctaatgtgtgtacttcataataattttttatccattttcatctttatattctgtaacatgaaacttacctaatcttcaaatgttagcttcattttttacctttgaaatacttaatctttctgaataaatataatgtgtctataaaataatgagactgattctggtgtctttagttattaagctggtatctagtcctataatgaacaaaggtgaagctgccttgaggagacaagtgaaaaatttttgcttcaaaggagctcacaagctaagtaaataaatgaaattaaggtatggggcatggtggcctcaggctgtctggaggtgtttggaaaggcttcttgagtgaggtggcctttgaactgaacttagtttttaaagtagcttttggaagagaaatgaggatttgctatgcagacagggaagggaatttcacttaaaaggaaggtcatttggagatgtgaagatacactgctttaaggaagcagggtagagctggaggataagagatgcagaccatgaagggccccattttatgctaaaggttttgtcctgtaggacatggagaacttctgaagaattttcaaggcgggtgggataagattatattgtattttagattacagtagtccccccttatcttcaggatatatgttccaagacccccagtggatgctggaaaccagggatagaacataattctatatatactatgcatgaatttctttttccttctttacaatctcacacataggtttgttcttactatagatcttaccaatctcagcatacttttatttctcttgagaaccttcaccctttcacttaaaggaggcgctttatagcttctctttggcatatccaaatgccagcatcactgttgtattttggggtcattattaagttacttaatcatccttaatccttatcttagggatacttgaacacaaacactggtaggataacagtatatctgattaacagactgctactaggtgattaatgggtgggtagtgtaaatacacaagaaaaggatgattcacatcccatgtgggatggagcagaactgcattatttcattacattactcagaacaggcatataattgaaaacttatgaattattattttttaattatttgagatggaatcttgctttgtcagccaggctggagtgcagtgacacgatctcagctcactgcaacctctgtctcctgggttcaggtgattctcctccctagtctcccaagtagctgggactataggcacgtgccaccacacccggctaattttcatatttttagtagagatggggtttcaccatgttggccaggctgttcttgaaatcctgacctcaagtgatccacacatgtctacctcccaaagtgctgggattacagtcgtgagccactgtaccccgcctaaaactgatgaattatttctgaaattttctatttaacattttcagaccacagttgaccacaggtaacggaaacctcaatcacagaaagtaaagccgtggatacggtgggactaatgtattggtagcagcctagaggattgatgggaaaggtatgaagctagaaggtggtcaatataatacagacatgagctgatgaacatctaaactgggactatactagtaggagaggaaaggaaaaaacatttggaaaatagtaacattgatatttcttgtgaaggagaagtagaaagtaacagtgacttctagatttctgggttgggtcatctgttgttggatagtagtaccactgagatagggaattcaaggtttggggcaagggtaattggagatgagaattgtgtttggaggtaactactgacattcaagtggagagggttagttggcagttagttctatggtcatctcttttgccgagactgtatatttatcagactcctgggagaacaccaacatccatggggttgtagggaaggctaaggacaagagtggggagtggtaccttgaaaatccaaaagccatctcaagtaaaaggaataaatgtgtcatgctttttaaaaagttgatgtgcggaaaatgttttcttggcttggaaactgggcggccaggggatgacagtatggacttccagtgaagtagtgacggaagcctgatcatagacattaaggaaagcggtgtaggtgttgtgagcttttgctgtaagaaaaagttgagacttttgttttgctttgtttgtgagagatgtgtatgtatttctgctgagtgataaagccagcggggagggactgatttttataggaaaggaggaaaaataatggaaacacatctcattattttattgtcacatttcttttctttgttatcttttgagtgtttcccttttttgccagtagagttattgtctattttttctttctataggacaaaaaaactaatacagactcctttatttttatatggatatactaggattgtaattcagatatttaatatcttttatcagtgttcagatcatagattaatggagaaaacatttaaaattgttttaaatttaaatacattgaactctaacatagatgaaaaatgtgtttactgctttcagtcgacctgataaaaagcaacgtatggtaaatattgaaaactccaggcatcgaaaacaagagcagaagcaccttcagccacagccttataaaagggaaggtaaatggcataaatatggtcgcactaatggaagacaaatggcaaatcttgaaatagaattggggcaattaccttttgatcctcaatactgattcacaattgagttaaattagacaactgtaagagaaaaatttatgctttgtataatgtttggtattgaaactaatgaaattaccaagatgacaatgtcttttcttttgtttctaagtatcagtttgataactttatattattcctcagaagcattagttaaaagtctactaacctgcattttcctgtagtttagcttcgttgaattttttttgacactggaaatgttcaactgtagttttattaaggaagccaggcatgcaacagattttgtgcatgaaatgagacttcctttcagtgtaagagcttaaagcaagctcagtcatacatgacaaagtgtaattaacactgatgtttgtgttaaatttgcagcagagcttgagaaaagtacattgttctggaatttcatcattaacattttataatcttacactcacttcttgtctttttgtgggttcaagagccctctgacttgtgaagaatttgctgccctcttaagagcttgctgacttgttttcttgtgaaattttttgcacatctgaatatcgtggaagaaacaataaaactacaccatgagg

SEQ ID NO: 30506 - DNA, 4096 bp, Homo Sapiens
acgatggcagcgtcagtggcagctgcagcccggaggctgcggcgggccattcgaaggtcgcccgcatggcggggcctcagccatcggccgctctcatcggagccccctgcagccaaggcctcggccgtgagggccgcctttctgaacttctttcgggaccgccatggccaccggctggtgccctccgcttccgtgcggccccgcggcgaccccagtttgctttttgtcaatgcgggcatgaaccagttcaagccaatctttctgggcaccgtggatccacgaagcgagatggcaggcttccgacgtgtggccaacagccagaaatgtgtgagagctggaggacaccataacgacctggaagatgtgggtcgagacctttcccatcataccttctttgaaatgcttggcaattgggcctttgggggtgaatattttaaggaggaggcttgtaacatggcctgggaactgctgactcaggtctatgggatccctgaggaaaggctctggatctcctactttgatggtgaccccaaggcagggctggacccagacctggagaccagggacatctggctgagcttaggggtgcctgctagccgtgtgctttcctttggaccacaagagaacttctgggagatgggggatactggcccttgtgggccctgtactgagatccactacgaccttgctggtggggtgggagccccccagctggtagagctttggaacctggtcttcatgcaacacaacagagaggcagatggaagcctgcagcccctgccccagcggcatgtggacacaggaatgggcctggaaaggctggtggctgtgctgcaaggcaaacactccacctatgacactgacctcttttccccgctgctcaacgccatacagcagggctgcagggcacccccttacttgggccgagtaggggtggcagacgaggggcgcacagacacagcgtaccgcgtggtggctgaccacatccgcacactcagtgtctgcatctctgatggcgtcttccctgggatgtcaggtcccccgctggttcttcgtcggatcctgcgtcgagctgtgcgtttctccatggagatcttaaaggcaccacctggcttcctaggcagcctggtacctgtagtggtggagacactgggagatgcttatccagaactgcaaaggaactcagcccagatcgccaacctggtgtcagaggacgaggcagccttcctggcctccctggagcggggtaggcggatcattgatcggactctgaggaccctggggccttcagatatgttccctgctgaagtggcctggtccttgtcactgtgtggagacctgggactccccttggacatggtagagctgatgctggaggagaaaggggtccagctagactccgctggactggagcggttggcccaagaggaggcccagcaccgggcacggcaggctgagccagttcagaagcagggattgtggcttgatgtccatgcgcttggggagctgcagcgccaaggagtgcccccaactgacgacagccccaagtacaactactccctgcgacccagcggaagttatgagttcggcacctgtgaggcccaggtgttgcaactgtatacagaggacgggacagcagtggcctccgtggggaaaggccagcgctgtggcctcctcttggacaggaccaacttctacgcagaacaggggggccaggcttcagaccgtggctacctggtgcgggcagggcaagaggacgtgctgttcccagtagcccgggcccaggtctgtggaggtttcatcctgcatgaggcagtagcccctgagtgcctgcggttaggggaccaggtgcagctgcatgtggatgaggcctggcgtctaggctgcatggcgaagcatacggccacccacctgctgaactgggcactgaggcagaccctgggccctggcacagagcagcagggctcccatctcaatcctgagcagctgcgcttggatgtgaccacccagaccccattgaccccagagcagctccgggcagtggagaacactgtgcaggaggccgtggggcaggatgaggctgtgtacatggaggaggtgcccctggcgctcactgcccaggtccctggcctgcgctctctggatgaggtttacccagaccctgtgcgggtggtatcagtgggggtgcccgtggcccatgcattggacccagcctcccaagccgcactgcagacctctgtggagctatgctgtgggacgcacctgttacgtactggggctgtaggggacctggttatcatcggggaccgccagctttccaagggcactacccgcctgctggccgtcactggggagcaggcccagcaggcccgagagctaggccagagcctggcccaggaagtgaaagcggccactgagcggctgagtctggggagccgggatgtggcggaggcactgaggctgtccaaggacataggacgactcattgaagctgtggaaactgctgtgatgccccagtggcagcggcgggagctgctggccacagtgaagatgctgcagcggcgtgccaacactgccatccgtaagctgcaaatgggacaggctgcaaagaaaactcaggagctgctggagcggcactcgaaggggcctctgattgtggacacagtctctgctgagtctctctcagtgctggtgaaggtggtacggcagctgtgtgagcaggcccccagcacgtctgtgctcctactcagcccccagcccatggggaaggtgctgtgtgcctgtcaggtggcccagggtgccatgcccaccttcacagcagaggcctgggcactggcagtgtgcagccacatggggggcaaggcgtggggctcgcgagtggtggcccaaggcaccggaagcactactgacctggaagctgccctcagtatagcccaaacctatgccctcagccagctctgacccaggtccgcccagggacccacatggactaaaggcaatgccaggagccctgaaggagccagcagaaccttcccacatgctgaagcgaggactagaggctggaggccaagcagctgagccaaagaagatcacctgggccagggcctacatgacacaaggagacatgggctagggaaggcagaactgggcccaaagacacacacccccttggtgaaagagaagacatggacaattatggctgtgactgcacattagaaattatttcactggccgggtgtggtggttcacacctgtaatccaagcactttgggaggccgaggcaggtagatcatgaggtcagaagatcaaaaccatcctggctaacacggtgaaaccccatctctactaaaaatacaaaaaattagccgggtgtggtggcacacacctgtagtcccagctactcgggaggctgaggcagaagaatcgcttgaacctgggaggtggaggttgcagtgggccaagatcgcaccactgcactccagcctgggtgacagagcgagactctgtctcaaataaataaattatttcacagaggatagcaagctccagaaggttctattacctttaaaaaagagtagttttgcccctcccagcaacctggtatgggtgccctaagaccagtctgaactcacactgtctgaaaggccacccaggatccaaatcgggccatcttcattgccatgagtgttcggacaggctctgcgtgccaggcaacagtgggcagacaaagggctccctggctactgggaagatacagaaccatcctgtgaaaatcatttcagcactggagaccttctttgctattacttctttcattaacaatgacctctaatttaaattgggccctgctggtttgttgatgaattgagcaactgagaacgtggcgggcactaaactgacagttccttccttcatggagcctgcttcatgtggaggaaacaggaaataaagcaaaagaagagggtcaggcttggtggctcatgcctataatcctggcattttaggaggctgaggttggagaatcgcttgaggccagaagtgcaagaccagcctgcgcaaacagcaagaccctgtctacaaaaaaaaaaaaaaaaaa

SEQ ID NO: 30507 - DNA, 4096 bp, Homo Sapiens; identical to SEQ ID NO: 30506

SEQ ID NO: 30508 - DNA, 5894 bp, Homo Sapiens
ctctgcctttcctctcgcagccacccttcctctcagaccagtacggtggccgacgggagtcagacgctggggatgaatgaaggatcaacaaacagtaataatgactgaatgtacaagtcttcagtttgtcagcccttttgcttttgaggcaatgcagaaggtggatgttgtttgcctggcatctttaagtgatccagaattaagacttcttctgccctgtttggtacggatggcactttgtgcacctgctgaccagagccaaagctgggctcaggataagaaactcatccttcgccttctttctggagtggaagctgtcaactccattgttgcattgttgtccgtggactttcatgctttagaacaagatgccagcaaagaacagcagcttaggcataaacttggaggaggcagtggagagagcatcctggtatcacagcttcagcatggactgacgttagagtttgaacacagtgattcacctcgtcgattgcgtcttgtgcttagtgaactgttggcaattatgaacaaggtgtctgagtccaacggagaattttttttcaagtcttctgaactttttgagagtccagtatatttggaggaagctgcagatgtactttgtattttacaagcagagctcccttccttgctccctatagttgatgtagctgaagctttgctacatgttagaaatggtgcctggttcttgtgtctcttggtggccaatgttcctgatagttttaatgaagtttgtaggggcctgataaaaaatggagaacgacaagatgaagaaagtcttggaggaaggcgcaggacagatgccttacgcttcttgtgtaaaatgaatccttctcaggccctcaaggtccgaggcatggtggtggaagaatgtcacttgccaggccttggtgtggctttgacattggatcatactaaaaatgaagcttgtgaggatggagtgagtgacttggtttgttttgtaagtggtttgcttcttggaacaaatgcgaaagtccggacttggtttggaacttttatccgaaatggacagcagagaaaaagagagaccagcagttctgtcctttggcagatgagaaggcagcttcttctggagttgatgggcattcttcccacagtaagaagcacccgaattgtggaagaagctgatgtggatatggagcccaatgtgtctgtgtattcggggctgaaagaagagcatgttgtgaaagccagtgcactcttacgtctgtactgtgctttgatggggatcgctggactcaaaccaactgaagaagaagctgagcaattactgcagttgatgacgagccgtcctcctgctacgccagctggggttcgctttgtttcactttccttttgtatgctactggccttttctacacttgtcagtacacctgaacaggagcagctgatggtggtgtggctaagttggatgataaaagaagaagcgtattttgagagtacttcaggcgtctctgcttcttttggggagatgttattattggtggctatgtactttcacagcaaccagcttagtgctatcattgacttggtctgttccactttggggatgaagattgtaattaagccaagctccttgagcaggatgaagacaatcttcacacaggaaatttttactgagcaggttgtcacagctcatgcagttcgggtccctgtcaccagcaacctgagtgccaacattactggatttttgcctattcattgtatttaccagcttctcaggagccgttcctttaccaagcacaaagtgtcaataaaagattggatttatagacagctgtgtgaaacctctactccacttcatcctcaattacttcctttgattgatgtgtacataaattctatacttactcctgcgtcgaaatctaatccagaagccacaaatcagccagtcacagaacaggagatactcaatattttccaaggagtcattgggggtgacaacatccgccttaatcagcgtttcagtatcacagcacagcttttggtgctctactatatactgtcttatgaagaggctcttctagcaaacacgaagactttagctgccatgcaaagaaagcccaaatcatattcttcttctttaatggatcagattcctatcaaattccttattcgacaggctcaagggctgcagcaggagttgggagggttgcattcagctttactacgtctccttgctactaactacccacatttatgtattgtggatgactggatttgtgaagaagaaatcacagggactgatgccctgctacggcgaatgctcctgactaataatgctaaaaatcattctcccaaacaactccaagaagcattttcagctgtcccagtaaatcacacacaagtgatgcagattatagaacacttgactctactctctgccagtgaacttataccatatgcggaagtgttaacatccaatatgagccagctattgaattcaggggttccacggagaattctgcaaacagtcaataaactatggatggttcttaatactgtgatgcctagaaggctatgggtaatgacggttaatgcacttcagccttcaataaagtttgtacgacaacaaaagtatactcagaatgacctgatgatagatcctctcattgtcctaaggtgtgatcagagggttcacagatgccccccactgatggatattaccctacacatgttgaatggatatcttcttgcatctaaagcctaccttagtgctcatctgaaggaaacagagcaagataggccttcccagaataatacaattggtttagttggacaaactgatgctccggaagttaccagggaagaattgaaaaatgcattactggccgctcaggatagtgcagctgtccagattctcttagagatttgcctacctactgaagaggagaaagcaaatggtgtcaatccagatagcttgttaagaaatgttcaaagtgttattaccaccagcgctccaaataagggaatggaggaaggagaagacaatttgctctgtaaccttcgagaagttcagtgccttatctgttgtctcttgcaccaaatgtacattgcagatcccaacattgctaagcttgttcactttcagggttatccatgtgaacttttgcctctgacggtcgcaggtattccatctatgcacatctgtctagatttcatacctgagcttattgcacagccagaacttgagaaacagatatttgctatccagttgctttctcacttgtgtatacaatatgcattaccaaagtcacttagtgtggctcgtttagctgtcaatgtcatgggaactttgttaacagttttaacacaggctaagcggtatgctttttttatgccaactctgccaagtttggtctctttttgtcgagcatttcctccattgtatgaggatattatgtctttgctgatccaaatagggcaagtttgtgcctctgatgttgccactcagacaagagacattgatccaattattacacgtcttcaacaaataaaggagaaaccaagtggatggtctcaaatctgtaaagattcatcttataaaaatggatccagggacactggaagcatggatcctgatgtacagctctgtcactgtattgaaagaacagtaattgaaataataaatatgagtgttagtggaatttaaaacaaaatttaaaacaacaaaaagttgtttgctgcatatacccaacatgaatctgcatattagtaacaactctaaactgaatgggaacagtaaagtattgtcttggaatcactaaaacaattcaattcaacatgagtatagtttagaactttatgagaattatgcttgcttgtttctgattggcacatctttggatctactttgctgatatgtttctattgtagcagctgagctttttttttttccactgggaacacatgtaagaaactcattattggaaagggaatttggccttgtatttagcttttgaagtgaagactgccatgcctttaatttcttataaaaatgagtctgtgggtagccctagtgtttattttaactgtgagcttgtaacagaatgtgacaaagatgcaaagatgggagaggaaaaaagggtaaagggaaaggagaattaaggaaataataggagttaaaaacacaagtagaaatctcaaagatttgcagtgcaagtaatagtaatgcaagttggaattctagttctcaagaaagagtattgagaagacttttaaaaaggcaagtagcttttgtaaatgatttctgtggaaatacagatgaggatttaaagatttcacatatttgcttcaatttttattaatatatgaagccatatgtttaaagagatacttgaataatttggaattttaagatactggtgtaaaagtgtttacagaaacatctttgttcaaagaagaacctgagagatctcatttagttttatgttttaaatttatttttataatgctttattaacttacctaatgctcagaggggggaaatatgtatcaaattaaatgaaggtagagcaataaaacccactggattaaagagctcttggtttgtcatcaggattataattcatatcttactttgagaagatctttgagtaagaaaatgcagtgtttgaacctgaggaaaagttaaagtgtagaaaatattgtcttgccgaaggattttgcagtcctctgtcagtaacttccattgattaggcagacatattcaggtaaaccctaatcattaaaaaaaaattatcaatgtagaaagtaattcccttttttctctctgagatatacctcaatcacacacttccccacccccacttgaaacagacctcttcacttgtgttttttttttttttttcctgaggtggagtcttcccctgttgcccaggctggagtgcagtgggatgatcttggctcactgcaacttctgccacctgggttcaagggattctcgtgcctcaacctcctgagtagctgggactgcaggcacgcgccacctgtatttttgtatttttagtagagacgggggtttgccatgttgcccagactggttttgaactcctggcctcaggtgatctgcccaccttggcctcccaaagtgctgggattacaggtgtgagccaccgcacctggccagaccgcttcacttgtaaaagaaattaggctaataagaaggtgtagtttttgagaaatgaaatttaactttagccttttcactagtaaatagtcacatctcattttcttcctttgtaaaatggggttactactggccctacctcatattctatgagaatgagtttgtagctgtttcaaatcatgaagtgcatagtatcacatgtgatagaatatttataactttttattagatgcttaatgttcaattaagtaattttgatgtgaaaaataaaagtaataaaagtatcttaaaaatagcataagaattttcatatttttaaacaaggcagttttgtagtcccttaagattaaatacaactgctccttttttttttaaactgaggccttgcgatattttgtgtgaatagatatgccctaggagttcagaaaaagttaaaagtatgttttctaattaaatgcagtgcacattcctggatcaatattcaaagactggtcataacctgctgtgttaaaataatcacatatgctctttttcatcagatttgttgatgatgtaaataaaatgtgtaaatatattagtaaatgttaatattcatgtattttaagttaaggttataaaatttgtcacaatgtgtttttttattcaagtgaaaacagatgtgtgcagctattttgaatattggtttataaacattcatattctttatcaaacaaaaaaaaaaaaaaaa

SEQ ID NO: 30509 - DNA, 5005 bp, Homo Sapiens
gggaggggcgggatttcctgcgggaggcgccgagccggccttggaaaaggagaaggagaaaggggggcaggggggagtgggagccaccgtcctgagtgccagggaccgagcagggccagccggaccccggcgggcggccgggagagagccctgagaccagtgcaccgctgctgcctgaggcccaagggaatgctggctgctctctgggtgggcactggtgttccacagccaagccgggaagattggtgtgcccagtcccagcccatcctggagctgtcggaagccacaagctgatatccatccagatttccatgtagccttcaccccctcaaagattagctttccttcgtgtggtggcagttcacggagcacctttgggagtatccctcagtacctgacgaggagcccactgcctgggacaccagacttgctcccccggaaccgggagccctccaaggggctgtggcatggcgccctgacgccccagcttggacccgttgcctgcctttgccctggactcctgagtgtagagctcagcccaggagccagtatgggtcgtgaacaggacctgatcctcgccgtcaagaatggagatgtgaccggtgtgcagaaactggtggcgaaggtcaaggccacaaagacaaagctcctgggctccacaaagaggctcaacgtgaactaccaggatgctgatggattctctgccctccaccacgctgctttggggggcagcctggagctcatagccttgctgctagaggctcaggccactgttgacatcaaggacagcaatggcatgcgcccgctgcactacgcagcctggcagggccggctggagcctgtgaggctgctgctgcgcgcctctgcggctgtcaatgccgcctcgctggacggacagatccccctgcacctggctgcacagtatggacattatgaggtgtcagaaatgctcctccagcatcagtccaacccatgcctggtcaacaaggccaagaagacgcccctggacctggcctgtgaatttggccgactcaaggtggcccagctgcttctgaacagccacttatgtgtggcactgctggagggtgaggccaaagacccgtgtgaccccaactacaccacgcccctgcacttggctgccaagaatggccacagagaagtcatcaggcagctcctgagagctgggatcgagatcaaccgccagaccaagacgggtacggcgctccacgaggccgcactgtatggcaagaccgaggtggtgcggctgcttctggagggaggtgtggacgtgaacatccggaatacgtataaccagacggcgctggacatagtgaatcagttcaccacctcccaggccagccgggaaatcaagcagctactgcgggaggcctcagggatcctgaaggtccgagcgctcaaggatttctggaacctccacgatcccactgctctcaatgtccgggcaggggatgtcatcacggtgctagaacagcatcccgacggccgctggaagggccacatccacgagagccagaggggcacagaccgcataggctacttccccccgggcattgtcgaggtggtcagcaagcgggtgggcatccctgcagcccgcctcccctccgcacccacccccctgcgcccaggcttctcccggacaccgcagcctcctgccgaagaacccccgcaccctcttacctacagccagcttcctcgggtgggcctcagcccagacagcccagcaggtgacaggaatagtgtgggcagtgagggcagcgtgggcagcatccgcagtgccggcagcgggcagagctctgagggcactaatggccatggccctggcctcctgattgagaacgcccagccactgccctctgctggagaggaccaggtgctgccaggactccacccgccgtccctggcagacaacctgagccaccgccctctggccaactgccgctctggggagcagatcttcacccaggacgtgcggccagaacagctgctggaggggaaggacgcgcaggccattcataactggctaagcgagttccagctggagggctacactgcccactttctgcaggccggctatgatgtgcctaccatcagccgcatgacacctgaggacctgacggccatcggggtgaccaagcctgggcacaggaagaagatcgcctcagagatcgctcagctcagcatcgccgagtggctgcccagctacatcccaacggacctgctggagtggctgtgtgcactggggctgccacagtaccacaagcagctggtgagcagcggctacgactccatggggctggtggccgacctcacctgggaggagctgcaggagattggggtcaacaagctcgggcatcagaagaagctcatgctgggggtgaagcggctggcggagcttcggcggggcctgctgcagggggaggccctcagcgaaggcgggcgccggctggccaagggtccggagctgatggccatcgagggactggagaacggagaaggcccagctacagctggcccacggctcctcaccttccagggcagcgaactaagcccagagctacaggcggccatggcagggggtggccctgaaccactccccctcccacctgcccgctctcccagccaggagagcatcggggcacgctcacgggggtctggccactcacaggaacagcctgccccacagcccagcggtggagatcccagccccccccaggagaggaacctcccagagggcacagagcggccccctaagctttgttcttcacttcctggccaaggacccccaccctatgtttttatgtacccccagggctcaccctctagcccggccccagggccacctcctggcgcaccctgggccttctcctacttggccgggccccctgccactcccccagacccgcctcgacctaagcgccggtcccacagcctaagccgccctggccccacagagggggatgctgagggggaggccgaagggccagtgggcagcaccctaggcagttatgctacccttacccggcggccaggacgcagtgcccttgtccggaccagtcctagcgtgaccccaaccccagctcgggggactcctcgcagccagtcctttgccctgcgggcccggcgcaaaggccccccgcccccgccccccaagcgcctcagctccgtctctggccccagcccggagccacctccactagatgggagcccagggcccaaggaaggggccacagggccccgaaggcgaacactgagtgaacctgctggcccctcagagccccctggcccacctgccccggctgggcccgcgtcagacacggaggaggaggagccaggccctgaggggacgcccccatctcggggcagctctggggaagggctgccgtttgcagaggaagggaacctgaccatcaaacagcgcccgaagcccgctggccccccgccccgagagacacccgtgccccccggcctcgatttcaacctcacggaatcagacactgttaagcggaggcccaagtgccgggagagagagccactgcagaccgcactgctggccttcggagtggccagtgccacgcctggccccgctgccccactgccttccccaactcctggcgagtctcctccagcttctagccttccccagcccgagcccagcagccttccagcccaaggagttccaaccccccttgctcccagccccgccatgcagcctccagtgccgccctgcccagggccaggtctggaaagctcagcagctagtcggtggaatggggagacagaacccccggccgcccctgctgccctcctcaaggtgcccggagcaggaacagcccccaagcctgtgtcggtggcctgcacccagctggcattttctggccctaagctagcgccccggctcggcccccgcccagtgcctcctccacggcctgagagcactgggactgtgggcccaggccaggcccagcagagactggagcagaccagctcgtccctggcagctgcactgagagccgcagagaagagcattggcaccaaggagcaagagggcacccccagcgcctccaccaagcacattctggatgacatcagcaccatgttcgacgccctggctgaccagctggacgccatgctggactgagccctccagcagtgcccactgtgacctgccgaagtccactgcctttgccccagcacagaagaggcccctgccaccctagggacgggccaagggctggtcaggctgaagtgcccctcctagcagggccccttcccactcagcccgcggctgtgggcaccacagctcttgtggggcagcccaccttagaacctgactagcgagggacctccgctgcatctcagcaaagcccctcccagggtttgatcgattgagcaggacagccctgctcctggacagggaccctggtaagagctctctcctcagggaggaagtaggggtggggctttgggggtgctttctctgtaccccccagcccatgtcccaagttgtgccaagggaatgcctcttgccacccaccatcctgcccaggccctgagaggctggaggaggcgtgtgtctggccgggccccctctccgtaggtgtacagaggacatgtaaatacacagcggtggtgcccaggcagctcctgcccccgccttccctcactgaggcagggctagcaggggtgggaggcagtggggttaacagatcccacaagtcctaacttttcaattgtaaatgttattttctaagcagagagaaatgcatatattttaaatggaatttattctatcaactgcctgagaggacacaatgggggaggggcttcggaccacagcaggagccccgactgcccacctgagggcagggagagcctgaccccattggcccaggccctggctctgtaaccattaacctcttcccccaactaacaccaatgaaaacaccattccacgtgaaaaaaaaaaaaaaaaaaaaaaaaaaaa

SEQ ID NO: 30510 - DNA, 6431 bp, Homo Sapiens
gagagcagggtcatcgtgaggcctgaagtctcttacgcttttggcagctcccctcgcagcccctctggaaacgtacagcctcaggagcagccagtggcttgggacctggggtggtgtgtgtctgcggagcttcttgggctgccccatttcctagcggcccccacctccccacttcccgctcagagttagagataaggatctcagacttttgcctgagtaagggtctccgcactctttatccatttggttttcgatttcccgtttttgtttcttatttcaccaattctggtacacgctagtttttaaggctggaggttctcgagcgcttgctgccaaggactcccccaccccctcccccactgatggagtccgaaatgctgcaatcgcctcttctgggcctgggggaggaagatgaggctgatcttacagactggaacctacctttggcttttatgaaaaagaggcactgtgagaaaattgaaggctccaaatccttagctcagagctggaggatgaaggatcggatgaagacagtcagtgttgccttagttttgtgcctgaatgttggtgtggaccctcccgatgtggtgaagaccacgccctgtgcacgcttggaatgctggatcgatcctctgtcgatgggtcctcagaaagctctggaaaccatcggtgcaaatttacagaagcagtacgagaactggcagccaagggcccggtacaagcagagccttgacccaactgtggatgaagtcaagaagctctgcacgtccttacgtcgcaacgccaaggaggagcgagtcctctttcactacaatggccacggggtgccccggcccacagtcaacggggaggtctgggtcttcaacaagaactacacgcagtacatccctctgtccatatatgacctgcagacgtggatgggcagcccgtcgatcttcgtctacgactgctccaatgctggcttgatcgtcaagtccttcaagcagttcgcactacagcgggagcaggagctggaggtagctgcaatcaacccaaatcaccctcttgctcagatgcctttgcctccgtcgatgaaaaactgcatccagctggcagcctgcgaggccaccgagctgctgcccatgatccccgacctcccggctgacctattcacctcctgcctcaccacccccatcaagatcgccctgcgctggttttgcatgcagaaatgtgtcagtctggtgcctggcgtcacactggatttgatagaaaagatccctggccgcctgaacgacaggaggacgcccctgggtgaactgaactggatcttcacagccatcacagacaccatcgcgtggaacgtgctcccccgggatctcttccaaaagctcttcagacaggacttgctggtggctagtctgtttcgaaattttttattggcggaaaggattatgaggtcgtataactgcactcccgtcagcagcccgcgtctgccgcccacgtacatgcacgccatgtggcaagcctgggacctggctgttgacatctgtctgtctcagctgccgacgatcatcgaggaaggcactgcgtttcggcacagcccgttcttcgccgagcagctgaccgcattccaggtgtggctcaccatgggcgtggagaaccgaaacccacccgaacagctgcccatcgtcctgcaggtgctgttaagccaagtgcaccggctgagagcattggacttgcttggaagatttttggacctgggtccctgggcagtgagcctggccttgtctgtcggcatcttcccctacgtgctgaagctgctccagagctcggcccgagagctgcggccacttctcgttttcatctgggccaagatcctcgcagtggacagctcgtgccaggcggacctcgtgaaggacaacggccacaagtacttcctgtcggtcctggcggacccctacatgccagctgaacaccggaccatgacggctttcattctcgccgtgatcgtcaacagctatcacacggggcaggaagcctgccttcagggaaacctcattgccatctgcctggagcagctcaacgacccgcaccccttgctgcgccagtgggtggccatctgcctcggcaggatctggcagaacttcgactcggcgaggtggtgcggcgtgagggacagcgctcatgagaagctctacagcctcctctccgaccccattcccgaggtccgctgcgcagcggtcttcgcccttggcacgttcgtgggcaactctgcagagaggacggaccactccaccaccatcgaccacaacgtggccatgatgctggcccagctggtcagcgacgggagccccatggtccggaaggagctggtggtggctctgagtcatcttgtggttcagtatgaaagcaatttctgcaccgtggccctgcagttcatagaagaggaaaagaactacgccttgccttctccagcaaccacagagggagggagtttgaccccagtgcgagacagcccgtgcacccccagacttcgttctgtgagctcctatggaaacatccgtgctgtcgccacagccaggagcctcaacaaatctttgcagaacctgagtttgacagaggaatctggtggcgcggtggcgttctcccccggaaacctcagcaccagcagcagcgccagcagcaccctgggcagccccgagaatgaggagcatatcctgtccttcgagaccatcgacaagatgcgccgcgccagctcctactcctccctcaactccctcatcggagtttcctttaacagtgtttacactcagatttggagagtcctgctgcacctggctgctgacccctatccagaggtctcggacgtggccatgaaagtactcaacagcatcgcctacaaggccaccgtgaacgcccggccgcagcgcgtcctggacacctcctccctcacgcagtcggcccccgccagccccaccaacaagggcgtgcacatccaccaggcggggggctcccctccggcgtccagcaccagcagctccagcctgaccaacgatgtggccaagcagccggtcagccgagacttgccttctggccggccgggcaccacaggccccgctggggcgcagtacacccctcactcccaccagttcccccggacacggaagatgttcgacaagggcccagagcagactgcggacgacgcggacgatgctgctggacacaaaagtttcatctccgccacggtgcagacggggttctgcgactggagcgcccgctattttgcccagcccgtcatgaagatcccagaagagcacgacctggagagtcagatccgcaaggagcgggagtggcggttcctgcgaaacagccgtgtcaggaggcaggcccagcaagtcattcagaagggcattacgagattggacgaccaaatatttctgaacaggaaccccggcgtcccctctgtggtgaaattccaccccttcacgccgtgcatcgctgtagccgacaaggacagcatctgcttttgggactgggagaaaggggagaagctggattatttccacaatgggaaccctcggtacacgagggtcactgccatggagtatctgaatggccaggactgctcgcttctgctgacggccacagacgatggtgccatcagggtctggaagaattttgctgatttggaaaagaacccagagatggtgaccgcgtggcaggggctctcggacatgctgccaacgacgcgaggagctgggatggtggtggactgggagcaggagaccggcctcctcatgagctcaggagacgtgcggatcgtccggatctgggacacagaccgtgagatgaaggtgcaggacatccctacgggcgcagacagctgtgtgacgagtctgtcctgtgattcccaccgctcactcatcgtggctggcctcggtgacggctccatccgcgtctacgacagaaggatggcactcagcgaatgccgcgtcatgacgtaccgggagcacacagcctgggtggtgaaggcctccctgcagaagcgtcccgacggccacatcgtgagtgtgagcgtcaatggagatgtgcgcatctttgatccccggatgcctgagtcggtaaatgtgcttcagatcgtgaaggggctgacggccctggacatccacccccaggcggacctgatcgcatgtggctccgtcaatcagttcaccgccatctacaacagcagcggagagctcatcaacaacatcaagtactacgacggcttcatgggccagcgggtcggcgccatcagctgcctggccttccacccgcactggcctcacctggccgtgggaagcaacgactactacatctccgtgtactcggtggagaagcgtgtcagatagcggcgtgacccgggcccaccaggccacggccgcctgctgtacatagtgaagctgtcactcgccggggcacggggcgtcggctgctgcggccccgcagtgtgaacgttggctgctgccttagctgctgatgacggcaggagggccctgctactcgcttttgtctgtcttcgctgtcgtgtctggaatgtcagggaaggggagggctcgggttgacggtggcttcccactgagcaccagcatccaggtgcacccccgcggccacggcgcctctgtccctctcctgttctgtgtttctctgagacgctgaaaggggaaacacctcactttatttccatgtaatcagagcattagctgcagaaaaacccccagacagagccctggcggagaggcaggcgctggggctcctacgggtccctggggcagctgtccccatcaggccaagagcgagcgagaggcgctgccccagccaggcccaccacctctcacagtcagtgcacgcaagcagggacatttcctagccagctgggggacactggaaattcgggaaaccaagagagaggaagaaggagacgcccctccaactggcgggtgtgaaggaagccgcccaggggtccgggctgtccttggccgctggcagcatcactgagcaggaagcgcacagcccaccctccccgcacctccaggtctctggactccagttttggcccctctcacacagagctgtcagcaggggccgctgtggcggtgcacaggggaggcaggtccttggcgaggtagcccctgccttaatccacggggctcctttccctccgaagggctgctcttccccacaggcgcggggacagcagcccgacctgtggtctccatgcctgtgccctcacacaggtgtagcacacgcatgtgcagatggcaccacggccggcacctgggggcacacacatgcaggcggcgtggtctccctgctctgtccccacacgttcctcacatacaggcaagaggcactgccgggtcccggacggctccgggtgacaccagccccgtctccagccttgagccgcccatgctgatgcgacctcggctgacagctgggcctgtggtgcagacaggagctgtgtggacagtcccgcccaggaggggccgcagggcgtgtatgagcagttttgcaaacagaacacaaccacaatgatggtattttgaaaagtgttctttccgtgttcgtcgggaatcaggattattgagaggtgaaggagccaggtggcttcattctggcggtgagaggcccatgaccacgggagtgagagctggtgtggcgaggcccggctctcctgcggtgtggctggtggcctgccgtggccaagagcatcttctgggtggatggaaccctgcctggtcacatttggccagagacacacctggccctcagggggctgagctggagactgagctggggctggccgggacgtgacaaggcaggacagaggcggcccctccgctgctcctttttggaatgcgagctcccaccagaagaaggttccggcacgaatcccatccccacgtctgggccgagaaagcagcccgggtccggaaggtgtagagagtcccggcctcactcagctcacagggcgtgccaggcggcaacaccagaatcttccagaagcccagctccacccgcacacgcagcttcccatccagtccttcaactcaattcttacccaacacgcgtttccgtttgttttgagacaaaatcaccacctgtcaaaaggcaggtggctccagaggggtcaagacccccccccccgcccccgctccaccctggagcccacccccatgggcactgcgtgccgcctgcacgtgggctgtcttcacaggtctgatgtgaaaattcaatcacgacgttaaccggctcgagagagcgccggcctagaggctcattatctatttattttaccaaacgcgaattgagacggactttgacaaaacacgaaatggtaatgtgaagctaagagcagagagtgaccaacagtaaacaacacgcgcagaaaaaaaaaaaaaaaaaaaaaa

SEQ ID NO: 30511 - DNA, 4426 bp, Homo Sapiens
gttgtgaccactgaacaaaacttgcccattgaaagcaaacccggaacagctggataatgtccaccccgagccgattcaagaaggacaaagagatcatagccgagtatgaaagtcaagtcaaagaaattcgagctcaactggtagaacaacaaaaatgcctggagcagcaaacggagatgcgagttcagcttctccaggatctgcaagatttcttccgaaaaaaagctgaaattgagacggaatattcccggaatctagagaagttagcagaaaggttcatggcaaaaacaagaagcactaaggatcatcaacaatacaagaaagaccagaacctgttgtctccagtgaactgctggtatttgctcctgaaccaagtaaggagagaaagcaaagaccatgcaaccttgagtgacatctatctgaacaatgtgattatgcggttcatgcagataagtgaggattctaccaggatgtttaaaaagagcaaagagattgcattccaacttcatgaggatttaatgaaggttcttaatgagctttatacggtgatgaaaacataccatatgtatcatgcagagagcatcagtgcagagagcaagctgaaagaggccgaaaaacaagaggaaaagcaaattgggagatctggtgatccagtcttccatattcgactagaggagagacatcaacggcgaagctctgtaaagaaaattgaaaaaatgaaagaaaaaagacaagcaaaatattcagaaaataagctaaaatcaattaaggcacggaacgaatatctcctaacacttgaagccaccaatgcctcagttttcaagtactatattcatgatctttctgatttaattgattgctgtgatcttggctaccatgcaagtctgaacagagccctaagaacatatctgtctgcggagtacaaccttgaaacctccagacatgagggcttagacattattgagaatgcagttgataatttagagcccaggagcgataagcagagattcatggagatgtaccctgctgcgttctgtccaccaatgaagtttgagtttcagtctcacatgggtgatgaggtgtgccaggtcagtgcccagcagccagtccaggcagagctcatgctcaggtaccaacagttgcagtcccgccttgccacgctcaaaatcgagaatgaagaggttaagaaaacgactgaagccaccttgcagacgatacaagatatggtcaccatcgaggactatgatgtttctgaatgcttccagcacagtcgttccacagaatctgtgaagtccactgtctctgaaacctacctgagtaaacccagcatcgccaagagaagagccaaccagcaggaaactgaacagttctacttcatgaaactcagagaatatttggaaggcagtaatctcatcacaaaacttcaagccaaacatgacttgctgcagaggaccctgggagaaggtcatagagctgaatatatgactacaaggcctccaaatgttccccctaagccccagaaacacaggaagtccaggccccgctcacagtataatactaagttgtttaatggggatttggaaacattcgtcaaggactcaggacaggttattcccctcattgtggaaagctgtattcggttcatcaatctctatggtcttcagcatcaggggattttcagagtgtctggttcccaggtggaagtcaatgatattaaaaattcatttgagagaggtgaaaatcctttggctgatgaccagagtaaccatgatattaactcagttgctggcgttctgaagctctatttccgtgggctggaaaaccccctctttcctaaggaaagatttaacgatctgatttcttgtatcagaatagataatctctatgagagggcgcttcacatccgcaaactcctcctgactttgcccaggtcggtccttatagtgatgaggtacctctttgccttcctcaatcatctatcacagtacagcgatgagaatatgatggacccttataacctggccatttgctttggcccaacattgatgcctgtcccagaaatacaggatcaagtgtcttgccaggcacatgtgaatgaaattatcaaaaccatcatcatccaccatgagactattttcccagatgctaaagagctggatggccctgtttatgagaaatgtatggctggagatgactattgcgacagcccatacagtgagcacggtacattggaggaagtggaccaagatgctggtacagagccccacacaagtgaagatgaatgtgagccaatagaagcaatagccaagtttgactatgttgggcggtccgccagagaactatccttcaagaagggtgcctccctgctgctgtatcaccgtgcatctgaggactggtgggaaggcaggcacaacgggattgacgggctggtgcctcaccagtatatagtggtgcaggatatggatgatacgttttcagacactctgagccaaaaagccgacagtgaggccagcagtgggccagtcacggaagacaagtcctcatccaaggacatgaactccccgacagaccgtcatcctgacggctatttagccaggcaacgaaaaagaggagagccaccccctccagtaaggcgtcctggcaggaccagtgatggccattgcccgctccaccctccacatgccctttctaactcctcagttgacctagggtccccaagccttgccagtcacccccggggcctgctgcagaaccgtggcctcaacaatgacagtcctgagcggaggcgcaggcctggccatggcagcctgaccaacatcagccggcacgactccctcaagaagatcgacagccctcccattagaaggtccacgtcatcagggcaatacacgggcttcaatgaccacaagccactggacccagagacaattgctcaggatattgaagaaacgatgaacacagctttgaatgaactccgagaactggagagacagagcacagcaaagcatgcccctgatgtggtgctggataccctggagcaagtgaaaaactctcccacccctgccacttccacggaatctctcagccctttgcacaacgttgccctcaggagctccgagcctcagattcgacgtagcacgagctcctccagtgacacaatgagtactttcaagcctatggtggcacccagaatgggcgtgcagctgaagcctccagcccttaggccaaaacctgctgttcttccaaaaacaaatcctaccataggacctgccccacctccccagggtccaacagacaagtcatgcacaatgtaaaaaccagccaagcaaggccataaagggaggtgacttaaaaaagaaaatggattagtgacaaaagtcactgatccataactttccttagttttgtgcttataactggagatcttttggcttttctatgttgtcgaatgtaatgtctgagactagctaaattaacacgggcatttgtattttgtaatttttttaaataactggacatatgtcattttaaggacaatagaaacacttagacttacttgaaaatccaatgctgcaccacttgtaatgaaggcaacaccgctctccacattgtacagagcttcaggtttaatgtagcccagctgagtcagaaaggttgtgacctgaaggcagaagaacccgaatgccacacctcattggagtatagccagtgttggtctgtggcacttgggctgaaaggtgataatggcattgcgtggtagctgacaatgagcaccttcggttccatgtggagcggggtttagctcatgcaaaagacttgcaattgtctccatgggacgatcccagtgggactgtcagcccacagctcgagtgggttggatgcttgcctctttcctaacagttatttccccgggtccagcttaaagactcgatggaaggaggtagaacctctgctgttactgcttgaacttaacctgggaaaggagaggaagacaccatctccaaagctattaatgtcactccttttgcgagcatgattaggccccggagatttccaagtccccccatctacacttacaaacgattagaagggtttaattttaaagactttctggttacactactccacgaactcctccaaagatccgttattcaataactgcctagaaaatgtttccatctcctctaaatccctgtgttctcctctgtggaaatgaaggcagcaagaagcacctgaggccttggttcatgcagtgttctcttttgactaaatcacctaggttcctttaaacatgctacaaagcccaggcatggtggtgcacacctgtactcccagctactcgggtgtactaggctttgggcctagtagttcgagtccagcctgggcagcatagtgtgagaccctgtctcttaaaaaaaaaaaaaaa

SEQ ID NO: 30512 - DNA, 15552 bp, Homo Sapiens
atggcgacgagcggcggcgaagaggcggcggcagcggctccggcgccggggaccccggcaacgggggcggacacgaccccgggctgggaggtggctgtgcggcccctgctgtccgcgtcctactccgccttcgagatgaaggagttgccgcagctggtggcctcagtcatcgagagtgaatcagaaatcctgcaccatgagaagcagtacgagccattctactcatcttttgttgcactttccacacactatattacaacagtttgcagtctcattccccggaaccaacttcagtcagtggcagcagcctgtaaagttctaattgagttttctctcctgcgtctggagaatccagatgaggcttgtgctgtgtcccagaaacacttgattctcctaatcaagggcctgtgcactggctgtagccgactagatagaactgaaattatcacatttacagcaatgatgaaatccgccaagctgccccaaacagtgaagacactttcagacgtggaagatcagaaagagctggcctcaccagtaagccctgagttgaggcaaaaggaggtacagatgaattttttgaaccagctgacctcagtttttaaccctagaactgtagcatcacaacctatcagtacacagactctggtggaaggagaaaatgatgagcagtcatctacagatcaagcctcagctatcaaaaccaagaatgtgttcatagctcagaacgtggctagtcttcaagagcttggtggctcggagaagctactgcgtgtatgtttgaacctgccatatttcctacgctatatcaatcggttccaagatgcagttttagctaattccttcttcataatgcctgcaacagtagcagatgccactgctgttcgtaatggctttcattcattggtgattgatgtaactatggcattggataccctttctctacctgtgttggaacctctcaatccttctcgtctacaagatgtgacagtcctcagcctaagttgtctgtatgcaggtgtgagtgtggcaacgtgcatggccatcctccatgtgggtagtgcccagcaagtgcggacagggtccacgagctccaaagaagatgactatgaaagtgacgcagctacaattgtccagaaatgtctcgaaatctatgacatgattggacaagcaatcagcagttctcgccgggctggtggtgagcactatcagaatttccaattgctgggtgcttggtgcttgttaaacagccttttcctcatactgaacctcagtcctactgcgttggctgataaggggaaagagaaggacccactggctgccctccgagtcagagacatcctttctcgtactaaagagggagtgggctcccctaaactggggcctggaaaagggcatcagggatttggggtactctcagtaatattggcaaaccatgccatcaaactgctaacgtctctctttcaagacctacaagtggaggcccttcacaagggttgggagacagatggcccccctgcagccttgagcattatggcccagagcacctccatacagaggattcaacggctgattgactctgtcccactgatgaacctgctcttgacgttactttcaacttcctacagaaaggcatgtgtcctgcagcggcagaggaagggctccatgagcagcgatgccagcgcctccaccgactccaatacttactatgaggacgatttcagtagcacggaggaggacagcagccaagacgatgacagtgagcctattttggggcaatggtttgaggagactatttctcccagtaaagagaaagcagcacctccgcctcctcccccacctcctccactggaaagctctcctcgggttaaaagccccagtaagcaggcccctggtgagaagggcaacattctggcgagtcgcaaagatcctgagttgttcttaggtctggcttccaacattttgaacttcatcacctcttccatgctgaactctcggaacaattttatccgaaactatctgagtgtatctctttcagaacaccatatggccaccctagccagtatcatcaaggaggtggacaaagatggactcaagggttcatcagatgaagagtttgctgcagctctctatcacttcaaccactcactggtaacctctgaccttcagtcacctaacctgcagaacacactgttgcagcagctaggagtggctcctttttctgagggcccttggcccttgtacattcaccctcaaagcctctctgtgctttcacgcctcctgctcatctggcaacataaagccagtgctcaaggtgaccctgacgtcccagaatgccttaaagtttgggacaggtttttgtctacaatgaagcagaatgccctgcaaggtgtggtgcccagtgagacagaggatctgaatgtagaacacctgcagatgctcctcctcattttccacaatttcaccgagacaggccggcgggccatattgtcgctttttgtccagatcatccaggagttgagcgtcaacatggatgctcagatgcgcttcgtgccgcttatcttggctcgcctccttctcatctttgattatctgcttcatcagtactccaaagcccctgtgtatctatttgagcaggtacagcataacctgctaagtcctccctttgggtgggcaagtggatcccaggacagcaacagccgccgggcaaccactcctctctatcatggattcaaagaagtagaagaaaactggtctaagcatttctcatcagatgctgtcccacaccccagattctactgtgtcctgtccccagaagcctcagaggatgatttgaaccgacttgattctgtggcatgtgacgtccttttctccaagcttgtcaagtatgatgagctttatgctgcactgacagccctgcttgcagctgggtcccagcttgatacagttaggagaaaggaaaacaagaatgtaacagccttggaggcctgtgcccttcaatattacttcttgatactgtggaggatcctaggaattttaccaccatcaaagacttacattaaccagctatccatgaactcacctgagatgagcgaatgtgacatcttgcacactctgcgatggtcttctcggctccggatcagctcctatgtcaactggataaaggatcaccttatcaaacagggaatgaaggctgagcatgctagctcgcttctagaactggcatccaccactaagtgtagctcagtgaaatatgatgttgaaatagtagaggaatacttcgctcgacagatctcatccttctgtagtatcgactgtaccaccatcttgcagctgcatgaaattcccagtctgcagtccatctacacccttgatgccgcgatctcaaaggtccaggtctctttggatgagcatttttctaagatggctgctgagactgatcctcataagtcgtctgagattaccaagaacctacttccagccacgctgcaactcattgacacctatgcatcgttcaccagagcctatttgctgcaaaactttaatgaagagggaacaactgagaaaccttccaaggagaaactgcaaggctttgctgctgttttggctattggctctagcaggtgcaaggcaaatactctgggtccgacactggttcagaatttgccatcgtcagtgcagactgtgtgtgagtcctggaacaacatcaataccaatgaatttcccaatattggatcctggcgcaatgcctttgccaatgacaccatcccttcagagagttatattagtgcagtgcaggctgcacacctggggactctctgtagccaaagtctgcccctggctgcttccctgaagcataccctcctctcactggtcaggttgactggagatcttattgtttggtcagatgagatgaacccaccacaggtaattcggacactgctacctcttcttttggaatcaagcactgagagtgttgccgagatcagtagcaactccctggaacgcatcttgggccctgctgagtctgatgagttcttggctcgtgtttatgagaagctgatcactggttgttacaacattctggccaatcatgcagatcctaacagtggactggatgaatccatcctggaggaatgtctccagtacttggaaaagcagctggaaagtagccaggctcgtaaagctatggaggagtttttctctgacagtggagaacttgtacagatcatgatggcaacagccaatgagaacctctctgctaaattctgtaaccgagttttgaaattcttcaccaaactcttccagctgactgagaagagccctaacccgagcctgttgcatctctgtggctccctggcacaactggcctgtgtggaacctgtgcgcctgcaggcctggctcacccgcatgactacatcgcccccaaaagattctgatcagctggatgtaattcaggagaaccggcagctgctgcagttactgaccacatacattgttcgggaaaacagccaagttggggaaggtgtgtgtgctgttcttctgggcaccctgactcccatggcaacagagatgctggccaacggtgatgggactggcttccctgaacttatggttgtgatggccactctggccagtgcaggtcaaggtgctggtcaccttcagcttcataatgctgctgtggattggctgagcagatgcaagaaatacctgtcacagaagaatgtagttgaaaaactgaatgccaatgtaatgcatggaaagcatgtgatgatcttggagtgcacatgccatatcatgtcttacttggctgatgtcacgaatgccctgagccagagtaatggtcaaggcccaagtcatctctcagtggatggggaagagcgggccattgaagtagactcagactgggtggaggagttggcggtggaagaggaagattcccaggctgaggattcagatgaagattctctttgcaataaactctgcacttttacgatcacacagaaagaattcatgaaccagcattggtaccactgtcacacctgtaaaatggtggatggcgtgggtgtctgcacagtgtgtgctaaggtgtgccacaaggatcatgagatttcctatgccaagtatggatccttcttctgtgactgtggagccaaggaagatggcagctgtttggctctggtgaagagaactcctagcagtggcatgagctctaccatgaaggagtcggcatttcagagtgaacccaggatttcagagagtctagtgcgtcatgccagcacctcctcgccagctgacaaagccaaggttaccatcagtgatggaaaggttgctgacgaagagaagcccaagaagagcagcctctgccgcacagtagagggctgccgggaggaattacagaaccaggccaatttctccttcgctcctctcgtgttagacatgcttaatttccttatggatgccattcagaccaacttccagcaagcttcagccgtcgggagcagcagccgtgctcagcaagccctcagtgagctacacactgtggagaaggcagtggagatgacagaccagctgatggttcccaccttagggtcccaggaaggtgcctttgagaatgtgcggatgaattacagtggagaccagggccagaccatccggcagctgatcagtgctcatgtgctcaggcgggtggctatgtgtgtgctctcctctccccatgggcgccgccaacatttggctgtcagccatgagaagggcaagatcaccgttctgcagctctctgcactcctgaagcaagcagattccagcaaaaggaagttaactctgacccgcttggcttctgccccagttccttttactgtgttgagcctcacaggaaatccctgcaaggaagactacttggcggtttgtgggctaaaggactgtcatgtgctcacctttagtagctcaggctctgtttcggatcacttggttttgcaccctcagttggcaacggggaacttcatcatcaaagccgtgtggttacctggttcacagaccgagttatcaattgtcaccgcagactttgttaagatttatgacctgtgtgttgatgccttgagtccaaccttctattttctcctgccaagctcaaagataagagatgttaccttccttttcaatgaggagggaaagaacatcattgttataatgtcttcggctgggtacatctatactcagcttatggaagaggccagcagtgcccagcagggacccttctatgtcactaatgtgttggaaatcaatcatgaggacctgaaggacagtaacagccaggtggcgggcggtggtgtgtccgtgtactactcccacgtgttgcagatgttgttcttcagctattgtcaaggcaaatcattcgcagccaccatcagcaggacaaccctggaggtgttgcaactcttccccatcaacatcaaaagttccaatggtggcagtaagacttctcctgctctttgccagtggtctgaggtgatgaaccaccctggcttggtgtgctgtgtccagcaaactacaggggtgccgctggtagttatggtgaaaccagacacttttcttatccaggagattaagactcttcctgctaaagcgaagatccaagacatggttgctattaggcacacggcctgcaatgagcagcagcggacaacaatgattctgctgtgtgaggatggcagcctgcgcatttacatggccaacgtggagaacacctcctactggctgcagccatccctgcagcccagcagtgtcatcagcatcatgaagcctgttcgaaagcgcaaaacagctacaatcacaacccgcacgtctagccaggtgactttccccattgacttttttgaacacaaccagcagctgacagatgtggagtttggtggtaacgacctcctacaggtctataatgcacaacagataaaacaccggctgaattccactggcatgtatgtggccaacaccaagcccggaggcttcaccattgagattagtaacaacaatagcactatggtgatgacaggcatgcggatccagattgggactcaagcaatagaacgggccccgtcatatatcgagatcttcggcagaactatgcagctcaacctgagtcgctcacgctggtttgacttccccttcaccagagaagaagccctgcaggctgataagaagctgaacctcttcattggggcctcggtggaaccagcaggtgtcaccatgatagatgctgtaaaaatttatggcaagactaaggagcagtttggctggcctgatgagcccccagaagaattcccttctgcctctgtcagcaacatctgcccttcaaatctgaaccagagcaacggcactggagatagcgactcagctgcccccactacgaccagtggaactgtcctggagaggctggttgtgagttctttagaagccctggaaagctgctttgccgttggcccaatcatcgagaaggagagaaacaagaatgctgctcaggagctggccactttgctgttgtccctgccagcacctgccagtgtccagcagcagtccaagagccttctggccagcctgcacaccagccgctcggcctaccacagccacaaggatcaggccttgctgagcaaagctgtgcagtgtctcaacacatctagcaaagagggcaaggatttggaccctgaggtgttccagaggctagtgatcacagctcgctccattgccatcatgcgccccaacaaccttgtccactttacggagtcaaagctgccccagatggaaacagaaggaatggatgaagggaaggaaccgcagaagcagttggaaggagattgctgtagtttcatcacccagcttgtgaaccacttctggaaactccatgcatccaaacccaagaatgccttcttggcacctgcctgccttccaggactaactcatattgaagctactgtcaatgctctggtggacatcatccatggctactgtacctgtgagctggattgtattaacacagcatccaagatctacatgcagatgctcttgtgtcctgatcctgctgtgagcttctcttgtaaacaagctctaattcgagtcctaaggcccaggaacaaacggagacatgtgactttaccctcttcccctcgaagcaacactccaatgggagacaaggatgatgatgacgatgatgatgcagatgagaaaatgcagtcatcagggatcccgaatggtggtcacatccgtcaggaaagccaggaacagagtgaggtggaccatggagattttgagatggtgtctgagtcgatggtcctggagacagctgaaaatgtcaacaatggcaacccctctcccctggaggccctgctggcaggcgcagagggcttcccccccatgctggacatcccacctgatgcagatgacgagaccatggttgaactagccattgccctgagcctgcagcaggaccaacaaggcagcagcagcagtgccctgggcctgcagagcctgggactgtccggccaggcacccagctcttcctctctggacgcaggaaccctctctgacaccacagcatcagctccagcctcagacgacgagggcagtacagcagcgacagatggttctacccttcggacctctcctgctgaccacggtggtagtgtgggctcggagagcgggggcagtgcagtggactcagtggctggcgagcacagtgtatctggccggagcagtgcttatggcgatgctacagctgaggggcatccggctggaccaggaagtgtcagctcaagcactggagccatcagcaccaccactgggcaccaggagggagatggctccgagggagaaggagaaggagaaactgaaggagatgtccacactagcaacaggctgcacatggtccgtctaatgctgttggagagattactgcagaccctgcctcaattacgaaacgttggcggtgtccgggccatcccatacatgcaggtcattctaatgctcactacagatctggatggagaagatgagaaagacaagggggccctagacaacctgctctcccagcttattgctgagttgggtatggataaaaaggatgtctccaagaagaatgagcgcagcgccctgaatgaagtccatctggtagtaatgagactcctgagtgtcttcatgtcccgcaccaaatctggatccaagtcttccatatgtgagtcatcttccctcatctccagtgccacagcagcagctctactgagctctggggctgtggactactgcctgcacgtgctcaaatcactgctggaatattggaagagccaacagaatgacgaggagcctgtggctaccagccagttgctgaaaccacatactacctcctccccacctgacatgagcccattctttctccgccagtatgtgaagggtcatgctgctgatgtgtttgaggcctatactcagcttctaacagaaatggtactgaggcttccttaccaaatcaaaaagattactgacaccaattctcgaatcccacctcctgtctttgaccactcgtggttttactttctctccgagtacctcatgatccagcagactccatttgtgcgccgtcaagtccgcaaacttctgctcttcatctgtggatccaaagagaagtaccgccagctccgggatttgcacaccctggactctcacgtgcgtgggatcaagaagctgctagaagagcaggggatattcctccgggcaagtgtggttacagccagctcaggctccgccttgcaatatgacacactcatcagcctgatggagcacctgaaagcctgtgcagagattgccgcccagcgaaccatcaactggcagaaattctgcatcaaagatgactccgtcctgtacttcctcctccaagtcagtttccttgtggatgagggcgtgtccccagtgctgctgcaactgctctcctgtgctctgtgcggcagcaaggtgctcgctgcactggcagcctcttcgggatcctccagtgcttcttcctcctcagcccctgtggctgccagttctggacaagccacaacacagtccaagtcttccactaaaaagagcaagaaagaagaaaaagaaaaggagaaagatggtgagacctctggcagccaggaggaccagctgtgcacagctctggtgaaccagctgaacaaatttgccgataaggaaaccctgatccagttcctgcgttgtttcctgttagagtccaattcttcctcggtgcgctggcaggcccactgtctgacactgcacatctacagaaattccagcaaatctcaacaggagctcctgctagatctgatgtggtccatctggccagaactcccagcctatggtcgtaaggctgcccagtttgtggacctactaggatatttctccctgaaaactccacaaacagagaagaagttgaaggagtattcacagaaggctgtggagattctgcggactcaaaaccatattcttaccaaccaccccaactcgaacatttataacactttgtctggcttagtggagtttgatggctattacctggagagcgatccctgcctggtgtgtaataacccggaagtaccgttctgttatatcaagctgtcttccattaaagtggacacgcggtacaccaccacccagcaggttgtgaagctcattggcagtcacaccatcagcaaagtgacagtgaaaatcggggatctgaaacggaccaagatggtgcggaccatcaacctgtattataacaaccgaaccgtgcaggccatcgtggagttgaaaaacaagccagctcgctggcacaaagccaagaaggttcagctgacccctggacagacagaggtgaagattgacctgccgttgcccattgtggcctccaatctgatgattgagtttgcagacttctatgaaaactaccaggcctccacagagaccctgcagtgccctcgctgtagtgcctcggtccctgccaacccaggagtctgtggcaactgtggagagaatgtgtaccagtgtcacaaatgcagatccatcaactacgatgaaaaggatcccttcctctgcaatgcctgtggcttctgtaaatatgcccgcttcgacttcatgctctatgccaagccttgctgtgcagtggatcccattgagaatgaagaagaccggaagaaggctgtatccaacatcaatacacttttggacaaagctgatcgagtgtatcatcagctgatgggacaccggccacagctggagaacctgctctgcaaagtgaatgaggcagctccagaaaagccacaggatgactcaggaacagcagggggcatcagctccacttctgccagtgtgaatcgttacatcctgcagttggctcaggagtattgtggagactgcaagaactcttttgatgaactctccaaaatcatccagaaagtctttgcttcgcgcaaagagttgttggaatatgacctacagcagagggaagcagccactaaatcatcccggacctccgtgcagcccacattcactgccagccagtaccgtgccttatccgtcctgggctgtggccacacatcctccaccaagtgctatggctgcgcctcggctgtcacagaacattgtatcacactacttcgggccctggccaccaacccagccttgaggcacatccttgtctcccagggccttatccgggagctctttgattataatcttcgccgaggggctgcggccatgcgggaggaggtccgccagctcatgtgcctcctaactcgagacaacccagaagccacccaacagatgaatgacctgattattggcaaggtctccacagccctgaagagccactgggccaaccccgatctggcaagtagcctgcagtatgaaatgctgctgctgacggattctatctccaaggaggacagctgctgggagctccggttacgctgtgctctcagccttttcctcatggctgtgaacattaagactcctgtggtggttgaaaacattaccctcatgtgcctgaggatcttgcagaagctgataaaaccacctgctcccactagcaagaagaacaaggatgtccccgtcgaggccctcaccacggtgaagccatactgcaatgagatccatgcccaggctcaactgtggctcaagagagaccccaaggcatcctatgatgcctggaagaagtgtcttcctatcagagggatagatggcaatgggaaagcccccagcaaatcagagctccgccatctctatttgactgagaagtatgtgtggaggtggaaacagttcctgagtcgtcgggggaagaggacctcccccttggatctcaaactggggcataacaactggctgcgacaagtgcttttcactccagcaacgcaggccgcacggcaggcagcctgtaccattgtggaagctctagccaccattcccagccgcaagcagcaggtcctggacctgcttaccagttacctggatgagctgagcatagctggggagtgtgcagctgagtacctggctctctaccagaagctcatcacttctgcgcactggaaagtctacttggcagctcggggagtcctaccctatgtgggcaacctcatcaccaaggaaatagctcgtctgctggccctggaggaggctaccctgagtaccgatctgcagcagggttatgcccttaaaagtctcacaggccttctctcctcctttgttgaggtggaatccatcaaaagacattttaaaagtcgcttggtgggtactgtgctgaatggatacctgtgcttgcggaagctggtggtgcagaggaccaagctgatcgatgagacgcaggacatgctgctggagatgctggaggacatgaccacaggtacagaatcagaaaccaaggccttcatggctgtgtgcattgagacagccaagcgctacaatctggatgactaccggaccccggtgttcatcttcgagaggctctgcagcatcatttatcctgaggagaatgaagtcactgagttctttgtgaccctggagaaggatccccaacaagaagacttcttacagggcaggatgcctgggaacccgtatagcagcaatgagccaggcatcgggccgctgatgagggatataaagaacaagatttgccaggactgtgacttagtggccctcctggaagatgacagtggcatggagcttctagtgaacaataaaatcattagtttggaccttcctgtggctgaagtttacaagaaagtctggtgtaccacgaatgagggagagcccatgaggattgtttatcgtatgcgggggctgctgggcgatgccacagaggagttcattgagtccctggactctactacagatgaagaagaagatgaagaagaagtgtataaaatggctggtgtgatggcccagtgtgggggcctggaatgcatgcttaacagactcgcagggatcagagatttcaagcagggacgccaccttctaacagtgctactgaaattgttcagttactgcgtgaaggtgaaagtcaaccggcagcaactggtcaaactggaaatgaacaccttgaacgtcatgctggggaccctaaacctggcccttgtagctgaacaagaaagcaaggacagtgggggtgcagctgtggctgagcaggtgcttagcatcatggagatcattctagatgagtccaatgctgagcccctgagtgaggacaagggcaacctcctcctgacaggtgacaaggatcaactggtgatgctcttggaccagatcaacagcacctttgttcgctccaaccccagtgtgctccagggcctgcttcgcatcatcccgtacctttcctttggagaggtggagaaaatgcagatcttggtggagcgattcaaaccatactgcaactttgataaatatgatgaagatcacagtggtgatgataaagtcttcctggactgcttctgtaaaatagctgctggcatcaagaacaacagcaatgggcaccagctgaaggatctgattctccagaaggggatcacccagaatgcacttgactacatgaaaaagcacatccctagcgccaagaatttggatgccgacatctggaaaaagtttttgtctcgcccagccttgccatttatcctaaggctgcttcggggcctggccatccagcaccctggcacccaggttctgattggaactgattccatcccgaacctgcataagctggagcaggtgtccagtgatgagggcattgggaccttggcagagaacctgctggaagccctgcgggaacaccctgacgtaaacaagaagattgacgcagcccgcagggagacccgggcagagaagaaacgcatggccatggcaatgaggcagaaggccctgggcaccctgggcatgacgacaaatgaaaagggccaggtcgtgaccaagacagcactcctgaagcagatggaagagctgatcgaggagcctggcctcacgtgctgcatctgcagggagggatacaagttccagcccacaaaggtcctgggcatttataccttcacgaagcgggtagccttggaggagatggagaataagccccggaaacagcagggctacagcaccgtgtcccacttcaacattgtgcactacgactgccatctggctgccgtcaggttggctcgaggccgggaagagtgggagagtgccgccctgcagaatgccaacaccaagtgcaacgggctccttccggtctggggacctcatgtccctgaatcagcttttgccacttgcttggcaagacacaacacttacctccaggaatgtacaggccagcgggagcccacgtatcagctcaacatccatgacatcaaactgctcttcctgcgcttcgccatggagcagtcgttcagcgcagacactggcgggggcggccgggagagcaacatccacctgatcccgtacatcattcacactgtgctttacgtcctgaacacaacccgagcaacttcccgagaagagaagaacctccaaggctttctggaacagcccaaggagaagtgggtggagagtgcctttgaagtggacgggccctactatttcacagtcttggcccttcacatcctgccccctgagcagtggagagccacacgtgtggaaatcttgcggaggctgttggtgacctcgcaggctcgggcagtggctccaggtggagccaccaggctgacagataaggcagtgaaggactattccgcttaccgttcttcccttctcttttgggccctcgtcgatctcatttacaacatgtttaagaaggtgcctaccagtaacacagagggaggctggtcctgctctctcgctgagtacatccgccacaacgacatgcccatctacgaagctgccgacaaagccctgaaaaccttccaggaggagttcatgccagtggagaccttctcagagttcctcgatgtggccggtcttttatcagaaatcaccgatccagagagcttcctgaaggacctgttgaactcagtcccctga

SEQ ID NO: 30513 - DNA, 4999 bp, Homo Sapiens; identical to SEQ ID NO: 24023

SEQ ID NO: 30514 - DNA, 7771 bp, Homo Sapiens
gtatcaggactcagcccatttccccctctggtgctgagaaatggaggccgaaggagtgatctagaagtgttaattgagcccctaatctatgctagttactgggggtgttgggggagacaggagagagatcccacggggttccggcctcccagggactcaggtcactaatggaggtggcttggcttgtctatgtgctgggccaacagccactggcgaggcaaggcgagggtcagtcacggctggtgccaggaagagggctggttctttggctccctggtctcccgcggtctagcccaagctggccagcggttgacctggctcccctggccccggccaggcctcgtggacccctcatatgccacacgggacatgagcaggccggccgggagccgggtcccgggagctccacgaaggggcctgtcctccatgaccaggacacccgctgcgccttcctcccgaggcctcccgggcctctccagacgcggcgctactgcagacaccagggccgccaagggagcggactcggagccggccctggggcgggcacatgggccccggcgccccccggcgtctccaagccgcgctgcccgggtcgggccaggccaggggagggacagcagcaggtgacgacggcccggccaccggctataaataggggcgcgcgtcagccgcgggcgggagcggcggcggcgggcaggggcccgggggccggggcctggaggacaggcgaggcagcggcgagtgcggggccggcggtcggggagggcggtgccatggggtcgcggagggcccccacccggggctggggcgcgggtgggcggtcgggggcggggggcgacggtgaggacgacggccccgtgtggatccccagcccagccagccggagctacctgctcagcgtgcggcccgagaccagcttatcaagcaaccggttgtctcaccccagctctggaaggagcaccttctgctccatcattgctcagctcacagaggagacccagccgctatttgagaccacgctcaagtcccggtctgtgtccgaggacagcgacgtcaggttcacctgcatcgtcacaggatacccagagccagaggtgacctggtacaaggatgatacggagctggaccgctactgtggcttgccaaaatatgagatcactcatcagggcaaccgccacacactgcagctgtacaggtgtcgagaagaagatgccgccatctaccaggcctctgcccagaacagcaagggcattgtgtcctgctcaggggtcctggaggtgggcaccatgactgagtacaagatccaccagcgctggttcgccaagttgaagcgcaaggctgcggcaaagctgcgcgagatcgagcagagctggaagcacgagaaggcggtgcctggggaggtcgacactctgcgcaagctcagccccgaccgcttccagcgaaagcggcgattgagcggggctcaagcgccgggcccctcggtccctaccagggagcctgagggtgggaccctggcggcttggcaggagggagagactgagactgctcagcactcaggtttgggcctgatcaacagttttgcttctggagaagtgaccaccaacggggaggctgcccccgagaatggagaggacggagagcatggcttgctgacatacatctgtgacgccatggagctggggcctcagagagccctcaaagaggagagtggggccaagaagaaaaagaaagatgaggaatccaagcaaggcctgcggaagccagagttagagaaggcagcccaaagccgccgttcttcagaaaactgcatccccagctcagacgagcctgactcctgtgggactcaggggcccgtgggcgtggagcaggttcagacccagcccagaggcagggctgcacgggggcctgggtcctctggcacagatagtaccaggaagccagcctctgctgtgggcactccagacaaggcccagaaggcccctggcccaggcccaggccaggaagtgtatttctccttgaaggacatgtacctggagaacacccaggcagtcaggcctcttggggaagagggaccccagaccctgagtgtccgggcgcctggggagagtcccaaggggaaggcacccctcagggctagaagcgagggggtgcctggcgctcctggccagcccacacactccttgaccccccagccgactaggcctttcaacagaaagagatttgcccctccaaagcccaaaggagaggccaccactgacagcaagcccatttcttctctgagtcaagctccagaatgcggggcccagagcttaggaaaggccccacctcaggcctctgtgcaggtgccgacgccccctgcccggcggagacatggcacccgggacagcacgttgcaggggcaagcaggccacaggactccaggagaggtcctggaatgccagacaaccacggctcctaccatgtcggccagcagcagctctgatgtagcctccattggggttagcacttccggaagtcaaggtatcattgaacccatggatatggaaacccaggaggatgggagaacatctgctaaccagagaactggaagcaagaagaatgtgcaggcagatgggaagatacaagtggatggaaggaccaggggagatggaacacagacagcccagaggacacgtgcagataggaagacgcaggtggatgctgggacacaagaaagcaagaggccacagtcagacaggagtgcacagaagggcatgatgacacagggaagggcagagacacagctagaaacaacacaggcaggtgagaagatacaggaagacaggaaggcccaggcagataagggcacacaggaagacagaaggatgcagggagagaaggggatgcagggagagaaggggacgcagtcagaggggagcgcgcccacagccatggaaggtcagtctgagcaagaggtggcaaccagcctcggcccaccatccagaacccccaaactcccacctacagcgggtcctagagctcctctgaatattgaatgttttgtacagaccccagaagggtcttgtttcccaaaaaaacctggttgcctgcccagatctgaggaggcagtagtaacagcctccaggaaccatgagcaaactgtgctgggtcccctgtcagggaacctcatgctcccagcacagccgccccatgaggggagtgtggagcaggtgggaggagagagatgccgagggccacagtcatcaggcccagtcgaggccaagcaggaggacagcccgttccagtgccccaaggaggagcggccagggggagtgccgtgtatggatcagggtggctgtcctctagctggcctgagccaggaggtacccacgatgccttctcttcctggaactgggctgacagctagcccaaaggcggggccgtgtagcaccccgacttctcagcacgggagcacagccaccttcctgccctctgaggatcaggtcctgatgagttctgccccaacactgcacctggggctggggacccccactcagagtcacccaccagaaaccatggccaccagcagtgagggggcctgcgcccaggtaccagatgtggaggggcggaccccaggtccccggagctgtgaccctggcctcatagattccctgaagaactacctgcttctgctgctgaagctgtccagcacagagacaagtggagcagggggagagtcccaggtgggggcagccaccggaggtctggtgccctcagccactctgacacccactgtggaagtggctgggcttagtccccggacatcgaggcgcatcctggagcgtgtggagaacaaccacctggtgcagagtgcacagaccctgctgctgagcccctgtacctcccgccgcctcaccggcctcctggaccgtgaggtgcaggctggccgccaggcccttgctgctgcccgaggctcctggggtcctggtcccagctccctcactgtccctgccattgtggtagacgaggaggaccctgggctggcctcagaaggagccagtgagggtgaaggagaggtttcccttgaggggcctggcctcctgggggcctctcaggagagcagcatggctggtcgactgggggaggcgggtgggcaggcagcccctggacaggggccctcagcagagagcatagcccaggagccctcccaagaggagaagttcccaggggaggctctgacaggcctcccggcagctacacctgaggaactggctctaggggcccggaggaagagatttctccctaaggtcagagcagcaggagacggggaggcaaccacacctgaagaaagggagagccccacggtttccccccgggggcccaggaaaagcctggtgcctgggtccccagggactccagggcgggagagacgctcccctacgcagggcagaaaggcgagcatgctggaggtgcctcgggcagaggaggagctggcggcaggagacctgggccccagccccaaggccggcggtctggacacagaggtggccctggatgaaggcaagcaggagacactggccaagcccaggaaagccaaagacctgctgaaagccccacaggtgatccggaagattcgggtggagcagtttcctgatgcctccggtagcctgaagctgtggtgccagtttttcaacattcttagtgactcagtcttgacatgggccaaggatcagcgcccagtgggcgaggtgggcaggagcgcaggggatgaggggccggcggccttggccatcgtgcaggcctcccccgtagactgcggtgtgtatcggtgcaccatccacaatgagcacggctcggcctccaccgacttctgcctcagccctgaggtgttgtcaggattcatctccagagaagaaggtgaagttggagaagagattgagatgacccctatggtgtttgctaagggtctggctgactctggctgctggggggacaagctctttgggcgactggtaagcgaggagctccgagggggtggatatgggtgtggccttcggaaggcctcccaggccaaggtcatctacgggctggaacccatcttcgagtcgggccgcacgtgcatcatcaaggtgtccagcctgcttgtgtttgggcccagcagtgagacttctcttgtgggcagaaactacgacgtcaccatccaggggtgcaagatccagaacatgagtcgggagtactgcaaaatcttcgcagcagaagcccgggccgcgcctggctttggggaggtgcctgagatcatcccactgtatctgatctaccggcctgcaaacaatatcccatatgctaccctggaggaagacctgggcaagcccctggagtcttactgttctcgggaatggggctgtgctgaggctccgacagcatctggcagctctgaggccatgcagaaatgccagaccttccaacactggctgtatcagtggacaaatggcagcttccttgtcacagacttggcaggggttgactggaagatgactgatgtgcagattgctaccaaactccgaggataccagggcctcaaggaaagctgcttccctgccctgctggaccggttcgcctcctcccaccagtgcaatgcctactgtgagctgctggggctgacacctctcaagggcccggaggcggcccacccccaagccaaagccaaaggctctaagagtccatctgctggcaggaaaggctcccagctgagtcctcagccccagaagaaaggcctccctagtcctcagggcacccggaagagtgctccaagttccaaggccacccctcaggcctcagagccagtcaccactcagttgttgggacagcctcccacccaagaggagggctccaaggcccagggcatgcggtagcctctgcagaggctgggggcctccacccagcagcagaccaaccaggaagcagcttgaactggatggagactttccaaatatggaactaactggagaaggtgcacgaaggagacaccacttggggacctctctgagcaggctctcgtgaatcagctcgtcatcagatggctttggtgcatggcacatagcccactggcctcttctggtgccactgtcacccagggctcccgggcctcaagcagtccccacctccgagtgcctggcaacctaggccctccttgaagtttacactttgccactgctggaggctcccctgagtcctctgcatgagttctgcaccccaagcccttgccccagcccagtccagcagcagatgttacaatctgagtgaggacatgcaggccaacttttaccctcctgcatttgcctggccctgatctcgcctgtcctcagggatccagacttcctctgctggtctggcctggtgactctcagggtatcttctccttccagctactttcgctcactgatctcagcttatcctgcaactaaccatccttgagcccagatggggctcagggcccttccagagcctgtcatgtccttgtgcagtggcctttgatgtgtgttcacgctcttcccccttcactcactcgcctgcttcccatgctcccttgtaccccctcgccacatccctgtcttggggcccagctgcagcctgctgcctgcccttcatggctctgcacatggccctttgcttgagggctccccactccctgcccaccaatacccaggtgaggaacagaccctctggcctctcaccccacttcagtgctctcttccccaacttctctcgggctctttgctcatgaggtgagagctggtgtgagggttgtgtcagcagctgtagccagagagaggtgttgactctgagagaccttgcactccatactgaaaggaggtggggtcacagtgaatttcacatcccctctcaaccaggagtggagggctaggtcccttccccatggggagtacacttgggtgttctaggagggatgcagtctatccatgcacttgggtggaggggagtctctgtgcctgggaattaggacccctgctccaaccatcgctcttgatcctggggccccagctctgggtcctcatgtatgggctcccaaggacccagcagcctggatccttccagagcatccctcctggaggcctgggatggggtaggtctgcagctagcctactccctttggaatgcaataaaggcagcattgtgtgccctgcttgccctcatctggtgtggttggaggtctgtggagtcaaggtccccctctcccaggcaggctctctgagggcattctgtagtcccaggcccactggaaaaatgaatctatattttggttcctggaccgaagttcagtcgcagccttctgtggccacagaaagacagcttgtgctgcttgcacaactgagctgctggtgtgtaccccttagcagggtgtctggggacttacgcctttggaattgctcttcattcagaagaggaacacaaaggaagccacccaggaaggaagcacagagctgggggctctggaaacgccctgtgtctctggctacagcaagaccagcccaggagcccaccagcacctgcctctcagctacttgctgaccatttcctgcttctcaagctgcagagaagcttttcattcccacccccacccggaacctccccttgcctaacatttcccctctatggtaacatctctgacttctctacctcctctgtgctcaggtgactccacatcttctgccccagtgtgtccccacctctcccagcctgtatacccagattactttggtgaactgaaaaa

SEQ ID NO: 30515 - DNA, 3952 bp, Homo Sapiens; identical to SEQ ID NO: 27095

SEQ ID NO: 30516 - DNA, 4336 bp, Homo Sapiens; identical to SEQ ID NO: 26630

SEQ ID NO: 30517 - DNA, 4642 bp, Homo Sapiens
tccctctcccccccttctctctctctccgaggggggggggtcccagggagggagggggggtcccccgatcagcatgtggctcctggcgctgtgtctggtggggctggcgggggctcaacgcgggggagggggtcccggcggcggcgccccgggcggccccggcctgggcctcggcagcctcggcgaggagcgcttcccggtggtgaacacggcctacgggcgagtgcgcggtgtgcggcgcgagctcaacaacgagatcctgggccccgtcgtgcagttcttgggcgtgccctacgccacgccgcccctgggcgcccgccgcttccagccgcctgaggcgcccgcctcgtggcccggcgtgcgcaacgccaccaccctgccgcccgcctgcccgcagaacctgcacggggcgctgcccgccatcatgctgcctgtgtggttcaccgacaacttggaggcggccgccacctacgtgcagaaccagagcgaggactgcctgtacctcaacctctacgtgcccaccgaggacggtccgctcacaaaaaaacgtgacgaggcgacgctcaatccgccagacacagatatccgtgaccctgggaagaagcctgtgatgctgtttctccatggcggctcctacatggaggggaccggaaacatgttcgatggctcagtcctggctgcctatggcaacgtcattgtagccacgctcaactaccgtcttggggtgctcggttttctcagcaccggggaccaggctgcaaaaggcaactatgggctcctggaccagatccaggccctgcgctggctcagtgaaaacatcgcccactttgggggcgaccccgagcgtatcaccatctttggttccggggcaggggcctcctgcgtcaaccttctgatcctctcccaccattcagaagggctgttccagaaggccatcgcccagagtggcaccgccatttccagctggtctgtcaactaccagccgctcaagtacacgcggctgctggcagccaaggtgggctgtgaccgagaggacagcgctgaagctgtggagtgtctgcgccggaagccctcccgggagctggtggaccaggacgtgcagcctgcccgctaccacatcgcctttgggcccgtggtggatggcgacgtggtccccgatgaccctgagatcctcatgcagcagggagaattcctcaactacgacatgctcatcggcgtcaaccagggagagggcctcaagttcgtggaggactctgcagagagcgaggacggtgtgtctgccagcgcctttgacttcactgtctccaactttgtggacaacctgtatggctacccggaaggcaaggatgtgcttcgggagaccatcaagtttatgtacacagactgggccgaccgggacaatggcgaaatgcgccgcaaaaccctgctggcgctctttactgaccaccaatgggtggcaccagctgtggccactgccaagctgcacgccgactaccagtctcccgtctacttttacaccttctaccaccactgccaggcggagggccggcctgagtgggcagatgcggcgcacggggatgaactgccctatgtctttggcgtgcccatggtgggtgccaccgacctcttcccctgtaacttctccaagaatgacgtcatgctcagtgccgtggtcatgacctactggaccaacttcgccaagactggggaccccaaccagccggtgccgcaggataccaagttcatccacaccaagcccaatcgcttcgaggaggtggtgtggagcaaattcaacagcaaggagaagcagtatctgcacataggcctgaagccacgcgtgcgtgacaactaccgcgccaacaaggtggccttctggctggagctcgtgccccacctgcacaacctgcacacggagctcttcaccaccaccacgcgcctgcctccctacgccacgcgctggccgcctcgtccccccgctggcgccccgggcacacgccggcccccgccgcctgccaccctgcctcccgagcccgagcccgagcccggcccaagggcctatgaccgcttccccggggactcacgggactactccacggagctgagcgtcaccgtggccgtgggtgcctccctcctcttcctcaacatcctggcctttgctgccctctactacaagcgggaccggcggcaggagctgcggtgcaggcggcttagcccacctggcggctcaggctctggcgtgcctggtgggggccccctgctccccgccgcgggccgtgagctgccaccagaggaggagctggtgtcactgcagctgaagcggggtggtggcgtcggggcggaccctgccgaggctctgcgccctgcctgcccgcccgactacaccctggccctgcgccgggcaccggacgatgtgcctctcttggcccccggggccctgaccctgctgcccagtggcctggggccaccgccacccccaccgcccccctcccttcatcccttcgggcccttccccccgccccctcccaccgccaccagccacaacaacacgctaccccacccccactccaccactcgggtatagggggtgggtggggaggccctcctccccggccctccctggcccggccactccgaaggcagggaggaggacttggcaactggcttttctcctgtggagtcgtcacacgccatccagcagcgctaaggtggacatgggattcctccctgcgatgcgtgtctttcccacgcagagaagcccagtctcttctctggatctgggcctttgaacaactggggggcgttttctcccccccattgggacaccagtcttcggtgtgtggaatgtggtattttcccgcgtggaggtgtgctttctcacaacggggtgtgttttcccatgtgcagggtgaggtttttttttgccaccctggacacatgttggccccctcaaagaatttctgtggggatttgtaccccagaatcctgttcccccatcccttctcccacctcctcccctctccctccccctggagaccctggaagtggtgtgttcacatacagtgacccttggccaccagaccacagaggatggagcctgggaagcagcgaggaaatcacagccccctcgcccctgcctcccttgcccctaccccggcgaagcatgttccccccgacgccccccttggcacaagtcagatgaagcacgttctgccggggaggccctcaccttccagagaggacagacacagatttcctgctgggggagggaggagtccacgcatcctgatgctgcctggaagcttattttcccgtggccaggacgcatttctctgagtggaaacaggttcttgcatgtggatgtgtgtttccccaggcagacggcccctctcttcccagcacttccctgcctcccccaggcctcaggcccagcacccagttcctcctcacatggcaggtgagcacagacttctagttggcaggagctgaggagggtgaacaaaccccgagggaggcccggcccttgctcccgagttggggggagggggtgtggcaacgtgccccccgcagaggccacgcatgtttgaccaaagccctcattgtggtccgaggacagccttttccccaggcctcagagcattgctcatccgtgccaaactgggtaggtggatttgagcggaaagactcccaaaatgtgccaagaatttcccagtcccaggcagggcaggggaaactaagggcaagcaggatacagggcgagggatgtggcaggtgagggggctcccgcctgtgccccttctcctcaccatgtctcccccaccctgcctcagttctccgttccccttcatctccgtccccctctttgaagctgtccccatctcagtgtcagaccagccttctcctcagctgaccaccctcctctgacccacgccccctccttgtctgaaagaaaggagccttgaatggtggagggaggcagtggggagaaaggtctcaccggacaggttgggagaatgaggtcagcggtgctggggaacagatggagggggcagtggggacagggcttgggcagacaccagcaggaataatttgaaatgtgtgaggtgactccccggagggccttgggcttgggcatttgggaaaagaatgatgtctggaagggcttaagggacacagtggacgaggggagagtcctcatctgctggcattttgtggggtgttagtgccaaacttgaataggggctggggtgctgtcttccactgacacccaaatccagaatccctggtcttgagtccccagaactttgcctcttgactgtcccttctcttcctacctccatccatggaaaattagttattttctgatcctttcccctgcctggtctagctcctctccaaacagccatgccctccaaatgctagagacctgggccctgaaccctgtagacagatgccctcagaattggggcatgggaggggggctgggggaccccatgattcagccacggactccaatgcccagctcctctccccaaaacaatcccgacaatcccttatccctaccccaaccctttgcggctctgtacacatttttaaacctggcaaaagatgaagagaatattgtaaatataaaagtttaactgtt

SEQ ID NO: 30518 - DNA, 6841 bp, Homo Sapiens
ggggtgaggctgcagccaactccgctccccgcgcactcggctgcccaggcgctcggaacccagcagcggcgctcctccgcggtgccggtcgcccgcgatgcccgcttagcagcgtgtagcagcggccagcatcaccacacccgcggcaccgcgctgccggccgcagagccgggccagagccttgcacccctgcctcagcccccaccccgccccccgccctgaattgacttgttaatcggcgcagacaccaccaaggggactcaccggagtggaatccaagtggaatttggatttggagaagagtttcttgaacatttaccctcttccttgttggttttctttttctttttcttctttttttttttggcttcttttttcctctccccttctccgctcgtcattggagatgaacacatcgcgtttgcatcccagaaagtagtcgccgcgactatttcccccaaagagacaagcacacatgtaggaatgacaaaggcttgcgaaggagagagcgcagcccgcggcccggagagatcccctcgataatggattactaaatgggatacacgctgtaccagttcgctccgagccccggccgcctgtccgtcgatgcaccgaaaagggtgaagtagagaaataaagtctccccgctgaactactatgaggtcagaagccttgctgctatatttcacactgctacactttgctggggctggtttcccagaagattctgagccaatcagtatttcgcatggcaactatacaaaacagtatccggtgtttgtgggccacaagccaggacggaacaccacacagaggcacaggctggacatccagatgattatgatcatgaacggaaccctctacattgctgctagggaccatatttatactgttgatatagacacatcacacacggaagaaatttattgtagcaaaaaactgacatggaaatctagacaggccgatgtagacacatgcagaatgaagggaaaacataaggatgagtgccacaactttattaaagttcttctaaagaaaaacgatgatgcattgtttgtctgtggaactaatgccttcaacccttcctgcagaaactataagatggatacattggaaccattcggggatgaattcagcggaatggccagatgcccatatgatgccaaacatgccaacgttgcactgtttgcagatggaaaactatactcagccacagtgactgacttccttgccattgacgcagtcatttaccggagtcttggagaaagccctaccctgcggaccgtcaagcacgattcaaaatggttgaaagaaccatactttgttcaagccgtggattacggagattatatctacttcttcttcagggaaatagcagtggagtataacaccatgggaaaggtagttttcccaagagtggctcaggtttgtaagaatgatatgggaggatctcaaagagtcctggagaaacagtggacgtcgttcctgaaggcgcgcttgaactgctcagttcctggagactctcatttttatttcaacattctccaggcagttacagatgtgattcgtatcaacgggcgtgatgttgtcctggcaacgttttctacaccttataacagcatccctgggtctgcagtctgtgcctatgacatgcttgacattgccagtgtttttactgggagattcaaggaacagaagtctcctgattccacctggacaccagttcctgatgaacgagttcctaagcccaggccaggttgctgtgctggctcatcctccttagaaagatatgcaacctccaatgagttccctgatgataccctgaacttcatcaagacgcacccgctcatggatgaggcagtgccctccatcttcaacaggccatggttcctgagaacaatggtcagataccgccttaccaaaattgcagtggacacagctgctgggccatatcagaatcacactgtggtttttctgggatcagagaagggaatcatcttgaagtttttggccagaataggaaatagtggttttctaaatgacagccttttcctggaggagatgagtgtttacaactctgaaaaatgcagctatgatggagtcgaagacaaaaggatcatgggcatgcagctggacagagcaagcagctctctgtatgttgcgttctctacctgtgtgataaaggttccccttggccggtgtgaacgacatgggaagtgtaaaaaaacctgtattgcctccagagacccatattgtggatggataaaggaaggtggtgcctgcagccatttatcacccaacagcagactgacttttgagcaggacatagagcgtggcaatacagatggtctgggggactgtcacaattcctttgtggcactgaatgggcattccagttccctcttgcccagcacaaccacatcagattcgacggctcaagaggggtatgagtctaggggaggaatgctggactggaagcatctgcttgactcacctgacagcacagaccctttgggggcagtgtcttcccataatcaccaagacaagaagggagtgattcgggaaagttacctcaaaggccacgaccagctggttcccgtcaccctcttggccattgcagtcatcctggctttcgtcatgggggccgtcttctcgggcatcaccgtctactgcgtctgtgatcatcggcgcaaagacgtggctgtggtgcagcgcaaggagaaggagctcacccactcgcgccggggctccatgagcagcgtcaccaagctcagcggcctctttggggacactcaatccaaagacccaaagccggaggccatcctcacgccactcatgcacaacggcaagctcgccactcccggcaacacggccaagatgctcattaaagcagaccagcaccacctggacctgacggccctccccaccccagagtcaaccccaacgctgcagcagaagcggaagcccagccgcggcagccgcgagtgggagaggaaccagaacctcatcaatgcctgcacaaaggacatgccccccatgggctcccctgtgattcccacggacctgcccctgcgggcctcccccagccacatccccagcgtggtggtcctgcccatcacgcagcagggctaccagcatgagtacgtggaccagcccaaaatgagcgaggtggcccagatggcgctggaggaccaggccgccacactggagtataagaccatcaaggaacatctcagcagcaagagtcccaaccatggggtgaaccttgtggagaacctggacagcctgccccccaaagttccacagcgggaggcctccctgggtcccccgggagcctccctgtctcagaccggtctaagcaagcggctggaaatgcaccactcctcttcctacggggttgactataagaggagctaccccacgaactcgctcacgagaagccaccaggccaccactctcaaaagaaacaacactaactcctccaattcctctcacctctccagaaaccagagctttggcaggggagacaacccgccgcccgccccgcagagggtggactccatccaggtgcacagctcccagccatctggccaggccgtgactgtctcgaggcagcccagcctcaacgcctacaactcactgacaaggtcggggctgaagcgtacgccctcgctaaagccggacgtaccccccaaaccatcctttgctcccctttccacatccatgaagcccaatgatgcgtgtacataatcccagggggagggggtcaggtgtcgaaccagcaggcaaggcgaggtgcccgctcagctcagcaaggttctcaactgcctcgagtacccaccagaccaagaaggcctgcggcagagccgaggacgctgggtcctcctctctgggacacaggggtactcacgaaaactgggccgcgtggtttggtgaaggtttgcaacggcggggactcaccttcattctcttccttcactttcccccacaccctacaacaggtcggacccacaaaagacttcagttatcatcacaaacatgagccaaaagcacatacctaccccatcccccacccccacacacacacacacatgcacacaacacatacacacacacgcacagaggtgaacagaaactgaaacattttgtccacaacttcacgggacgtggccagactgggtttgcgttccaacctgcaaaacacaaatacattttttaaaatcaagaaaatttaaaaagacaaaaaaaaaagaattcattgataattctaactcagactttaacaatggcagaagtttactatgcgcaaatactgtgaaatgcccgccagtgttacagctttctgttgcagcagataaatgccatgttgggcaactatgtcatagatttctgctcctcctctcttttaatgaaataacgtgaccgttaacgcaagtaactctttatttattgttcaccctttttttccttaaggaaaggactcttccaaatatcatcctatgaacagctcttcagaaagcccattgaaagttaaactatttaacgtgaaatccattaactggaataattgagtttctttatttttacaataaattcactgagtaaataagttggagctggaattctgagctttgtgtttggactgtctggtctgtagctaaaggaaaaagttaggaggggaatatttatttaaatctatcagttcattgcctggtcaggtctctggcctataaacatgcaaaaaaactaattcatgttaaagtccttccagatcctaatttctaaagcaatcaggagagaaagcttttagaatggcacatcatatctcattgatgccaacatggttttgtccatggttctgactttctgtgaaggcaccagcttgcaatatgccatcccatttcaccttgcatgtgagacagcaaacaaaatccacaaatggtgtgaactaatatgctggctgctaccttgcataaattaatgatttgatcacacgggttcttcgtggggttacatctgtgaatagcctgttttccacatgtaaatttgtgccttacaccttgagttgtgtacacttgtaaactctttatgatcaactgttcccccttttgaaataagtgcagatatttatttaaccctcccttccccaccctctgccccacttccagccctctgaaagattggagtcaagcagatggaagaatgcagtggtgatagttgtcatgcgacagcctgagaacgctgggcagcaccacaccctccaattcacactgccttctagttgtgccaactggaaccaccctttggctgtgctgcgaagcatggaccccagtgttgttgtgggtgtgtcaaatcccctttcatcctcaagagctccctgcttcccttagattatttcaatacggtgatatccttatttgctagcagaaaagggactaacgtcccattcctcttttctgctgcgtccactggctagagagcaggcggtgcgcggttgggcagacacctgggaggagtctccaagccatgtgcacagcacacacgtgcagtgcacacaaagaaatgacatggaaatagatgcaggcaggctggtccctgctgtgattaacgagtaactccaagtacaaggccgaccacaatggatgctgcaaaaacgttgactggggcaaaggattttttattttattttttattttgttaattatgtttttaggggatgggaggtggtgtgtgtttttctcctcttggttttcatttgctcaagcacacaaaagggacttttgtttactctatcatgaacaaaggaactgtccacatactgtaaaccatgagcagtgttgttgttgtttttttaaacagtatatttggtggtctctttgtctgcttttatttccagttcgatcttctgggtttagttttgtctttaaaaagaattcaaaaaaagactgacaatgacagttttgagttggatagtgaaaaagtggagcctccataatcagtgtggttgccttcagacctgagtacttagctgagggtgggtgagagccctttgttccaaaagtccattagttttgctgttgtttaggagtaggtggttgttgttgtttttactttttttttttttggcttttgtaatggaatccatgttcacatcctgtgaactctgtctcctgaaaccctgaagtatttcctagaacctgaaatattgttttcttccttgaattttctctagaaatgcagaaattaggaaggtgatgggtctgtatccccctgcccccttctttcccatgcttgactcccgagagtactggcagtgcagcacccatcattgacgtaagcggctgtcttgtccagtgtttgtaggcatcactgcctcagctgttaaggagacctgtgtcaaaacttacatccacattcctacacccccacaacccatcacttctggtgttaaccctaaaatacccacatgtattgagctggtcttctgcatttaagtatttctccccagtttttttccccactgtgtgtggggggagggtccataaacccgagtgtgcctttgctttccacccttgctagacactggtagatgcaacaaactcagatttatatttgttgtaaagttgtaaaaatattgtgatgtcaccaattttccttccatctccacatcccctaacatctgattcacgacttaatgtatgttgtaagaaaagaaaaaagaaaagaaaaaaagggaaaaaagaaaagcaaggaaaaggctctttattacttaaaagtaataaaacctgactgttctatattaaaaaaaaaaaaaaaaaaaaaaaaaaaaaaaaaaaaaaaa

SEQ ID NO: 30519 - DNA, 4146 bp, Homo Sapiens
gaccactgagacgagcgggagcgcggagcagcagcctctgctgccctgactttttaagaaatctcaatgaactatttgtagagaatcactgatccggcctgcaagcattttgcacggcaaaaatatcgatcagtgttaagtgaagatcacattttatatgcgatcttgacttttttgtcttacattatatttttatagattttgttataaacatggtgctgggaaaggtgaagagtttgacaataagctttgactgtcttaatgacagcaatgtccctgtgtattctagtggggataccgtctcaggaagggtaaatttagaagttactggggaaatcagagtaaaatctcttaaaattcatgcaagaggacatgcgaaagtacgctggactgaatctagaaacgccggctccaatactgcctatacacagaattacactgaagaagtagagtatttcaaccataaagacatcttaattgggcacgaaagagatgatgataattccgaagaaggcttccacactattcattcaggaaggcatgaatatgcattcagcttcgagcttccacagacaccactcgctacctcattcgaaggccgacatggcagtgtgcgctattgggtgaaagccgaattgcacaggccttggctactaccagtaaaattaaagaaggaatttacagtctttgagcatatagatatcaacactccttcattactgtcaccccaagcaggcacaaaagaaaagacactctgttgctggttctgtacctcaggcccaatatccttaagtgccaaaattgaaaggaagggctataccccaggtgaatcaattcagatatttgctgagattgagaactgctcttcccgaatggtggtgccaaaggcagccatttaccaaacacaggccttctatgccaaagggaaaatgaaggaagtaaaacagcttgtggctaacttgcgtggggaatccttatcatctggaaagacagagacgtggaatggcaagttgctgaaaattccaccagtttctccctctatcctcgactgtagtataatccgcgtggaatattcactaatggtatatgtggatattcctggagctatggatttatttcttaatttgccacttgtcatcggtaccattcctctacatccatttggtagcagaacctcaagtgtaagcagtcagtgtagcatgaatatgaactggctcagtttatcacttcctgaaagacctgaagcaccacccagctatgcagaagtggtaacagaggaacaaaggcggaacaatcttgcaccagtgagtgcttgtgatgactttgagagagcccttcaaggaccactgtttgcatatatccaggagtttcgattcttgcctccacctctttattcagagattgatccaaatcctgatcagtcagcagatgatagaccatcctgcccctctcgttgaaggaacacttggttgaatcaagttgatgtgggttccgaactgtatctcttccggctgaggacagagaagtatcttggagacacgtttcagaggaagtggaattacttttgcccagaaaaatggcgaatacatgaaacaaccagtgatcatgctttagaagcctacagcaacattctgagactgctccaacatgcttgaagatctaagcttttctcttttaaaactggcacatactcagagcagtcttcttagcctatggtcgtacgtgtcaagacatcacgttgtaaagagggatgatttccttcttttgatttgaaaatttgcacatgctcaatgcttacattgtgcggttcgacgtcactacagcttctttttttttttttttttctatttttgccagactcttgatactcttaaaacttgtttgtggtcagcacaacaaggaacaaaacaaagctttgaaaaaactttaacatgaaaaaacgcactgacatttttttttatttaatatagcctggactttacctgcgtatgcacatgctcagaattgtctactaggctgactatgtatcacctcttcagcttggatccaattgtggatttatttacaaacatcaaatgccttcaagccaatcctttttgctgtatgttttgcagcctactgtagtagatacgcaacagataatgtgggaaaaaaagagataagaggaggaagctaataagagactgtcaagattgtataccttcttggtttcttttaagaatttgttgcctttctactattacagcaaagcagcattttgttactgactgcctaaaatcacttaatctcaggtgaacgcatcacttgccaaactgttggaatgctatttgtgttttgttgcactgtttttttcgtttgtttgtttgtttatttggttggctttttggagagggaaatttggaaacgggacatacacaaaagttacacacccacattccctttttatcatgacatacaagaagaaactagcagagctaagaatggagtgaagaaaggcagtatggcaggcaccagcaaagagttgagggctgttgctcttaaaaattattttttttattattattttgaaagtatggaagttttccattcactggggaaaggagggaaaagtgcatttatttttatacagagttacttaattacctccaaaacacatatgttggaaatcgcttttgctggtgcaaagtatattaatgagcaggaatacatacattgaggttatgaatagagagctcaatttgtacctttgctgtcttgctcaagcttggtatggcatgaaaactcgactttattccaaaagtaacttcaaaatttaaaatactagaacgtttgctgcgataaatcttttggatttttgtgtttttctaatgagaatactgtttttcattacctaaagaacaatttgctaaacatgagaaatcactcactttgattatgtatagattacataggaagaacaatcacatcagtaagttatagtttatattaaaggtaattttctgttggctcataacaaatataccagcattcatgatagcatttcagcattttccaaggtaccaagtgtacttattttgttgttgttgttgttgttgtattttagaaggaattcagctctgatgtttttaaagaaaaccagcatctctgatgttgcaacatacgtgtaaaatgggtgttacatctatcctgccatttaaccccacagttaataaagtggctgaaaataatagtagctctggcttggtgcttgacctggttaaatactgtcttaaagctcatacaaaacaaataggcttttccataagtggcctttaagaaaacatggaagacaattcatgtttgacaaatgctgacagggtgaagaaagcccagtgtaaaaatgaatcgcgttttaagtgattcggttaaagagtttgggctcccgtagcaaactaatactagataataaggaaatgggggtgaaatatttttttattgttgaatcattttgtgaatgtccccctcaaaaaaagctaatggaatatttggcataaagggcatttggtggttttatttttgtttgagggggattgtcagaaaatcccttttctctcttacgtctaactgactagggaacaattgttgatatgcatagcattggaatacttgtcattatatactcttacaaataacacatgaagcaagaatgaccaatattctgataattggcactggatcacaaaatgtgataaaactttaaatgtataaaactttatcaaataaagttttattttcccctttaaaatgtatttctttagaggcattacttttttaaaaatattggtcaattcctgacataagatgtgaggttcacagttgtattccagtattcaagatagattcctgatttttcaattaggaaaagtaaaatccaaaatgttagcaaaacaaagtgcaatattaaatgtttgctttatagattatattctatggctgtttgtaatttctctttttttccttttttatttggtgctgaatatgtccttgtaggctctgttttaagaaaacaatatgtgggaaatgatttaatttttcctattgctcttccttgtggaaaataaagtgttttgtttttttctgttttgtataaaaaaaaaaaaaaaaaaa

SEQ ID NO: 30520 - DNA, 4282 bp, Homo Sapiens
ggcgagatcccagagcgacgcggtggcggcggcagcgccagccccctcctcccccgggaagtcggccgggcttgaggccgggccccagacgtcccgcttcgccccgaggcgccgccgatggtccccggagctcctgcccccagtgcatgagcagccgagcctgctaaccgcagctccgcacttgtccatccccctgcggctacaccatgtccagctcctacgatgaggcctcactggcgccagaggagaccaccgacagcttctgggaggtggggaactacaagcggaccgtgaagcgcatcgatgacggccaccgtctatgcaacgacctgatgaactgcgtgcaggagcgcgccaagatcgagaaggcgtacgggcagcagctcaccgactgggccaagcgttggcgccagctcatcgagaaaggcccacagtatggcagcctggagcgggcctggggtgccataatgacagaggcagacaaggtgagcgagctgcaccaggaggtgaagaacaatctgctgaatgaggacctggagaaggtgaagaactggcagaaggacgcctatcacaagcagatcatgggtggcttcaaggagacgaaggaggctgaagatggcttccgcaaggcccagaagccttgggccaagaagatgaaggagctggaggcagccaagaaggcctaccatttggcttgcaaagaggaaaagctggccatgacacgggagatgaacagcaagacggagcaatcggtcacacctgagcagcaaaagaagctgcaggacaaagtggacaagtgcaagcaggatgtgcagaagacacaggagaagtatgagaaagtgctggaagatgtgggcaagaccacaccccagtacatggagaacatggagcaggtgtttgagcaatgccagcaatttgaggaaaagcggctggtcttcctcaaggaggtgctgctggacatcaaacggcacctcaacctggctgagaacagcagctacatccatgtgtaccgtgagctggagcaggccatccggggggctgatgcccaggaagacctcagatggttccgcagcaccagtggccccggcatgcccatgaactggccccagtttgaggagtggaacccagaccttcctcacaccaccaccaagaaggagaaacagcctaagaaggcagagggagtggcgctgaccaatgccactggggcggtagagtccacatcccaggctggggaccgcggcagtgttagcagctacgacagaggccagccctacgccaccgagtggtcagacgacgagagtgggaacccctttgggggcagtgagaccaacgggggcgccaacccctttgaggacgactccaagggagtgcgcgtgcgggcactctacgactatgacggccaggagcaggacgagctcagctttaaggccggagacgaactcaccaagctgggcgaggaggatgagcagggctggtgccgtgggcggctggacagcgggcagctgggcctctaccctgccaactacgtggaggctatctagaggccccctccctccatactcccgtcactcctccccactgccgcccctcccctcccactctcgtctccttcccctcgccatagagttccagacatattttccgatcaagcttttatttttttaaaagtcaaaacagaacaaaacaaagtatgcagagacagagcatttgcagggccacctggaggctggggtgctggggcttggggtggccccagggtaggtaacagtcttaggacttagcccaacatcacaacatctgctcttcgggttccaccaaagagtctcctgagccctgagggatggatgtctcctgacccttccaccccgcctcactccctccgtcccactccactccaggctgccggcacctgccccattccctggcctggtttcctaacctcttcttcctcccctgccctgcttcccttcctccaccaccctgctctcaaaggcctcctctccagacccctggaagggaggcttccccatctttagttttccactctgccccggggagcacccttctactcctagccacgtcccttgggaccggtgggactggaggaggaacggtcaccctcctcccccatggaggtttccaggggtcccccagacatgaaagaggggtgagctggaggaagtcatggtgtcactggggtacaggagggtgaatgaagggcatgcaggccctcagcccgggctgtgccagccctcccagccccaggcccatctgagggaccaagacgctgttacgcaggcccttctttccagctatcagcactttcagcatcggctcttcagcagatccaaaccccctcagcaacttgcagaggacctgtcccctctcaaaagtcccctggcctagggtggggacccccaaacctacggcaaagccagcaacagtagcagcctgctcccatttgctggggaggagatcatcttgttcccctggccccccactctccctccatgtccatccaaaaaccataaaatcactgggttccacatcagcctccatgaggccaagccttgtacctgcaaggctcttggcctaaccattcctctgtcctcttctctggcctgcctggggagcccgtgaaggccgcacgggtgcctccagcctgagacatcaggggagagcctgcagctgagttcagcagaaaggaggaatcctggccctcaggaagaagatagtcacatgtttttcttccttgtccccacagcccccagaacaacattctccctgctggcagcccttccatgtctccaaacctgggtcagagtgaaaggacctttgggggtgggtgggagcaaagggcccacctgctggttggtgaaagcagtggtgccggagtgctaggtaccgcacgagagggtgcgggggcttgggaagcagaccagggttggacaaaaccccatgagggcggggagctggaagaaaagtctcttggggacctctggggcaaggagctgagaagtcctgcagcaccaggtgagacttgcttacagtggatgccacttctaggcctctggaccgcagatgccctcctccctcctgcacacctggcctcctgggcctccaggtaaagagagagagccagcccagccctgtttcccctcagtcctcctttgctcctgctgcttctcccaacagcccactgttaggaggtagtagaccccagcctcaaggctctgaccttcttcatgtgggcacagagggtcctgacactctggcagggcctgagctggggcaggcctccctcagggccaggggcgatggcaccccggggacaggcagacctccttcctgccgtcagcacccccttccttatcactgtctggtctccgagcttcggctgcagcctgaggtgtgtcctgggctcctcagagcctgaagcaagcttttggaagcctgcagtcctcccagctccagtgcagaagcctctctctccagcctttccccaggcaggagttggggttgggggcctctgtccctcatcgcttaccttggaaaggtgggaagctggcaatctgcaccttggggcctgggctccccctctctgtgccagcggcttcccagcacctgggaggggctgcagccccagctggactccagcctgtccctcttagcactctagctgcccactccagggcagggactcgaaaccccctccgtcctgagcagccacctccagggccctgtttgggaccactctctcagtccccaggtcctcagggccccagagcgggagggtctcctacctggaagtccccctgagctccagggcccagccctacctgccagtgctggtgtcagggcactcaacaccgagtgtgggggccacgccccttgccatgcccacggcctcctcctgtagcccctgcctgcacccacgatgctgcacgggcccgccctggtggggctcggcgagtaatgtgttttgtccccagttaaccaccattctgcggcctggttctgcaaggaaccagggctgccccaccgcccgccgtctgccgccctaggcttcctgactccattagttccgacacttgtgaaactccgagaagtgctgtggtctcagcaatgcacctgttttgtacatgattgtgtaatttaaaggtatataaatacaaatatatatatatatcagttgtgattgtatgactgtggataaaatccagaactgtgtcaaaaaaaaaaaaaaaaaaaaaaaaaaaaaaaaaaaaaaaaaaaaaaaaaa

SEQ ID NO: 30521 - DNA, 6633 bp, Homo Sapiens
cggcgccgcgcggccgcgctagaatggaggcgcccagcggcagcgagcccggcggcgacggggccggggactgcgcccacccggacccccgggcccctggcgccgcggcgcccagctccggccccggcccgtgcgcggccgcccgggagtccgagcgccagctgcgcctccgcctctgcgtcctcaacgagatcttgggcaccgagagggactacgtgggcaccttgcgcttcttgcagtcggcattcctgcatcgcatccggcagaacgtggccgactcagtggagaagggcctcacggaggagaatgtcaaggtcctgttctcgaacatcgaagacatcctggaagttcataaggatttcttggccgccttggagtattgtttacacccggagccgcagtctcagcatgaacttgggaatgttttcttaaaattcaaggacaagttctgcgtgtacgaggagtattgcagcaaccatgagaaagccctgaggctgctggtggagctgaacaagatccctaccgtgcgcgccttccttttgagctgcatgcttctgggaggccggaagaccacggacatccctttggaaggctacctgttgtctccgatccagaggatctgcaagtacccgctcctccttaaggagctggccaagaggactcccggcaagcacccagaccaccccgcggtccagagtgccctgcaggccatgaagaccgtttgctccaacatcaatgagaccaagcggcagatggagaagctggaagccctggagcagctgcagtcccacatcgaaggctgggagggttccaacctcacagacatctgcactcagctcctcctgcaagggactttgttaaagatctctgcgggcaacatccaggaaagggccttcttcctcttcgacaaccttctcgtctactgcaagcggaaatccagggtcaccgggagcaagaagtccaccaagaggaccaaatccatcaacggctccctctacatcttcaggggtcgaatcaacactgaagtcatggaggtggagaatgtggaagatgggacagcggattaccatagcaacggctataccgtcaccaacggctggaagatccacaacacggccaagaataagtggtttgtctgcatggccaagacggcagaggagaagcagaagtggctggatgccatcatccgcgagcgggagcagcgcgagagcctgaagctgggcatggagcgtgatgcctacgtcatgattgcggagaagggggagaagctgtaccacatgatgatgaacaagaaggtgaacctcatcaaggaccgccggagaaagctgagcactgtccccaagtgctttcttggcaatgagttcgttgcctggctcctagaaattggtgaaatcagcaagacggaagaaggagtcaacttgggccaagccctgttggagaatggcatcatccaccatgtttccgacaagcaccagttcaagaatgagcaggtgatgtatcgcttccgctacgacgatggcacctacaaggcccgaagtgagctggaggacatcatgtccaagggtgtgaggctttactgccgtcttcacagcctctacaccccggtgatcaaagaccgtgattaccacctgaagacctacaagtcagtgcttcccgggagcaagctggtggactggctgctggctcagggagactgccagactcgggaggaggcagtggcgctcggcgtgggtctgtgcaacaatggcttcatgcaccacgtgctggagaagagcgagttcagggatgagtcccagtacttccgctttcatgctgacgaggagatggaggggaccagcagcaagaacaaacagcttcgcaacgacttcaagctggtggagaacattctggccaagcgcctgctgatcctgccccaggaggaggactatggctttgacatcgaggagaagaacaaggctgtggtggtgaagtccgtccagaggggctcgctggctgaggtggctggcctgcaggtggggaggaagatctactccatcaatgaggacctggtgttcctgcggccgttttcagaggtggagtccatcctcaaccagtccttctgctcccgccgccctctgcgcctcctggtggccacgaaggccaaagagatcatcaaaatccccgaccagccggacacactgtgcttccagattcgtggagctgccccaccgtacgtctatgctgtggggagaggctctgaggccatggctgcagggctctgtgctggtcagtgcattctgaaggtcaatggcagcaacgtgatgaacgatggtgcccctgaggtcctggagcacttccaggcattccggagtcggcgcgaagaggccctgggcctgtaccagtggatctaccacacccatgaggatgcccaggaagcacgagccagtcaggaggcctccactgaggaccccagtggcgagcaggcccaggaggaagaccaggctgattcagccttcccactgctgtccctgggtccccggctgagcctgtgtgaggacagccccatggtcaccctgactgtggacaacgtgcacctggaacacggcgtggtgtatgagtatgtgagcacggcaggcgtcaggtgccatgtgctggagaagatcgtggagccccgcggctgcttcggcctcaccgccaagatcctcgaggcctttgctgccaatgacagcgtcttcgtggagaactgcaggcggctcatggccctgagcagcgccatcgtgaccatgccccactttgagttccgcaacatctgtgacaccaagctggagagcattggccagaggattgcctgctaccaggagtttgcagcccaactgaagagcagggtcagcccacccttcaaacaagcccccctggagccccacccgctgtgtggcctggacttctgccccaccaattgccacatcaacctcatggaagtgtcctaccccaagaccaccccctcagtgggcaggtccttcagcatccgctttggacgcaaaccctccctcatcggccttgacccggagcaaggccacctgaaccccatgtcgtacacccagcactgcatcaccaccatggctgctccctcctggaagtgcttgcctgctgcagagggtgatccccaaggccagggtctccatgatggcagcttcgggccagccagtgggacccttggtcaggaagaccggggcctcagcttcctactcaagcaggaggaccgtgagatccaggatgcctacctgcagctcttcaccaagctggatgtggccctgaaggagatgaagcaatatgtcacccagatcaacaggctgctgtccaccatcacagagcccacctcgggtgggtcctgcgacgcatccttggctgaggaggcctcctccctgcccctggtcagtgaagagagcgagatggacaggagtgaccatgggggcatcaagaaggtgtgcttcaaggtggccgaggaggaccaggaggactcaggccacgacaccatgagttatcgcgactcctacagcgagtgtaacagcaatcgagactcggtcctgtcctacaccagcgtgagaagtaacagctcctacttgggcagcgacgagatggggtctggagatgagctgccctgtgacatgcggatcccatctgacaagcaggacaagcttcatggctgcctggagcacctctttaaccaggtggactccatcaatgctctcctcaaggggccagtcatgagccgggctttcgaagagaccaagcatttccctatgaaccacagcttacaagagtttaaacagaaagaagagtgtacaatccgtggccggagcctgatccagattagcatccaggaggacccctggaacctccccaactccatcaagaccctggtggacaacattcagagatatgtggaagatgggaagaaccagctgctcctggccttgctgaagtgcacagacacggagctgcagctgcgcagagacgcgatcttctgccaggccctggtggccgccgtgtgcaccttctccgagcagctgctggcggccctgggctaccgctacaacaacaatggcgagtacgaggagagcagccgcgacgccagccgcaagtggctggagcaggtggcggccacgggcgtcctgctgcactgccagtccctgctctcgccagccacagtgaaggaggaacggaccatgctggaggacatctgggtgacgctgtcagagctggacaatgtcaccttctcctttaagcagctggacgagaactatgtggccaacaccaacgtcttctaccacattgagggcagccggcaggcgctgaaggtcatcttctacctcgacagctaccacttctccaagctgccctcccgcctggagggtggggccagcctgaggctgcacacagcgctgttcacgaaagtgctggagaacgtggaggggctgccttctccaggcagccaggccgcggaggatttgcagcaggacatcaacgcgcagtccctggagaaagttcagcagtattaccgcaaactcagggcattttacctggagcggtctaacctgcccacggatgccagcaccacggcggtaaagatagaccagctgatccgccccatcaatgccctggatgagctctgccgcctcatgaagtcctttgtccacccaaagcctggtgctgctgggagtgtgggcgccggcctcatccccatctcctcggagctctgctaccgcctgggggcctgccagatggtcatgtgtggcacaggcatgcagaggagcaccctgagcgtgtccctggagcaggcggccatcttggcacggagccacgggttgctgcccaagtgcatcatgcaggccacggacatcatgcggaagcagggcccaagggtggagattctggccaaaaacctgcgagtcaaggaccagatgccccagggtgctccgcgcctctaccgcctctgccagccgccggtggatggggacctctgaacacccaaatgccccacgctgggccgcggcctctggagctgggatttgggaggacacagcaggcagcgctggccttctccagggatggcccaaggcttccgcagccgcccgttccgggacctgcccagcgtcctccctgcctccttccgggacaagcctggccaccctcgctgtgatgacgagctggctgattggccctgggccggcccattcttcacacgcctgccagaagctggaggggtgctggagacccatagagctgatgggagcagctggtgcctggccttcggctcctgcgtccccagaacccaagggaacgtcatggaggccacatggggccacccggctccctcgggatggctccgcctgcacttttgaaaccccggtttccttcaacgtccacattccaggtgaccacacgtgtctcctcctcctcatcttagcttccaggttcaccctaaccctgtactaacctgcttggtggacttggaaaagacttggctctgtcgggaaaggagagacggggcctccatcacgcctgttaccagaggatccccgagagccacaccagctctggacatcaccgcccctggaactggggccaccagccctgggcacgagatttgctctgactttatttatatggcatgaaatctctggtttattttgggattttttgttgttggtgttgtcaaagtttgttttttctaaagttgtgtgattatatatttgacattttacatttcaaagaaaggtatgttgtctaacaggggaccaacagaaggtagtattgacaactgttcccgcttctactaaaaaaaaaagagcacaaaagaaaaactaaattattgaaaaattaaaaaatgtcattgtttcctgtttgttaatattagggttgtaaggtgtcgttttgaggtatcgactgtgattccttcccccaccctccattctccagcggttggccggtgttagaactcgctctctttgagtgactggctacaagggcctgagaggtggccagccagggttggagctggaggggatggagccccacctgaggtgccgtgtcacacgggttagagggtcactgggaaacaccgggcggtggcttctgtgatttattttcttgatggtaacttctcagagcagggcgattgggacatcaccagccagagcacaggaagccaccctgcctgctggggaggagggacccacacaagccccctcggcagtttgtccccccagcttcggtatgccttcagggaaaggtcacagctggggaggaagcggggggacgcctgtcacccctggcaggtggtgagttcaggtgggggctccctgctgcccccaggcctgggagcttgaagccctcccggcatctggcatccgagcctcccgccctccagggtgcgcttccctctcttgccgcagcatacacgagggcaggcagtggccttgtcactgtatcttgcatcagagacaaaggaggacccgctttagccctgctgcgggaaatgggggagggcccagggccagcgcattgtgcactggtttactttaaaatgtacagattcttctcgttaaattcttgatagattttttattattattaaaagtcagtttataatac

SEQ ID NO: 30522 - DNA, 5326 bp, Homo Sapiens
caagaagaaaggcaagccagcaagcatggtgaagaacaaggagcaggtccgccacttctactaccgcacctggcacaagatcaccaagtacatcgactttgatcatgtgttctctcgaggcctgaagaagtcatcccaggaactgtatggcctgatctgctatggcgagctgcgcaagaagattgggggctgtatggatgacaagaatgcaacaaagctgaatgaactcattcaggttggacggagtttcaccatgttggccaggctggtcttgaactctcgacctcaggaaacctgtcaagggccaccactgtacgttacaaagggcggaacctgcggatcaaagcgcccatgtgccgggccctgaagaagctgtgcgatccagatggcttgagtgatgaagaggaccagaagccagtgcgcctgcctctgaaagtccctatagagctacagccgcggaacaaccacgcctgggcccgtgtgcagagccttgcccagaacccacgcctcaggatgatcgtggagctacatcgaaaggtctccagcctcatcgaattcttgaagcagaagtgggcgctccatgaggtgcgagttcggaagacactcgaggagcggcagctgcaggactcatgctccgcaccgatgcaggagaagacttggcagatgcacctgcggaggagctccaggagaaggggagccccgcggggcctccgccgtctcagggacagcctgccgccaggcccccgaaggaggtccccgccagccggctggctcagcagctccgtgaggagggctggaacctgcagacctccgaaagcctcacgctggccgaagtctacctcatgatgggcaagcccagcaagctgcagctggagtacgactggctggggcccggccgccaggacccccgccccggctccctacccaccgccctccacaagcagcgcctcctcagctgcctcctgaagctcatttccaccgaggtcaaccccaagctggctctggaagcaaacaccatctctacagcctcagtaaggcccgcccaggaggagcagtcgatgacgcccccagggaaggtggtgaccgtcagctctcgcagcccccgctgccctcggaaccaggcctccctccgcagcagcaagaccttcccgcccagctctgcaccctgctcctcaggtttgagaaaccctccaagacccctcttggtgcctggtccctccagcacaggaagcaatgactcagatggaggcctttttgctgtcccgacaaccttgccacccaacagccgacacgggaagctcttctctcccagtaaagaagcagagctgactttccgccagcatctgaactccatcagtatgcagtcggatttcttcctgccaaagccccggaagctgcggaaccggcacctgcggaagccactggtggtccagagaacactgctccctagaccatcggaaaaccagtcccacaacgtttgttccttctccatcctgtctaactcttccgtaactgggagaggttcgttccggcccatccagtcttctctgaccaaagcagctctgtctcggccgatcgtgcccaaggtccttccaccccaggccacgagtcacctggccagtgctatcgacttagcagctacaagtgccggcatcctttccgggaaccccctccctgccttggacaccgagggcttgtctggcatctctccactgtcttcagacgaggtgacgggtgccatctcggggcaggactctactggaactcaccaggatggagacaccctccccaccgtggggggctccgacccatttgtcagcatcccttcgaggcctgagcaggagccagtggcagacagtttccagggctcatctgttctctccttatctgagctgcccaaggcccctctccagaatggcctctccataccgctgtcctcgtcagagagctccagcacccggctgtctccaccagacgtctctgctctgctcgacatctccctgcccggcccacctgaggatgcgctgtcacagggcgagcctgccacacacattagcgactccatcattgagatcgccatcagctccggtgaaggagtccctctttctccagcaaaactgaatggcagtgacagttccaagagccttccctccccgtccagcagcccccagccacactggatcgcctctcccacccacgacccccagtggtaccccagtgactccaccgactcctcgctcagcagcctgtttgcaagcttcatctccccagagaagagccggaagatgttgccgactcccattgggaccaacagtggcacttccttgcttggccccagcttgttggatggaaactcgcgggactcatttgtgtccaggtccctggctgacgttgcagaggttgtggattcccagctggtgtgcatgatgaacgaaaacagcattgattacatttctcggttcaatgacctggcccaagagctgtccatcgctgagcctggccgccgagaagctctgtttgatggtggtggaggcggccccgctgtcagtgacctgtcccagtgaccacacgtcctggtggcggatgaagccctcttcgagctagagaaaaatagataagcccagcagccccagaagatggtctgaacagaggcatctccgcacccaagactgtgcaacgggcaggaacgtggtcacagagctgcttccccacgagcagcaggcaacggcgtccaaggagactaggatgagttcttggcaagggccagcgttagaaatcactgtggtactagagccgttcttcaccacgcctgggcccatgttagggtctgcataatgatcccatttcagcctgtgctctgcctcgattgttgtgttggacattccggtggcatttccttctgagacaagggagtatgtgtgccttggtgtagttgctgtgcactaggagctgtgatctccctctctgcagggaggccccagcccctgctgcttgctttctgccaaacctgtgctatgcatcagctgtgccctctgtggactgtaacgggcaggacagttgggtgtggcctgggctcatgcctggtggtgtcacatcccaaggcagcaagagcatggataccgatcacagggctgctgcggagtcgtggggccctgggctggtgcctcccctccctagaggttttgttcgtactcttaacagggagtggggtcaggaagagtcctgtactatgcaggttgtgtggactttacatgggaccctgctaagctggttgaaaatgtttttcttgtgttttaagaattaggagacatggaagaggaagaacaaagtcccctctgtagttggtttccttcctgtgtccctttgcaagcttccaggcgatctaaggtgtcatttctccctcctggggtgacccttaggcgctaatatgattacagcgaagactttcctgataagttctcaaactcgatgtgtgactgtttggcacttgagacaaacctgcctttgcagggaaagtgtctctcacgggcattggtgtgggcgtgcctgacatacgtgttcagtcccttgcatacctttgccttgagacttctgtgtctccttcccatttgggacacccaggtgagggcccagacatctggatgtggtcagacctcaccaaatatatgccttcgtggtggtctccctccttgcgccctcttgggtggccagcgttcctactgcagacggcccaacatccagtctttccccaggacagagctaacaagggcccctttgccttctcatcctcaggagttccaggcacatgagtcaccgtccatccacatccagtgtggcctggagctgctacagaggtgttgggcaggccatgcctgtgccgccatctctcccttcctgcctcatttcatcccccgcagcagccgggattgattgtgctttcctaacccccttggacctactctccctcctccccaccattcctcttcccccacatgtgtggcacgctgcagccctcaaggccagccctggcccctccactgcttctctccccatccacaatggagaaggtgaaaagaggagggaaaggcctttggtgtggacaagcatgtggacgccctccgtcctgcagtcttgccagcccaccacagccactgtagaccacaggcaggccgtgtactgcaccactgggaggacgtggagaggacagtgaacttccagggccatgaagcccccaggaggagaatcgagcaatctttttggaagtccagaagaagctactccttccagcaggcctaataggatggcatctaatatttttggaccaacagaagaacctcagaacatacccaagaggacaaatcccccaggtgacttgagtagtcttgaattctccatctgttctggagactttggttgaatacaggcactgaggacacaaaagtggacgggggcttctggttcctgccagggagctgctcccaattgttccacggacccccatgagattcctgaaattgcgtgcaaattattgtgcatttaaacatttttcctagggagggagagtgtttttattcagatcgtcagtgggattgaaactcttaacaaggaagaattgatctagcacacatctacatagttcttcagtatttacccaacctcctagtggttacagtaggagggactctttgaaaaaggtttcttggccaggcgcggtggctcatgcctgtaatcccagcactttgggaggccaaggtgtgcagatcacgaggtcaggagatcgagaccatcctggctaacacggtgaaaccccatctctactaaaaaagaaaaagaattagccgggcgtggtggcgggcacctgtggtcccagctactcaggaggctgaggcaggagaatggcatgaacccgggaggcggagcttgcagtgagccgggatcgcaccactgcattctagcctgggtgacagagcgagactccgtctcaaaaaaaaaaagaaaaagaaaaagaaaaaggtttctcagccgggcgtggtggctcatgcctgtaatcctagcactttgggaggccaaggcaggtgatcatgaggtcaggagtttgagaccagcctggccgacgtggcaagactccatctgtactaaaaatacaaaaattagctgggtgtggtggtgcacgcctatagtcccagctactcaggaggctgaggcaggagaatcacttgagcccgggaggtggaggtggcagtgagccaaattcatgccactgcactccagcctgggtgacagctagactccatctcaaaaagaaaaaaaaaaaaaaaaaaaaaaa

SEQ ID NO: 30523 - DNA, 4703 bp, Homo Sapiens
ataaatgatcttggcatagaagagaatttaaagagtgatggcttcattccagcgctccaatagtcatgacaaagtaaggagaatagttgcagaggagggtcgtacagcaagaaacctaatagcttggagtgttccactagaaagcaaagatgatgatggaaaacctaaatgtcaaactggtggaaaatctaagaggaccattcaaggcactcataaaactactaaacagagtactgcagtggactgtaaaataacatcgtctacgactggagataaacactttgataaaagtcccactaaaacaaggcaccctcggaaaattgatctaagagctcgatactgggcatttctttttgataatcttcgccgagcagtagatgaaatctatgtaacttgcgaatcagatcagagtgtggtcgaatgtaaggaggtgctaatgatgctggataactatgtaagagatttcaaagcattgattgactggattcagcttcaggaaaagctagagaagacagatgctcaaagcagaccaacatcattggcatgggaagtaaagaagatgtctccgggacgccatgtgattccaagtccatcaacagatagaataaatgtaacatcaaatgctcgacgaagcttaaattttggaggttcaactggcacagtgccagctcctcgtctggctcccacaggtgtcagttgggctgacaaggtaaaggctcatcatacaggctctactgcttcttcagaaataacacccgcccagtcttgcccaccaatgacagtgcagaaggcctcacgcaaaaatgaacggaaagatgctgaaggatgggagaccgttcagagaggaaggcctattcgttctcgatcaacagcagtgatgccaaaagtttcattggcaacagaagccacaagatcaaaggatgacagtgataaagaaaatgtatgtcttttacctgatgaaagcatacagaaaggtcaatttgttggagatggaacttctaatactatagaatctcatcccaaagactcattacactcttgtgaccatcctcttgccgaaaaaacccagttcacagtgagtacattggatgatgtgaagaattctggcagtattcgagacaattatgttcgaacttctgaaatatctgctgtccacattgatacagagtgtgtttcagttatgctgcaagctggtacacctcctttacaagtaaatgaagaaaaatttccagcagagaaagcaaggatagaaaatgaaatggacccttcagatatttcaaattccatggcagaagtccttgctaaaaaagaagagctagcagatcgtctagaaaaggccaatgaagaagccattgctagtgctattgctgaagaagaacagttaactagagaaattgaagctgaagaaaacaatgatattaacattgaaactgacaacgacagtgatttttctgccagcatgggcagtgggagtgtttctttctgtggtatgtccatggactggaacgatgtccttgcagattatgaagctcgtgagtcttggcgccaaaatacatcctggggggacattgtagaagaagaacctgctagacctccagggcatggaattcacatgcatgaaaaactttcttcaccctctcgtaaaagaacaattgcagaatctaagaagaaacatgaagaaaaacaaatgaaagcacagcagctaagggaaaagttacgcgaagagaaaacattgaagcttcagaaattgttagaaagggagaaggatgtccggaagtggaaggaagaattgctagatcaacgacgcaggatgatggaagaaaaattacttcatgctgagtttaagcgagaagtgcagttacaagcaattgtgaaaaaagcacaagaagaagaagctaaggtaaatgaaattgcctttataaatacccttgaagcccagaataaacgtcatgatgttttatcaaaattgaaggaatatgaacagaggcttaatgagctacaggaagagcgtcagagaagacaggaagaaaagcaagcacgtgatgaagctgtgcaggaacgcaagagagctctagaggcagagcggcaggcccgtgtagaagaattgttaatgaagaggaaagaacaagaagcccgaattgaacaacagaggcaagaaaaggaaaaagcccgtgaggatgcagcccgggaaagagctagagacagggaagaacgattggcagcactcacagctgctcaacaagaagctatggaagagttacagaaaaaaattcagctcaagcatgatgaaagtattcgaaggcacatggaacagattgaacaaagaaaagaaaaagctgctgagctaagcagtgggcgacatgcaaatactgattatgcccccaaactgaccccttatgaaagaaagaagcagtgttctctctgcaatgtcctgatctcttcagaggtatatctttttagccatgttaaagggagaaaacaccagcaagccgtgagagagaataccagcatccaggggcgtgaactgtcagatgaagaagtggagcatctttccttgaagaagtacattattgacattgtggttgaaagtacagctccagcagaagctttgaaagatggagaagagcggcaaaaaaataaaaaaaaagccaaaaagataaaagcccggatgaacttcagggctaaggaatatgagagtttaatggaaaccaaaaattctggctctgattcaccttataaagcaaagcttcagcgattagccaaagatcttctaaaacaagtacaagttcaagacagtggctcatgggcaaacaataaagtgtctgctttggatcggaccctaggagagatcactagaatactggaaaaagagaatgtggcagatcagattgcatttcaagctgctggtggattaacagcccttgaacacatccttcaagcagtagtcccagccacaaatgtgaacacagttttaagaattcctcctaagtctctctgcaatgcaatcaatgtttacaacctcacctgcaataactgttcagaaaactgcagtgatgttctgtttagtaacaagattaccttcttaatggacctcctgatacaccagttgacggtttatgttccagatgaaaataatactattttggggagaaatacaaataaacaagtttttgaaggcttgacaactggacttctcaaagtcagtgctgtggttttgggctgcctgattgccaatcgaccagatggaaactgccagccagctaccccaaaaataccaacacaggaaatgaaaaacaaaccctcacaaggtgatccttttaacaatcgagttcaggaccttatcagctacgtggtgaacatgggtctgattgacaaactgtgtgcctgcttcctctcggtgcaaggcccagtggatgagaatcccaagatggccatatttctgcagcatgccgcaggactcttacatgcaatgtgtacactgtgctttgctgtcactggaaggtcatacagcatatttgacaataatcgccaggatcccacagggctgacagctgctcttcaggcaaccgacctggctggagttcttcatatgctctactgtgtcctcttccatggcaccatcttggaccccagcactgccagtcccaaggagaattacactcaaaataccatccaagtggccattcagagtttacgtttcttcaacagctttgcagctcttcatctgcctgcttttcagtctattgtaggggcagagggcttgtcccttgcattccggcacatggccagctccctgctgggccactgcagccaagtctcctgtgaaagcctccttcatgaggtcatcgtctgtgtgggctacttcactgtcaaccacccagataaccaggtgatcgtgcagtccggccgccaccccacagtgctgcagaagctctgccagttgcccttccagtatttcagtgacccacggctgatcaaagtactgttcccttcacttatcgctgcttgttacaacaaccatcagaacaagatcattctggagcaagagatgagctgtgttttactggccactttcattcaggatttggcacagactccaggtcaagcggaaaaccagccttaccaacccaaagggaaatgccttggttcccaagactatcttgagctggctaacagatttcctcagcaggcctgggaagaagctcgacagtttttcttgaaaaaagagaaaaaataaatgttttggttgattctgtatttgagtacccttgttaatattttaaattgtccaaacaaacattctaattgttccttaagaactcattttcccatgtttatactcttcccacactgtagatatggcatgtactttacactatttataatgactgtagatacttgaatgttctacttgctaattttgcaagttgagtttatttcatttatgcagagtatcttggagtttggtaatttccatcttatgataatatatactttgcatttgtgatatgggtgaaaggagacataaaattagcaagtctgttttgttcttgtaataaaagtaacttattctgttttcattgttgacttttcatgttaaggaaatacgaatctgaaagaaaaatgttaactccagctcttgaagtatcttaaataaagacttaattaaagtttaaaaaaaaaaaaaaaaaaaaaaaaaaaaa

SEQ ID NO: 30524 - DNA, 5156 bp, Homo Sapiens
gagaggcgggggattggtatgcgagcgaatgtgcgaggggagggaggcgtcccggcggagcgtggtactacgaccagcgcgggccggagggggcggggggatgcgccgcggcggcggcggcgcgggagctggggttggtgtttggcggcgccagagcagcggatcccggtctcgccgcagcagcagcgcgggtgtcgtgcaccgcctgaagacgccgtacctttctaccctcccacctttttttttttttttttaaataaccggaaccaatgaacgcagccgggatcagagctccggaggccgccggtgccgatgggaccaggctggcgcccggcgggagcccgtgtctgaggcggcgggggcggccggaggagtcgccggcggcggtggtggcgcctcgcggagccggcgagctgcaggcggccggggcgccgctgcgctttcacccggcttctcctcggcgccttcatcccgcctcgactcctggcccagcgtggggctggctgctgcggcggcggcgctgggctgcgttgctggtgctcgggctgctggtagccggagcggcggacggatgcgagcttgtgccccggcacctccgcgggcggcgggcgactggctctgccgcaactgccgcctcctctcccgccgcggcggccggcgatagcccggcgctcatgacagatccctgcatgtcactgagtccaccatgctttacagaagaagacagatttagtctggaagctcttcaaacaatacataaacaaatggatgatgacaaagatggtggaattgaagtagaggaaagtgatgaattcatcagagaagatatgaaatataaagatgctactaataaacacagccatctgcacagagaagataaacatataacgattgaggatttatggaaacgatggaaaacatcagaagttcataattggacccttgaagacactcttcagtggttgatagagtttgttgaactaccccaatatgagaagaattttagagacaacaatgtcaaaggaacgacacttcccaggatagcagtgcacgaaccttcatttatgatctcccagttgaaaatcagtgaccggagtcacagacaaaaacttcagctcaaggcattggatgtggttttgtttggacctctaacacgcccacctcataactggatgaaagattttatcctcacagtttctatagtaattggtgttggaggctgctggtttgcttatacgcagaataagacatcaaaagaacatgttgcaaaaatgatgaaagatttagagagcttacaaactgcagagcaaagtctaatggacttacaagagaggcttgaaaaggcacaggaagaaaacagaaatgttgctgtagaaaagcaaaatttagagcgcaaaatgatggatgaaatcaattatgcaaaggaggaggcttgtcggctgagagagctaagggagggagctgaatgtgaattgagtagacgtcagtatgcagaacaggaattggaacaggttcgcatggctctgaaaaaggccgaaaaagaatttgaactgagaagcagttggtctgttccagatgcacttcagaaatggcttcagttaacacatgaagtagaagtgcaatactacaatattaaaagacaaaacgctgaaatgcagctagctattgctaaagatgaggcagaaaaaattaaaaagaagagaagcacagtctttgggactctgcacgttgcacacagctcctccctagatgaggtagaccacaaaattctggaagcaaagaaagctctctctgagttgacaacttgtttacgagaacgactttttcgctggcaacaaattgagaagatctgtggctttcagatagcccataactcaggactccccagcctgacctcttccctttattctgatcacagctgggtggtgatgcccagagtctccattccaccctatccaattgctggaggagttgatgacttagatgaagacacacccccaatagtgtcacaatttcccgggaccatggctaaacctcctggatcattagccagaagcagcagcctgtgccgttcacgccgcagcattgtgccgtcctcgcctcagcctcagcgagctcagcttgctccacacgccccccacccgtcacaccctcggcaccctcaccacccgcaacacacaccacactccttgccttcccctgatccagatatcctctcagtgtcaagttgccctgcgctttatcgaaatgaagaggaggaagaggccatttacttctctgctgaaaagcaatgggaagtgccagacacagcttcagaatgtgactccttaaattcttccattggaaggaaacagtctcctcctttaagcctcgagatataccaaacattatctccgcgaaagatatcaagagatgaggtgtccctagaggattcctcccgaggggattcgcctgtaactgtggatgtgtcttggggttctcccgactgtgtaggtctgacagaaactaagagtatgatcttcagtcctgcaagcaaagtgtacaatggcattttggagaaatcctgtagcatgaaccagctttccagtggcatcccggtgcctaaacctcgccacacatcatgttcctcagctggcaacgacagtaaaccagttcaggaagccccaagtgttgccagaataagcagcatcccacatgacctttgtcataatggagagaaaagcaaaaagccatcaaaaatcaaaagcctttttaagaagaaatctaagtgaactggctgacttgatggaatcatgttcaagtggcatctgtaaactattatcccccaccctccactccccaccttttttttggtttaattttaggaatgtaactccattggggctttccaggccggatgccatagtggaacatccagaagggcaactgtctactgtctgcttatttaagtgactatatataatcaattcatcaagccagttattactgaaaaatcattgaaatgagacagtttacagtcatttctgcctatttatttctgctttgttctcagtgatgtatatgcaacattttgttgaaagccacgatggacttacaagctttaatggactcgtaagccagcatgggcttgcaaaaatttcttgtttaccagagcatcttcttatctttccacagagctatttacatcctggactatataacttaaaagaagtaaaacgtaattgcactactgttttccagactggaaaaaaaaaaaatctctgcaagtgaaactgtatagagtttataaaatgactatggataggggactgttttcacttttagatcaaaatgggtttttaagtagaacctagggtttctaattgacttgatttctggaaatgaaaacccgcgcttttattatgggaagcttcttgaactgcatttactattgtgaagtttcaagtcccgctgtaaagatcatgttgttttgttttccccagggctttcactgtgatttactgcattgcaggctgtatgataaaacacacataatttaaagagagaaggctcttgattccttatgcaagtggaagagttgaaacttgattgaaggacttaaaacattcacaaccttaagccgaggtggggggatatggggattcaggcaattgtttacacactttgaataactgcaaaggatttacggtttgtgaaaaatgtgtactgtggaaaagataataaattgaagacattattgtgtgggattgtgctgatttttgttgataacacaaaaaacactatgttttctggagagctgtgtaagctgtcttgttgcttagttgcaatataagaaatagtgatgttttggacgtaagttgtcaacaaatttctattttatattgttatatttttatgtagtttgaaatgtaaaaatgttctaatatcaagattaacaaatataaatttatggtgcatttagattgcgttgtattaatttataaagtatggtgttcattaaattggtgggttgtataagggtagcttttgttgttaaaaaaacagtagagagttaagttccatatagcaacaaagtatgttaacatctagggagtttctgcttataccactttaaaaatatgcaatcataagtgatttggttactgcaatgcagatggatgtttggatgaacaactgatacattttagttagaatgctttttcagcattatggctaaaatatatgtctaacccagtgctatttaggtgaaaatgctaattgataaaccagaagtttcttttgagatttgctttaaagaaatgctttagtaagaatatgaacaatttcctgatgtctcctataaattgtgattgtttattctattactattgttaaaaacttgaatggtatttatattggctgatatttatatacttaatagattgagttctgtaagggcaaaaacggattgaaatgaacatagcgttttgcactaatgataagataacctgagaggtagggttgaggaacacagggttgaaagctgttggagaggggaaaagttgtgcataaagaactgaaaagggttctggagtgttcattcagagtgaagggaaaactttatccttctatttcttataaccagacaggaggagttcttccctttgaaaattgcaaaaggaatgagaactttgcagttggatgaatagagaagggaaaagttgctggagcacggagtgaagatgggaggagctgttagcaaggcccactgctgctcctgggtgagaagggagctctggagcaggaccagctgggggccggcactgctgcttagagtggaggaggctggccaaagagactgtgggctgttttcagtcagggagcatgtgcattgtttgtgctcaatttcagacactcatttataaacaaattcaaccaagggatatttactgctttatgttgcttatgataattattttgcattaatacagtatacacatttgtaaattcaacaggaaattattgagttttggaaagctacagtaatttctgtattacatcatttatatgtgaaaagttggacatttctgtaagtttttaaaattatccatttgttactttaacattttaaaattatggtgttttcctgattttaaaagcaatattttccttactgt

SEQ ID NO: 30525 - DNA, 4621 bp, Homo Sapiens
agactccatccgccatgttggatgccgcagattcgccataacctcgccggctcttttcttaaaaaaataaaaataaaaagcgaagcgtcagcagggcgccccgccccctcggtcggcacgggagggggcccggaagagcccgaggcttttttttcctccgcggtggggcgttgccatggagacgcgggcggcagaaaacacggccatctttatgtgtaaatgttgtaacctcttctcaccaaatcagtcggaactcctctcccacgtttcagagaagcacatggaagaaggggttaatgttgatgagattattattccccttaggcctctgagtacacctgaaccccccaactcaagcaaaaccggagatgagtttttggtcatgaagaggaagagaggcaggcctaaggggtccacgaagaagtccagcacagaagaggagctggcagaaaacatcgtgagtccgactgaggacagcccgctggctccggaggaagggaacagcctgcctccaagcagcttggagtgtagcaagtgctgtcggaagttctccaacacgcgccagctgcggaagcacatctgcattatcgtgctgaatttgggtgaggaggaaggagaagcaggtaacgagtctgaccttgaactagaaaagaagtgtaaggaagatgatcgggaaaaagcctcgaaaagaccacggtcacagaaaacagagaaagtccagaagatctcaggaaaggaggccagacagctttctggggcgaagaaacccatcataagtgtggttttaactgcacacgaagcaattccaggtgctaccaagattgtgccagtggaggctgggccccctgaaacaggagctacaaattctgagaccacttcagcagacctggtgcctcggagaggctaccaggaatacgccattcagcagacaccttatgagcaaccaatgaagtcaagcaggctaggtcccactcagctcaaaatcttcacttgtgaatactgcaacaaggtcttcaagttcaagcactcgctgcaggcccacctgaggatccacaccaatgaaaagccatacaagtgcccccagtgcagctatgccagtgccatcaaggccaacctcaatgtgcacctgcgcaagcacactggagagaagttcgcctgcgactattgctcgttcacctgcctgagcaagggccacctcaaggtgcacatcgagcgagtgcacaagaagatcaagcagcactgccgcttctgcaagaagaagtactctgacgtcaagaacctcatcaagcacatccgagacgcgcatgacccacaggacaagaaggtcaaagaggccttggacgagctctgcctgatgacgagggagggcaagcggcagctgctctatgactgccacatctgtgagcgcaagttcaagaacgagctggaccgtgaccgccatatgctggtccacggagacaagtggccttttgcctgtgagctctgtggccatggggccaccaagtaccaggcgctggaactgcatgtcaggaagcaccccttcgtgtacgtctgtgccgtctgccgcaagaagttcgtcagctccatcaggctgcgcacccacatcaaagaggtgcacggggctgcccaggaggccttggtcttcaccagttccatcaaccagagcttctgcctcctggaacctggtggggacatccagcaagaagctctgggggaccagctacagctggtggaagaggagtttgccctccagggcgtgaatgcactcaaggaagaggcctgtcctggggacactcagctggaggagggccggaaggagccggaggcccctggggaaatgcctgccccagctgtgcacctggcctccccgcaggccgaaagcacagccctgccaccctgtgagctggaaaccaccgtggtctcctcctcagacctgcattctcaagaggtggtttcagatgattttttgttgaaaaatgatacctcctccgcagaggctcatgctgctcctgagaagcccccagacatgcagcacagaagctcagtccagacgcaaggtgaagtgatcacactactgctgtccaaggcccagagtgctgggtcagatcaggaaagccatggcgcccagagccccctaggggaagggcagaacatggctgtgctttcagctggtgacccagatcccagcaggtgtctcaggtcaaacccagctgaggcctcagacctcctccctccagtagctggtggtggggacaccatcacacatcagcctgactcttgcaaagctgcccctgagcaccggtcaggcatcaccgctttcatgaaggtcctgaacagtttacagaagaagcaaatgaacaccagcttgtgtgagcggatccggaaggtttatggagacctggagtgtgaatactgtggcaaacttttttggtaccaagtgcattttgatatgcatgtccgcacccacacccgggaacatctgtattattgctctcagtgtcattattcttccatcaccaaaaactgccttaaacgccacgtaattcagaaacacagtaacatcttgctgaagtgtcccaccgatggctgtgactactcaactccagataaatataagctacaggcacatcttaaagttcacacagcactggacaaaaggagttattcttgtcctgtttgtgaaaagtctttttcagaggatcgattgataaagtcacatatcaagaccaaccatcctgaggtctccatgagcaccatttctgaggttctcgggaggagggttcagctgaaagggctaattggaaagagagccatgaaatgcccatattgtgacttttatttcatgaagaatggctcagaccttcagcgtcatatttgggctcatgaaggtgtgaagcccttcaagtgttctttgtgtgagtatgcaactcgtagcaagagtaacctcaaggctcatatgaatcgtcacagcactgagaaaacccacctatgtgacatgtgtggcaagaaattcaaatcaaaagggacactgaaaagtcacaaactccttcacactgcagatgggaagcagtttaagtgcacggtgtgtgactacacagcggcccagaagccacagctgctgcggcacatggaacagcatgtctccttcaagcctttccgctgtgcccattgccattactcctgcaacatatctggctctctgaagcggcactacaacaggaagcaccctaatgaggagtatgccaacgtgggcaccggggagctggcagcggaggtgctcatccagcaaggtggtttgaagtgtcctgtttgcagctttgtatatggcaccaaatgggagttcaataggcacttgaagaacaaacatggcttgaaggtggtggaaattgatggagaccccaagtgggagacagcaacagaagctcctgaggagccctccacccagtatctccacatcacagaggccgaagaagacgttcaagggacacaggcagcggtggccgcgctccaggacctgagatacacctctgagagtggcgaccgactggaccccacggccgtgaacatcctgcagcagatcattgagctgggcgccgagacccatgacgccactgcccttgcctcggtggttgccatggcaccagggacggtgactgtggttaagcaggtcaccgaggaggagcccagctccaaccacacggtcatgatccaggagacggtccagcaagcgtccgtggagcttgccgagcagcaccacctggtggtgtcctccgacgacgtggagggcattgagacggtgactgtctacacgcagggcggggaggcctcggagttcatcgtctacgtgcaggaggccatgcagcctgtggaggagcaggctgtggagcagccggcccaggaactctagaggacatgtggcatcggatggccacagggcggggctgccaggctctgcaggcacccagggtggggaggccacccttcctgccctacccgcagaatggtgctctcctttgccctccctgcccagcagcctgataggactctcctagtccaacttggggtgggcaaggcagtcagcatcaccagcaataccacaggaccctcaccccagcatagacacacaccccctgacccttaccatctgcttcctgaaagacttcagtgtcagctcccctacacacaccccacaccttcaccccttgcttcaagattcaaacagagactcccagtccccctcagcatcttccctgaatcacagccccagctccttgacccccatctaggtgccaaatgttcatctgcaaccgctatgcagtctggtgagagggagacagccatcacatagaaagtgaccgtacgggtttttaatcactgctgggtggggtgggggtagggggattgtcctggctttgtcgacaaagtcccacttccccgagtattaagggcccttggtatcaagtgaggtaaattcacccatcacagggtctcgccctaccatcctggaattatttcacttttaagataaatgcactatttcactgttcgcctcccattctaaggaggtgaggtggttggaataaaaacagttcctgtctgaaaaaaaaaaaaaaaaaaaaaa

SEQ ID NO: 30526 - DNA, 4140 bp, Homo Sapiens
gtgacgcgaggtcacgtgacgggttgggcagcctgtgccgccgccgccgctttgtaagaggcacattggcagattttctattttgtacatacattattttgtatatactgtatatgatgacttcagtgagcagtgaccattgtcgaggtgctcgggaaaaaccacagatttcagcagcacaatcaacgcaaccacagaaacaagtggtacaggcaacagctgaacagatgcgtctcgctcaagtgatctttgataagaatgattcagattttgaagctaaagttaagcagcttatggaagtgacagggaaaaatcaggatgaatgcatagtggccctacatgattgtaatggagatgtgaacaaagctatcaatatattgctggaagggaattcagacacaacttcatgggagactgtagggtgtaagaaaaagaattttgcaaaagaaaattcagaaaacaaagagaatagagagaagaaaagcgagaaagaatcgagtcgtggacgtggaaacaacaaccggaaaggaagaggcggcaatcgtggcagagaatttagaggtgaagaaaatggaattgattgcaatcaagtggacaaaccttcagatcgtggcaagcgagcccggggtagagaactggcatcaaatactcacaacatagctcaggatctgtcaaacaaaagttcttatggactcaaaggggcttggaagaattctgtggaagagtggacaacagaagactggactgaagatctttctgaaacaaaggtcttcactgcctcatctgctccagcagagaatcacatcttacctgggcaaagcattgatctggtagccttgctccagaagcctgttcctcacagtcaagcctcagaagccaactcctttgaaacttcccaacagcagggctttggccaagcccttgtcttcacaaattcgcaacacaacaatcagatggcaccagggactggcagctccactgccgtcaactcctgttctcctcagagcctgtcatccgtccttggctcaggatttggagagcttgcaccaccaaaaatggcaaacatcaccagctcccagattttggaccagttgaaagctccgagtttgggccagtttaccaccaccccaagtacacagcagaatagtacaagtcaccctacaactactacttcttgggacctcaagcccccaacatcccagtcctcagtcctcagtcatcttgacttcaaatctcaacctgagccatccccagttcttagccagttgagccagcgacaacagcaccagagccaggcagtcactgttcctcctcctggtttggagtcctttccttcccaggcaaaacttcgagaatcaacacctggagacagtccctccactgtgaacaagcttttgcagcttcccagcacgaccattgaaaatatctctgtgtctgtccaccagccacagcccaaacacatcaaacttgctaagcggcggatacccccagcttctaagatcccagcttctgcagtggaaatgcctggttcagcagatgtcacaggattaaatgtgcagtttggggctctggaatttgggtcagaaccttctctctctgaatttggatcagctccaagcagtgaaaatagtaatcagattcccatcagcttgtattcgaagtctttaagtgagcctttgaatacatctttatcaatgaccagtgcagtacagaactccacatatacaacttccgtcattacctcctgcagtctgacaagctcatcactgaattctgctagtccagtagcaatgtcttcctcttatgaccagagttctgtgcataacaggatcccataccaaagccctgtgagttcatcagagtcagctccaggaaccatcatgaatggacatggtggtggtcgaagtcagcagacactagacactccaaagacaacaggccctccctctgccctcccgtctgtgagctccctgcccagcaccacctcctgcactgcacttctgccgtccacatcccagcacactggcgacctgactagcagccctctctctcagcttagcagttcgctctccagccaccagagcagcctctctgcacatgcagccctctcctcgagcacgtcacacacacatgccagtgtggagagcgcctcttcccaccagtcctcagccaccttctccacggcagcgacctccgtctcaagttccgcatcctcaggcgccagcctgtccagtagcatgaacaccgcgaacagcctctgtctgggtgggacccccgcgagtgcatccagcagcagtagcagggccgcgcccttggtgacctcaggcaaagcacccccaaacttacctcagggggtgcctcccctgctgcacaaccagtacctcgtaggtcccggaggactgcttcctgcctacccgatctatggctatgacgagctccagatgctgcagtcacggctgccagtggactactatggaattccctttgctgcacccacagcgcttgccagccgagatgggagcctagctaataatccatatccaggtgatgtcacaaagtttggccgtggggactctgcatcccctgcacccgctaccacaccagctcagccacagcagagccaatcacagacccaccacacagcccagcagcccttcgtgaatcctgcactgccacctggctatagctacactggtcttccctactacacaggcatgcccagtgccttccagtatggccccaccatgtttgtccctccagcctcagccaagcaacatggggtgaacctcagcactcccacacctcccttccagcaggccagtggttatggccagcacggctacagtacaggttatgacgacctgacccaggggacagcagcaggagactactccaaaggtggctatgctggatcatcgcaggcaccaaacaagtctgcaggttctgggcctggcaaaggagtatcagtgtcttcaagcaccactggtctacctgatatgactggttctgtctacaataagacacagacttttgacaagcagggatttcatgcagggacgcctccacctttcagcctgccctcggtcttgggctccactgggcccctggcctcgggagcggcccctggctatgcacccccaccattcctacacatcttgccagcccaccagcagccccactcacagctgctgcaccaccaccttccgcaggatgcacagagtggctcgggtcagcgcagccagcccagctccctgcagcccaagtctcaagcctccaaacctgcctacggcaactctccatactggacaaactaaacccagaagagaggggtgggctggggcaaggcttatcctgggcaggagagaacacacgagcacgtatttgggagcccagtgccctttcctagaattcccgacatgtgtcagccatgcctctgtggggagtctgcctcccagactggctactgtatgtaatgtatttatgtatgtatttgtaaatgtgatagaagtctgggggggagttgggggatggcggcagatgttagccaggtctgccctccccattcaagccccttctccactgtagcaaaataagcacccccaccccatctgccttcaggtcttcttcacagcctgcactgcccagtgggccactaggggcagtctctggaagggctggttcaaggctgtttgggtataggggtcaggtaccaatgaagaatcacgacttgtctcactcctttggaaattgttttctttcctgtgtaattacttcatacctctgtttttgagaaactgttccgtttgtcatctgtcatggtctccttccaccaaatcttcatctgggaatagcagcggtatccctccacccaagtatggccacctgtttgtcttcatatagaacaggggcttctggtctggtcatgtccctagagacttactagagactggctgaccatgaaaaaaaaaaaaataatctgagttattcagccagtcagctcccctttaaaaatctaaggtatctccaagcaacacatctccattctagttgtcttgaaccacgtgggcaactgtttcaggggttttctcttgcccaatccccacctaataaagttctgagagcatgaaaaaaaaaaaaaaa

SEQ ID NO: 30527 - DNA, 4905 bp, Homo Sapiens; identical to SEQ ID NO: 26748

SEQ ID NO: 30528 - DNA, 5668 bp, Homo Sapiens; identical to SEQ ID NO: 27804

SEQ ID NO: 30529 - DNA, 4943 bp, Homo Sapiens
attgtcgggggctattctctctcccaggaacatggcggcgagtcagggaggaggcggtaacagtgggggcggcggttgtggtggaggtggaagtagcggtggctgtggcacggctggagggggaggtggcggggctggagggggaggcggcggcggcggcgggaccctggtggtccccatcccggtaccgactcttttcggtcagccgttccccaacgggccgccgtggaacccggggagcctgcagcctcagcacaccgtgaggagcctggaccgggccctggaagaggcgggcagctccggcatcctgagcctcagtggtcggaaactccgagacttcccgggcagcggctacgacctgacggacaccacccaagcagatctttccagaaatcgttttacagaaattccttctgatgtctggttatttgcaccccttgaaacattaaatttatatcataattgcatcaaaaccattcctgaagccattaaaaatctgcagatgttaacataccttaacattagccgaaatcttttatcaacattgccaaaatacctatttgatcttccccttaaagttttggtcgtcagtaataataaactggtatccattccagaagaaattgggaagttaaaagatttaatggaattggatattagctgcaatgagattcaagtccttccccaacaaatgggaaaattacattcacttagagagctaaatataagaagaaataatcttcatgttttgccagatgaattaggagaccttcccttagtcaagctggatttctcttgtaataaagtgaccgaaattccagtttgttacagaaagctgcatcatttacaagtaataattttggataacaatccattgcaagtaccaccagcacagatatgtttaaagggtaaggtgcacatatttaagtacttaaatattcaagcatgttgcagaatggataagaaaccagattccctggatcttccatcattgagtaaacgaatgccctcacagcctctcacagacagtatggaagatttttatccaaataaaaatcatggccctgactctggaattggaagtgataatggagagaaacgattatccacaacagaaccatcagatgatgacacagtcagccttcattctcaagtctcagaatcaaatagagagcagacatcaagaaatgacagtcacataataggaagtaagactgattctcagaaagaccaggaggtatatgattttgttgaccccaacacagaagatgtagcagttcctgaacagggaaatgcacatattggatcatttgtatcattctttaagggaaaagaaaaatgttctgaaaaatctcggaaaaatgaagaattaggagatgaaaaaagacttgagaaagaacagttactggcagaggaagaggatgatgatttgaaggaagtaactgatttgaggaaaatagctgctcagttattgcagcaagaacagaagaacaggattcttaatcattcaacttctgtgatgagaaacaagccaaaacaaactgtggaatgtgaaaagagtgtctcagcagatgaagttaattcaccattatcacccctcacctggcagcccttagaaaatcagaaggatcaaatagatgaacaaccgtggccagaatctcaccctataatctggcagagtgaagaaaggaggcggagcaaacagattagaaaagaatatttcaagtataaatcaatgaggaagagttcaagtggcaatgaaaatgatgagcaagacagtgataatgctaatatgtcaacacaatctccagtatcatctgaggaatatgacagaactgatggtttttcacacagtccctttggcttgaagcctagatcagcttttagccgctcatctcgccaagaatatggggcagcagatccaggatttacaatgagaagaaagatggaacatttacgggaagagcgagagcaaatacgacaacttcgcaacaatcttgaatccaggttaaaagtaattttgcctgatgacattggagctgcactgatggatggggttgttctttgccatttagccaatcatataaggccacgttctgttgctagtattcatgtaccatcaccagcagtgcccaaactgagcatggcaaaatgtcgaagaaatgtagaaaattttcttgatgcttgtaaaaagttgggtgtctcacagaggaaagactttgtttgcctcatcatattttggaagaacgaggacttgtgaaagttggtgtcacagttcaggcgctccttgaattaccaacaaccaaggcatctcagctttctgtggcttaatataacattttaaaattctaagtgtatagtttcatttatttgaagtgatttcaaatatttcaaattcatgaataagaatattccgtcaaaaatagtttgccttaggtcacgccttaggattttaaaaaaattacattgaaacatcaaacttaaacattgaattgcccgaacttctttgggggaaaactggattaacttaataagagtatttgataaactcaaattctctttttactaagtcagttgataatcttgattatttttcagaaagcagactgatactaaatttaaaatgtagtttcaatttaataatcacattaggtttaatttttttacatcatagcatattagtaaacatctggataaaggtaattttttttagcaatttagagcaattctatatttgagttatttaatacacttctaattctagtttatacacaatttcttcaatctttggtcttagttttctagaaaaaaggagtagaaaaaacaattctggctttatattaaattcttttagtattataggttggtgccaaaatattttcagttgtactgtagattgtttacatgtgaagtgcctgtgtaattgatgactcttacatagtcttaagcatttttgcaattttttaaatgtattaatagagtcaatggaactttaaaatattttagtagattttgtaaagtcagtaatatgtgaggatttaaatgagcctcacattgtgacatttgtggttttttagttagtccattgcagtttcccttaaattggttatttcatgttgtcaaaaataccaatgttaatatgattaatttatgctatttaattttgtgaaacttaatcatcttttaaaatgtattatttgaagagtattttatttctgtattgaaaatgttacacaaagcagtaaagtttttgagaactagtgaagtactaattatcaaggacattttgataaaactgccaaagtttgggtttatatcttccctttgagcagcattctatcagtgctgcctttagctatactcagagagcagcagttgaggaataggtttttactcaaaatctggccatttgtgaatcctgtaaaccttgtgatcttcaattactttgatgttaaattaaacacagactcttctataaatattttcatgagatactgtgttacacaaagtccttgttttaacttaggtatgggtaaatttacattggtggtattgcaggaatttttcaaaaacattactgtaatgaataactgagtttcctatagaagaacctgaataattacttttgtagtaaccaagcaagcatcatatcttaagtatgtgatcatttgcacttgttacctcttaatatggatgcaacttattaaaaatgttggcctgggtatttcaaagggtatatataaaaggtaaaaaactagtgtgccaaatggtataggaacaactgtactttttttgatcagttggcatgaagccatagaattaaattttggctttagaatacagatgtgttcattacattccccaagggtcaaattggagcttttaaagaattaaagcttctatgagtatatggtttaagaattaaattattagtaatttattattttaaatatttgacctcattagttgttaattttttagttggataaaaaaaaaactcgctgacataatctccctagtgaaaacttgggtaatatatgtaagaaatggcaaataaataccttagttaatgactttttatgtagaaatttgacagcattacaaattaagtgaccattaaaaacacagcaatcattcatactgctttcataggtgttatgatagtctctgattaatcaatctagtatgaattattttacaagtgttgtcctgtttcatatctttgaagtagtagtgaaattgtaggccattttcttataacatttcagttacttttcagttaattattcctttaaaaagaaaatacagcagaacctcactgtagcattctttactgcagagcaaaattcaatttaagatgggcttctctgaggtccacatcatggcagttcatttactcttgtgccaaatggcaacaccacgtctaaagcagtttcacagcatggtcccctacaatgttataccaaggctctgatgtatttcttttagtagtttctaagtgtaaaatttattctaaatgtttttatggctattatctatttcatcagttattgaattaagaatgattttcattacttgagtgggatttgtgatttaatgacagttgaataatcaaaaatattttattaggcccccaaaatttaatagatatctatttctgttacattttattactgtatggcacaagaaagaagtgacattgggtatgttagaaatgaaataaggagtaaaaatgcattaccatttgtttaataattatctttacagaatgctagtttaatgacttttttaactgaattttttgaataaatcagaaatgtttgtattggtcacagatctatcataattgcttttctgatgcatttaaaaataaatggaacacttaaatgtatattaccgatgcaaactgtggataaagttgaaagaaaaaaaaaaaaaaaaaa

SEQ ID NO: 30530 - DNA, 3717 bp, Homo Sapiens
tgggcgccatggaggcagagcagcggccggcggcgggggccagcgaaggggcgacccctggactggaggcggtgcctcccgttgctcccccgcctgcgaccgcggcctcaggtccgatccccaaatctgggcctgagcctaagaggaggcaccttgggacgctgctccagcctacggtcaacaagttctcccttcgggtgttcggcagccacaaagcagtggaaatcgagcaggagcgggtgaagtcagcgggggcctggatcatccacccctacagcgacttccggttttactgggacctgatcatgctgctgctgatggtggggaacctcatcgtcctgcctgtgggcatcaccttcttcaaggaggagaactccccgccttggatcgtcttcaacgtattgtctgatactttcttcctactggatctggtgctcaacttccgaacgggcatcgtggtggaggagggtgctgagatcctgctggcaccgcgggccatccgcacgcgctacctgcgcacctggttcctggttgacctcatctcttctatccctgtggattacatcttcctagtggtggagctggagccacggttggacgctgaggtctacaaaacggcacgggccctacgcatcgttcgcttcaccaagatcctaagcctgctgaggctgctccgcctctcccgcctcatccgctacatacaccagtgggaggagatctttcacatgacctatgacctggccagtgctgtggttcgcatcttcaacctcattgggatgatgctgctgctatgtcactgggatggctgtctgcagttcctggtgcccatgctgcaggacttccctcccgactgctgggtctccatcaaccacatggtgaaccactcgtggggccgccagtattcccatgccctgttcaaggccatgagccacatgctgtgcattggctatgggcagcaggcacctgtaggcatgcccgacgtctggctcaccatgctcagcatgatcgtaggtgccacatgctacgccatgttcatcggccatgccacggcactcatccagtccctggactcttcccggcgtcagtaccaggagaagtacaagcaggtggagcagtacatgtccttccacaagctgccagcagacacgcggcagcgcatccacgagtactatgagcaccgctaccagggcaagatgttcgatgaggaaagcatcctgggcgagctgagcgagccgcttcgcgaggagatcattaacttcacctgtcggggcctggtggcccacatgccgctgtttgcccatgccgaccccagcttcgtcactgcagttctcaccaagctgcgctttgaggtcttccagccgggggatctcgtggtgcgtgagggctccgtggggaggaagatgtacttcatccagcatgggctgctcagtgtgctggcccgcggcgcccgggacacacgcctcaccgatggatcctactttggggagatctgcctgctaactaggggccggcgcacagccagtgttcgggctgacacctactgccgcctttactcactcagcgtggaccatttcaatgctgtgcttgaggagttccccatgatgcgccgggcctttgagactgtggccatggatcggctgctccgcatcggcaagaagaattccatactgcagcggaagcgctccgagccaagtccaggcagcagtggtggcatcatggagcagcacttggtgcaacatgacagagacatggctcggggtgttcggggtcgggccccgagcacaggagctcagcttagtggaaagccagtactgtgggagccactggtacatgcgccccttcaggcagctgctgtgacctccaatgtggccattgccctgactcatcagcggggccctctgcccctctcccctgactctccagccaccctccttgctcgctctgcttggcgctcagcaggctctccagcttccccgctggtgcccgtccgagctggcccatgggcatccacctcccgcctgcccgccccacctgcccgaaccctgcacgccagcctatcccgggcagggcgctcccaggtctccctgctgggtccccctccaggaggaggtggacggcggctaggacctcggggccgcccactctcagcctcccaaccctctctgcctcagcgggcaacaggcgatggctctcctgggcgtaagggatcaggaagtgagcggctgcctccctcagggctcctggccaaacctccaaggacagcccagccccccaggccaccagtgcctgagccagccacaccccggggtctccagctttctgccaacatgtaaaacctttgagtacatccagccttagttcttggggtgcagtagtatgtacccaagggcagatgcctcttggggaaggccatggggacctgaaacattgccccatggaaatgtcgaccctgtgcggacattccgcatactgccatgaagacggtctctgtgtcctcagctcaagaatcctgtagcttgtcccatcataatccattcacccgttcatcatgtgtactgagcagctaccatgttcaaggtaatatgccaggcgctgtatgtctccactgccaagtagaagtgactcaaaaccctctgacaaggatattcccttggctatggtcctgccaggtgcaggcccaggcccatgaccccacctttactaagcacaagtacttgccactgccatcactgccaagtaactagatgtctctgtttccctgccaatgatcctgcaggttctgcccggtctggttatcttcctgttcctgtagcatagccaggcactgccagtcacctgtgcccccattgctgtcagcagatgtcttgggtcctgagtgtgggtatccacttttacccgctcactgccacctgtggacactctgtgtctaccctctgagtgggaacatacttctaagttccctgcagtctctgtcctgtggtagaccatctttttgtaaactgcgagcttcctcttccctgtaccctctgccccagtcgtgaccccctaaaagttaaggggtagttggcacctccttattaatatgccagcctagatcccccccggtggaggggcaaatggctgaatccttgtgtgatatttttttcttcgcttgtttatttattcatttatttaattgtatttattcatttactaactttatgtgttaccaattaattttgtttacccattcctttatccatccctcccctccttttcaggtaaggagacaggaggagtaggaggaggcagggcctctccatgccagcctctgtggtccttgcccaaacccatcagcgcaatacttgaaccttctcccaggtaggggcaggaggagccacatgagagagggagaaggaccgcgtttacctttagagttttgttttgttttttccttctgagtttgctgttggtgcaggaataagggaaaggcccaaggtatccaagcctggggaagggcaggccagccagcacctctgccttctcagggacaagagtagtcctttaccaccctcactctgcctgtcccctctcctactctacagcattaaagactgtgggaccaggaccctaagtctcctttccttctgggtggggagttctggggttcttggtgtgtgggagaagttttataattgcttccaaacagctgggtttaaatataaaatagacacactc

SEQ ID NO: 30531 - DNA, 6567 bp, Homo Sapiens
agccggtgggctcgttgtgggcgccatttctcggcgtctaccgaggagccgcccctttctcagccttgctcggctcttccccgctctggtcgccggggctgcgccgtccccagctcagtgacaaaaatgctgagtttcttccgtagaacactagggcgtcggtctatgcgtaaacatgcagagaaggaacgactccgagaagcacaacgcgccgccacacatattcctgcagctggagattctaagtccatcatcacgtgtcgggtgtcccttctggatggtactgatgttagtgtggacttgccaaaaaaagccaaaggacaagagttgtttgatcagattatgtaccacctggacctgattgaaagcgactattttggtctgagatttatggattcagcacaagtagcacattggttggatggtacaaaaagcatcaaaaagcaagtaaaaattggttcaccctattgtctgcatcttcgagttaagttttattcctcagaaccaaataaccttcgtgaggagctaacccggtatttatttgttcttcagttaaaacaagatattctcagtggaaaattagactgtccctttgatacagcagtgcaattggcagcttataatctgcaagctgaacttggtgactatgatcttgctgagcatagtcctgaacttgtctcagagttcagattcgtgcctattcagactgaagagatggaactggctatttttgagaaatggaaggaatacagaggtcaaacaccagcacaggctgaaaccaattatctgaataaagccaaatggctagaaatgtatggggttgatatgcatgtggtcaaggctagagatgggaatgactatagtttgggactaacaccaacaggagtccttgtttttgaaggagataccaaaattggcttatttttttggccgaagataaccagattggattttaagaagaataaattaaccttggtggttgtagaagatgatgatcagggcaaagaacaggaacatacatttgtctttagactggatcatccaaaagcatgcaaacatttatggaaatgtgctgtggagcatcatgctttcttccgccttcgaggccccgtccaaaagagttctcatcgatcaggatttattcgactaggatcacgatttagatatagtgggaaaacagagtatcagaccacaaaaaccaataaagcaagaagatcaacatcctttgaaagaaggcccagcaaacgatattctagacgaactctacaaatgaaagcatgtgctacaaaacctgaagaacttagtgttcacaataatgtttcgacccaaagtaatggctcccaacaggcttgggggatgagatctgctctgcctgtgagtccttccatttcctctgctcctgtgccagtggagatagagaatcttccacagagtcctggaacagaccagcatgacaggaaatgcattcctctgaatattgatttgctgaatagcccagacttattggaagcaacgattggtgatgtaattggggcatctgacactatggaaacatcccaagcactgaatgacgttaatgtagccaccaggcttccgggattaggggaacctgaagttgaatatgagacattaaaagacacctcagagaagctcaaacagcttgagatggagaacagtcctttgctgtcccctcgatccaacatcgatgttaacataaacagccaggaggaagtggtgaagttgactgagaaatgccttaataatgtcattgagagcccaggattgaatgtcatgagagttcctcctgacttcaagagtaacattttgaaggctcaagtagaagcagtgcataaggttacaaaagaagatagcttattaagtcataaaaatgccaatgttcaggatgctgccacaaacagtgctgtgttaaatgagaataatgtgcccctccccaaagagtctcttgagactctgatgcttatcacacctgccgacagtggttctgttctaaaggaagctacagatgaattggatgccttgcttgcatctctaactgagaatctaattgatcacacagttgcacctcaggtgtcttccacatccatgatcacaccccggtggattgttccgcagagtggtgccatgtctaatggacttgcgggatgtgaaatgcttttgacagggaaggagggacatggtaataaagatggaatctcactgatctctcccccagcgccattcttggtagatgctgtgaccagctctggtcccattttggcagaagaagctgtcctgaagcagaagtgtttactgaccactgagctctgagggcctgtagctggaatacgcatctctccagcattccgtcctgggatccgtttcagctagaatatgttggattcaggagcttgtccattatttgtaggtaaaaaaagctgcacgtagatttgacttcaactccgtaaaaaagacagctgtattttccgtccaactggaattgttgaatcacactgcatagctgcccaaaagagagtgtttggtcttgaactttctatacttttataaatgttacaaattcccgaaagaagggaatttctttttctggggtttccttcaaactcttggctccacctagcggttctatttgttcataacaacttcataacaagcctgcctctggtagtcaacagccttttgaaagctatttccatctagtatcagggtgagagcatccttgatctggctgcctgttagagaaattgcacttttcctgacttacctagaaatcaagaatttaggaaattaatgtggacactataaaggcagacttagggccaacttttttttttttttacaattattacaacactaaagagaagtttagaatatagagagtttttaaatgtctcccattcttttgatttcttactgtactggctatcttaatatttcaagtttacatcaagataaaccctgagaagaactacggagaaatcaaataaaatcctgtcatatttttttcaccctgcctttccacaggaagcactcacaggcaccacacacgtatcatgtaacttatcagtggggtgggttactgttgaagagaccctggggcatttacctcaggcatctgcactcctccgagcccggtggagaatgcaggctgctgtagtctcaggtaatgaaggcacagcacagcagtactccacattgtttcctatttggacatagacttcatttcctttcagtataagctgaataaatttagagctttcaaactggaaaaaaaaatgaaacaaaacaaatacaccaagaccaaaataggcaataggaacaggggtgaagggatgttgtttcttaaatacctaccatgtatgaagctatacacagcatataccgaaagaacctgcattgcactaggaattctgtgttagtttaaaagagatctctaaaacttccccatccctttgggcctgtacaaagaaattctggatgttaaaataatatatactcatcacagaaaaataaagtatagcaatgtccatctgtaattctaatacccagaaataacgctatttagctttataattttcgaatgaacaaggtaaacctcggttgccatggggaagaaggatgatgtggaaaccatattggtaaagttgttaatccctcgttatggagaactgatcttaagctatacctcctggaatttgctttctagttttctgtcctgcaatatgtatataattaagcactaatttgtactgcttagcataaaagaacatccagtcttagatccttaaaacttcatggattggactttcctgggctccttataacataatcgtgtgtccaggcaaacgcacactagtgtctgactggaaagctcaggaattttaatcttgcactgtttcccagggagctgtagtgattggaacccacgtttgcacaaaacatttttgcagaaggaaagtcaacacttcttgctggctgcctccccttagccattatgctaaaaacagcttctgagtttcactggtggggctcttgccagttcttaattataggacatattttctcaaagctgaaggtgacacctagaaccaggggcttgacccaggacatgatggaatgagcatcaaattttcagtgtcttggcaaccgtagatgtcctacagggttaccgttgtgctgctcaccacagagcagctgaggcattatgccttggaagacctaaatctcccatccagttcaggaggtgacaacatccttattttaaacttcctaaaattaggaattaggtagttggacatagtctgtgacctttatgtcgttggatacctgtattcttgacagttagaatattggtagggactttgttaaaattcacttgaatttcaagctcagaggaaactttgtctcatgccctgacatgaagtggcaaacacggaagttcatacttgaatgctgaattggccccgacagattaaatgcgtgttggggattggtttcctgtcatagctgctgctgctgccatgcgcagagctgctgtaacagctcttcctgttctgctcccctgagaacagtgtggtggggagaggcagggctgaggtggtctacgaatgtggcaggtagggaaggggagatgtctgtctcttgagaagagagaggcatgtgtgccggcatccttgatgggttcaaagagaaaggttggagatgatagtgggtgagaagcaggctggtgagactgggctgaggttggagaaggggcagccgggggcactgctgagggtttgccgtgcacgcctcggacggagcacggtggggtggcggggagcagatagtgctgcctccctgcgggcagacaggagaggaacctcaactcagtccatttcatagccctgataggggaagtgggagttgacaggatggtttaaaataagacgtgaaggtttcagttacctgctctagactttgcctgagaacttgtaaattaatcagtgagacctaatttgtgacatgtcagtagcatcatcttttgacacacaggaggtcatggtcatttcattcctactcttcaggagacactgctgaacagaggaatgattctgttccttgtgtgcttacttccttaacatttatacattgttttaagaaaaaacttttaaaaatatttcttatagtctcctaacatttgtctctagcctttgcctttgtacaatcacagatatcctatggagatttaaggatgaaagccctgagttgttcttgggttcttggatctggactacttgttatcttatgcttctcacttctggctaaaacttgcacctcttcttctcttagctaagccccaaaatgaagatttccttcagaagtcttgttagcagaattatttatcagtcacagagagaaaaatctgctatttttctaagtaagagtctcgagaagcagagtttttgtcttgtcattgagaggagtcagcagtcttgttctgtaaaggaccagagatggtaaatactgtcccactcagctctgctggcgcagtacagcagcagcagccccagcacagctgtgttcctgcggagtcccctttacaaagccgctgacccctgatgtgaaactttgtagagcagcagagtggctgcgtgaaacgggaggctggcaggtcctcagataggttctgcagtgttacctgtcacttggaggcagccaacacttctggacattgcatccttattcacacatgtggcagctgaacgaggtgctgttgtgggtgtctcagctctgagggtctttgtgagctcccactgttgtgggtgtctcagctctgagggtctttgtgagctcccactgttgtgggtgtctcagctctgagggtctttgtgagttcccaccaacttttaattattcatgcccttgaccatgtggttgcttggagacctggggtcttctgcagactgaagaagacacatttctagattatttgtcctttttatcctctcaaaaatttaaacactgtacctcttcagtggtcagaagaaagttggaaacttttcctacatattaggcgttagtatgaggacatttgtttgaattatagaaatttgccctgagctgaactgggttgtgttaacacattggtagagctatgattccttcccagttctaagagatacgatctgtaagtccctatgtcaccacattgcttgagatgatcattcagttacttgtcaggatttctcctcttcagagagatttttttttatagcacagattcctttgccccttttatctccttatctggatatgataagtggttatgagggtctcactaactattttgtgtttaccttttatatgtgtaaaactttgcagtagcatttaaagtgtaatttatttttctatcaagtgcactattcatttagtgtgttccagttttatatgacttgtattagaaacactgcactgagttgtttgtacactgaaatgagaactctagatgtaactctattcaaataaaccttcgtgagacattcaaaaaaaaaaaaaaaaaaaaaaaaaaaa

SEQ ID NO: 30532 - DNA, 6387 bp, Homo Sapiens
gactgcagctggcattggccgggactggaagtgcgggcttctgcagcagccgaagctggagctgctagggcagcagcggctcccctgttgtatggacattctgcacccgaaactgatagctgagtcctgaagttttatgttatgaaacagaagaactttcatcccagcacatgatttgggaattacactttgtgacatggatgaatctgcactgacccttggtacaatagatgtttcttatctgccacattcatcagaatacagtgttggtcgatgtaagcacacaagtgaggaatggggtgagtgtggctttagacccaccgtcttcagatctgcaactttaaaatggaaagaaagcctaatgagtcggaaaaggccatttgttggaagatgttgttactcctgcactccccagagctgggacaaatttttcaaccccagtatcccgtctttgggtttgcggaatgttatttatatcaatgaaactcacacaagacaccgcggatggcttgcaagacgcctttcttacgttctttttattcaagagcgagatgtgcataagggcatgtttgccaccaatgtgactgaaaatgtgctgaacagcagtagagtacaagaggcaattgcagaagtggctgctgaattaaaccctgatggttctgcccagcagcaatcaaaagccgttaacaaagtgaaaaagaaagctaaaaggattcttcaagaaatggttgccactgtctcaccggcaatgatcagactgactgggtgggtgctgctaaaactgttcaacagcttcttttggaacattcaaattcacaaaggtcaacttgagatggttaaagctgcaactgagacgaatttgccgcttctgtttctaccagttcatagatcccatattgactatctgctgctcactttcattctcttctgccataacatcaaagcaccatacattgcttcaggcaataatctcaacatcccaatcttcagtaccttgatccataagcttgggggcttcttcatacgacgaaggctcgatgaaacaccagatggacggaaagatgttctctatagagctttgctccatgggcatatagttgaattacttcgacagcagcaattcttggagatcttcctggaaggcacacgttctaggagtggaaaaacctcttgtgctcgggcaggacttttgtcagttgtggtagatactctgtctaccaatgtcatcccagacatcttgataatacctgttggaatctcctatggtcgcattatcgaaggtcactacaatggtgaacaactgggcaaacctaagaagaatgagagcctgtggagtgtagcaagaggtgttattagaatgttacgaaaaaactatggttgtgtccgagtggattttgcacagccattttccttaaaggaatatttagaaagccaaagtcagaaaccggtgtctgctctactttccctggagcaagcgttgttaccagctatacttccttcaagacccagtgatgctgctgatgagggtagagacacgtccattaatgagtccagaaatgcaacagatgaatccctacgaaggaggttgattgcaaatctggctgagcatattctattcactgctagcaagtcctgtgccattatgtccacacacattgtggcttgcctgctcctctacagacacaggcagggaattgatctctccacattggtcgaagacttctttgtgatgaaagaggaagtcctggctcgtgattttgacctggggttctcaggaaattcagaagatgtagtaatgcatgccatacagctgctgggaaattgtgtcacaatcacccacactagcaggaacgatgagttttttatcacccccagcacaactgtcccatcagtcttcgaactcaacttctacagcaatggggtacttcatgtctttatcatggaggccatcatagcttgcagcctttatgcagttctgaacaagaggggactggggggtcccactagcaccccacctaacctgatcagccaggagcagctggtgcggaaggcggccagcctgtgctaccttctctccaatgaagccaccatctcactgccttgccagacattttaccaagtctgccatgaaacagtaggaaagtttatccagtatggcattcttacagtggcagagcacgatgaccaggaagatatcagtcctagtcttgctgagcagcagtgggacaagaagcttcctgaacctttgtcttggagaagtgatgaagaagatgaagacagtgactttggggaggaacagcgagattgctacctgaaggtgagccaatccaaggagcaccagcagtttatcaccttcttacagagactccttgggcctttgctggaggcctacagctctgctgccatctttgttcacaacttcagtggtcctgttccagaacctgagtatctgcaaaagttgcacaaatacctaataaccagaacagaaagaaatgttgcagtatatgctgagagtgccacatattgtcttgtgaagaatgctgtgaaaatgtttaaggatattggggttttcaaggagaccaaacaaaagagagtgtctgttttagaactgagcagcacttttctacctcaatgcaaccgacaaaaacttctagaatatattctgagttttgtggtgctgtaggtaacgtgtggcactgctggcaaatgaaggtcatgagatgagttccttgtaggtaccagcttctggctcaagagttgaaggtgccgtcgcagggtcaggcctgccctgtcccgaggtgatctcctggaagacaagtgccttctccctccatggatctgtgatcttcccagctctgcatcaacacagcagcctgcagataacacttggggggacctcagcctctattcgcaactcataatccgtagactacaagatgaaatctcaataaattatttttgagtttattaaagattgacattttaagtacaacgtttaaggactaattactgtgatggacacagaaatgtagctgtgttctggaactgaatcttacatggtatacttagtgctgctgggtaatttgttggtatattatctggttagtggttaatgcttcctttaaaaataattgagtcatccattcactctttttcagttttatctgtcaatagtagctacatttttaatgggagcaccttttatcccaaagtgctttataaattgagtggactgatatatatcacacccaggtatcactgtgctgtcctttgctgtcagatttagaaatgtttttaagagctatatgaaaacagacaatattagtttaggtcgggaactgagatattgtaatcaaatagttaacatcaggaagttaatttggctggcaaaattctagggaaacttggccagaaaactggtgttgaaggcttttgctcatataaacaagtgccattgagtttcaaatgaccagcaaatatatttagaacccttcctgttttatgtctgtacctcgtccacccctcaggtaatacctgcctctcacaggtacagctgtttcttggaaatcctccaaccaaatagcagttttcctaacttgattagcttgagctgacagactgttagaatacagttctctggccacagctgatgagggctttctgtactgcacacagattgtgtactgcaccccagtccaggtgactggtacccactcgagttgtgccgtgcacaacctgtccagtatatgcatgtggtggccctactgactggtaatggttagaggcatttatggatttttaactttgaggaaaaaccatgacttttaacaaatttttatgggttatatgcctaaacccttatgccacatagtggtaaataattatgaaaaatggtctgttcataattggtaggtgccttttgtgagcagggagcataattattggtttattatggtaattatggtgattttttaaatatcatgtaatgttaaaacgttttctaacagtttactgttgcttatctccaagatattatggaattaagaatttttccagatgagtgttacatagattctttgaatttagtataaaagtactgagaattaagtttgtacttccataagcttggattttaaacactgatagtatctcatgagtaatgtgtgttttgggagagggagggatgctgattgatatttcacattgtatgaaataccatgtttgaaactcatagcaataatgctatgctgttgtgatccctctcaagttctgcatttaaaatatattttttctttataggaattgatgtataccatgaagtcattgtcagttgtagtagctctgatgttgaaagagatatcatgttttagcattccattttactgactagggtagaagaacacttttcttggctacatttggaggatacccagggagtcttgggtgttccttatctggggaagcaaacatttcactagtctctttttttcatcctttaaattgtaaattaaggattactcaagctcaccattattcaagattgggactcgcttcccagtcgacactctgccctgcctgtcattgctgcaaagagctgctgctttgccaacctaagcaaagaaaatacggcttctcttgcattattttcccttttggttggtttgttttctagaagtacgttcagatgctttggggaatgcaatgtatgatttgctagctctctcaccacttaactcactgtgaggataaatatgcatgctttttgtaattaactggtgctttgaaaaccttttttaagggagaaaaatctcaaccaaagttatgctcatccagacaagctgacctttgagttaatttcagcacaactcattcttcagtgcctcatgactgaaaacaaaaaacaaaaaaacgaaagcatcttcacaatgaagcttccagatagcaccgttttgctaaaagatacattctcattgttttccaacagtgatggcttccacataaggttaaacaaactaggtgcttgtaaataatttattacagtttactctatcgcatttctgtaacatgaaatgcatgcccttcttcaggggaagactgtggtcaagttaaaaaaaaaaacaatattaaacaacatgaaactgcagtctgtttttgaaaatgagaatgtcctaagtgattcagaagagaggagggaagttgtgcactctgaaaatgcatgaaaaacaaaggcaaaaactagtgggaaatgtgtagaactgttaactgagacggcttcgagtcttccttctggaatctgttaaatttcacaaagtcatgagggtaaatggagaaaatatttctgggattacaatgaatgtaagcccaaattgtggaattgccagtaacctggatggggaaaagcatttcccatggcactccatgtaatatgagtgctctgtgagatgttcatcagtgttttatagaaatggtgttgctgggaaaccaagtttgcacctggaaacttacaatgcactttagcgcagtaagggcttggcatccggtagtgaaaaactgtctaacccagcattgcccaaactattttgacaccaggacctttttctcctttgggatacttatgaacctctcactaatgtcctgtggagaacattttgggaaacactatgttagatagttctttaaggagacaaaacggtaatgaacagatagcactggggcagaatatgcatgcattttgtaacgtccagtgtggcgttgaatagatgtgtatttcctcccctgcagaaaataagcacagaaaattataatgtaggtgatcggagctctttcctttgatagagagaacagccccaatgatcctggctttttcactgaacgtatcagaatacatggatgaattggggtaaataaggttttaattcagatctagaagaaagtattgtacgtttgaatgcagatttttatccacagatagttgtagtgtttagacatgacaggacctatcgttgaggtttctaagacttactatgggctgtaaacctgttttttaaaactattttagaaacctgagacttgccgtctggcattttagtttaatacaaactaatgattgcatttgaaagagattcttgaccttatttctaaacgtctagagctctgaaatgtcttgatggaaggtattaaactatttgcctgttgtacaaagaaatgttaagactcgtgaaaagaattactataaggtactgtgaaataactgcgattttgtgagcaaaacatacttggaaatgctgattgatttttatgcttgttagtgtattgcaagaaacacagaaaatgtagttttgttttaataaaccaaaaattgaacatacaaaaaaaaaaaaaaaaaaa

SEQ ID NO: 30533 - DNA, 10259 bp, Homo Sapiens
ccgagccgggagccgagcgcgctgggcgcggccgtcccgctgccgccgccaagcccggagtgcgccagcggccatggttcccgcggcggcgccgggcgcctgagccccgggacgcaagcgctggaggcgggctgccggctgtgcgggcgctccggagagaccgacagaaggtgagcactgtgggctatgggatggatgaggtggagcaggaccagcatgaggcccgactcaaggagctgtttgacagttttgacacgacgggcacagggtccctggggcaggaggaactcaccgacctttgccacatgttgagcttggaggaggtggccccagtgctgcagcagacattacttcaggacaacctcttgggcagggtacattttgaccaatttaaagaagcattaatactcatcttgtccagaactctgtcaaatgaagaacactttcaagaaccagactgctcactagaagctcagcccaaatatgttagaggtgggaagcgttacggacgaaggtccttgcccgagttccaagagtccgtggaggagtttcctgaagtgacggtgattgagccactggatgaagaagcgcggccttcacacatcccagccggtgactgcagtgagcactggaagacgcaacgcagtgaggagtatgaagcggaaggccagttaaggttttggaacccagatgacttgaatgcttcacagagtggatcttcccctccccaagactggatagaagagaaactgcaagaagtttgtgaagatttggggatcacccgtgatggtcacctgaaccggaagaagctggtctccatctgtgagcagtatggtttacagaatgtggatggagagatgctcgaggaagtattccataatcttgatcctgacggtacaatgagtgtagaagattttttctatggtttgtttaaaaatggaaaatctcttacaccatcagcatctactccatatagacaactaaaaaggcacctttccatgcagtctttcgatgagagtggacgacgtaccacaacctcatcagcaatgacaagtaccattggctttcgggtcttctcctgcctggatgatgggatgggccatgcatctgtggagagaatactggacacctggcaggaagagggcattgagaacagccaggagatcctgaaggccttggatttcagcctcgatggaaacatcaatttgacagaattaacactggcccttgaaaatgaacttttggttaccaagaacagcattcaccaggcggctctggccagctttaaggctgaaatccggcatttgttggaacgagttgatcaggtggtcagagaaaaagagaagctacggtcagatctggacaaggccgagaagctcaagtctttaatggcctcggaggtggatgatcaccatgcggccatagagcggcggaatgagtacaacctcaggaaactggatgaagagtacaaggagcgaatagcagccttaaaaaatgaactccgaaaagagagagagcagatcctgcagcaggcaggcaagcagcgtttagaacttgaacaggaaattgaaaaggcaaaaacagaagagaactatatccgggaccgccttgccctctctttaaaggaaaacagtcgtctggaaaatgagcttctagaaaatgcagagaatgtgttagcagaaaagtttggtgacctcgatcctagcagtgctgagttcttcctgcaagaagagagactgacacagatgagaaatgaatatgagcggcagtgcagggtactacaagaccaagtagatgaactccagtctgagctggaagaatatcgtgcacaaggcagagtgctcaggcttccgttgaagaactcaccgtcagaagaagttgaggctaacagcggtggcattgagcccgaacacgggctcggttctgaagaatgcaatccattgaatatgagcattgaggcagagctggtcattgaacagatgaaagaacaacatcacagggacatatgttgcctcagactggagctcgaagataaagtgcgccattatgaaaagcagctggacgaaaccgtggtcagctgcaagaaggcacaggagaacatgaagcaaaggcatgagaacgaaacgcacaccttagaaaaacaaataagtgaccttaaaaatgaaattgctgaacttcaggggcaagcagcagtgctcaaggaggcacatcatgaggccacttgcaggcatgaggaggagaaaaaacaactgcaagtgaagcttgaggaggaaaagactcacctgcaggagaagctgaggctgcaacatgagatggagctcaaggctagactgacacaggctcaagcaagctttgagcgggagagggaaggccttcagagtagcgcctggacagaagagaaggtgagaggcttgactcaggaactagagcagtttcaccaggagcagctgacaagcctggtggagaaacacactcttgagaaagaggagttaagaaaagagctcttggaaaagcaccaaagggagcttcaggagggaagggaaaaaatggaaacagagtgtaatagaagaacctctcaaatagaagcccagtttcagtctgattgtcagaaagtcactgagaggtgtgaaagcgctctgcaaagcctggaggggcgctaccgccaagagctgaaggacctccaggaacagcagcgtgaggagaaatcccagtgggaatttgagaaggacgagctcacccaggagtgtgcggaagcccaggagctgctgaaagagactcttaagagagagaaaacaacttctctggtcctgacccaggagagagagatgctggagaaaacatacaaagaacatttgaacagcatggtcgtcgagagacagcagctactccaagacctggaagacctaagaaatgtatctgaaacccagcaaagcctgctgtctgaccagatacttgagctgaagagcagtcacaaaagggaactgagggagcgtgaggaggtcctgtgccaggcaggggcttcggagcagctggccagccagcggctggaaagactagaaatggaacatgaccaggaaaggcaggaaatgatgtccaagcttctagccatggagaacattcacaaagcgacctgtgagacagcagatcgagaaagagccgagatgagcacagaaatctccagacttcagagtaaaataaaggaaatgcagcaggcaacatctcctctctcaatgcttcagagtggttgccaggtgataggagaggaggaggtggaaggagatggagccctgtccctgcttcagcaaggggagcagctgttggaagaaaatggggacgtcctcttaagcctgcagagagctcatgaacaggcagtgaaggaaaatgtgaaaatggctactgaaatttctagattgcaacagaggctacaaaagttagagccagggttagtaatgtcttcttgtttggatgagccagctactgagttttttggaaatactgcggaacaaacagagccgtttttacagcaaaaccgaacgaagcaagtagaaggtgtgaccaggcggcatgtcctaagtgacctggaagatgatgaggtccgggacctgggaagtacagggacgagctctgttcagagacaggaagtcaaaatagaggagtctgaagcttcagtagagggtttttctgagcttgaaaacagtgaagagaccaggactgaatcctgggagctgaagaatcagattagtcagcttcaggaacagctaatgatgttatgtgcggactgtgatcgagcttctgaaaagaaacaggacctactttttgatgtttctgtgctaaaaaagaaactgaagatgcttgagagaatccctgaggcttctcccaaatataagctgttgtatgaagatgtgagccgagaaaatgactgccttcaggaagagctgagaatgatggagacacgctacgatgaggcactagaaaataacaaagaactcactgcagaggttttcaggttgcaggatgagctgaagaaaatggaggaagtcactgaaacattcctcagcctggaaaagagttacgatgaggtcaaaatagaaaatgaggagctgaatgttctggttttgagacttcaaggcaagattgagaagcttcaggaaagcgtggtccagcggtgtgactgctgcttatgggaagccagtttagagaacctggaaatcgaacctgatggaaatatactccagctcaatcagacactggaagagtgtgtgcccagggttaggagtgtacatcatgtcatagaggaatgtaagcaagaaaaccagtaccttgaggggaacacacagctcttggaaaaagtaaaagcacatgaaattgcctggttacatggaacaattcagacacatcaagaaaggccaagagtacagaatcaagttatactggaggaaaacactactctcctaggctttcaagacaaacattttcagcatcaggccaccatagcagagttagaactggagaaaacaaagttacaggagctgactaggaagttgaaggagagagtcactattttagttaagcaaaaagatgtactttctcacggagaaaaggaggaagagctgaaggcaatgatgcatgacttgcagatcacgtgcagtgagatgcagcaaaaagttgaacttctgagatatgaatctgaaaagcttcaacaggaaaattctattttgagaaatgaaattactactttaaatgaagaagatagcatttctaacctgaaattagggacattaaatggatctcaggaagaaatgtggcaaaaaacggaaactgtaaaacaagaaaatgctgcagttcagaagatggttgaaaatttaaagaaacagatttcagaattaaaaatcaaaaaccaacaattggatttggaaaatacagaacttagccaaaagaactctcaaaaccaggaaaaactgcaagaacttaatcaacgtctaacagaaatgctatgccagaaggaaaaagagccaggaaacagtgcattggaggaacgggaacaagagaagtttaatctgaaagaagaactggaacgttgtaaagtgcagtcctccactttagtgtcttctctggaggcggagctctctgaagttaaaatacagacccatattgtgcaacaggaaaaccaccttctcaaagatgaactggagaaaatgaaacagctgcacagatgtcccgatctctctgacttccagcaaaaaatctctagtgttctaagctacaacgaaaaactgctgaaagaaaaggaagctctgagtgaggaattaaatagctgtgtcgataagttggcaaaatcaagtcttttagagcatagaattgcgacgatgaagcaggaacagaaatcctgggaacatcagagtgcgagcttaaagtcacagctggtggcttctcaggaaaaggttcagaatttagaagacaccgtgcagaatgtaaacctgcaaatgtcccggatgaaatctgacctacgagtgactcagcaggaaaaggaggctttaaaacaagaagtgatgtctttacataagcaacttcagaatgctggtggcaagagctgggccccagagatagctactcatccatcagggctccataaccagcagaaaaggctgtcctgggacaagttggatcatctgatgaatgaggaacagcagctgctttggcaagagaatgagaggctccagaccatggtacagaacaccaaagccgaactcacgcactcccgggagaaggtccgtcagttggaatccaatcttcttcccaagcaccaaaaacatctaaacccatcaggtaccatgaatcccacagagcaagaaaaattgagcttaaagagagagtgtgatcagtttcagaaagaacaatctcctgctaacaggaaggtcagtcagatgaattcccttgaacaagaattagaaacaattcatttggaaaatgaaggcctgaaaaagaaacaagtaaaactggatgagcagctcatggagatgcagcacctgaggtccactgcgacgcctagcccgtcccctcatgcttgggatttgcagctgctccagcagcaagcctgtccgatggtgcccagggagcagtttctgcagcttcaacgccagctgctgcaggcagaaaggataaaccagcacctgcaggaggaacttgaaaacaggacctccgaaaccaacacaccacagggaaaccaggaacaactggtaactgtcatggaggaacgaatgatagaagttgaacagaaactgaaactagtgaaaaggcttcttcaagagaaagtgaatcagctcaaagaacaactctgcaagaacactaaggcagacgcaatggtgaaggacttgtatgttgaaaatgcccagttgttgaaagctctggaagtgactgaacagcgacagaaaacagcagagaagaaaaattacctcctggaggagaagattgccagcctcagtaatatagttaggaatctgacaccagcgccattgacttctacacctcctttgaggtcatagccaaaccaaagggtacactcatatttgtgcactttactgaaatagatgaacatttcagtaggttctcaacttaaaattaagcctaacctaaaactgccagcaacacaactggagtttccatttatcataattagtttttctaaatagacccttatgggagtttgaaaataaatactcacatatttcactacttaaattattcccaagatttgaatttattttaaaattttaatagccaccaagaatgtggacatatgaaaattcaagaacctaaaaaataccagttttgaatgagtttttgtggttttggttttttttttaattattacaaatctatgtgtaaaatctagatatttgaagtttgagatctgatgagaatggttgttataaactttattttaaaaccaaatttaggtgttcttacatatttaaatactggaaagtcattataatagttttggttctttgaattggtagacaattagtagagtataattggttaggaggcagggcttattaagtggttattaaccgctgacatcagacaaacccaaatctgtagaattctaaccttctaacacctgtgacagtattaccactcttcttgtattatagatttagaactgatttactcaattgcactcttaactaatgttaaaagcttacttgctttaaacagccttttcttctttctcttaaaagtttcatttggggagctggtcttctaagaaacggataaagccacataattaaagcagttgaactatagggaaagcactgaacaaaccactttggagtaaatagctactcttagaaaagagggataagcagaccatgtaggttttctgtctctcaaatcttagagttcataaatttacttgaggttgcctcaagaactcagggaacaatactgtaaactgtcttcctgaactactgtagggcctctctaagaatttgaaatgtataaaccatgtgacctcatttatttgtcttatatatttacagccatactagaatttttatttctacgtttttagtaaatttaatattctgggggaaaaaaggccttgattttagggttaaaaacctgacttatagaagagtttatttaatataggtcaaaattttctgtgtttcttattccttctatacctcaaatctgattctaagaatttcttactgtgataatcattggcatgccacctgaggtcaaggagtgccaaataggactttccactcatgctcaagatcaaaactttatagaacagtcaacattttagattcggtaaccttttttttcttccaattataatctctgctagccacttccgccagcagttggtggaagacttactaggtgcagggcactttccaagttcatcacaacaacctgcttgttttcatgagacaataatccgaaaagttcgctttgatatattcctggagggccaagcccatctatttacaaaaggtgaacagcaaaatcaagcactgctttatgggcaggaacacaagagaaagcaaactgcccaagaagtcatcatgtcagaaactcaatctcaacaaaataatttccatcagggaacttcagggtttcttgggggcttatgagtctcaccggtcaacccaggaggcctcactacaagagccttgacaaggcactgttttttgtgggactgggagttcacactgatgaagcaaacctttgaatttttgcacagctcttgtcagaaagccctgagttccccctggataaagagttaattttaatccttccctataattatacttcaaaatatttgacatctgctattatgccttctttagatctttcttctgtggtgcagacatttctagtaagtgtttgactacttgtatggcattagctttcacagaaaattgtttcacttaaaactgtggattggcctaggctaaggacaaaaataaactaagtacctgtagtgtatttatgtgatatgtgtcaagttactcaaagttattgctgttggaactgaacaataatatttcccagatagctggccttagcatgtgatcacggttgttgtatttttaatttttgtcttttacagtatgagaggtgtaggttaatttgtttatttcctataaatttgtatttatgtgtatataaaatgtacaatgaatgtaaatatgactttctggaaagtttagactacatttagaatctctattcaaaatcaaaatgctgctcaaatgaatttaaccaacatctaggtgcttaatttctcattttatcccacttatgagattgggaaaaagatcaatatgagaaataccatacagataccttaaatgtatgcatttgtgcaacaatttttgagaaggtgagtggcaatttataatttagttggcaatttataatagaacttatagcttttaaaagaccttttaaagacattaaatgtaaacttaaaaatgtttagatcttgtttcaaactttacaatagcattcttcaaaatattaagttatatattttataggcatttagttgcttattaaaagcactgattttcaaactttttgatttaagaacaattatttaagatcgtctcagaagatgggatcttcgtttcaagaaaagggaatcaagtttgcctttgagataatacgttacactaagaaaaggaaaatgtggatagtaaaacccacctctctcatcctattgtactctcttctgctttttagaagcctgcacttaagcttagatttgtgaagggagagtagaaggggagaagtagaaccacagtgttttatttatttttctaaaactcttactaaatccagattttttaaactgttttaaatgtgaattcttcccagaaatttcaatgcattgcatatttagccttcggcatatttttcatgaatagatcatgaagtcataggcttccaaggcataggaagagatcttgcaggtctagtattttaataatgcactattacccagggcagatattatgagaaactgtttcttctctaagggtttatggcagactttgcttttttaacatgtgagaaatgaattttttattttgtgatttatgtgatttcttttgctgagtgaaggaaaggagaaattgttgctattgtcagcatcttaaaggtatttccagtcaaggcaaggctaagtgctttgtgatagtattaagcaagtcatgttttgaatggattacctgtagtgactcattggaatgatataattatacaagtaatgccaaaaaccaagtcaaagcctaattaaccaaagcactcatttaaaaatcatcatgtttggacctatctggacctctcagcactgtaaaatagttttggttttgtggcatatgaatagctgtttaacaaatcaaagttagctttttgcttctcagcttttttgggcaatacaagttaagttcttaatggggagacattatcatggcatgacttaagggaacattggtttgtgaaggaaaaacagattatctaaagccatctctatgtttctgttcagataaagattaatgagttctgtgtttatatcagctttgtatatttcatcttagccattctatcctagaaagattttaatgtgagcttaagatgtaaataaataattttgcaaacatgccttttgttttctatataccctgaccttttaataaagtttcagtgtatttatcaaaaaaaaaaaaaaaaaa

SEQ ID NO: 30534 - DNA, 3676 bp, Homo Sapiens
ggtccccggctgcccgcagcccgctcgcggcgcttctccggcccggctccttctccgctcgttaacgtcgccaaccccccccacccctcatatctctctccacccacccaaccgccccccgctccttctcgccgcctcgagtccgcttgggggaaaacttcaaagagccggatcgcaggctccctgcctactcccccaccggggatttcagactagacgcttgaagcaaagctgccatcccagaagacgacatgctctcagcaacccccctgtatgggaacgttcacagctggatgaacagcgagagggtccgcatgtgtggggcgagcgaagacaggaaaatccttgtaaatgatggtgacgcttcaaaagccagactggaactgagggaagagaatcccttgaaccacaacgtggtggatgcgagcacggcccataggatcgatggcctggcagcactgagcatggaccgcactggcctgatccgggaagggctgcgggtcccgggaaacatcgtctattctagcttgtgtggactgggctcagagaaaggtcgggaggctgccacaagcactctaggtggccttgggttttcttcggaaagaaatccagagatgcagttcaaaccgaatacacccgagacagtggaggcttctgccgtctctggaaaacccccaaatggcttcagtgctatatacaaaacaccgcctggaatacaaaaaagtgctgtagccacagcagaagcgctgggcttggacaggcctgccagcgacaaacagagccctctcaacatcaatggtgctagttatctgcggctgccctgggtcaatccttacatggagggtgccacgccagccatctaccctttcctcgactcgccaaataagtattcactgaacatgtacaaggccttgctacctcagcagtcctacagcttggcccagccgctgtattctccagtctgcaccaatggggagcgctttctctacctgccgccacctcactacgtcggtccccacatcccatcgtccttggcatcacccatgaggctctcgacaccttcggcctccccagccatcccgcctctcgtccattgcgcagacaaaagcctcccgtggaagatgggcgtcagccctgggaatcctgttgattcccacgcctatcctcacatccagaacagtaagcagcccagggttccctctgccaaggcggtcaccagtggcctgccgggggacacagctctcctgttgcccccctcgcctcggccgtcaccccgagtccaccttcccacccagcctgctgcagacacctactcggagttccacaagcactatgccaggatctccacctctccttcagttgccctgtcaaagccatacatgacagttagcagcgagttccccgcggccaggctctccaatggcaagtatcccaaggctccggaagggggcgaaggtgcccagccagtgcccgggcatgcccggaagacagcggttcaagacagaaaagacggcagctcacctcctctgttggagaagcagaccgttaccaaagacgtcacagataagccactagacttgtcttctaaagtggtggatgtagatgcttccaaagctgaccacatgaaaaagatggctcccacggtcctggttcacagcagggctggaagtggcttagtgctctccggaagtgagattccgaaagaaacactatctcctccaggaaatggttgtgctatctatagatctgaaatcatcagcactgctccctcatcctgggtggtgcccgggccaagtcctaacgaagagaacaatggcaaaagcatgtcgctgaaaaacaaggcattggactgggcgataccacagcagcggagttcatcatgcccgcgcatgggcggcaccgatgctgtcatcactaacgtttcagggtcagtgtcgagtgcaggccgcccagcctccgcatcacccgcccccaatgccaatgcagatggcaccaaaaccagcaggagctctgtagaaaccacaccatccgttattcagcacgtgggccagcccccggccactcctgccaagcacagtagcagcaccagcagcaagggcgccaaagccagcaacccagaaccgagtttcaaagcaaacgagaacggccttccaccaagctctatatttctgtctccaaatgaggcattcaggtccccaccaattccctaccccaggagttacctcccttacccagcccctgagggcattgctgtaagtcccctctccttacatggcaaaggacctgtctaccctcacccagttttgttacccaatggcagtctgtttcctgggcaccttgccccaaagcctgggctgccctatgggcttcccaccggccgtccagagtttgtgacctaccaagatgccctggggttgggcatggtgcatcccatgttgataccacacacgcccatagagattactaaagaggagaaaccagagaggagatcccggtcccatgagagagcccgttacgaggacccaaccctccggaatcggttttccgagattttggaaactagcagcaccaagttacatccagatgtccccaccgacaagaacctaaagccgaaccccaactggaatcaagggaagactgttgtcaaaagcgacaagcttgtctacgtagaccttctccgagaagaaccagatgctaaaactgacacaaacgtgtccaaacccagctttgcagcagagagtgttggccagagcgctgagccccccaagccctcagttgagccggccctgcagcagcaccgtgatttcatcgccctgagagaggagttggggcgcatcagtgacttccacgaaacttatactttcaaacagccagtcttcaccgtaagcaaggacagtgttctggcaggtaccaacaaagagaacctagggttgccagtctcgactccattcctggagccacctctggggagcgatggccctgctgtaacttttggtaaaacccaagaggatcccaaaccattttgtgtgggcagtgccccaccaagtgtggatgtgacccccacctataccaaagatggagctgatgaggctgaatcaaatgatggcaaagttctgaaaccgaagccatctaagctggcaaagagaatcgccaactcagcgggttacgtgggtgaccgattcaaatgtgtcactaccgaactgtatgcagattccagtcagctcagccgggagcaacgggcattgcaggtgagcccccccacctgaatttcagttactttaccagttgtcagttttttaatgtgtaaacaggattgggggagtatggtagggcagggcaccaggcagatttggtgaatgaagcttgtggtaatttgaatatatgcaatgtggccagtaagagaacgtgagtggtagcactgaggcgtgtctggatgctttaagttattctgtagattataagggaactccactcaattgctgataaccgatgttttaattattgtgaagggtatctaaagactgcatgacgtttacctatcaattgctttgatttctctgcctgtaagatagcaaatatacctagaagtgctgcttagaatgccttacttgatacctggtagagatgtgtagcagccgcatgtctgtgggattcatgcaaatttttcaccaaaaaa

SEQ ID NO: 30535 - DNA, 8015 bp, Homo Sapiens; identical to SEQ ID NO: 28314

SEQ ID NO: 30536 - DNA, 3895 bp, Homo Sapiens
gttgcctggcaacagggaaggggcggctctcgagaggagcccgtgggctgctggaccggaccggacagcaccaggaagcccggcaggagaattctgccagatatcaggacagatggggaacagcagaagccgtgtggggcggagcttttgttcacagtttcttcctgaggaacaggcagagattgatcaattgtttgatgctctgtcatcagataaaaacagcccgaatgtctcatccaaatccttctctctgaaggcactacagaaccacgtcggggaagctcttcccccagagatggtcaccaggctgtatgatggcatgcggagggtcgacctgacagggaaggcgaagggacccagtgagaacgtgtcccaggagcagttcacagcatccatgtcccacctgttgaaaggaaactccgaggagaagagtctcatgattatgaaaatgatttctgccacagaaggtcccgtgaaggccagagaagtccaaaagtttacagaggatctggttggctctgtggtgcacgtgctaagccacagacaggagctgagaggctggactgggaaggaagccccagggcccaacccccgggtgcaggtgctggctgctcagctgctctctgacatgaagctgcaagatggcaagagacttctggggccccagtggctggactatgactgtgaccgagctgtgatcgaggactgggtgttcagggtcccccatgtggccatattcctgagtgtggtcatttgcaagggctttctcgtcctgtgctcgtctcttgatctgactaccctggtccctgagcgtcaagtggaccagggcaggggttttgagagcatcctggatgtcctctctgtcatgtacatcaacgcccagctgcctcgggagcagcggcaccgctggcgcctgctcttttcgtctgagctccatggacacagcttctcccagctctgtggccacatcactcaccgggggccctgtgtggctgtcctcgaggaccatgacaagcatgtgttcggtgggtttgcctcttgctcttgggaggtgaagcctcagtttcaaggggacaacagatgcttcctgttctccatctgccccagcatggctgtgtacacacacacgggctacaacgaccactacatgtacttgaaccatggacagcagacgatcccgaacggactgggtatgggggggcagcacaattactttgggctttgggtggatgttgattttgggaaaggacacagcagagccaagcccacgtgcaccacgtacaacagcccgcagctgtcggctcaggagaacttccagtttgataagatggaggtgtgggcggttggagacccctcagaggagcagttggccaagggcaacaagagcatcctggatgcggaccctgaggcccaggccctgctggagatcagtgggcattcgcgccacagcgaagggctccgggaagtcccggacgatgaatgaggagccgcctgagccttcctggagccaggacctggattcctctgggtagagggcaacgcctgcagcccctcttccctcccacatggtttaactgtaatagcgtaccgcacgggtcacagcctggtagtcccacatgtgccaagaagacgccctctgaagccatgtcctgactcatgggtggatctcccagaaatagatgttttttaagttttctttttttccctacagggtcaccctcaggatctctccaagaaatcttgtgtcaaattagtaactcagtcttatactttgttcttttttaccaacgaaatcctaagcagctgagacctttcagacccccgctggcattagggaattccgctggcattagggaattccgctggcattagggaattccgctggcattagggaattccgctggcattagggaattccgctggcattagggaattccgctggcattagggaattccgctggcattagggaattccgctggcattagggaattccgctggcattagcattgctgggatctcaacttctctattgaggagggggttcctcccgctggggttcatatggcctcactcaggccatccctgttagaaggtggtacctgatggtctgttctgacgggtgagggacagaggcatctggatgaaaatctcgacgctttctgggaacagcttccaatggcatgggagttctgtatttaaaagcatgaactgtgtataaaatggggaaatggaggcaggagactttgaggtaacatggtctggtggtggcatgagtcctcagaaggtatttgtaataaggttccacacccagctctctcagctgtttttaaatgaatgtgtgtgaggaacagatgggaaagttgggagatctgtctacagagaagcaaagttgtggttctcttgctaacttcaaggtgagggacattgggcaccctaagtttgggaacttggttgataaatacgtatatggtccattccataaatcagtggtgagtgactggcctgggttctagacctctgggaaccagcacctgagtcacagctgtctaggcctcggtgctggcctgggttctagatctctgggaaccagtgcctgagtcacagctgtcagtgcagccatttgcccagggctgctcccgagggggatgatgggaaattcagcagtgtagactcactttaaacaagctccggtgatcctgaaatgctgaagatcgtgtaggtgggttgtggggtcagcagagctgccatctgcccacgtctggaaaacaacacacggtgagtcaccggttggccatgagatctccccacttaaaggtgctgtgagcttgtctctaagatatatacctcttccttttgtcttttgctgtaagctttgaccttttgcagatctgatgaaaatacaacctcttattgtatagtttgccttgattataagccatagtaaatcgagctgttcgcatttttgcaggccttgcattttctactgggaggttcatcaaaccttccacttagcaatagccctgactcaggcagaatgcctcataaattagccttcgaaagaaaagtgcacgctcagacagtgtgtggaggggcaggagcgtgatgcagacaaggacttagtcatgactgattttccttagccagtttgtaatggcttatggggaacattgtgagcttcctacctgacatgttggcagaagtagaatattaggatcctcaagcatctctaccgtaagtccaaagaatttaggtccctattgtcactttgttttgcaatgttttttataaaaatgcaattaaatacctcactattaaactgccatgatgcctcagttaaaaaaaaaattaaatgtccgtcagtgtctgtgccttggtgaccattgattgctgcttctgcccaggccgctgcaaaggttaggactttgtccactcacatgctttccaccctgagcttgttctaaggagagtgcagatcacgaatgcacctgcttccaggcagtgcacttagagaaaggtcactggcccgggcttgggagcctgggggatgcagctctctctgtgggcttctcttggtgcacggttctgcctctggacactcaaacctttttagggcgtgtgcagggctggggccagtggacctgacagtaccttacctggctctgagaaactcgcaatcctagtttgcacaaatgaatagtttgttcttttgtgaaaccagaatgagaattcaggttctaaggactagaggtctccctacaaatgaagacttatcagggccctagaaagtgctaggaggaagaggttaaaaaaaaaatttgtccgcgttgcaaactattataaatgattgccacattgcaagctattattttctcccaccatattttttaattaaaa

SEQ ID NO: 30537 - DNA, 4348 bp, Homo Sapiens
ccttctgaagaatgagcagtttttatcgcatctcctcttgttcctacacttggacagcggtgtccctcagggtgtcacacaacaggtcacccacaaggtggcacagcacctgacaggagccagccatggggacaacgtgaagcttctcaacagcatgatccaggcacacatatctgtaagcactcagcccaatgaagtgggccccgttgctgtgttggagttctgggttcaggctctcataagccagcatctctgataccgagaacaacctatcctcttcctcatggaccacttgtgtaaagcagcttttcagctgatgcaggaagactgcatacagaaattactctaccaacaacataagaatgccttgggttaccaccgtgaccggagtctgctctcatctttggtaagctggattgtggcaggcaacatcactccttcctttgtggagggcttggccacgcccactcaggtctggtttgcctggacagtgctcaacatggaatccatctttgaagaggactcccagctccggagagttattgaaggggaattggtgataaactctgctttcacccctgaccaagctctgaagaaagcccagacccagctgaagctccccatcgtgccatccctccagaggctgctgatttatcgctgggcccaccaggctctggtcacaccttctgatcaccccctcctgccactcatttggcagaagttcttccttctgtatcttcaccgtccgggaccacagtatgggttacccatagatggttgtattggaagaaggttttttcaaagtcctgctcatatcaatttgttgaaagaaatgaagagacgtttgaccgaggtggctgacttccaccatgctgcaagcaaggtcctccgtgttccagcagagggcagtgaagggctgccagagagccactctggcacccctggttacctgacttcaccagaactgcacaaggagctggtgaggctcttcaatgtatatatattatggctagaagatgagaattttcaaaaaggagatacctatatcccttctctaccaaagcattatgatattcacaggctagcaaaagtgatgcagaatcagcaggatctgtggatggagtatttgaacatggagcgcatctatcatgagtttcaggagactgttggtctgtggacacaggccaagcttgagtcccattccacaccctgcagtttgtccgtgcagctggacttcactgatcctttgctggctaaagaaagggttttaagtaacttgcggaagcatgaggctccccagcctccccttgctctgcacccgacgaagcctcctgtgccagttatttcctctgctgtgctattgagtcagaaggacgccacccagctggtgtgcacagacctgaatctgttgcaacagcaggccagaaccgcagctcttcgggaatctcagcaggttgctctggatggtgagctgttagacacaatgccaaagcagtatgtgaatcgtgaagaacagaccacactacatttggagtgcagaggcagcagcggtaagaaatgccaaggagccgcagttgtcacggttcagtttgaaggcatgcataagaatgaagccataagccaacagcttcatgttttacggaaggaagtgaagcagttgcaagcagaagctgctaaaccaccatcacttaatattgtggaagctgctgtacatgcagaaaacttgatcacggccttagtgaatgcctacaagttgcagcctacacctgggattcagaaagttggcattagccttttctttactattgtggattacgtcagcgatgagacgcagcgtcatcccccaacaaggcagttctttacttcatgtattgagatcttgggacaggtatttatcagtggcattaaaacagagtgcagaaaagtacttgaaaccattctgaagaacagcaggctctgctccctgctgtctcctttcttcactcccaatgctgcacctgcagagttcatacagctgtatgagcaagtggtgaagtttctaagtgaggacaacagtgatatgattttcatgctgctaaccaagttcgatcttaaacaatggttaagcgccactaaacctcctctgtctgatcgtaccaggcttctggagtccattcacttggcacttactgcctggggccttgaaccagatgaggatattttgatgccatttaatcttttctgtaagcactggacttatcttcttctctaccagtttcctgaccagtacagtgacattctcaggctgcttatgcaaagctccgcggagcagcttctgagccccgagtgttggaaggccactctgagagccctgggctgctgcgcccccagctgccagcagggggcagcgtccaccgagggcgccgtgcttcccagctcttctgatgctctcttgtcagacaagcaggtaatggagactatacagtggctttcagactttttttataagcttcggttatccaagatggactttaaaagctttggtttattctcaaaatggagtccttatatggctgatgtgaagacattcttgggctaccttgtgaaaaggctgattgacttagaaatgacctgtttggcccaagacccaactgccagcaggaaaacagtgctgaaatccctacattcagtaatcattcagctctttaagccatggatcctggttttagaggacaacgaaagcagccaacagcggcattacccctggctagagagtgatactgtggtggcctcaagcattgtgcagctgttcactgactgtattgactcactgcatgagagttttaaagataagctgttgccaggtgatgcaggagccctttggttgcacctgatgcattattgtgaagcatgtacagcacccaaaatgccagagttcattctgtacgctttccatagcacgtaccggaaactgccatggaaggacctgcaccctgaccagatgctcatggaggccttcttcaaagtggaacgaggaagccccaagagctgtttcttatttttggggtctgtactctgtgaagtcaactgggttagtgtgctctctgatgcctggaattccagtccccacccagaaacccgcagcatgattgtctgcctccttttcatgatgattttattagcaaaggaagttcaactggtagaccaaacagattcacctttacttagtctccttggacagacaagctcactttcatggcatcttgtggatattgtgtcgtaccagagtgtgctaagttatttcagcagccattacccgccgtccatcatcctggcaaaagaatcttatgctgaattaatcatgaagctcctaaaagtgtctgcgggcctttctattcctactgacagccagaagcatcttgatgcagttccaaaatgccaagcttttactcatcagatggttcaattcctcagcaccctggaacaaaatggaaaaatcaccttagcagtcctagaacaggagatgtctaagctcttagacgatatcattgtctttaacccgcccgacatggacagccagacccgccacatggccctcagcagcctctttatggaagtcctgatgatgatgaacaacgcgactattccaacagcagagttccttcggggcagtatccggacctcgattggccaaaaaatgcatgggctggtggtgctgccccttttaacagcagcctgccagagcctggcgtccgtccgccacatggctgagactacagaagcctgcatcactgcctacttcaaagaaagccctctcaatcagaattcaggatggggacccattctggtatcccttcaggttcccgagctcaccatggaagagttcctgcaggagtgcctcaccttgggcagttacttgactctttacgtctacttgcttcagtgtttaaacagcgaacagactttaaggaatgaaatgaaagtgctgctcatcttaagcaagtggctggaacaggtgtacccaagctccgtggaggaagaggcaaagctgtttttgtggtggcaccaagtccttcagctctccctcattcagacagagcagaatgactccgtcctgacagaatctgtcattcgaattctgctcttggttcagagcaggcagaacctcgtggctgaggagagactcagctctgggatcctgggggcaattgggtttggccggaagtcgcctttgtctaacaggtaaggaagcgcctttctaacactgttgttctaaataggcctcagacatctgtacctacttacaggttgtgatatacttcagtaggtttttcgacttaggatctaggttctccagaaagattaatgg

SEQ ID NO: 30538 - DNA, 3822 bp, Homo Sapiens
ctcctggggacaattcccttttcctttcttcagcctaacccgcggtggccctcgcggagtccggtcagccccggggagcgcaacccgggaggggcgtccaaggggcgtctcgcgtctgggaacggccgggcccccagcgggctgtggtcgcggggtgggggccggagcggcgaggccccccttaccgggctgcgcaggccgcccagggcccccgggctgagacggggccggagcggcgccccggccgcccgcgcggggtctcccccatggtgcagcggggttcgggatgtcgaagacgctgaagaagaagaagcactggctcagcaaggtgcaggagtgcgccgtgtcctgggccgggcccccgggcgacttcggcgcggagatccgcggtggcgcggagcgtggcgaattcccctacctggggcggctccgcgaagaacccggcgggggcacctgctgcatcgtctcgggcaaggcgcccaacccaagcgatgtgctgctggaggtaaacgggacgcctgtcagcgggctcaccaaccgggacaccctggctgtcatccgccacttccgcgagcccatccgtctcaagactgtgaaaccaggcaaagtcattaataaagatttgcggcattacctaagtcttcagtttcaaaaaggatcaattgaccacaaactgcagcaagtgatcagagataatctctacttgagaaccattccatgcactacaagggcccccagggatggagaagtaccaggagtggattataatttcatttccgttgaacagttcaaagcactggaggagagtggagcattgttagaaagtgggacatatgatggaaacttctatggaactcccaagcctccagcagaacccagcccttttcagccagatccagttgatcaagtcctctttgataatgagtttgatgcagaatctcaaagaaaacgaacgacatctgtcagcaagatggaaagaatggatagctctcttcctgaagaggaagaagatgaggacaagggagctattaatggcagtggaaacgcagaaaacagagagaggcattctgagtcatctgactggatgaagactgttccaagttacaaccaaacaaatagctccatggactttagaaattatatgatgagagatgagactctggaaccactgcccaaaaactgggaaatggcctacactgacacagggatgatctacttcattgaccacaataccaagacaaccacttggttggatcctcgtctttgtaagaaagccaaagcccctgaagactgtgaagatggagagcttccttatggctgggagaaaatagaggaccctcagtatgggacatactatgttgatttcactcttgtcgcccaagctggagtgcaatggcatgatctcggctcactgcaacctccgcctcctgggttcaatcaccttaaccagaaaacccagtttgaaaatccagtggaggaagccaaaaggaaaaagcagttaggacaggttgaaattgggtcttcaaaaccagatatggaaaaatcacacttcacaagagatccatcccagcttaaaggtgtccttgttcgagcatcactgaaaaaaagcacaatgggatttggttttactattattggtggagatagacctgatgagttcctacaagtgaaaaatgtgctgaaagatggtcccgcagctcaggatgggaaaattgcaccaggcgatgttattgtagacatcaatggcaactgtgtcttcggtcacactcatgcagatgttgtccagatgtttcaattggtacctgtcaatcagtatgtaaacctcactttatgtcgtggttatccacttcctgatgacagtgaagatcctgttgtggacattgttgctgctacccctgtcatcaatggacagtcattaaccaagggagagacttgcatgaatcctcaggattttaagccaggagcaatggttctggagcagaatggaaaatcgggacacacttcgactggtgatggtctcaatggaccatcagatgcaagtgagcagagagtatccatggcatcgtcaggcagctcccagcctgaactagtgactatccctttgattaagggccctaaagggtttgggtttgcaattgctgacagccctactggacagaaggtgaaaatgatactggatagtcagtggtgtcaaggccttcagaaagaagatataattaaggaaatataccatcaaaatgtgcagaatttaacacatctccaagtggtagaggtgctaaagcagtttccagtaggtgctgatgtaccattgcttatcttaagaggaggtcctccttcaacaaccaaaactgccaaaatgaaaacagataaaaaggaaaatgcaggaagtttggaggccataaatgagcctattcctcagcctatgccttttccaccgagcattatcaggtcaggatccccaaaattggatccttctgaggtctacctgaaatctaagactttatatgaagataaaccaccaaacaccaaagatttggatgtttttcttcgaaaacaagagtcagggtttggcttcagggtgctaggaggagatggacctgaccagtctatatatattggggctattattcccctgggagcagctgagaaagatggtcggctccgcgcagctgatgaactaatgtgcattgatggaattcctgttaaagggaaatcacacaaacaagtcttggacctcatgacaactgctgctcgaaatggccatgtgttactaactgtcagacggaagatcttctatggagaaaaacaacccgaggacgacagctctcaggccttcatttcaacacagaatggatctccccgcctgaaccgggcagaggtcccagccaggcctgcaccccaggagccctatgatgttgtcttgcaacgaaaagaaaatgaaggatttggctttgtcatcctcacctccaaaaacaaaccacctccaggagttattcctcataaaattggccgagtcatagaaggaagtccggctgaccgctgtggaaaactgaaagttggagatcatatctctgcagtgaatgggcagtccattgttgaactgtctcatgctaacattgttcagctgatcaaagatgctggtgtcaccgtcacactaacggtcattgctgaagaagagcatcatggtccaccatcaggaacaaactcagccaggcaaagcccagccctgcagcacaggcccatgggacagtcacaggccaaccacatacctggggacagaagtgccctagaaggtgaaattggaaaagatgtctccacttcttacagacattcttggtcagaccacaagcaccttgcacagcctgacaccgcagtaatttcagttgtaggcagtcggcacaatcagaaccttggttgttatccagtagagctggagagaggcccccggggctttggattcagcctccgaggggggaaggagtacaacatggggctgttcatccttcgtcttgctgaagatggtcctgccatcaaagatggcagaattcatgttggtgaccaaattgttgaaatcaatggggaacctacacaaggaatcacacatactcgagcaattgagctcattcaggctggtggaaataaagttcttcttcttttgaggccaggaactggcttgatacctgaccatggtttggctccttccggtctgtgctcctacgtgaaacccgagcaacattaaggctttcagggcttttcttggtctttccttaaaaagacttggtaaatttgcatgtcttgtaaatcactttcttcttttgtttt

SEQ ID NO: 30539 - DNA, 2125 bp, Homo Sapiens
gtgctctgcttctggcagctgaagatcccagtagacagcttcttaaaccatggctttccctgcaggatttggatgggcggcagccactgcagcttatcaagtagaaggaggctgggatgcagatggaaaaggcccttgtgtctgggacacatttactcatcagggaggagagagagttttcaagaaccagactggcgatgtagcttgtggcagctacactctgtgggaggaagatttgaaatgtatcaaacagcttggattgactcattaccgcttctctctttcctggtcacgtctgttacctgatgggacgacaggtttcatcaaccagaaaggaattgattattacaacaagatcatcgatgatttgttaaaaaatggggttactcccattgtgaccctctaccactttgatttgcctcagactttagaagaccaaggaggttggttgtcagaggcaatcattgaatcctttgacaaatatgctcagttttgcttcagtacctttggggatcgtgtcaagcagtggatcaccataaatgaagctaatgttctttctgtgatgtcatatgacttaggtatgtttcctccgggtatccctcactttgggactggaggttatcaggcagctcataatttgattaaggctcatgccagatcctggcacagctatgattccttatttcgaaaaaagcagaaaggtatggtgtctctatcactttttgcggtctggttggaaccagcagatcccaactcagtgtctgaccaggaagctgctaaaagagccatcactttccatctggatttatttgctaaacccatattcatcgatggtgattatcctgaagttgtcaagtctcagattgcctccatgagtcaaaagcaaggctatccatcatcgaggcttccagaattcactgaagaagagaagaaaatgatcaaaggcactgctgatttttttgctgtgcaatattatacaactcgcttaatcaagtaccaggagaacaagaaaggagaactaggtattctccaggatgcggaaattgaattttttccagatccatcttggaaaaatgtggattggatctacgtggtaccatggggagtatgtaaactactgaaatatattaaggatacatataataaccctgtaatttacatcactgagaatgggtttccccagagtgacccagcgcctcttgatgacactcaacgctgggagtatttcagacaaacatttcaggaactgttcaaagctatccaacttgataaagtcaatcttcaagtatattgtgcatggtctcttctggataactttgagtggaaccagggatacagcagccggtttggtctcttccacgttgattttgaagacccagctagaccccgagtcccttacacatcggccaaggaatatgccaagatcatccgaaacaatggccttgaagcacatctgtaggcaagatggctgagaaatacaggagaggcgtctgcttttggaaaggaaatctgctttggtgatgatctttcaggcaatctcaacttacttctttaatcaacatttaatatcaatggatctgtgattaaaaggtctgaatatgtaatgcctcgtgaagtatttaataatggcctttatttgtatttggatcaatgaggtttttaaaaaaaatggaagagaaaaccactaaccttgatttttgtattgcaaaatcagatagacctggaaacataaatttaaatccttagacatttttctagaaaaaaatgcaaagtttataaagatgatacaaccatgatttgcaactgtaacaggagaccatttattataagcgtacctgtttgtgaacttaattattctgattccataagctgtttttgcttaggtgatccactgccatgtgatccataatttttctacataaaaaatcaaagttaaaagtcacattatacagttatgcattcatttcaacaaaatagtgaattgataatctacttgttaatatattcggcccatattttgtgtgtttggacaaggtacatctcccttttgcctaatgaacttttgaaaaataataaaataatagaataaattagactttgaatggcaaaaaaaaaaaaaaaaaaa

SEQ ID NO: 30540 - DNA, 3737 bp, Homo Sapiens
ggcgtccgcgcacacctccccgcgccgccgccgccaccgcccgcactccgccgcctctgcccgcaaccgctgagccatccatgggggtcgcgggccgcaaccgtcccggggcggcctgggcggtgctgctgctgctgctgctgctgccgccactgctgctgctggcgggggccgtcccgccgggtcggggccgtgccgcggggccgcaggaggatgtagatgagtgtgcccaagggctagatgactgccatgccgacgccctgtgtcagaacacacccacctcctacaagtgctcctgcaagcctggctaccaaggggaaggcaggcagtgtgaggacatcgatgaatgtggaaatgagctcaatggaggctgtgtccatgactgtttgaatattccaggcaattatcgttgcacttgttttgatggcttcatgttggctcatgacggtcataattgtcttgatgtggacgagtgcctggagaacaatggcggctgccagcatacctgtgtcaacgtcatggggagctatgagtgctgctgcaaggaggggtttttcctgagtgacaatcagcacacctgcattcaccgctcggaagagggcctgagctgcatgaataaggatcacggctgtagtcacatctgcaaggaggccccaaggggcagcgtcgcctgtgagtgcaggcctggttttgagctggccaagaaccagagagactgcatcttgacctgtaaccatgggaacggtgggtgccagcactcctgtgacgatacagccgatggcccagagtgcagctgccatccacagtacaagatgcacacagatgggaggagctgccttgagcgagaggacactgtcctggaggtgacagagagcaacaccacatcagtggtggatggggataaacgggtgaaacggcggctgctcatggaaacgtgtgctgtcaacaatggaggctgtgaccgcacctgtaaggatacttcgacaggtgtccactgcagttgtcctgttggattcactctccagttggatgggaagacatgtaaagatattgatgagtgccagacccgcaatggaggttgtgatcatttctgcaaaaacatcgtgggcagttttgactgcggctgcaagaaaggatttaaattattaacagatgagaagtcttgccaagatgtggatgagtgctctttggataggacctgtgaccacagctgcatcaaccaccctggcacatttgcttgtgcttgcaaccgagggtacaccctgtatggcttcacccactgtggagacaccaatgagtgcagcatcaacaacggaggctgtcagcaggtctgtgtgaacacagtgggcagctatgaatgccagtgccaccctgggtacaagctccactggaataaaaaagactgtgtggaagtgaaggggctcctgcccacaagtgtgtcaccccgtgtgtccctgcactgcggtaagagtggtggaggagacgggtgcttcctcagatgtcactctggcattcacctctcttcagatgtcaccaccatcaggacaagtgtaacctttaagctaaatgaaggcaagtgtagtttgaaaaatgctgagctgtttcccgagggtctgcgaccagcactaccagagaagcacagctcagtaaaagagagcttccgctacgtaaaccttacatgcagctctggcaagcaagtcccaggagcccctggccgaccaagcacccctaaggaaatgtttatcactgttgagtttgagcttgaaactaaccaaaaggaggtgacagcttcttgtgacctgagctgcatcgtaaagcgaaccgagaagcggctccgtaaagccatccgcacgctcagaaaggccgtccacagggagcagtttcacctccagctctcaggcatgaacctcgacgtggctaaaaagcctcccagaacatctgaacgccaggcagagtcctgtggagtgggccagggtcatgcagaaaaccaatgtgtcagttgcagggctgggacctattatgatggagcacgagaacgctgcattttatgtccaaatggaaccttccaaaatgaggaaggacaaatgacttgtgaaccatgcccaagaccaggaaattctggggccctgaagaccccagaagcttggaatatgtctgaatgtggaggtctgtgtcaacctggtgaatattctgcagatggctttgcaccttgccagctctgtgccctgggcacgttccagcctgaagctggtcgaacttcctgcttcccctgtggaggaggccttgccaccaaacatcagggagctacttcctttcaggactgtgaaaccagagttcaatgttcacctggacatttctacaacaccaccactcaccgatgtattcgttgcccagtgggaacataccagcctgaatttggaaaaaataattgtgtttcttgcccaggaaatactacgactgactttgatggctccacaaacataacccagtgtaaaaacagaagatgtggaggggagctgggagatttcactgggtacattgaatccccaaactacccaggcaattacccagccaacaccgagtgtacgtggaccatcaacccaccccccaagcgccgcatcctgatcgtggtccctgagatcttcctgcccatagaggacgactgtggggactatctggtgatgcggaaaacctcttcatccaattctgtgacaacatatgaaacctgccagacctacgaacgccccatcgccttcacctccaggtcaaagaagctgtggattcagttcaagtccaatgaagggaacagcgctagagggttccaggtcccatacgtgacatatgatgaggactaccaggaactcattgaagacatagttcgagatggcaggctctatgcatctgagaaccatcaggaaatacttaaggataagaaacttatcaaggctctgtttgatgtcctggcccatccccagaactatttcaagtacacagcccaggagtcccgagagatgtttccaagatcgttcatccgattgctacgttccaaagtgtccaggtttttgagaccttacaaatgactcagcccacgtgccactcaatacaaatgttctgctatagggttggtgggacagagctgtcttccttctgcatgtcagcacagtcgggtattgctgcctcccgtatcagtgactcattagagttcaatttttatagataatacagatattttggtaaattgaacttggtttttctttcccagcatcgtggatgtagactgagaatggctttgagtggcatcagcttctcactgctgtgggcggatgtcttggatagatcacgggctggctgagctggactttggtcagcctaggtgagactcacctgtccttctggggtcttactcctcctcaaggagtctgtagtggaaaggaggccacagaataagctgcttattctgaaacttcagcttcctctagcccggccctctctaagggagccctctgcactcgtgtgcaggctctgaccaggcagaacaggcaagaggggagggaaggagacccctgcaggctccctccacccaccttgagacctgggaggactcagtttctccacagccttctccagcctgtgtgatacaagtttgatcccaggaacttgagttctaagcagtgctcgtgaaaaaaaaaagcagaaagaattagaaataaataaaaactaagcacttctggagacat

SEQ ID NO: 30541 - DNA, 2948 bp, Homo Sapiens
aggtaatgattaatctgtcaggcacaaaagggattgttttggggatttcgggttctaagtcgcagattcaaacaaatagcagcgaacagggaatgacagttccaccagaagacgattaagccacagcctctaattggaacggcatttgtacagtcagagactcttaccagacatctccaggaatctgtgagccattgtcaaaacgtccattttcatctggctgtgaaagtgaggaccacaacaggtaggtattggtagaaacaggagtcctcagagaagccccaagatgcagcctgagggagcagaaaagggaaaaagcttcaagcagagactggtcttgaagagcagcttagcgaaagaaaccctctctgagttcttgggcacgttcatcttgattgtccttggatgtggctgtgttgcccaagctattctcagtcgaggacgttttggaggggtcatcactatcaatgttggattttcaatggcagttgcaatggccatttatgtggctggcggtgtctctggtggtcacatcaacccagctgtgtctttagcaatgtgtctctttggacggatgaaatggttcaaattgccattttatgtgggagcccagttcttgggagcctttgtgggggctgcaaccgtctttggcatttactatgatggacttatgtcctttgctggtggaaaactgctgatcgtgggagaaaatgcaacagcacacatttttgcaacatacccagctccgtatctatctctggcgaacgcatttgcagatcaagtggtggccaccatgatactcctcataatcgtctttgccatttttgactccagaaacttgggagcccccagaggcctagagcccattgccatcggcctcctgattattgtcattgcttcctccctgggactgaacagtggctgtgccatgaacccagctcgagacctgagtcccagacttttcactgccttggcaggctgggggtttgaagtcttcagagctggaaacaacttctggtggattcctgtagtgggccctttggttggtgctgtcattggaggcctcatctatgttcttgtcattgaaatccaccatccagagcctgactcagtctttaaggcagaacaatctgaggacaaaccagagaaatatgaactcagtgtcatcatgtagtggcatgctcagctctggatttgcagtcagtttgggattctcttcagaaagatggcatctaagtgtctgtgttcttgtaagcctgaggtggaatccacccagttttgtctgctagccatatgggacatctaattggaaaagcatctgcataaaagtttggaaacaatgaccacttctctaccattgtcccccaccccaccccccagaataacgctgactgtcccctgaaacagccttctctcctgccctgtttatttcatcctcgatgggaattcttgctaggtaagcactaataactcggcatcttgacgatagtcccatttgggtggtttcagctgcactatctgtatgaaatggtgtcaccaaaacccttttcttcagtatcgacaaagattacattctgagtaccaaccaaaccctaaattgaaagacaaaactatggtttcagtcaacatattcatgaattagggagctaatgggttaagcttccagttcccgctatgctactggatttgtataaatactgatattctccaaacctagtggtgtagggagcaagagaatgcagctggaaggcacaaggggaggacattgtggcattcagaaactgcaggagacaagatgaatttgagaagccaaatggaatttttaatggaaaccatttatcagattaatctcttgctctcctgcattttagaggacaccaattaatttcctggtctttagtatataataacctaaaataccattgtaacctcagtcatgaaaaatacatcactctgtctttttagctcaaatgtattttcctaattgcccacttgagaacagacatttgacaagttatatcaacgactgtgcttgtccattattttacacatgccctagaagccaaaactgaaagccactggatcctggtctagctgaatcttcagagtgggaggtctccaaaaagatattaccttattgggcttaacaattcacaaggcactttcacacccattatctaatttaatcctcataatgactatgtgaggcaaatgccacattgcccatttttcagataaagaaacaaaatcttagggaagataagttgagttgtccaagagcacactgaaagttgaatgttatctaatgcattcctctacctttcagaagatcagtagctggctgagaatctttgccaaatcttccttgctagccagaagtggaattggcagcttctagaatatgtacacctctggacaaaatgttcctcaatcttaagatacaaagaccctcattgtctgggtctattcccacacttactgagtacagatgaaggaaagtggtagcaatttaatcataactttcatttgctgaaaaacattatgagaaggcctcccttcctaagccacctctggtcttgctaagtcttgatcttgcttcctgccagcaccaaacattacattcaggggatttcctctggctcagtcttttccccttgaagttctctaatagatgttacttttgacaaaagatcgcctatgagttacaagcaccaggggatgctctacatcaagggatgcaccttcagtcaaactgtcaaaaagcccagaattcccaaaggcattaggtttcccaactgctttgtgctgatatcagaacagcagaaattaaatgtgaaatgtttctgatgacttatgttctacaatctatggacatacgggatttttttttcttgctttgaagctacctggatatttcctatttgaaataaaattgttcggtcattgtt

SEQ ID NO: 30542 - DNA, 1462 bp, Homo Sapiens
gcccgcgccgcgccgctctttctccgacagctgccgggggtgccctgcaagctgttccgcgcgtcctgcccgtctgtccccgcgggtcgtcgcccgccacagccgcgccatgaccacccagcagatagacctccagggcccggggccgtggggcttccgcctcgtgggcggcaaggacttcgagcagcctctcgccatttcccgggtcactcctggaagcaaggcggctctagctaatttatgtattggagatgtaatcacagccattgatggggaaaatactagcaatatgacacacttggaagctcagaacagaatcaaaggctgcacagacaacttgactctcactgtagccagatctgaacataaagtctggtctcctctggtgacggaggaagggaagcgtcatccatacaagatgaatttagcctctgaaccccaggaggtcctgcacataggaagcgcccacaaccgaagtgccatgccctttaccgcctcgcctgcctccagcactactgccagggtcatcacaaaccagtacaacaacccagctggcctctactcttctgaaaatatctccaacttcaacaatgccctggagtcaaagactgctgccagcggggtggaggcgaacagcagacccttagaccatgctcagcctccaagcagccttgtcatcgacaaagaatctgaagtttacaagatgcttcaggagaaacaggagttgaatgagcccccgaaacagtccacgtctttcttggttttgcaggaaatcctggagtctgaagaaaaaggggatcccaacaagccctcaggattcagaagtgttaaagctcctgtcactaaagtggctgcgtcgattggaaatgctcagaagttgcctatgtgtgacaaatgtggcactgggattgttggtgtgtttgtgaagctgcgggaccgtcaccgccaccctgagtgttatgtgtgcactgactgtggcaccaacctgaaacagaagggccatttctttgtggaggatcaaatctactgtgagaagcatgcccgggagcgagtcacaccacctgagggttatgaagtggtcactgtgttccccaagtgagccagcagatctgaccactgttctccagcaggcctctgctgcagctttttctctcagtgttctggccctctcctctcttgaaagttctctgcttactttggttttccctctgcttgtaaaacattgagtcccctccctgccttggttaattgactcacaccagctgtgcgatgcccgcttttacaattaaaggaaaactgttttgttcagtgtcaccttgtcagcaacactgtgtcccttcgccccaccgttcttctctgctgcatttggacatcagccaaatttgaacccaatcaaatataacgtgtctgacactgattttgtttttactcaataaatgtatagactacaaaaaaaaaaaaa

SEQ ID NO: 30543 - DNA, 4529 bp, Homo Sapiens
cgggtctcagtctggtactgaagtcaggaatggcttaaggtgaaatcgtggtcctctggtgaactcagcgaagaccccctcgccttgtttatgacaagagaacttctgggggcgggaggaagagtccctgttacgatgctgatcatcattgagcttttgctgagaaaactctttagtactaaggtcgagagtctctgtggtctgcctggcaccagcaccttcctacaaccctagttttccaaaaggaaaagcctggggccaggcgacgtcctagctcgcatttgaacagggccgcgggccaccagagatgcgcgatgcccaactctttccaagagcacctcgcgtcccgaaccggtgccttcaactcggagaagtcaagagacccgcaagaaacttgcacgactgcacccgccgccgcgctgctgggggctgggcaggggcagctgggctggctcccggggaacgcgacccccccgcgccccgcagaccggctgtctcccatggacccctcggcacctgcagcctccgaggaagggtcagcgcgcgtgtccgcaccccgcccccaccgcgcgcccagagccgggggtcgccgtggcccttcgccacctccccaggagggcgtccggggcgtcccctctgggcgacgcgaggcccgggggcgctgcggtggccgcggcgcggagccgcactccggcggcggcggcggcgcggctccccctgctctgtgcagctgccgcccgggcttgcgctgggccaggcgcgcggcggccccgggctttgtgtgtgtgtatgtgtgtgtgtgtgtgtgtgtgtgtgtgtgagagtgtgtgcgtgtgagagtgcgagtgtctgtgcgcgagtgagtgagcggcgggcgggcgcgagtgtggccggccggagcgcgagcatggacccggcgggcgcgctccccagcctccgtctccccgccggaaccatgtcgggcaggtcggttcgagccgagacgaggagccgggccaaagatgatatcaagagggtcatggcggcgatcgagaaagtgcgcaaatgggagaagaaatgggtgaccgttggtgacacatccctacgaatctacaaatgggtccctgtgacggagcccaaggttgatgacaaaaacaagaataagaaaaaaggcaaggacgagaagtgtggctcagaggtgaccactccggagaacagttcctccccagggatgatggacatgcatgacgataacagcaaccagagctccatcgcagatgcctcccccatcaaacaggagaacagcagcaactccagccccgctccagagcccaactcggctgtgcccagcgacggcaccgaggccaaggtggatgaggcccaggctgatgggaaggagcacccaggagctgaagatgcttctgatgagcagaattcacagtcctcgatggaacattcgatgaacagctcagagaaagtagatcggcagccgtctggagactcgggtctggccgcagagacgtctgcaatctctcaggtacctcgctcgaggtctcagaggggcagccagatcggccgggagcccattgggttgtcgggggatctggaaggagtgccaccctctaaaaagatgaaactggaggcctctcaacaaaactccgaagagatgtagacgatgctttaaagcctccgataactgttccatggaaggtacatcagcaattaattctagagcaactttgccccagcgattcctcttgggtgcgaacagaactactaacgtttcaagtttaccaagtgcaaatccaagaagacccagaacggcgtcacttctcagacactgaagaactctgctgtgaagcaaaacactcaaacctttaagggactgtccttggggaggcaggcggggctgacagctcaggagtgtctgcacactgtctcggaagccaggattccatttgtgttgctgctgtattttccccccacttctctatgtaacgatataagctatcggagggtggtaccgatcaggaacgctttttggcggggctttccactgttcaaccgattccttccgctttctttttttgtgccttgtgcccttgaggtgacctctggcatgtatcctggtggttcttacatccccctctgcaaagtgccctcttggtttggttcgggcggcggctgccaccctactcaccgctctcctccctgccccaggacttcatcggagcaggcagggtggagcgaaggagctccttagcccacctggtttgcaggtgcagggggaccttaggcacgccccaagcaccaggcaccagggcccaaggacgcgcaggtgttggggcacagtccccaagggctcggccccttggatcaggctgggcactcgctgtgctctcccctccttggggcgtttaggactgggcgtctccaagcccaccatggcccagatggacgtgcaaagcccttggaattttctggcacttcctctctattgcccccaccaccaccacccccatcactgctttctcccagacctccgaatacgaaatggcttctctggctgactgcaaggctgtctccttaaggcactgagtgggccggggaggctgggagccggcggcaggattagctggtgctgaactttctctcataggacgtcgcttggatttcaaatccacggtcacctgctgccctttgcctcccccgacgccccagcctgtgccccggagaggcaggatcgcagtggtcagaatccacgtgctttcctattctcaggctgttctgactctgagccaacagctggaccgtgtctcatccccagaacatgccgtctgtccaccggggagtggccttgatggccggcctcgaaggccacaaacaaggcgtcgaggaattggaaagatttgcacaccctccagaaaggagagacgcaatctcccctccctcccatcccccaccttcgctggaacagcttcctctcactgaacggagacgcccccttggacgaactgcctaatcgtttggttctgaggcctggtttgctcttaattaatatatgaactcctcagaccttaaaccttttcctaagctttctttactgcactggagttctgactccctttgagttgtgtgttactgggggtggggtggggtcatgggttttgttgtttttgggggctaattggtgcatattcaggtaccacctttgacgtgtggctctttctcctgaccatcatgggaagtgtctgctggattccattttctaagagtttctgagggtgaggctcttattttttttttaagggatcctgtctatttcctgcacttcgagaagaatcaaaatgttcctgaatttcaaatacctcatgcaaaatgtctcctgaaataagggaaaaaaaaaaaaaaccacaactttgaaaatcttaatgttgaagttagcaatgccgaaaggtttctgtcttaaaaaaaaaaaatccttgtacttatcaattttgccccttaggcagtcagttttgttgagaactgtgtcctgcatcctggcgcagaacctacctgatgcggttcctctccacgcatctcgaggcggcgttacctccagattccgtagagttagagtcacatttttctttgcagcgaaactccatcttggtgagagatgaatttggatatttatttccttctctgtttttgggaaacgagaggctacaaccaagacagctgaaggagaatgaaacacacacatccacagaaacagagaggcgtaggtggccctgccgttgaccgcagcctctctggacaggcaaggggagttggcgcaggtgaggactcagacgacgtccaccgtcccaaggctgtcactagtatttctctgaagtgcctgaaggtaggaatgggccggcgattgggaccagctgggccccaccacggccacgccaggcaaagcgccagcagccctgcactccacgctggccaagaaggccttccacgcagaatgacaagactgcaaaaatccgatgtgcttccttccctggcgcagtcgctcctcgagccgctgccccccacccaccctgcacccctcgccctcccccccaccacagaatctaagacctttcagcttcgagccagggggcgggggatcccgagcaaaagccttccgtggacatcaggccccgtggcctcaagggctcccagggcaaacctaattccccccaaaacgtgaagtcggggaagctgcggctacacattccacaaagtgctggcacttacacccacaacccggaaggctgtggaccgattcctctagggtggtgacctcccattagcaaacggtgtcatggtttggaatgttcattatcgccaagaacctggttagaggcataaagaccttttttcaccgttacctaattttttcccctttcaagaattttttttttttttggtgtgttgtacagcagtataatttttcacttatttattccatcagtagatatggtttgtacaatgtacaattgtttcatttcagaaaataaaaatttcaaatcatg

SEQ ID NO: 30544 - DNA, 2737 bp, Homo Sapiens
tgacgaaggggcccgaccgcgccgcgtttcgggagcggacgtccgagccacggccgaggcccgattagtccgtccggcaccgctcgggcactttcggaagggaagaggtggagaaccgacgttcgggagcattcggcctcggggacattcggctcgtctcggctcggcctcgggctgactcggcttccgccggcggcgggaacgggcgaaacccgcggcactaagctctctctgagaggcagaattgcgccggccgccggcgagaatctgcctagagccgtccagccctgtcggccggggacgacagccgcctcagcctgtcaggacagtgaggagagcaggggccgagtctctcggaagccctcgtgaggactcggacctattcggactgattcggcttcccacttcggggaacttcgaccctcctcggttcaggactcggtctcggctcggcggcttcgtgcaggttcggctcctactcgggcagcctctgttcgcctcggctccgctccgcgggcggactcggctcggctctgctcggcggctggctgccttttcggtccctattcgggcggcggcttcgggcggcctcggcccagctcgggcgtcctcttcgggccccgcttcgggctccgcgaccggcgcttcgggcggtcccggacggcgccttcgggaaggctcggcggagtccggatggaggactcggactcggcggcaaagcagctgggcctggctgaggcggcggcggtggcggccgcggccgctgtggcggcggcggccgcggccgcggcaggaggcgaggcggaggagccggtgctgagcagggacgaggactcggaggaggacgcagactcggaggcggagcgggagacgccgcgggtcacggcagtggcggtgatggcggcggagcccgggcacatggacatgggcgccgaggccctgcccggccccgacgaggccgccgctgccgcagccttcgcagaggtgaccacagtgacagtggccaacgtgggggctgctgcagacaatgtcttcaccacgtctgtggcgaacgcggcatccatctcaggacatgttctgtctggtaggacggcccttcagatcggggacagcctgaacaccgaaaaagcgacactgattgtcgtccacacagatgggagcatcgtggagaccaccgggctgaaaggcccggcagctcccctcaccccaggtcctcagtctcctccaacccctctggctcccggccaagaaaaaggtggaactaaatacaactgggacccttctgtgtacgacagtgagctgcccgtacggtgccggaacatcagcggcactctgtacaagaacaggctcggctcaggcggccggggacggtgcatcaagcagggggagaactggtacagtcccaccgagtttgaggccatggcaggaagagccagcagtaaggactggaaaagaagcattcgctacgcgggccgacccttgcagtgcctcatccaggatgggatcttaaaccctcacgctgcctcttgcacctgtgctgcctgctgcgacgacatgaccttaagtggcccagtcaggctttttgtgccttacaaaaggcgcaagaaggagaatgaactgcccacaactcccgtgaagaaggactcccccaagaacatcacattgcttccagccaccgcggctaccaccttcaccgtgaccccctcgggacagatcacgacctcgggggcactgacctttgaccgagcgtccacggtagaggccactgctgtcatatcagagagtccggcccagggcgacgtcttcgcaggggccacagtccaagaggccagcgtgcagcccccatgcagggccagccaccctgagcctcactaccccggctatcaggacagctgccagatcgcaccgtttccagaagctgcgttgccaacgtcacatcccaaaatagtgttgacatccctgcctgcgctggcggtcccacccccgactcccaccaaagcggcacctcccgcgttggtcaatgggctggagctgtcagagccgcggagctggctgtacctagaagagatggtcaactccttgctcaacacagcgcagcagctgaagacgctgtttgagcaagccaagcatgccagcacctaccgagaagctgccacaaaccaggccaagatccacgctgacgcagagcggaaggagcagtcctgcgttaactgcggccgggaggctatgagcgagtgcaccggctgccacaaggtcaactactgctccaccttctgccaacgcaaggactggaaggatcaccagcacatatgcggccagtcagcagctgtcaccgtccaggcagacgaagtccacgtggctgaaagcgtgatggagaaggtgaccgtgtgaggctccatcggccgccctgggagctggggcccctcgcactcctgtgaggcttttgcaggtcgaaggcccccctgaggactctggggggacgttgagaagaggggtgtgggaaggtaaagaaacttgctggacaagtcattaacacactttaagcgaatggtgccctgggaagcgcactccccctgcccgggccccctgcccgctcgcggacagattttttatccctgggatcatgagcgtccggtcttgcccacagggcctgtgctgcgacgcacatacatacgtgttgtgtctgtcaataaagtgtaaataaggtctccctgccaaaaaaaaaaaaaaaaaaaaa

SEQ ID NO: 30545 - DNA, 5492 bp, Homo Sapiens
tgagggctttgctatgacctcagtcccctcacggagccacgactgccccttgctgccacagcctttccaagaccctgcccggccctgccccatcctcagccccgagtcaccatgggcagcgtcagtagcctcatctccggccacagcttccacagcaagcactgccgggcttcgcagtacaagctgcgcaagtcctcccacctcaagaagctcaaccggtattccgacgggctgctgaggtttggcttctcccaggactccggtcacggcaagtccagctccaaaatgggcaagagcgaagacttcttctacatcaaggtcagccagaaagcccggggctcccatcacccagattacacggcactgtccagcggggatttagggggccaggctggggtggactttgacccgtccacaccccccaagctcatgcccttctccaatcagctagaaatgggctccgagaagggtgcagtgaggcccacagccttcaagcctgtgctgccacggtcaggagccatcctgcactcctccccggagagtgccagccaccagctgcaccccgcccctccagacaagcccaaggagcaggagctgaagcctggcctgtgctctggggcgctgtcagactccggccggaactccatgtccagcctgcccacacacagcaccagcagcagctaccagctggacccgctggtcacacccgtgggacccacaagccgttttgggggctccgcccacaacatcacccagggcatcgtcctccaggacagcaacatgatgagcctgaaggctctgtccttctccgacggaggtagcaagctgggccactcgaacaaggcagacaagggcccctcgtgtgtccgctcccccatctccacggacgagtgcagcatccaggagctggagcagaagctgttggagagggagggcgccctccagaagctgcagcgcagctttgaggagaaggagcttgcctccagcctggcctacgaggagcggccgcggcgctgcagggacgagctggagggcccggagcccaaaggcggcaacaagctcaagcaggcctcgcagaagagccagcgcgcgcagcaggtcctgcacctgcaggtactgcagcttcagcaggagaagcggcagctccggcaggagctcgagagcctcatgaaggagcaggacctgctggagaccaagctcaggtcctacgagagggagaagaccagcttcggccccgcgctggaggagacccagtgggaggtgtgccagaagtcaggcgagatctccctcctgaagcagcagctgaaggagtcccagacggaggtgaacgccaaggctagcgagatcctgggtctcaaggcacagctgaaggacacgcggggcaagctggagggcctggagctgaggacccaggacctggagggcgccctgcgcaccaagggcctggagctggaggtctgtgagaatgagctgcagcgcaagaagaacgaggcggagctgctgcgggagaaggtgaacctgctggagcaggagctgcaggagctgcgggcccaggccgccctggcccgcgacatggggccgcccaccttccccgaggacgtccctgccctgcagcgggagctggagcggctgcgggccgagctgcgggaggagcggcaaggccatgaccagatgtcctcgggcttccagcatgagcggctcgtgtggaaggaggagaaggagaaggtgattcagtaccagaaacagctgcagcagagctacgtggccatgtaccagcggaaccagcgcctggagaaggccctgcagcagctggcacgtggggacagcgccggggagcccttggaggttgacctggaaggggctgacatcccctacgaggacatcatagccactgagatctgaggggctgcctgggaaggcgagtctggggacctggcactgggaggcagggctctcccgtgcatcccccctgctcagcaattcagacccctctgagagacgccactccctgggacacagacccaggacccccgaggggagggcaggatggcctttccttccctctctgatgtcccagtgctcaccagccctgcagcccaccagacgtcaggccctgactcctctggctttcccaggagatgggtccaggggtctgtctgctttggttaagggctccctaaactttggcctttgttcgaaatagatatcctctccccctcctccagggaaggtggccacagcaagaacagcggctcccctccgcttctcatcccaacctctttttcctcctggacacattggaatgccttggaaatagaaagaagccatatatgaccagaagccttggaaccagccccatcagaacctgagctattttcctctggccgcagaggtgtaggggtggaatgagccgcggggaagctggctttgaaacctcagggctgtcccagccccggcaagccacaggaaggaggggagagacaggcagcccagcagtgtggagaccctgccacagccagaggagggcagagggagaatccaagggttgagagccagtggcgggtgatggccagcccctggggcccagcccctgtttactggttcttgcaaatgggagctgagcagcctctggacagccagtgacctttgacctcggtgaccactcttctttaagccatagaccctgaggccctgggctgggtgctgggaagggagggttgaaaccaccgtgaaccagagggtgtggctttccaggcaccctcagggagcctccccatctgtccagctggggccagaggctgggagtccctacctgcttcacgttggccggcggctactctggaatgtttttccctccccagaatcaagcttttgcttgatccagaagagcccatatcactaagatggcatatatgtgatctgggcattttcctcctctgcctacagccaggtttagcggcaaacctttcccccttagcaccttcagggctgagttctgggtttctagaggtcaggacggctcctcagagcgccaggaagccagagccccaagcaggacgaaaaagaggcatacacacagcagtgtgaatagcctggccaccagccatcctccctccacctcaagacccccatttgtcccagactaaaggatccagagagcagctccctttctcaggagcttgggcagtgccccagggagtccagggtttctctgcagatgtgcggagcgggaggcggtggtagagagagataaaaggtggagtttctctgttgtttggttcagggattttatttttaattttatgagacagggtcttgctctgtcccccaggctggagtgcagtggcatgatcatagctcactgcagcctcatactcctgggctcaagcaatcctcctgcctcagccttccaactagctgggactacaggtgcgcgccaccgtgcctggctaacttttcattttttttgtagggacggggtctcgttttgttgccaaagctggtctcaaacttgtggcctcaagcaatccacctgccttggcctcccaaagtgctgagattgcagatgtgagccaccgtgcctggccagatttttcttttattcttctttctttttcttttttgctttcttgtcttttcagaagcaagccagacctagcaggctgttccatgttctatttttgactgtagccacagctgctgttctcaggacagcatcccttcccacatgcctgcgcctgctgcctgctgagatgaggaggggagcgtctgggaacttgcgagtccaaggccagtccccatttctgcctcgctcaccgctggcccttagagaccccgaggtaggggtggggagatgcttctctccttgccccccgccctcatgggtcctagcccttccctgagtgcgggctgaggccagagtcaccttttctgtggctggctctaccttcctgtccctgaggttaaacggtgcccatcctgccatcctcaaacgacagaggagcttttctggaatttcaaaccattgctcttagtcccaagctaggcttaaacctggaatctacaagccaaaagtccctccctgcctgagggcagtaccctccattgggcacagtccagacccaagtcaaagatgccccattccttgcgcctcagccctcagttccttcatttccaccaggccgtgccttgtttgagtttttcctcccagtgagactgccccacggagacagaggaaagggctggctccccctccccaggctggagaccccccccaactccaggaaagagcagtcagagtccagtgctctgcctcagacgttgcctgagaagaagtggctgccacacccaggggaaggccctgaggcggaggctgtgctccgccatggtgtcccggtaccttccatacacagaggagtgcagccttctccatatctccatggccctgtcccaggccggcccagatgtgtcccccccaggccttgtcctacgtccaaggtggcagatgtcttccctgggctgccaccagcccccgccccagagtggcccaccgtggcactagaatgcaagtatcctgcgaccttgcaacctcaccttcctgtgggtgttctttcctgccctgtccaaaagcgccctcactattcttggaccatgccagattctgcctctctggaaagaggctctggacagcagaagcctccaagcacagagcctggccccaggccccagacagggtgggcttcctgcccttccctctgggcacgcctgctggccgacccactgacccactcggatggaccaacctgctctgtccccaaaggacgcctgcaggagagagcagcactccgcatcacctcaccaaggatcggactctgcccctggacctgggaacgactggactgtcacggggttccctcctagctctcccagtgaactcctgccaggcacacacagcccctatagcactgagctcacatgggactgggatatgggggcatctcttccccagagaggcactcagtgagcctcctgtgcctggccccagtctgggccatctcttaggtgagacagttgcccgaaactaagccaggcctggctggaggagcagcagcttggggagagggatttccctgcagacctcaagccatcatgcggtgggtgctgccatgacagaggctgcacccctgggccagcggggctgctcacccacctcttgtgcaaggtggcctttgtgctgcgcctgcaggcagagctggagcccccagcagaggcaggctgggacggaccagcatctggaagatgtacatagttatttttctctttgtggtttcttgtttggtttggtttgcttttgacagcttcattttatttttgacgtcactttttggccatgtaaactatttgtggcaattttatgtttttatttatgaataaagaatgccatttctcacgccctctaaaaaaaaaaaaaaaaaaaaaaaaaaaaaaaaaaa

SEQ ID NO: 30546 - DNA, 2630 bp, Homo Sapiens
gctgactcgatttcgtctcggtcttccccagagctggacacgaggcaccatgatcagagagacacattccctgcggacggcgctcccatcggatactggagggacgcgacactagaggcaggcagtacttcagggtgaccataagtctcccaaacagccacaacggctcgctctcccagctaaggcgacagcgctgccattttggatcctgttcagccacgggaagccggcgtttgcacacattttcggacgtcatattaaagcgcaccggacgccgagacttctgggagatgaagtccttgcgaaggccccgcattgattgggagcgcagtcgccaggaccctgtgcgcaggcgcgttggtttcccgacctgaagaggcgccgtcttcccgggtcccgagcactctgtgccggaggactctgcccttgtccacaaggagagcacacaggagagaatggctgctgtgtctccgaccaccagatgccaggaatcagtgacattcgaagacgttgccgtggttttcacagatgaagagtggagtcgtctggtccccatacagagggacctctacaaggaggtgatgctggagaactataacagcattgtgtcattgggccttccagttcctcaacctgatgtgattttccaattgaagagaggggacaagccgtggatggtagatcttcatgggtctgaggagagagaatggccagagagtgtctctctagactgggaaactaagcctgagattcacgatgcttcagacaaaaaatcagaaggatcattgagggaatgccttggaaggcaaagtcctctgtgtcctaaatttgaagttcatacacccaatggcaggatgggaacagaaaagcaaagcccttcaggggagactcgtaagaaatccctctcccgggacaaaggcttgcggcgacggtcagccctgtccagggaaattctcactaaagagagacaccaggaatgcagtgactgtgggaagaccttttttgaccactcatccctcacccgccatcagaggactcacactggggagaagccctacgactgccgcgagtgtgggaaagccttcagccacaggagcagcctcagcagacatctgatgtcacacactggggagagcccctacgagtgcagtgtgtgctcaaaagccttctttgaccgttcgtccctaactgtccatcagcgaattcacactggagagaaaccctttcagtgcaacgagtgtggaaaagccttttttgaccgttcatcccttactcgacaccagagaattcacactggagaaagtccttatgaatgtcatcagtgtgggaaagcctttagccagaaaagtattcttactcgccatcagctaatccacactggcaggaagccttatgagtgtaacgagtgcgggaaagctttctatggtgtctcgtctctgaatagacatcagaaagctcatgctggggaccctcgctatcagtgtaacgagtgtggcaaagctttctttgaccgctcatcccttacacagcatcagaagatccacactggagacaagccacatgaatgcagcgaatgcgggaaagcctttagccagcggtgccggctcacgcggcatcagcgtgtccacacgggagagaagccctttgaatgcactgtgtgtgggaaagttttcagttcaaaatcttctgttattcaacatcaacggcgttacgccaaacagggaatagactgagttgggcaaaagcttgggtaggacaagaacttccatacaaatttgagatagatctcgcctgtcttaaagctgccatttgctcattctacccactctggctgccgttgtcctgtcctgcttctgcgccagagtgtttaataagcactcccttcctgctgtgttacagaactgtaggggaggccatggaaatgactctaaagatacaaaattttgaagaggtttgtcagacaataggatagatgttaggaggagacacacctcttgtctgagaacctaggccccaggtatcactgcactttaagaaactggaggctgcaacaggagggaaaggcagaatgatatcacagcagtactatttttttttttcagaacatttgttttgatggctgttagtccccctctcttggagcattttggggcactaatcttgttctcttgtgtcccagcttttagacctcttacttccactgctagtagctagcacttactgagcacctgcaatgaggtaaagactcagctaagggttttacaggaagtagattaattgatcctgtcaccaaccatatgaagtaggcactgttaccatctgcatctccagatgagcaccctgaggtttagagagattaaatcacttgcccaaggtgaaccagctggtaaaaggtgatgccaggtcttgaagacaggtccaccttcaaaatctattctctttaccattatgctcgatggtttgtttgttttataatttatgtatatgtattatcctctcaactagattgtaagcacttggaggtgtgacttacaggtctttgtatctcacacagtgccttgctaataggtgctcaataaatatttatatgagtgaatgacaaaaaaaaaaaaaaaaaaaaaaaaaaaaaa

SEQ ID NO: 30547 - DNA, 12499 bp, Homo Sapiens
gcgcccgctgcatggcgctgagatggcgggggcgccgcgcggcggaggcggcggcggaggcggcgcgggcgagcccgggggcgccgagcgggcggccgggacaagccgccggcgcgggctccgggcgtgcgacgaggagttcgcttgcccagagctggaggcgctgttccgcggctacacgctgcggctggagcaggcggccacgctgaaggcgctggccgttctcagcctgctggcgggcgcgctggcgctggccgagctgctgggcgcgccggggcccgcgcccggcctggccaagggctcacacccggtgcactgcgtcctcttcctggcgctgctcgtggtaaccaacgtccggtccctgcaggtgccccagctgcagcaggtcggccagctggcgctgctcttcagcctcaccttcgcgctgctctgctgtcctttcgcgctgggcggccccgcccggggttccgccggggccgctggggggccagcgaccgccgaacaaggggtttggcagctccttttggtcaccttcgtgtcctatgccttgctgcccgtgcgcagcctgctggccataggctttgggctcgtggtggctgcgtcgcacttgctggtcacagccaccttggtccccgccaagcgcccacgtctctggaggacgctcggtgccaatgccttgctcttcgtcggtgtgaacatgtatggggtctttgtgcggattctgactgagcgttcacagaggaaggcgttcctgcaggcccggagctgcattgaggaccgactgaggctggaggatgagaacgagaagcaggagcggctcctcatgagcctcctgccccggaacgttgccatggagatgaaggaggacttcctgaagccccctgagaggattttccacaagatttacatccagaggcacgacaatgtgagcatcctgtttgctgacatcgtgggtttcacgggcttggcatcccagtgcacagcccaggagctggtgaaactcctcaatgagctcttcggcaagttcgatgaattagccacggagaaccactgtcgccgcatcaagattctcggggactgctactactgcgtgtcgggcctcacccagcccaagactgaccatgcccactgctgtgtggagatgggactcgacatgattgataccatcacatctgtggctgaagccaccgaggtggatctgaacatgcgtgtgggtctgcacacgggcagggtcctctgtggtgtcctgggcttgcgcaagtggcagtacgacgtgtggtccaatgatgtgaccttggccaatgtcatggaagccgctggcctgccagggaaggttcatatcacaaagacgaccctagcgtgcttgaatggggactacgaggtagaaccgggttacggacatgagaggaacagtttcttgaaaactcataacatcgaaaccttttttattgtgccatcccatcgccgaaagatatttccaggcctgattctctcagatataaaaccggccaaaaggatgaagttcaagactgtctgctacctgctggtgcagctcatgcactgccggaaaatgttcaaggccgagatccccttctccaatgtcatgacctgcgaggacgatgacaagcggagggcattaagaacagcctcggaaaaactcagaaaccgctcatctttttctaccaacgttgtctacaccaccccgggcactcgcgtcaacaggtacatcagccgcctcttagaagcccgccagacagagctggagatggcagacctgaacttctttaccctgaagtacaaacatgtcgaacgggagcaaaagtaccaccagcttcaggacgagtatttcaccagcgccgttgtcctcaccctcatcctggctgccttatttggccttgtctaccttctaatattcccacagagtgtggtcgtcctgctcctgctagtattctgcatctgcttcctggtggcctgtgtcctgtacctgcacatcacccgggtccagtgttttccagggtgcctgacgattcagattcgcactgtcctgtgtattttcatagtggtcttaatctactcagtagcccaaggttgtgtggtgggctgcctgccttgggcctggagctccaagcccaacagttccctggtggtcctttcgtctgggggccagcgcacagccctgcccaccctgccctgcgagtctacacaccatgccctgctctgctgcctggtgggcaccctcccgctagccatatttttccgggtgtcctccttgccaaaaatgatcctgctctccgggctcaccacgtcctacatcctcgttctggagctcagcggatacaccaggactgggggtggtgccgtctccgggcgcagctacgagccgattgtggccatcctgctcttctcctgtgcgctggccctgcatgccaggcaggtggacatcaggctgaggctggactacctctgggccgcacaggcagaggaggagcgagaggacatggagaaggtgaagctggacaacaggcgcatcctcttcaacctcctgccggcccacgtcgcccagcacttcctcatgtccaaccctcggaacatggacctctactaccagtcctactcccaggtgggcgtcatgtttgcctccatccccaacttcaatgacttctacatcgagctggacggcaacaacatgggggtggagtgtctgcggcttctcaacgagatcatcgccgactttgacgagctcatggaaaaagacttttacaaggacatagagaagatcaagaccatcgggagcacctacatggccgctgtggggctagcgcccacctcggggaccaaggctaagaagtccatctcctcccacctgagcacgctggcggactttgccattgagatgtttgacgttctggatgaaatcaactaccagtcttacaacgactttgtcctccgagttggcatcaatgttggccctgtggtggctggagtgattggcgctcgcaggccccagtacgacatctggggaaacacagtcaacgtggccagtcggatggatagcacaggggtccagggcagaatccaggtgactgaggaagtccaccggctgctgagaaggtgcccctaccactttgtgtgccgaggcaaagtcagtgtcaagggcaaaggcgagatgttgacatactttctagaaggcaggactgatggaaacggctcccaaatcaggtccctgggcttggatcggaaaatgtgtccatttgggagagctggccttcagggcagacgtccccccgtgtgccccatgcctggcgtctcagtcagggctgggctccctccacactccccaggccagtacctgccctctgcagcagctgggaaggaggcttagtggagcccacgtgggcctctggggtgcacatggggtgggaatgctccgggggtgacacaggccacggtggctccagccaggaccagccagaccagcagagcagggagccacttgccagggtggaggaggagcattgtccaggcatggcctgtggcccgagggccaaccaccgagcaggcacagcacagcagtgactcggtgaggggaggacacccgactgtgcacacttccaggcctccctggagaggtgtccactccatccttccctccgtggcgtagggagcactgtttctttccagcaagcctgttcaggtttggccaggtcggcatcaatgtaaggaccttcagagcatcccagggttacagcaagagccactgaggtgtggctggcagagcaactgaggagctctgcgagagtgtgccctctgagacagccctgtccgccccgcccaggtgggacctgacatacaggcggctccagccctgggcagcggcttcaagagccagagtgggaagtcaggcctctctgggaaggtcacaaggcctggggttgttcacaccacaggcacaatacagagctgtccactcttgaactggaccgtctggggagaattgagaagctgcctctcactgcatggatagtggtggctgctggctttcaagcgtggttttttgctaagagccagaggcaggtcttctggagttctcaggggggccctgtgaccccctctccacaaccatggccagcatcggcttcttgctgcacctgtgcattctccacccctccgccaatggcttccagctcctaaaacacctggacattccccatcctgcaccggcactgtgtttgttcagagaaaacgaagggtgtcatttcttcttttccctgtggcatcgtggatcctttacatttagcaacaacagtgtgaggctccacttctgttgaatatgagcggctgtcacacccatgagcaagtttccttgatggaagatgctgtttctccggcagaaccaaccctccaggacgaagtttcagaattggctgatggtcgtgagtgcaggtgtccctgttgtaatttgcagggaaattgactgcaggtgatagtgttgacgtctgacgtctgacaacctcctatgtgcatgtctaaatagtcacaatgaagatgaaaataaggatgatggggacggggtccaggagggccactgggaaggcactatccagaaatagtggacagaggtctggcatgtggaaaccttggatctcggtcacagggaggaaggcagctagaaatgggagggaagcttctgggtaggcaccatagtaggggaatgtctaaagacccactgctctgagatgtggtcagagaggtttctgtggactgcagatgaggcctgagccctgcctatgctcaaagccagcagggttgggggtccgcctcctcactgctcctcaacagctgtaaccctttcctgagggccccgacttttcagaataggagcagagagaagcccagacttccttccctggagtgtagacctgtgtgtgggacctgctccaggctgatccctgtccgcacaggtgggtgatgtccttggctgctgccgtcagaggcagccccctgcacagggaggggctgatcctgcctcagctgtgtggccatgtgggggcagcaggggcctgggccatagctgggggaggccagaccctgagggctttgcagggcggccagtgcagtgatgcctggcgcttccagctgagacaggagtccggacagaggtgggcagggtggatggcttcgggcagggaaggcgggtagaggctgcatgtgggggcccctgtctgcctgtccttagggtgtggattaggctctggcttctgtgatggtgcaagaggcaggatggtctccagacaccttcttgcagagtgattttgaccaatgcctttccagcaccttcccctggttatgacagggagctcccaggccaggccacatgaccccacaggtaggctgaccccatggacccactggagactttgagggcagagctcgggcacctttcatcttccttgggtggtcctcatgtcgctgtccgctcatgttcctggtgttctggcatcaccttgtgccggtgggggctgggctcccgtgaggtcctagggcagaaggaggtgcttgcagggcctctcgctgctactgggacatccacaggacctaatgtttatgtggaatctccaggctgccatcgagggctcctgagctcatcctgaggacccagggtccatctgagctggctgtgggctgagatcctggctggggccctgctgtcaacctctcctccaggccctgccttgtccctgctcctgtgctttcctctcttcaggacaaatggtttgtccttatggtcccctttccactaggattttctcatcctcatctgtctatcccagccggatttaaagcagtcacttcagacaggagccacagggagcctgtgagggagtagtgcggtggtggtgagtgtggctgccctggctcccccagctcaccgtggtgctgtccttgacccacgagctgttgagaagggtgcagagcccctggcacagccaaccctgttgcccccagtgccgctgcccagcttcggccatccaggtggtgggtagacagaggagtgaaccccaaaggtgtccatgccccagttctaagccctgtggccaggtgctgtcacacagcaaaggggactttgcaggtggaattagggttagggatctaaggatgggaggggaacttggtttatctgggtgggctcagtgaccccttggaatggctgagggaggcaggagagcctggaaagattcgaagtgtcacagagatggtgccgtcattgctggcttaaagacaaggggccaggagccaacaccagaggccactccacaaccccagcgccagtcagcaaggaagccgggtgtcgctcacacaaccagaaggagctgagtttggcaacaacccaagtgagcctgaagcagattcgccccagagcctccaggcgtgagtggagcccagtccagcgacaccttggtttggcctgtgagactgagaagagagccagccacgccatgctgtgcctggggtccacagagccgggaggtcacacatgtacatcctggaagctgcccaaggtgtggccacttgtagggcagtgagaggaagccgtcgcggggaccatgctgccttctctgggctcacgactgttctggaaaggaccccatggcagacttggcaaggtctccacttcaggggcaaacatctccatcatcagcaactccaaaccccagccacttcctgggagttcaggaactgtgtttagccataatgtcccttggggtttggtgaaaaacaacttcctttttatttgtgggaaaactgtattatattgccttatttatttttaatcatgtacaatattcatgtacaaatgttagagccattcgggtaggattctctctaaattatttattgaagaggctttgtaaatagtgcaccagtgacaggtgctgcctgtttactcgtaccaaaaatgaagacaagccccacacccacctcagcccttgcttggccatgctgtggccctttggaaatgaccctgtgtgctcccctcgcgacccttgcatgcctttcatgcctgatgccgtagagtagaacacagccccggaatgcttccagttgcttgcaagggaccatgccggcccgggtggtccatgcctgcggggtgtctgtatcctgcaggaggacgcccctacagacccagcaacccaagttgccagcccgtgtttctcagactttaaagccaccagggcttctggaacacctgtcatagaagcaataactctaactctatactgtagagatgagtctggtccgaagcagattagtaatttagagataagccatgcatacaagtttgccccattctctggcttggggtggtgggaggcggggagctgccactcccaaagcctccaccccttcctgaagacccagctatgaaaccgcagttcctgtgggttgggctgcccaggctggtcagagctcagcaccccaggtctggtgagcagacagagccggcgttaaaccccgatcaggtcattgtcaccacacccttgcttggatgaggaaggaaggaggcaaaggcacccactccatccaagatccgttccaattgatgagcctcagtactggcctcacactgaccaacggtggtatgctgcagtttgttggtttggtgcagagtctaaaggataacatatcaaggcttacctgtgataggccattttaaggaaatggtggcactctgaaggctgtccccattcaccttccacaatgctggtaccatcctggtagaagagccctctgaacaggacacctgttcaggcctgggggccccatgctaggcttgcctgggtgtgagaaggtcgaactgggtggcttaggccttcaaattgagcttgggggtgtccaagagaggggtcttattcgaggaactcacataccccaaataaccatcagtgcacaaatcattccatgctctttggcaccaggcaggagatgctgcaggcaggtgtccgtagttggcaaaaatgggcagtaggggaaatggagttgcttcaacctttctcagtcccggccctcactgcacccaccaagtcaagcagagctgggtgggctgagaccagcatcccagctggactgagcctggggggaggggctggagccaaggagcccccctgggtgggggcatcaggagcaggggcagggcctgaggactgctccccctgcatggagggcaggccaggatggagcccagggtagactttgaggaaggctcagtgggctcagcagaaggaaggctcttctcatagttgtggtttttcacagatggatttgggtgatctgagtgtggtcaggccctgccgttggggaatgaatgccacacggggtttgtctgtaagctgcagtgtctgtgattctgtgtgaactgacagcagggagctgaaggacaggccccggccttgggagaggacacgggcatgggctgctggatgcagggctcccagggctgtgaaggcagaggggtctctggaggcagacagggtgggctgggggccagcagcagggggcagagccccagccagggcagctgcttcctgcacatagacattcctcctgcgcagggccaagtgcccatgagcacagccccagacagacacggtggggagcttggagccctccgctcacctagaggagccctgggacacgcactggaaagtattctaggggcttcctgccttatccttctgtttgttcatacacttagtgaaagcagatcctgtactaggatgtgaggatatctgtcacctgcgtggtccattccataaacaccagattccatttcagttgccacacattttggggctagacttccctaaacaacatgccattgtgaaataatgcatatatttgtatttttaaatttccctgaaaatttaatctattctgttccatatgaagtctgtttcactaccttaaaaaatagatactccactagaggctgtgcttaattcaaatccatgtgtgtgcctgcattacatgtgtgaacacgtgtttctgtcgtgtgtgtcatgcacatctgtgtgttgcatagcataagccaaatgaaaatcatttgttcatgggattcatatgaggaacaaaattaaatttgaatacagtcagataactgccacgcagggcatttggggaaccatccccgaatgccctgatgtgatttccctcagaaaatccttgttattagaggagaaggtctgggcaggggcagcagcatctcagacatcaagtcaactttatcatctactacatcagcactgaagtccaggggcattgaggcactaactaggttccattttctttggtttggttacttattttttctttttgggttctcggtgtgcagaggctgtagagagagcctcagggcggtgaccgctgcaggaattcggccctccagctcccctccagttaccaggagccgatttggaggccaggccttcccagctgagtgtctgtcagcttcattctctctcagctgtgcagtggaagagcaacaacagacaggtgaccttcttgggttgtgcttcacaatggactgggaaaaacatctttgaaatcaggaaatcaggccgggcgcagtggctcatgcctgtaagcccagcactttgggaggcggaggcgggtggatccattgaggtcaggagctcaagaccagcctggtcaacatggtgaaaccccgtctctactaaaaatacaaaaaaaaaattagctgggcgtgttggcgggagcctgtagtcccagctacacgggaggctaaggtgggagaattgcttgaacccgggaggcggaggttgcagtgagctgagattgcaccattgcactccagcctgggcgacagagcaagactctctcaaaaaaaaaaaaaaagaaagaaagaaatcagaaaatcgaccacagtggtagccacctggcctaatgctgtgtttttgtacctgacaggggtcactcattttaggcacaactccttcattctttgtgaaattagtgagtttccttctacccgtcaccagattcaatatgttctattaatacaccgataaccacaggggaagggcacttgtcgctctcccacctggttaccacagtctccatgggtcttttgccgtgaccacaaataaaggaaacactcatcactagtatctaagtcgggctttacagtaactatgcaccttctgtgtgcttcacctcactctctacttcaaacagcccatggagggaggtattattatactccttatgttgacagtgaagaatctgaggcccagagaggttggggacttgagtaaagtcacacagccctgagaggcaggaccagggttccattcctgctctatccagttccaagcccttgtgttttccattatgtttagtgcctctttgctaacagcaacatctgcaagatttgtgttggttttgatggagaactctagctcatccacatgctagtgcccaagtggtggaggggccacctcagcaggtgggttctgaatgcagccaaggctgtccccgcaatgggtgagactcgctccaactgcccgccctcagagcaggtgcctaagtcctccctggcactggcaggccttacctcacattgctaaattaaagcaatgcaattcctcttgggtaagaggaattcctccttctttactaactgatccccagcaaggaaataaaatgttaggctttaaaaatccctactttgtcatatcagactatattctaaaactatatttgagcgaaacctgtcattgcgtctaatttcaaatatacagaatctccttaagagctgttgccttatttttttgtaaagcctctctgacatcaaatggggagaaatggtggcacctccagacaccctgaaactacacaccatttcttccctgctcagcttctgctcaggagttctgtgagctatgggaaggccattggttgtatttgctacttttactttcatcttcctctgctgtagagccatttaatgttattgtcatatgctgctggtgaggtaaaggtgggtccgggtgccttcccaggggttagaggatgttcaaagggccgatttcagcaggagttcagagggcttatgatggatggtgagagatttgacaaccaccagagcacatgtgctctgaccctctcctgggcattggttcctgctggtaccgggcggttcagaccttcaaataggttgctttcaaaagagctttcaggcacttattgagaattaatgtttaaacagacataatagcctagatgaactcccaagagatctattaaatcttgtgggctgaataaatatctcgtgcaggactgtgcaacagtagcccagagcatcctgcctgtgggcatccacctcccaggtgagggcagtgggaagctggcccgacggcagccagaacttgtttctcacctcccaccagcaaccccccacccaactctgggccccaggcacacgaagcacaagtctcaggggaccattcccacattgggggatcctgagggagcccatcaccgcctcttgcatacaactgtccactaggaggcacgcccagtgtgggagagatgtatggtcttgccttccacctgtaaaaactgcacatatgcaagccatttgcactctggaactgcatgccgtgaaaactcctaatggtgtggaacttagtttgaatttgaaatcacgccgcatgcacaaagggacaggcccaggcccgacctcaggtcatccgcccgctggctgcagagcatccctgggagccaaggcgaggcccgtggagcctgagctttgtgtagctcgagctttgtgtagctcgtgcacttattatgcaccacctcccttcagtcaccactcctcttcctccgccatcctcatttatactgattgcacaccccccgctcaaacaacaatgtccttattatgatgaccatctcgtagtggtacattccattcctatttaaggtaagcccaaagcccacttttggattttctcgactgtccgagaaaagttgtgtaagcgcctgcgttcttctgggtttggctagatagggttgtgtccctctatggaatggagagtgatgtgggcaagggtgtcattttctcgcacaatacaactcactgaggatgcttctgtagaagtgagaaacacgatgagtacattcagaattacaataactcactctcactgggtaacttctcatgatagatttgtatgatcaatacgggtctatttttatgtcaactgaacactgtagggtaccttccagtctttttcaagattgttaaattgagacaagtaattgaataatttgtcctatttttattttaaaaaaagtgaatggactgaaatgttaaatgtgaatgtacatttcttaattgcaacttttctactgagtgtttgcactatactttctggaatcttatttaacaaaaataaagggaaaaaattgcttgact

SEQ ID NO: 30548 - DNA, 3079 bp, Homo Sapiens
gggccctacagagggtccgccatgttccccggcggcgccgccgcttggctctggtagccgccgcccccgcccccaaccccgcccggcccagagcctagccgagccccgggcccagcatggccgccccggagccggcccgggctgcaccgcccccacccccgcccccgccgccccctcccggggctgaccgcgtcgtcaaagctgtccctttccccccaacacatcgcttgacatctgaagaagtatttgatttggatgggatacccagggttgatgttctgaagaaccacttggtgaaagaaggtcgagtagatgaagaaattgcgcttagaattatcaatgagggtgctgccatccttcggagagagaaaaccatgatagaagtagaagctccaatcacagtgtgtggtgacatccatggccaattttttgatctgatgaaactttttgaagtaggaggatcacctgctaatacacgatacctttttcttggcgattatgtggacagaggttattttagtatagagtgtgtcttatatttatgggttctgaagattctatacccaagcacattatttcttctgagaggcaaccatgaatgcagacaccttactgaatattttacctttaagcaggaatgtaaaattaagtattcggaaagagtctatgaagcttgtatggaagcttttgatagtttgcctcttgctgcacttttaaaccaacagtttctttgtgttcatggtggactttcaccagaaatacacacactggatgatattaggagattagatagattcaaagagccacctgcatttggaccaatgtgtgacttgttatggtccgatccttctgaagattttggaaatgaaaaatcacaggaacattttagtcacaatacagttcgaggatgttcttatttttataactatccagcagtgtgtgaatttttgcaaaacaataatttgttatcgattattagagctcatgaagctcaagatgcaggctatagaatgtacagaaaaagtcaaactacagggttcccttcattaataacaattttttcggcacctaattacttagatgtctacaataataaagctgctgtattaaagtatgaaaataatgtgatgaatattcgacagtttaactgttctccacatccttactggttgcctaattttatggatgtcttcacgtggtctttaccgtttgttggagaaaaagtgacagaaatgttggtaaatgttctgagtatttgctctgatgatgaactaatgactgaaggtgaagaccagtttgatggttcagctgcagcccggaaagaaatcataagaaacaaaattcgagcaattggcaagatggcaagagtcttctctgttctcagggaggagagtgaaagtgtgctgacactcaagggcctgactcccacagggatgttgcctagtggagtgttagctggaggacggcagaccctgcaaagtgccacagttgaggctattgaggctgaaaaagcaatacgaggattctctccaccacatagaatctgcagttttgaagaggcaaagggtttggataggatcaatgagagaatgccacctcggaaagatgctgtacagcaagatggtttcaattctctgaacaccgcacatgccactgagaaccacgggacgggcaaccatactgcccagtgacccactacttcccagggactctcacatctcgggccccaaatggacagatcacccgaggagctggaggggtcggccaagctgactgtaaatttcacagtctctctgaagaaaccattgtgcttctgagaccctagcccccttcctggatggaggcttgagggccctgggacatgtgctatctgataagattgggtcatcgctgccaaggtggagagcagtgagcaaggggcttggggcaatttccagtggagggcatccacacctccattttatgcttgtggttcacacatttaagtttacaaatcagatttcttttccccttcagtagaattagattttgtttttcaatcatgatttcaaatgcaatcctaagagctaatgtggacttttctttttccatgaaatgtctttaaaggatgaattagcatggtcttaaaatacatttctgaggttactagctgtattttgaattgtgagcaaaatgccgagaaacccagttggcatttatacaaaatgttgacctcaggtctatagttcttaaatgtggctaattctgtaacatagtcttggtattttttaattatgaatgcatatcctatttccaggcaggctctcttacttgaacacaaatccaaaaactaatttagagtcttttttgcccagatcttttaagacttacaccccagagatttaagaagaaaacctctaaatttcaaaattatgaagaattacagaattactcatttaaggtactttaaaagaagtttgtacattgtcaaagtaaattttaattcaaatcatgtctgtaaaacttgacgtattttgtgtatgcatgttttcattttgcaaatatttaatatatagacctatgatgtacaggtacgacatgtataggttacctagatgttatgagaaattttagtttattgtgagtactcaagttgcttagagagccaccagggtgatttgctgctggctttctatcatttttatgttttaatgcaaaggaaattttaaaatgttctggaagtgtttttgattaagcaatgcagcctagaagcaatggttctgttcaatcattcagatgttagtggaagcataaaagtcaagactgcatgttgaaacctttcttttgatagttactgaactgcttggttaaactaaatggaaccatgtgctaatttttcacaattattgacctgtattgattgccactgtagtttggtatttccctttactttggtggcctgcttccctcatgccctggaatacaactcagagctccaggcagcggaaccatctattgttttgtttgccagaaagtgcaccctgtatggtctcctgtctaagttggaaatattatgcatgtgcaggactattcgagtatt

SEQ ID NO: 30549 - DNA, 3211 bp, Homo Sapiens
gggagcgagccggtgctgctgcaggctgaggctgcggcagaggcggcgaggcgcgggcggtgaggacggacagtcaccgacttagtccagttccctgtgatctcaaaacaattgttgcagcaggctcctggcagtctcaagcagttcatcttcttggtgtactggtttcctattgtgattttatcatggaaaatcaattggctaaatcaactgaagaacgaacatttcagtaccaggattctcttccatcactgcctgttccttcacttgaagaatcattaaaaaaataccttgaatcagtgaaaccatttgcaaatcaagaagaatataagaaaactgaagaaatagttcaaaaatttcaaagtgggattggagaaaaattgcaccagaaattgcttgaaagagcaaaaggaaaaagaaattggctggaagagtggtggctgaatgttgcctatctggatgttcgtataccatcacaattgaatgtcaactttgcgggtcctgcagctcattttgaacactactggcctccaaaggaagggactcaattagaaagaggaagtataactctttggcataacttgaactactggcagctattaagaaaagaaaaagtgcctgttcataaagttggaaatactcctctagatatgaatcaattccgaatgctattttctacctgcaaggttccaggaattactagagactccattatgaattattttaggactgagagtgaagggcgttccccaaaccacattgtagtgctgtgtcgaggccgagcttttgtctttgatgtaatacatgaaggatgtttggtcaccccgccagagcttctcagacaactgacatatatccacaagaagtgccatagtgaacctgatggacctgggattgcagcattaactagtgaggagcgaactcgatgggctaaggcacgagaatatctgattggtcttgatccagagaacttggctttgttagaaaaaattcagagtagtttactggtatattccatggaggatagcagtccacatgtaacaccagaggattattctgagattattgcagccatccttattggagatccaacagtacgctggggtgacaaatcctataacttgatttccttttctaatggagtatttggctgtaattgtgatcatgctccttttgatgcaatgattatggtgaacatcagttattatgtggatgagaaaatttttcagaatgaaggaagatggaagggttcagagaaggtacgagatataccacttccagaagagctcattttcattgtggatgagaaagttttaaatgacatcaaccaagctaaagcccagtatctcagggaggcatctgatctacagattgcggcttatgcctttacatcttttggcaaaaagctaaccaagaacaagatgcttcacccggatacgtttattcagcttgcacttcagctggcctattacagacttcatggacaccctggttgttgctatgaaacagctatgacaagacatttttatcatggccgtacagagactatgcgatcatgcacagttgaagcagtgaggtggtgccagtccatgcaggatccttctgtcaatcttcgtgagcggcagcaaaagatgttacaagcttttgcaaagcataataaaatgatgaaagattgttcagctggaaaaggatttgatcgtcaccttttaggtctcttactcatagcaaaagaggaaggtcttcctgttccagaactctttacggacccacttttttccaaaagcggaggaggtggaaattttgttctctcaacaagtctggttggctatttacgagtccagggagtggtagttcccatggtacacaatggttatggatttttctaccatatcagagatgacaggtttgttgtggcctgttcagcctggaaatcctgtcccgagactgatgcggaaaagctagttcagctgactttttgtgcttttcatgatatgatacagctgatgaactctactcatctttagagatgaatcatctattaagcacttaccaaaacatatcattaaactgagtgctgggagtgagttggtaatatgagatgggaaggaatgttgacttgctaacattcctttaacaagttaagaaaacttgttaaatgtagaaattagtagaatcatgctctctaaatttattctgccatagaaggtagaaatatttttaagctcctctgatgcagcagcaatgcaaattatgacatagtgaatatagaactatgcagtatttaagcctcaacaatccaaatctacaaactttaacaatgcaagtcttactctaatttttaagtatttttgttggtacttacatgggttataaatcctctctctggacatcaatgtagagtccatctttcaagcactttaatttttttagctgccaaagggtatgaattacattattgtatgctaatttccctgaaatcaatgccttctatgttcaccacagggatacaagcctgttatgtttgatgggaaagaccactacaatctaatggtgatctaaaataacttttttgggctgggtgcagtggctcatgcctataatcttagcactttgggaggccaaggtaggaggattgcttgaagctaggagtttgagaccagcctgggcaacagggtaaggtcctgtctctacaagatcaaaaacttagccgggtatggtggtgcatgtgtgcctgtagtccaagctacttgaaggctgagacaggaggatcggttgagcccaggaggttgtggctgcagtgagctgtgatgtgcccttatgctatagcctgggcaagagcgtgagaccctgtctcaaagaagaaaaaaagagaaaaataactcttttgaacaaacagacaaattagctagtagtatggagatgtataccctctattacacacataaaaccgtaacaaaattcattgtggtgtattataattagttttgtgaatagaaaaataaagcacttatgtttaaatttgttacagtgacttttaaaggattaatgttgaatcacattgtcagaattttttcctcctcgctgttcaattttgtagtttttactctcaaaaaatgaaattctcaaaattatatagctttttgttttgtttgaataaatgattcattcctgttaaaaaaaaaaaaaaaaaaaaaaaaaaaaaaaaaaaaaa

SEQ ID NO: 30550 - DNA, 4031 bp, Homo Sapiens
cctcagtcctcccttggtggcctcgccgcggctctgctgggagacccggcgctggcggctgctgaggccggagcggagggcccgggagcgtgggagcaggagggtggcgcgcagccggtttcgcgtttggtcggccagggagctgccttcccaccagccggtcgaggaaacaacgggtcgggcttccggggagagggcccacacagtctcctcgccggcaccggcctcctccatttttccgggccttgcgtggagggttttggcggatgtttttgaacgaaggaatgtcatcggggctctctcgagcccctcaccccgccagctactctgggggtggcgtggcatagtgagaggagcgctaagttgttgggaggcctgggtccttttccccacgactctgaaagaggacagcgttcccaatgtcccagtttaagcgccagcggatcaacccgcttccagggggacgcaacttctcaggcacagcttcaacatctcttctgggccctcctcctggtttgctcactcctcctgtggccacagaactgtcccagaatgccaggcaccttcagggtggggagaaacagcgggtcttcactggtattgttaccagcttgcatgactactttggggttgtggatgaagaggtcttttttcagctaagtgtggtgaagggccgtctgccccagctgggtgagaaggtgctggtgaaggctgcatacaacccaggccaggcagtgccctggaatgctgtcaaggtgcaaacgctctccaaccagcccctactgaagtccccagcacctcctcttctgcatgtagcagccctgggccagaagcaagggatcctgggagctcagcctcagttgatcttccagcctcaccggattcccccactctttcctcagaagcctctgagtctcttccaaacatcccacacacttcacctgagccacctgaacagatttcctgcccggggccctcatggacggttggatcagggccgaagtgatgactatgactccaagaaacgcaaacagcgggctggtggagagccctggggtgctaagaagccaaggcatgacctgcctccttaccgggtccacctcactccttacactgtggacagccccatctgtgacttcctagaactccagcgccgttaccgcagcctcctggtcccctcagattttctgtccgtgcatctgagttggctatcagccttccccctgagccagcccttttccctccatcatccaagccggatccaggtctcttctgaaaaggaggcagctccagacgctggtgctgagcccatcactgcagacagtgaccccgcttatagttcgaaggtactgctgctctcttccccggggttggaggaattgtatcgttgttgcatgctctttgtggatgacatggctgagccaagggagacgccagagcatcctctgaagcagattaagtttttgctgggcaggaaagaagaggaggcagtgctggttgggggtgaatggtctccttccctggatggcctcgacccccaggctgacccgcaggtgctggtgcgtaccgccatccgctgtgcgcaggcccagactggcattgatttgagcggctgtaccaagtggtggcgctttgccgagtttcagtacctgcagccgggacccccccggcggcttcagacagtggtggtgtacctgccggatgtctggaccatcatgcctactttggaggagtgggaggccctgtgccagcagaaagctgcagaggcagctcccccaacccaggaggcacaaggggaaacggagcctactgaacaggcacctgatgccttggagcaagcagcagacacttctagacggaacgcagaaactccagaggccaccacacagcaggaaacggacactgatctcccagaggcccctccaccccccctagaacctgctgtcatcgcacgccctggctgtgtaaacctgtccctccatgggattgtggaggatcggaggccaaaggaaaggatctcttttgaggtgatggtgctggccgagctgtttctggagatgctccagagggattttggctatagagtttataagatgctactgagccttcctgaaaaggtcgtgtccccacctgaacctgagaaggaggaggcggccaaggaagaagccaccaaggaggaagaagccatcaaagaggaggtggtcaaggagcccaaggatgaggcacagaatgagggcccggctacagagtcagaggccccgctgaaggaggatgggcttttgcccaaaccactctcttctgggggagaggaagaagaaaaaccccggggcgaggcttctgaggacctgtgtgagatggccctggacccagaactgttgcttctgagggatgatggagaggaggagtttgcaggagcaaagctggaggattcggaggtccggtccgttgcctcaaaccagtcagagatggagttctcttcacttcaggacatgcccaaggagctggatccctctgctgtgctccccttagactgtctgcttgcttttgtgttctttgatgccaactggtgtggctacttgcaccggcgagacttagagaggatcctccttacccttgggatccggctcagtgcagagcaggccaagcagctggtcagcagggtggtgacccagaacatctgccagtaccggagccttcagtacagccgccaggagggcctggatggtggccttcccgaggaggtgctcttcggaaacctggacctgctgccccctcctgggaaaagcacgaagccaggtgctgcccccacagaacacaaagccttggtgtcccacaatggcagcctgattaacgtggggagcctgctgcagcgcgcggagcagcaggacagcggccggctctacctagagaacaagatccacacactggagctgaagctggaggagagccataaccgtttctcagccactgaagtaaccaataagacgctggcggcagagatgcaggagctgcgagtccggctggcggaggccgaggagaccgcccggacggcggagcgacagaagagccagctccagcggctgctgcaggagctccgcaggcgtctgacccccctgcagctggagatccagcgggtggtggaaaaggctgacagctgggtggagaaggaggagccggcacctagcaactgacggcctcgcacggaactgccatcctgtgagggcagcggtggcgcccggcaaagttggagcccttgcggtaccagaaagcagcgagagcgagacctgggagccagggcaggggtggctgaccccatgctcagcctctaggggacggcaggccatcaggctgggggctgtgctatgtgggatggatgtgtgaggaaccccggttccacttaacaactaaatacaacatcttttgcacccctagaatgtcattttgccctcaaccttggtatttctcctggggcccttttagtcttgtgctgactttctcctgtcctcttccagtttagaataagacaggggagaaaaaggcttttcgagtgtgggacaaggtctgatgtcagtgaacggaactgaagagcaagacatggagcctggctggggctaagcagccccctcctccggatggcacaggctctgctaggttccggacacaggcttctgggggaagggtctcccttggccatcacgggaatggagtccatgctagaaagagctcagtgttgggctgggtttgccagtagaacactgcgttccagtcaccccggtcttgccagaagaaaccagcacctctttcccgtggctcctgtgttcagaatgtggtattggctctggcccagccttctcccctgttacccataattcttgcctctttccataatccgtggtttcagtttgactttgtatataaagttggggttttttttttttttttttggcttgttttttaaataaaccaaagtcaaaaacaaaaaaaaaaaaaaaaaaaaaaaaaaaaaaaaaaaaaaaaaaaaaaaaaaaaaa

SEQ ID NO: 30551 - DNA, 4124 bp, Homo Sapiens; identical to SEQ ID NO: 25098

SEQ ID NO: 30552 - DNA, 4369 bp, Homo Sapiens
cgtgggcgccagaaagcggaacctcccgggccagtcgcgcggtggtcaccctcttgggagctggggaggaggctgcggaggctggcccggctccttcgggcgtcgcttcccggaccgggtgcgcggggtcccccggaacgtgtgttccaggtcctcccgcgccagtgttcgcagtccccgcctggtcgcggcggcgcctcgggcgcgggtgcaggcgcgcggcgcgcaggcggggggcgctgtggtcttggcgcggggaccgagccgctcggccagacccgcctcttttccctccccgccagcccgcccgcctgcccgccccccacgcgtcgtgtcgccgggaagccgggcggagacagagcgcttgggatccacggcgctcggaccgctgtcctccaacagcgcagggcagagcggctggcgccgccggagcgcggagccacgaccctccctggccgcctttgtctactggccgtgcggcccggaaccgccactctccagggccggggacgcgcccgcagctgtcggtgacagctcctccctaccgcaaccctccggggcggaggggcggtcgggccgggccctgctagcccgcgaccgcaagcccgcgctcgcggatcgatgcccccgcagcagggggaccccgcgttccccgaccgctgcgaggcgcctccggtgccgccgcgtcgggagcgcggtggacgcgggggacgcgggcctggggagccggggggccgggggcgtgcggggggtgccgaggggcgcggcgtcaagtgcgtgctggtcggcgacggcgcggtgggcaagacgagcctggtggtgagctacaccaccaacggctaccccaccgagtacatccctactgccttcgacaacttctccgcggtggtgtctgtggatgggcggcccgtgagactccaactctgtgacactgccggacaggatgaatttgacaagctgaggcctctctgctacaccaacacagacatcttcctgctctgcttcagtgtcgtgagcccctcatccttccagaacgtcagtgagaaatgggtgccggagattcgatgccactgtcccaaagcccccatcatcctagttggaacgcagtcggatctcagagaagatgtcaaagtcctcattgagttggacaaatgcaaagaaaagccagtgcctgaagaggcggctaagctgtgcgccgaggaaatcaaagccgcctcctacatcgagtgttcagccttgactcaaaaaaacctcaaagaggtctttgatgcagccatcgtcgctggcattcaatactcggacactcagcaacagccaaagaagtctaaaagcaggactccagataaaatgaaaaacctctccaagtcctggtggaagaagtactgctgtttcgtatgatgctggcaagacacccagaaaggctattttcagatgaaatcgatattagaagctatattagctgaaacaactccttttactgcgtagaacctatatcgagagtgtgtgtatatgtattataggaggagctctcaattttatgtattctttctgcctttaattttcttgtttgtttgagcttagggatgagatacttatgcaagatatttttgaagtaaattaaacatttttcacatctctggaaatttagagttctagacctctggttaatttatatctaatatgaagaagacacctctaatctggatgttaagaatgaagttctgctacattataatgtacagaagagcaaaagggaggaacactatggttaaccctctcttgattaagggctacttaatgcacagtgcattatgtacacaggtcaaccatggtaacaatagttcttagctttgaaactccatgcaaaccatgccttttttttaaggagcaaaaatctgagaaaaaaagtgagagacctctgcctacaaaacctcaaaccagtcacttttgtcaattgctaatacccagttacttatgatttaaaaacaaccaacagaaaacatcccactgactgtatggcactctgtagtcaaaaaaggaaacttccttattgggacttttctttcttagtccagttgtgttgacacatatgaacacagacaaagtgctatgcggaggaaagcaagtgttggtcagtagtttcatgttttagggagtggttcctgtggagatcagaaagtgacatttgctttcggtactgtaatacgtgcaccaaactgcctcaatcctaggtaacgagggcaacagggagcacctgtctggattgtttttaaacctccatactcaagctgtctcttcggcagggaggtgaatactcttgaaaggccaacagcaagtgtttgtgggacacaacacagataattttttcttaagtcggccaagatgtacttctctgtgtgcacacccatgcacactcatgcacacagatacataggtctgtatggctgtatttgctgttgattcagactttcacaccattaatggggaaaagcgtggccacaaaaacagatgctaggaagcttggcttcctcttcttgttgacccttttttgaaccaacatcttttttattatattcagagtatgtttttaagtgtatcttaatatatacattttttaggacatcttaaatctaaacaaaaaataaaatgaacatctcttgaaacctgttaaaacaaccagttaaagccacagatggctttcagggcagtagcagcagaggccagtggactctgaggactcctgaggggcggggcgtgtagccagccaggtgcatgccgggaccatggcccccatacttggctgcttcctgtgacagtgaaatacatccttcaaggtggcagctgttagggctgaatcttctggagaaaaaggtgccatctcaggagaatagcttttactctggtaggaatgcttccgagacaccacaaggcagcctgaacactcagttgcagggtcgggcttgcggtgggtgacccagagccaccaaagtcacatccacaactaatgagggaaatctgtaaagccagttagatagaagaattttatttttctgtgggttttgtgttgtcttttttatgttaaaaagaaatccagtttgtgtttttctatagaaaaagtaaaagatcaggttatactttaggttaggggttctatttattcctgttagtaaataaaattaacaaatttctttgtttaacaaaagattaatctttaaaccactaaaatacatagactgattgattattcaacacattggaattgatgtcggtcatagtttcctgaagcatttagttacaacctgaaggaataaaatgatttgtggaaatgcttaaaatagacctaactgaatacagtctcatcttgccgcgcctggcttacctatctgtggaaagctaggcttcccaggctgggctctgcctgtctggtgcctggaggtgtgggagggaagatgagttatttaactggtaagcgatttgaaacactatttttatattaaagtaaatggcatggagtatagtgcaaattcatttttaagatagaacacaaaacttgaaagaagttttatgcgtgtgacagtgtatggggctgcagttggtctccctggaggggacttccacacctcctgcctttaggccatgggtggaaagtgctcagtgaagtacacctgtgtggcccagttctgaaagctttatacagttgaattttaagtggggttgataacaccttggactgttagtgttaaaaatctagtgggttgacctttaaatgcaacagtttttaaaatatattgctgcattttatagaatagtaaaggtacgattatacttgagattttcctccatttttatttcttcgtgaacatagagtttggggccgaaaatgtttttaaagtatgtgtttgagttaaatataaagttggttcacttcaaagctaaaaaattgttaaacttgcagcttggtattgcagagaagattttataagaattttgctttagagaatgccactttggctgaactacaagtgtaggccaccattataatttataaatacagcatacttcaaaactgtttgttatctcttgttaccatgtatgtataaatggaccttttataaccttgttctctgcttgacagactcaagagaaactacccaggtattacacaagccaaaatgggagcaaggccttctctccagactatcgtaacctggtgccttaccaagttgtgcttttctgttttcaagtgtaaatgatgttgagcagaatgttgtacttgaaaatgctataagtgagatggtatgaaataaattctgacttatgaaaaaaaaaaaaaaaaaaaaaaaaaaaaaaaaaaaaaaaaaaaaaaaaa

SEQ ID NO: 30553 - DNA, 2952 bp, Homo Sapiens
ggcgcggtcgagtcatcgcagggcctcaccgcttcgttctcccgtccctccccgcgccttggctcgactagccaagtgaggcgggaggcgactcggacctttccctgcatttcgtttcggccagtgccggggctacccgccctggggcctgggatccttggggcccgtgagccactcttagcggccggggctaccgcggcccgccgtggccctcatgaggcatagctgaccaagctgctggcagcctcgggcagcaactccccaacccgcagtgagagcccggagccggctgcaacttgttcgctgccctctgacctgacccgggctgcagcgggggaggaggagacggcggcggcgatctcccggccgcaagcagcagtttggcgacgaaggagagttggaagccgggagggggagccgcggcggcgtggccgtgcgcgcgccctcccccgaggagatggaggaggaggcgatcgccagcctcccgggggaagagacggaggatatggactttctgtctgggctggaactggcggatctcctggaccccaggcaaccggactggcacctggaccccgggcttagctcgccggggcctctctcctcgtctggcggaggctcggatagcggcggcctgtggagaggggacgatgacgatgaggccgcggctgctgaaatgcagcgcttctctgacctgctgcaaaggctgttaaacggtatcggaggctgcagcagcagcagtgacagtggcagcgccgaaaagaggcggagaaagtccccaggaggaggcggcggtggcggcagcggtaacgacaacaaccaggcggcgacaaagagtccccggaaggcggcggcggccgctgcccgccttaatcgactgaagaagaaggagtacgtgatggggctggagagtcgagtccggggtctggcagccgagaaccaggagctgcgggccgagaatcgggagctgggcaaacgcgtacaggcactgcaggaggagagtcgctacctacgggcagtcttagccaacgagactggactggctcgcttgctgagccggctgagcggcgtgggactgcggctgaccacctcgctcttcagagactcgcccgccggtgaccacgactacgctctgccagtgggaaagcagaagcaggacctgctggaagaggacgactcggcgggaggagtctgtctccatgtggacaaggataaggtgtcggtggagttctgctcggcgtgcgcccggaaggcgtcgtcttctcttaaaatgtagggtcaagtaatctgctctttatccgcgtttacccctttcaactcccttacaccatgtcaaacttaccttagtgggacatcttcaccggacacatttcagaggagagaaaaaaagtaatattgaatcttaaagtgtttagctaaaagcatgaatgtgacacagtaaccaactcctaatgataacatgtgactattaaatctctctgacagtttcttttttaggtgatttccttcctgccaggctccgttgtaggggttacagaacagtcgttcccgcctcacaacctgtggatacagctgttggggcagaagagacgggaccagctgctggccacatttcctgctttattttaaaaggtagtataagaatgaggaaaaagaggtaatatcagggcttctgctgttttttatttttaacatgttcataattaaaaagtattttccagcagtccaaagatgtaagttatcttacacataatatgttttattttgttatttggttatgaaaatggaatccttgttcttgcacaactgtaaatgttttgttgctagataatacgatttgagacctgaattggtctttggtttccagtgcatcacagcatattttgtaaaatcatgtactactgcacttgagcatgaatgggtagtagccaaactcacaaattggagtgatgaacctgcttatacctaagggcaggagcaagcccctcacaatgcagctgcatgggtttttagtgcctactgaattatatatatatatacatatatatatatatatataaaccaaaagtagttggaaagattatttgaaatgactaactttgtgctatctttatgaaatatgttaaatgtagcttttttgaaacagaagccttgaattgaaatttaactaatacttgaacattttgtatatatttctttgtatataattttgtgcagtaccaatgacaaaaatatggtgtcataataaaaccaggtttgttgatcttttagttatgggctcaaagaatttattcatctctaacatgatattggaaaataatggatgaaaataggaaaaatgattgttaatgctgactgtgggtcttaaaaggttctggaaagcagtaagttcatttttctaaaaactataacattctgttggagtattttcttccttacgtcaatacttttcctgcattatttgaaattgtgggctggggagaaacagtagtcaaagctttctgaattgagatactttgaaattccaagtgtagatttttagaatgtcattttataaatggccgtttttggaattacttgataagaacttttgaaaatggaaggattagtatggcctatttttaaagctgctttgttaggttccttatgttttattaactgtcttttctcagtttccatttcatttttttttttctagttttggtgacttagtgattttgtcattttttacatcaacttcatggtcttgtttttacatggtaattgcatgtacttaggatctatctaataggggctttaaataaatttggtcatatttatgtgtaagcacattttactgtaaatgtttgggtttctgaatttaaacagatctgtttatttcagtatgtagtaaacaatatcttaaagtgtccgattcactacttgttaattaaaaaagttatgattaatgtg

SEQ ID NO: 30554 - DNA, 3116 bp, Homo Sapiens
ccggtgagtgtggctgcggggtcgcgcccaccctctacctgtgccgggggccggaacctggccccggggagggcgcggcctcggggagacggcgtgcaggcccagcactgttggtcaccgcaggcctgtcttcctattcaccgtgggcagcagagggatggctgctcagctgctgactgatgaggcactgactgggagactagacctgaaatgaaagagttggatccaaagaatgacatttcggaagacaagctctccgttgttggggaggccacggggggacccacgaggaatggtgccaggggtcctggctcagaaggagtgtgggaaccaggcagctggccagagaggccgcggggagatgcaggtgcagagtgggagccattgggaattccccaggggaacaaactcttagggggctcagtacccgcatgtcatgaactgaaggcatttgccaaccaaggctgtgtcctggtcccaccacggctggacgaccccacagaaaagggggcctgtccacccgtaaggcgtggcaagaacttctccagcacttcagacctcagtaagccccccatgccctgcgaggagaagaaaacctacgactgcagcgagtgtggcaaggcctttagccgaagctcgtccctgataaagcaccaaaggatccacacgggagaaaagccgtttgagtgtgacacctgtgggaagcacttcatcgagcgctcgtccctcaccatccaccagcgggtgcacacgggcgagaagccctatgcctgcggggactgcggcaaggccttcagccagcgcatgaacctcactgtgcaccagcgcacgcacacgggcgagaagccgtatgtgtgcgacgtgtgtggcaaggccttccggaagacttcctctctcacccagcacgagcggatccacacgggggagaagccctacgcgtgcggggactgcggcaaggccttcagccagaacatgcacctcatcgtgcaccagcgcacgcacaccggggagaagccgtacgtgtgccccgagtgcgggcgagccttcagccagaacatgcacctgaccgagcaccagcgcacgcacaccggggagaagccgtacgcctgcaaggagtgcggcaaggccttcaacaagagctcctctctcaccctgcaccagaggaaccacaccggcgagaagccctacgtgtgcggcgagtgcggcaaggccttcagccagagctcctacctcatccagcaccagcgcttccacatcggcgtgaagccgttcgagtgcagcgagtgcggcaaggccttcagcaagaactcctcgctcacgcagcaccagcgcatccacaccggcgagaagccctacgagtgctacatctgcaagaagcacttcacggggcgctcgtccctcatcgtgcaccagatcgtgcacaccggggagaagccctacgtgtgcggcgagtgcggcaaggccttcagccagagcgcctacctcatcgagcaccagcggatccacaccggcgagaagccgtacaggtgcggccagtgcgggaagtccttcatcaagaactcctccctcactgtgcaccagcggatccacacgggcgagaagccctaccgatgcggcgagtgcgggaagaccttcagccgcaacacgaacctgacgcgccacctgcggattcacacctgagcgcctctgtgcagggctctcactggcggtgcccaggacggacgccagatggctgcgcgctttgtcagcagtgctgtgagaagttctcccctggggtggggactcggggtcaggggagctcaggaatgtggtgttgtggaggggctggctgatcacacatgccccctccttactgagcctcagaaagcaagcccctcggtgtctgacgtatctggggacacttcaaggttcactgtagctgagccatggccgctggtaacagacatcagggttccagactagccctcttgagtaactgtcctagagctgggacaggtcacgcctgcctccacatctctgtttcttcagcgggaaagtggagctggtggaggggagggaggagacatctccctctttgtcagatacatcctggagtccagatgcagcttgtcaccatctgcattttctccgtgggttgggagcgtgagggccttcctatccctccacccaccgtttccctgcagtgcacgctggcagccaccaagctaggaagtggcaggagtttgccggttgtttgtgaggggaaaaatttttttttcagagttagcaaataacagtaactactgctttgaatgccaaagtttcttagagtggtctgttacgttttttaaaaataaaacttttaattaagggagactatgttattttaaacagtcttctgttttggccagttgtctggtcaaaatcggcttcagtgattgtgggaggggcaagaaggaaaagaaacagcagcaggtttgatattcagaaagaaatatgcatggattcaataagtatatacatctgagcacagattatttttatagtgatttttgcagctaaatgtgaaggcaactgtcttaagtcccttcctgctgctgtaacaaaagaccttagactgggtaatttataaacaatagaaatttgtcactcatggttctggatgctgggaagtccaagatcaaggctctggcagatttggtgtctgatggggtatgttcttcataggtagtgcttgtgtcttgatgtgtgtcttcacgtggttgtaaacagcagacttcctcaggccccttataagggtgctaatcccagtcacaagggccctgacctcatgacctcccaaaggtcctccctcttcatactgttacattggggatcaagtttccaatatgtgaatacagggaagcaccaacagaccatatcagtaacttcgagtgagtttcctaaggccgactgaagctctgtttacacataagagtgttccccaaagtgcactttctctggggccttttaggccatacttttaattttgttatttgatactactggttgctaatgttctggcatttccagttgttccacactccctgacactggtgtacacaaataaataatacagaaaaaaaaaaaaaaaaaaa

SEQ ID NO: 30555 - DNA, 2184 bp, Homo Sapiens
ccgcagccaggctgccaactcattcgggagcccggggcatgaacggctacggctccccctacctgtacatgggcggcccggtgtcgcagccgccacgggcgcccctgcagcgcacgcccaagtgcgcgcgctgccgcaaccatggcgtcctgtcctggctcaagggccacaagcgttactgccgcttcaaggactgcacctgcgagaagtgcatcctcatcatcgagcggcagcgggtcatggctgcgcaggtggcgctgcgccggcagcaggccaacgagagcttggagagcctcatccccgactcgctgcgcgctctgccagggcccccgccgccgggggacgccgtcgccgccccgcagccgccgccagcctctcagccgtcgcagccgcagccgccgcgccctgctgccgagttggccgcggccgccgcgctgcgttggactgccgagccgcagcccggggctctgcaggcgcagctcgccaagccagatttgactgaagaacgacttggagacggcaagtcggcagacaatacagaggtcttcagtgacaaagacactgaccagaggagttccccagatgtggcaaagagtaagggctgcttcacccctgagagccctgagatagtgtccgtggaggaagggggatacgctgtccagaaaaacggaggcaaccccgagagccgccctgacagccccaagtgtcacgcggagcagaatcacctcctgattgagggcccctcggggactgtttctctgcccttcagcttgaaagccaacagaccgccgcttgaagtgttaaaaaagatattccccaaccagaagccaacggtgcttgagctcatcctcaagggctgtggcggggacctggtgagcgccgtggaagtccttctgtccagccgatcctcagtcacgggagcagagcgaacttccgcagaacctgagagtctagcgttgccctccaatgggcacatctttgaacacaccttgagctcctaccccatctcgtcttccaaatggtctgtgggatcagcctttcgagtcccagacacgttgaggttttctgccgactctagcaacgttgtccccagtcccttggctgggcctctgcagccccctttcccccagccaccccggtacccgctgatgctgaggaatactttggcgagaagccagtcgagcccctttttgcccaatgatgtcaccctgtggaacaccatgacgctgcagcagcagtatcagctgaggtcccagtatgtcagtcctttccccagtaactctaccagcgtcttcagaagctcgcccgtccttcctgcccgcgccacggaagaccctcggatttccatccctgatgatgggtgtccatttgtgtcaaagcagtccatttacaccgaggacgactatgacgagaggtctgactcctcagactctagaacactcaacacatcatcttaaagtggtgctggatgggtggtggccaggtgacattttctgtgcgttttgaccctgaggcatctgaggagaggccacatcttgtgtatgccctttccttctgtttgacaaagtgactgtgcttgattctatacattagcaataaaaacataacttatttaacttcttgcacttcactggaaaatgccaaatagctctgttctgtggctttagtgctgaatgtttattgtaaaagagagtctaatgttaagaatagtcttgggaaggctgggtccgtggaagatttatttggggatgtaaagctgaaggtcagccttgcacctaaacccaacctggaatgttaaatgaaataatatacttgaatgcaattttgtaaaagtggattcctcaggatatgtgaaacctaaaggaagtggttctgttgcaaatggactataaacagggacattatattcttacactaaaaatccttgcattttaaagagagatgcacttaagaatagagtgaactgctcatatgcttatttaagcttggacagttttcagagacaaaccccattaagaattactcttttcacatggctgaatcgaaacatgtgtaatgtcaatgtaaaaccaatcacagctgtgaactgcatgaaatgtattgtgaaacgaacacaagattaagctttgtcaggttaatgtagcatgttaaggactctagaaaaaaataaactaaggagacgag

SEQ ID NO: 30556 - DNA, 1921 bp, Homo Sapiens
cctgttgctgatgctgccgtgcggtacttgtcatggagctggcactgcggcgctctcccgtcccgcggtggttgctgctgctgccgctgctgctgggcctgaacgcaggagctgtcattgactggcccacagaggagggcaaggaagtatgggattatgtgacggtccgcaaggatgcctacatgttctggtggctctattatgccaccaactcctgcaagaacttctcagaactgcccctggtcatgtggcttcagggcggtccaggcggttctagcactggatttggaaactttgaggaaattgggccccttgacagtgatctcaaaccacggaaaaccacctggctccaggctgccagtctcctatttgtggataatcccgtgggcactgggttcagttatgtgaatggtagtggtgcctatgccaaggacctggctatggtggcttcagacatgatggttctcctgaagaccttcttcagttgccacaaagaattccagacagttccattctacattttctcagagtcctatggaggaaaaatggcagctggcattggtctagagctttataaggccattcagcgagggaccatcaagtgcaactttgcgggggttgccttgggtgattcctggatctcccccgtggattcggtgctctcctggggaccttacctgtacagcatgtctcttctcgaagacaaaggtctggcagaggtgtctaaggttgcagagcaagtactgaatgccgtaaataaggggctctacagagaggccacagagctgtgggggaaagcagaaatgatcattgaacagaacacagatggggtgaacttctataacatcttaactaaaagcactcccacgtctacaatggagtcgagtctagaattcacacagagccacctagtttgtctttgtcagcgccacgtgagacacctacaacgagatgccttaagccagctcatgaatggccccatcagaaagaagctcaaaattattcctgaggatcaatcctggggaggccaggctaccaacgtctttgtgaacatggaggaggacttcatgaagccagtcattagcattgtggacgagttgctggaggcagggatcaacgtgacggtgtataatggacagctggatctcatcgtagataccatgggtcaggaggcctgggtgcggaaactgaagtggccagaactgcctaaattcagtcagctgaagtggaaggccctgtacagtgaccctaaatctttggaaacatctgcttttgtcaagtcctacaagaaccttgctttctactggattctgaaagctggtcatatggttccttctgaccaaggggacatggctctgaagatgatgagactggtgactcagcaagaataggatggatggggctggagatgagctggtttggccttggggcacagagctgagctgaggccgctgaagctgtaggaagcgccattcttccctgtatctaactggggctgtgatcaagaaggttctgaccagcttctgcagaggataaaatcattgtctctggaggcaatttggaaattatttctgcttcttaaaaaaacctaagattttttaaaaaattgatttgttttgatcaaaataaaggatgataatagatattattttttcttatgacagaagcaaatgatgtgatttatagaaaaactgggaaatacaggtacccaaagagtaaatcaacatctgtatacccccttcccaggggtaagcactgttaccaatttagcatatgtccttgcagaatttttttttctatatatacatatatattttttaccaaaatgaatcattactctatgttgttttactatttgtttgacatatcagtatatctgaaacaccttttcatgtcaataaatgttcttctctaacattaa

SEQ ID NO: 30557 - DNA, 2497 bp, Homo Sapiens
gggcctctggtagccctggggacgctgtatctgtgggctcttgaatcgcgtcacaaatcagcgaccgaactctggcggtggtggttaagacggcgaaggcggcagcggcggcgacagctctggggtttgcgtctcggggtgtgtcggccgccgctgctgcttgggcctggtatgtacagatggctggttaggattctcggcaccattttccgtttctgcgaccggtcggtgccccctgcccgggccctcctgaagaggcggcgctcagacagcactctgttttctacagcagtggacactgatgaaataccagccaaaagaccaagattagattgctttattcaccaagtgaaaaacagtctctacaatgctgccagcttatttggattcccattccagctgaccacaaagcccatggtaacttctgcttgtaatggaacaaggaatgtggccccttcaggagaggtattttcgaactcttcatcttgtgaactgacaggttctggatcctggaacaacatgctgaaactgggtaataaatctcctaatggaataagtgactatccaaagatcagagtgacagttacccgagatcagccacgcagagtcctgccttcctttggttttactttgaactcagaaggctgtaatagaagaccaggtggccgtcgccatagcaaaggtaatccagagagttctttaatgtggaaacctcaggaacaggctgtaacagagatgatttctgaagagagtggcaagggtctgaggcgtccccattgtactgtggaggagggtgttcaaaaagaggaaagagagaagtaccgaaagttattggaacgacttaaagaaagtggtcatggaaactctgtctgtcctgtaacttcaaattatcacagttctcaaagaagtcagatggacacattaaagaccaaaggctggggggaagagcaaaatcacggagtcaaaacaactcagtttgttccaaaacaatatagacttgttgaaacaaggggacctctatgttcattgagaagtgaaaagaggtgttcaaaggggaaaattactgatacagagaagatggtcggaatcagatttgaaaatgaaagtaggaggggataccaactggagcctgacctatcagaagaagtgtcggcccgactccgcctgggcagtggaagcaatggcttactcaggaggaaagtgtcaataattgagacaaaggaaaagaattgctcaggcaaagagagggacagaagaacggacgatctccttgaacttacagaggacatggaaaaggaaatcagtaatgccctaggccatggcccacaggatgaaatcctaagtagtgctttcaaattgcgaattactcgaggagatattcagacattaaagaactatcactggctcaatgatgaagtcattaatttttacatgaatcttctggtggaaagaaataaaaagcaaggctatccagcacttcatgtattcagtactttcttctatcctaaattaaagtctgggggttaccaagcagtgaaacgatggaccaaaggggtaaatctctttgaacaagaaattattctggtgcctattcatcggaaggtacattggagcctggtggtgattgacctaagaaaaaagtgtcttaaatatctggattctatgggacaaaagggccacaggatctgtgagattctccttcagtatttacaggatgaaagtaagaccaaaagaaatagtgatctgaatcttttagagtggacccatcacagcatgaaaccacacgagattcctcaacagctgaatgggagtgattgtggaatgtttacttgtaaatatgcagattatatttctagggacaaacctatcacatttactcagcaccagatgcctctcttccggaagaagatggtgtgggaaatccttcatcagcagttgctgtgagaaaactttgcctggtccctctagctgctggtggttctttcacagacatttccatatacctcatgcattgtgggttaaaaagtccctgcatcacttctgttctcacaggtactgagctgtcaaaagtgcatgaaggcctctcactgtactctagtcctgacttggggtgcagagggctgcttgcaatcctgtttgtaaggctgtgcctgctcagagctttggactgttcaacccacacaagaacaaacgctaactaatattttttttaagagattcttttccctatgaatgtgggaaatgcaggatttattctgtgaattgttgtttctgtgtgttgtccagcgtattcattcactcactcgttttgcaaacataatgggcagtgggcatttactgctgctctttaacagttagctctaaattacttgttttgaactatttatttctgaaaggacatgttactcaagctgcatccctgtgagaagcaggaggggaattctcactggggcgaaggagtggactggagcgtaactgccacttaagcggcggttgg

SEQ ID NO: 30558 - DNA, 3302 bp, Homo Sapiens
acgtccccgccgggcccgcgcgcctcgtgcctcgcgcctcgcgcctccagccacgtccccgccccggctccggcgcgccgcggagttggctgctgggaggtgcgggactgggtgtggccggcggctctggtctcggctgtgagctgcgctctccacgccggctccgcgctccaggggctgctgagcgcccagcggacaccggcagcgcgcggtcgacgcgggcctgagctccctccagctgttttcactcattagctcctgaggtaaacaaattgaaaaaatgagcgaactggaacagttgaggcaagaagcagaacaactgcggaatcagattcaggatgctcggaaagcatgtaatgatgcaacgcttgttcagattacatcaaatatggactctgtgggtcgaatacaaatgcgaacaagacgtacactgaggggccacctagctaaaatctatgctatgcattggggatacgattccaggctgctagtcagtgcttctcaagatggaaaattaattatttgggatagctatacaacaaataagatgcatgctattcctttgaggtcctcctgggtgatgacctgtgcttatgctccctctggtaattatgttgcctgtggaggcttggacaacatctgctctatatataacttaaagaccagagagggaaatgtgagagtaagccgagagttgccaggtcacacagggtacttgtcctgctgtcgttttttagatgacagccaaattgttacaagttcaggagatacaacttgtgctttatgggacatcgaaactgcccagcagaccaccacattcactgggcattctggagatgtgatgagtctttctttgagtcctgacatgaggacttttgtttctggtgcttgtgatgcctcttccaaattatgggatattcgagatggaatgtgtagacagtctttcacgggacatgtctcagatatcaatgctgtcagttttttcccaaatggatatgccttcgccactggctctgatgatgccacttgccggctctttgaccttcgtgcagatcaagagttattattgtattctcatgacaatatcatctgtggaatcacttctgtagccttctcaaaaagtgggcgtctcttgttggctggttacgatgactttaattgtaatgtatgggacacgctaaaaggagatcgtgcaggtgtccttgctggtcatgacaaccgtgtgagctgcttaggtgtaactgatgatggcatggctgtggcaacaggctcttgggacagttttcttagaatctggaattaacagtgtcatacatatttgttctccattgatatatctggagaaatcaatgctacagcctatagctgtgaaaaaattctaccttatatttgcaggtgaagatttttctattagattatctacaaaaacaagctttcagtaaactaccaaaaaaaaagtgggggtggaggaaaaaaggcaaaggcgccttctgagatcaaaaggaccagtgtattaatttgaggggttgggttattttaaccttggtgaattgttgtgtgtactcagagtgtattttctttgtgtagaacagaatgtacacattatagcagctcgccattgtgtttgcattttttaagaagtacatttttaactttgtatacacaagaaatgtcatatttttgagttttgtaatggaagaaccaggcacagaaacagacagaaatgatactgtatgtgtgtgtatttatgtctgaagaaagtccccttgaattctgatatctctttgaatctaagagatcctgatagcttcatgtttaagagcattgacaggtggggcacctctgaggggagttcattgtttctcatgcatcatttgccatatactattaatcaaagtgcttgctttcagtcctttgaggggacagataatctgaaggccagagattagagatttcactgatattttggacatacataagaaacatcattataattaataaaaagtaggtaatagcatataaatggttcttgacattttaaaagcctggttatgatcagttgacactttgagtacccccctaaatagctggactttccttttcatttcatatttggaactaagtttgtagcgtatactcatctttcagaagtttggtaaacattgggattgtccctgcatctgaacatctttcccagtgctatcagtatacatctagagaggaaatgcaatgtgacagtgttacatttggagagaagtgtgaaatctaaccaatcgctagcacatatttgttgtaatacggtggtttatttcatgtttgcatactataaaatctgaattgatgtgaaatatctgtgcctttaaatttcttaaacctttaagctttttgttctgttttgcaacattttgtagtatttcttcccttccttagcacaaaatactggtttctaagtggttttgcttcaaaggatgtctagatgtaagtgattccacttaaagccaaaataaaaattcctaaagcagttcttaaaggagttagagagctatattaaacagtttttctgtggtataataatgtgtctcttactagaagtcccccacgaccaagttaaagatacttttcctgttggattctcttttacaaataagtctaaatgactgataatagaagattgttagtcttgcttgatggtaaagtcttggattattctgatatatagacgtgcattgttttgtaacttagttacttttcagataggtctgtgttaacttttgaacatgtgtaacttaacctaaatactcccaaactttacctctaaatttttgtttttatgttgtgaatgtgctaatatgtgcatcaactgtaaagatgtatcagttttattaaaatcagttgacaattagaataataaagtggataaaggcaaattaagatataggaccaaaacagaatattgtagatggcagttatgaatgtatatttatattttgattaagatttctattaactttttggctgggcagagtggcttacacctataatcccagcaatttgggaggccaaggtgggcagatcacttgaggtcaggagttcgcgaccagcctacccaacatggtgaaaccccatctcttctaaaaatacaaacattagccgggcgtggtggcacattcctgtaatcccagctactcgggaggctgaggcaggagattcgcctgaacccgggaggcagaggttgcagtgagccgagattgtgccactgcactccagcctaggcgacagagtgagactccatctcaaattgg

SEQ ID NO: 30559 - DNA, 7496 bp, Homo Sapiens
ctgccttaaagcagaagcaaaggagtagtgcatttgttaagaagaagacgcctgaatcttttagtggacctgctttcagcaaacttgttttttaggtcagaatactatatccaatgatcaagctaaacatgaaatgcttcgagtaagactcagtattcatactttgacatttgcaaatcactgggtctaataatactcttcctcttttgttgtcagcaatggaagagttaatagttgaacttcgtctctttcttgaactcctggaccatgaatatctaacctcaactgtcagggagaaaaaggcagtgataaccaacattctgctaagaatacagtcatccaaaggttttgatgtgaaggaccatgctcagaagcaggagaccgctaacagcctgccagcccctcctcagatgcccctgccggagatccctcagccctggctgcctcctgacagtgggcctccaccattgccaacatcctccctcccagaaggttattatgaggaagctgtgccgctgagccccggaaaagctccggaatacatcacatcaaattatgattccgatgcgatgagcagctcttatgagtcgtatgatgaagaggaggaggatgggaaggggaagaaaacccggcaccagtggccctccgaggaggcctccatggacctggtcaaggacgccaaaatctgcgccttcctgctgcggaagaagcggttcggccagtggaccaagttgctctgcgtcatcaaagacaccaaactgctgtgctataaaagttccaaggaccagcagcctcagatggaactgccactccaaggctgtaacattacgtacatcccgaaagacagcaaaaagaagaagcacgagctgaagattactcagcagggcacggacccgcttgttctcgccgtccagagcaaggaacaggccgagcagtggctgaaggtgatcaaagaagcctacagtggttgtagtggccccgtggattcagagtgtcctcctccaccaagctccccggtgcacaaggcagaactggagaagaaactgtcttcagagagacccagctcagatggggagggtgttgtggaaaatggaattaccacatgtaatggaaaggagcaagtgaagaggaagaaaagttccaaatcagaggccaagggcactgtgtcgaaagtcactgggaaaaaaatcaccaagatcatcagtctgggaaagaaaaagccgtccacagacgagcagacctcctcagctgaggaagatgttcccacctgcggctatctgaacgtgctctccaacagccgctggcgagagcgctggtgccgagtgaaagataacaagctcattttccacaaggacaggaccgacctgaagacccatattgtgtctattccgctccgtggctgcgaggtgatcccgggtttggattctaaacatcctctgacgttccggctgctgcgcaacggccaggaggttgcagtattggaggcatcttcttctgaagacatgggcaggtggattgggattttactcgcagagacgggatcgtccacagacccggaggctctgcactatgactacattgatgtggagatgtctgcaagtgtcattcagacagccaaacagaccttctgtttcatgaacaggcgtgttatatctgctaacccatatctagggggcacctccaacggctatgcccaccccagcgggacggcacttcattatgacgatgtcccgtgcatcaacggctcgctcaagggtaaaaagccccccgtggcgtctaatggggtcacaggaaaagggaagactctgagcagtcagccaaagaaagcggatcccgcggctgttgtgaaaaggacgggttcgaatgctgcccagtacaagtatggcaagaaccgggtagaagcagatgccaagcggctacagaccaaagaggaggagctgctgaagaggaaagaggccctgcggaataggctggcccagctccgcaaggaaagaaaagaccttcgagcggctattgaagtgaacgccggcaggaagccgcaggcgatcctggaggagaagctgaagcagctggaggaggagtgccggcagaaggaggcggagcgtgtcagcctggagctggagctgacggaggtcaaggagagcctgaagaaagcgctggcgggcggagtcaccctggggctggccatcgagcccaagtcagggacatcgagtccacagtctccagtgttccggcaccggaccctggaaaactcgcccatctccagctgtgacaccagtgacaccgagggccccgtgccggtgaacagcgcggccgtcttgaagaagagccaggctgccccgggcagctccccctgccgagggcatgtgctgcggaaggccaaggaatgggaattgaagaacgggacctaggggacagcagcaccactccagcctcagagactgcacacccccttgcctgtatcctcatctgtgtgacggcaggaagctctgcccagagtggcctcagctgcacgactccagaggctccacgactgagctctgaggccagtgcctgtcccccaggcccacttgtattctttctactgtaaaatggcgcctttaaaaaagatgtaagactttggttcccaactttgttaaaaaacaaaaaaagtgatggaaaggtgtttgaaaggatgctatcaggcgaagtgacatctttctaaccagataggccattgctttcaccgattccaacccagccctggactgaggatggatggttccatgagcccccagatgaaaacctggattcgacagggaagagcttggatccccggctgccccgggcatgagtgtggctggccatgggcactgggctcgccttgcacgcccaccaggagggccaggggcatacgcagtcctgacgtggactttgtgtcttggcgtaccctctccacgtgcccgtccccctcgtcatcagaggtaaaggcatgagaaaatcgcgctgtgaaacgttttttaccttttattattattttttggacagatgcttttgtcaccaagacatgaaaagctgccattcttcttaacctgttttttaggaatgtctttttactgtgtgtcacacttagatcaaggagttttcagaggttccttattttattaattaattatttgtgctgcttttgacaggtagcagagggttttaatacttcactaacagtacaccctcctcccccttgggctagcatccccagcccttaatccacgtcggagccggcaggtgcttctcacaccaggagcctctgggggcaggggctggctcctcgccgctgtacaggacgtttactgctgcttggggccagggcagtcctttgaaagggaagcaagttccggaatttgttcgctcatggaactataacaccttagagcaagaggcaggaattccagggcctcctgcccctccccttcctccagcttgtcaagttaaaccactaatgtgttggtgggcctggccgtgctgcctctcctgagtagggtgggtgcaagtagggcctctttcccagctttcttgcttgccttctgtgcaatatttcttggagaatttggatgcctaaggcataaaggaaaaaaacagagttcatagtttgagctggtatttaccccctgggtttaaaaatcagattaacttcttggtctcccggaggctgctgtcaggaattctccagtacgggaagatgcagtcacttatgacgaaataagtcacccctgaacgcctccgcaggcagattcatggagaccagtcccagtagcaaccgccccttccccaagcatagaatacagaggtgccatacttggtgtaagccttccttctgtccactgtccagaatgtcctttttcacacagaggaagagatggcgggaaaacactgactgactccttgggtttcccccagacatactttcagagcgctagctgtgtggtgcacgggactttacagttaggattcatgtttaaggtggtggcgcttgaggcctgcaagggccacgttggattactgaagcggaaagcggtctcccatgtataagaaaaagttttacaacacgaattggaagctgcttgagtccacctgaacttgaattgattgcaaagccatctgccgggaacggttttgggttcctgagccatcagccagcctttctttcccctctgatgcacgttcctcccggcctagtccgtggaggcccatcacaccagcatccgtgacgccagcttcccactaggacatccaggcaggtcgggcggggacgccacacacctcagggccgtccgctgcattgccatagaggagccctccctccagtggtcacttcccaccattgcaggcagacttcccaccattgcaggcagctgggcccacttcatatcacacaaaatgaattttctataaagggaaaaaagtttgctcctccatagatttttgctgccttcgggtcaaatagtttccctggttgacactcttgggccactctgattggcagcctgctttgccaaagagaactgtgtgaggttttggtggttagtaagagaagggggagatggccagcctgaagtcacggtcctggcccagcacaggtgggcagcagcgagctggcaggtgaagtgtgagcagcacgcaaagtgtcacgtgggccttagccgtcacccaccagcttcctcaccaggcaaggaggccccggagccttagcagggacttgcccaacggcacagctgattggtgctcgactcccagcatgcatattttgttgtaaaaacccaggtttgtaattcacatccacaaccctaagccttttaaagcggaggcaaacgttaacaaaccccatcgtggtccatggagcctttcaaaatgggtgccctggaggggcctgacagtgggttccttccatggcggatactcccttgaaatttcacattccatcaaagtttaaagcatttacttcagaataagttatttatgtgtatatgttcaataaatatagtttttaatttatatctgtacatattagacacacgcgagccatcttgccagaattctgacagtgatgtcattttattcccctcccaaaacatgccccaggaacaagcaccccttgcctctgtggcagctgcgagtgtgtctgatttcataacgaagccaggctgagggcaagaggcccgacaggcaggccagggtccccggagaagccggatttcttcgcaatgtcactggtacttagcagatggtcgtgttcacaggggctagccacctgtactacggtgccgaccgcaatgcgaggaatgtggtggccacgcgatggagctggccggaggacaggtcaggtgagggggccgacccctgcggggctcagggctccttccattctaaccttgagccacagtgtcactcttcagggctctgctcctggctctattttgttaaggtgtcatcagccttcaacctccatttatatatttttataatgttaagccactgaccaactttttcatagaaacaactatcagattcgagggctccctttgtccccctgacctgggcacaggcatgggcgatggctccctcttcccagaatctgcggggaactggggcaaggcccatctgtctgcaaggctggtagctctctccctcggcttccagagtccacggcagttgcaaggtaaccagtgtggatctgctgagtcaccccaggcaccagacttaccccaggagcatgggccactgtccatggggccttccttgagaccttcccttggggctggcgggcggcggcttaccagctgggtcagtcccatctcgcccctctgtgcctatgccctggcgttgccaggcttaaccttcccctgtatcttactcatcccagaattattactggccatttctaaatagacaaaaactaccctaaaatgtggagatttactccttttgaaaagtctgtttcaaaaagtgtggcctcagctctggaggccacccccaggaaggagtttgaggttcattgtcattatggccacagtttggtgcttgtgcacgggactcaaagggcagcgtcgaagctggggttaggtgtagggttgtgagcaaagctcccctgtttgtggccacaccttccctttccaaaaaggctattaattctactcacccactatttggggggatgtaaattttgcccacagactttgccacccaggtgaggtgctgtgttcatgcacggaactgatgtcattagacaccatccaaggatgggcagcctgcagtgtggccggcgactgccatccagagaaaaggcaccttgtgccacagggcggggccgacaccctgagctcacaggtggcccctgcattcaggtggatgtccatccttgaaacagcctcttctgggaacacagcactggaggtctccaggcatcagggttggccggcagggtgccctgcagcttacataaaggtcgtggcaatgtttcaatgttaaactaaactattgccttcctcttacttttcctaaaatgattttctaatgggaacagtcacttcaagttcatgacatagtttgaaggaggataattcattttttcctggttgtcactgtcttcttatccccttggtgggctgggttcatactgtgaaataaactaaaatgaaaccaaaacgttcctgccgtaaatacgtggcacagcactgcagaaaaagcagtcacctctattcgtgagtccccaagccatagcagggcgtctgtaaaagaagggaaactgcacccaggaagtggtgggcgtcagacgcatcctttcgcccgtagttcatgaaatagttccggctttggtcttccagaaaatctcaacttcaccgtgcacaagtgttaccgggtctttttagtgtagccatggaagatactttcaaaaggacatcttcagatcataagtcttaggaccaaaggtgtttttaatgagataatctttttgattttctaacaagaaaggaaatattcactttacattttaacatcaacttttaagtgatattcagaattaattgaccatggtgatacgttgtaaaatgttttcatattaagaatgtaattatttccttattgtattttttaaaagctaaagtcatatttaaaattctctttgaaagaaacaggcaaagaaacagcaaagatttttttaaattaaatatgttagtagtgcccacttcaaatgactgtaaatatattttcactgtttctcaatgtatttaattcataaagtaaaaattttatgaaaagaaacttgcaaggaaaatcctagttttcagtccactcgccccactttgtagtagcttcactgaatttcctgctttcctggttgaattttctactgtttcacgtggtgtaaccctagactggcgcccttggcgtgcccctttgtgtatgaataaacttctctcccccaaaaaaaaaaaaaaaaaaaaaaaaaaaaaaaaaaa

SEQ ID NO: 30560 - DNA, 4221 bp, Homo Sapiens; identical to SEQ ID NO: 28766

SEQ ID NO: 30561 - DNA, 4144 bp, Homo Sapiens
ggaggggtggtgctagacgtttcgggcagagctcggccgctgcggaggacaaggaactctccctctcccactagtctgacttcttccaaaatgagcggcctggatgggggcaacaagctccctctcgcccaaaccggcggcctggctgctcccgaccatgcctcaggagatccggaccgagaccagtgccaagggctccgtgaagaaaccgaggcgacacaggtgatggcgaacacaggtgggggcagcctggagaccgttgcggaggggggtgcatcccaggatcctgtcgactgtggccccgcgctccgcgtcccagttgccgggagtcgcggcggtgcagcgaccaaagccgggcaggaggatgctccaccttctacgaaaggtctggaagcagcctctgccgccgaggctgctgacagcagccagaaaaatggctgtcagcttggagagccccgtggccctgctgggcagaaggctctagaagcctgtggcgcagggggcttggggtctcagatgataccggggaagaaggccaaggaagtgacgactaaaaaacgcgccatctcggcagcagtggaaaaggagggagaagcaggggcggcgatggaggaaaagaaggtagtgcagaaggaaaaaaaggtggcaggaggggtgaaagaggagacacggcccagggccccgaagatcaataactgcatggactcactggaggccatcgatcaagagttgtcaaacgtaaatgcccaggctgacagggccttccttcagcttgagcgcaagtttggccgcatgcgaaggctccacatgcagcgcagaagtttcattatccagaatatcccaggtttctgggttactgcctttcgaaaccacccccagctgtcacctatgatcagtggccaagatgaagacatgctgaggtacatgatcaatttggaggtggaggagcttaaacaccccagagcaggctgcaaattcaagttcatctttcagggcaacccctacttccgaaatgaggggcttgtcaaggaatatgaacgcagatcctctggccgggtggtgtctctttccactccaatccgctggcaccgaggccaagacccccaggctcatatccacagaaaccgggaagggaacactatccctagtttcttcaactggttttcagaccacagccttctagaattcgacagaattgcagagattatcaaaggagaactgtggcccaatcccctacaatactacctgatgggtgaagggccccgtagaggaattcgaggcccaccaaggcagccagtggagagcgccagatccttcaggttccagtctggctaatctctgtcctgtgagaagcttctgcacaagtttccttaccacctcctcttggacctatgcttggccaacagcatgcagtcttccatctgctttctcttcatactgtggattatcttttcctttggttctaaatcttcagtaatcggttgcaagattgttggcttacctgcctgtgccattcttcctctgggccttcatgcttttctgcattgtgttaacatgtttcaagtgcatggccttctacggcttctatgccaagcgtatgatactatagatatagtgtaccatactgcctttctttgcatggcttggaccctatctgtgaccatgctcttctcccaatttaagtggttctgtaccacaaagaatcttgatacattttcacaaataactgattgggcttcatactttatgctggctgtgtcctgatacccatgtacttatggtaagctatttgggtattaccactgcaagacaaaactgatatcttaacccggccatcaacccaaattggacattccagactaccaccaactggatcccagctgccttcctgggcttgtgccatccaccctactggttatctgatagaacaagctggtggctgatgggtgactgctaggcgtgactgaggtaatagatgaaaagtgttctatgttatcacattggttttcctgtacctttggttactctacgtcatgaccagctgctggtgagtatgaagcctgtgctatagcccacccctactcactctcaccttctggttgaactttgcttaggccaccattgtctgcctcatcaggaactatctgtagacgtagctcccagggagctcacagcaacaccccctaccaccaggatgggcagtaatatgtgacagagcccaaagcaaggctggaacgcagtcccttccagcttagtctttctgactcctagccaacaaaccatccttaatgtgagcaacttctttaggcatttcctcttttccccgcctgcacccactctgaacatgacaaaagttgccagagttggggcattgaggaagagatatttctggaatgtgagacttgttatgcctctgtctctttctctccctcctcctcccctctccctccccctctccctcccatcccttttcttccctttcactctgaagcagttttagcttattaacagaaaacaaaactggcaaagcaggctttttgtttaatttgctctttccctgattgtgttcagagagaaaggttatgattaaatgggctccagatctcttattgcccttattcctccaccccacttcttttagcaaggtctgaaagtttcaaagggagacctataggttaattgtttagttataggcagtgttaaattaggcagattttgacatatttatctttttaccccatccattctaccaaaacctgtgtatttcttgagtttttagtttgagaagctggaaagagagagaagggcctcacagtgatgggttcaggacgggtcaaaggcaaaggcctttgtgatgtgagcaaaggcaaccaaaacttagcctcactccacttttctaaagatggaaattcttttttgggccttggactgcttctagggtagcattttgtaggtcactcttctcctttgtactattttgtttctgccctgatgtcccttgggtctccatcctactgcctggctttcttggccctcatttctcagcttctgcatttccttccctgctcctaacaaatgaagaagcaggctgcagcctgcattgtggaagatctccagcctccttgtaggggataaggggatgtgcagcatctgtgtggattttcacggacaagttccagtaggtgggacagtgatgccgtcaaggcttagttatgatcatgtgtggtgataaagaccatccaccatcacccttttcccctttggttttgaaggccttgccctaagctacctgagggtttaggaggtctgaacacacacagtggagaggttaatctaggttgggaaactgagtaaaagtccagagcaggaatgagcctgctgtggcgtgggtttggaaaggctcacaggaaagaacctgcaggatcaggggtgggaggggaggcccctgaggtgctctccagggaagaggggctggggtttaaatagcatgcttggaggaagattttccttcaatttttcctaagtccttgaattcaccagtagatttttgtaaacaaaatgtaagtcgatgttttctctcaattatcctaggagtgacctttatatgtgtggaagattaatggtatatgctccttatgtcactgtttttgagtaaaatccatttcctttctctgtttcagcctatgacaaaattgatgtttacaggcctgctttttgcttataattgacaacatgtgcaaaaataccaaatttgtgtcctgtgcagtatgaagaattcagtgaatattcattaatgtattagcttgttttgctctctgttcatatatggctctattcttagaaatataatttgaatgtgatctttcaatagtctgaatattttacaaattatagctatgtcttgtgaaaataacctcaaaaagaaaaatacgactctgttgtcttacttgatatttcttgccctagtaatgtacttgacatttatgttcctaagcagtgtaagtaccagtagaatttctctgtcaaactcaatgatcatttagtacttttgtcttctcccatgtgcttgaaggaaaaataaagtgtcactaccgtatttcttgttttcatcaaaaaataaaaataatttaaaaaaaaaaaaaaa

SEQ ID NO: 30562 - DNA, 3455 bp, Homo Sapiens
gcggagcgagggaaacggactcggcggcgccggcatgaggagctgagcgtctcgggcgaggcgggctgacggcagcaccatgcaggcggcagtggctgtgtccgtgcccttcttgctgctctgtgtcctggggacctgccctccggcgcgctgcggccaggcaggagacgcctcattgatggagctagagaagaggaaggaaaaccgcttcgtggagcgccagagcatcgtgccactgcgcctcatctaccgctcgggcggcgaagacgaaagtcggcacgacgcgctcgacacgcgggtgcggggcgacctcggtggcccgcagttgactcatgttgaccaagcaagcttccaggttgatgcctttggaacgtcattcattctcgatgtcgtgctaaatcatgatttgctgtcctctgaatacatagagagacacattgaacatggaggcaagactgtggaagttaaaggaggagagcactgttactaccagggccatatccgaggaaaccctgactcatttgttgcattgtcaacatgccacggacttcatgggatgttctatgacgggaaccacacatatctcattgagccagaagaaaatgacactactcaagaggatttccattttcattcagtttacaaatccagactgtttgaattttccttggatgatcttccatctgaatttcagcaagtaaacattactccatcaaaatttattttgaagccaagaccaaaaaggagtaaacggcagcttcgtcgatatcctcgtaatgtagaagaagaaaccaaatacattgaactgatgattgtgaatgatcaccttatgtttaaaaaacatcggctttccgttgtacataccaatacctatgcgaaatctgtggtgaacatggcagatttaatatataaagaccaacttaagaccaggatagtattggttgctatggaaacctgggcgactgacaacaagtttgccatatctgaaaatccattgatcaccctacgtgagtttatgaaatacaggagggattttatcaaagagaaaagtgatgcagttcaccttttttcgggaagtcaatttgagagtagccggagcggggcagcttatattggtgggatttgctcgttgctgaaaggaggaggcgtgaatgaatttgggaaaactgatttaatggctgttacacttgcccagtcattagcccataatattggtattatctcagacaaaagaaagttagcaagtggtgaatgtaaatgcgaggacacgtggtccgggtgcataatgggagacactggctattatcttcctaaaaagttcacccagtgtaatattgaagagtatcatgacttcctgaatagtggaggtggtgcctgccttttcaacaaaccttctaagcttcttgatcctcctgagtgtggcaatggcttcattgaaactggagaggagtgtgattgtggaaccccggccgaatgtgtccttgaaggagcagagtgttgtaagaaatgcaccttgactcaagactctcaatgcagtgacggtctttgctgtaaaaagtgcaagtttcagcctatgggcactgtgtgccgagaagcagtaaatgattgtgatattcgtgaaacgtgctcaggaaattcaagccagtgtgcccctaatattcataaaatggatggatattcatgtgatggtgttcagggaatttgctttggaggaagatgcaaaaccagagatagacaatgcaaatacatttgggggcaaaaggtgacagcatcagacaaatattgctatgagaaactgaatattgaagggacggagaagggtaactgtgggaaagacaaagacacatggatacagtgcaacaaacgggatgtgctttgtggttaccttttgtgtaccaatattggcaatatcccaaggcttggagaactcgatggtgaaatcacatctactttagttgtgcagcaaggaagaacattaaactgcagtggtgggcatgttaagcttgaagaagatgtagatcttggctatgtggaagatgggacaccttgtggtccccaaatgatgtgcttagaacacaggtgtcttcctgtggcttctttcaactttagtacttgcttgagcagtaaagaaggcactatttgctcaggaaatggagtttgcagtaatgagctgaagtgtgtgtgtaacagacactggataggttctgattgcaacacttacttccctcacaatgatgatgcaaagactggtatcactctgtctggcaatggtgttgctggcaccaatatcataataggcataattgctggcaccattttagtgctggccctcatattaggaataactgcgtggggttataaaaactatcgagaacagagacagttaccccagggagattatgtaaaaaagcctggagatggtgactctttttatagcgacattcctcccggagtcagcacaaactcagcatctagttctaagaagaggtcaaatgggctctctcattcttggagtgaaaggattccagacacaaaacatatttcagacatctgtgaaaatgggcgacctcgaagtaactcttggcaaggtaacctgggaggcaacaaaaagaaaatcagaggcaaaagatttagacctcggtctaattcaactgagactttatctcctgccaagtctccttcttcatcaactgggtctattgcctccagcagaaaatacccttacccaatgcctccacttcctgatgaggacaagaaagtgaaccgacaaagtgccaggctatgggagacatccatttaagatcaactgtttacatgtgatacatcgaaaactgtttacttcaacttttatagaaacccaggctcatggaatcactgcaaatctatctgctcttcagacaatacgaagaccctctgagatgctacagaggagaggaagcggagtttcacatctggttaccattttctttttgtcattggcttaggatttaactaaccatgaaaagaactactgaaatattacactataacatggaacaataaaggtactggtatgttaatggataatccgcatgacagataatatgtagaaatattcataaagttaactcacatgacccaaatgtagcaagtttcctaaggtacaatagtggattcagaacttgacgttctgaggcacatcctcactgtaaacagtaatgctatatgcatgaagcttctgtttattgttttccatatttaaggaaacaacatcccataatagaaatgagcatgcagggctaaggcatataggatttttctgcaggactttaaagctttgaaaggccaatatcccataggctaactttaaacatgtatttttatttttgttttgttttttacttttcatatttatattagcatacaaggacaattgtatatatgtaacatttttaaaattttaaaaaaaaaaaaaa

SEQ ID NO: 30563 - DNA, 3993 bp, Homo Sapiens
gtccagagtggcagtaaaggaggaagatggcggggtgcagggggtctctgtgctgctgctgcaggtggtgctgctgctgcggtgagcgtgagacccgcacccccgaggagctgaccatccttggagaaacacaggaggaggaggatgagattcttccaaggaaagactatgagagtttggattatgatcgctgtatcaatgacccttacctggaagttttggagaccatggataataagaaaggtcgaagatatgaggcggtgaagtggatggtggtgtttgccattggagtctgcactggcctggtgggtctctttgtggacttttttgtgcgactcttcacccaactcaagttcggagtggtacagacatcggtggaggagtgcagccagaaaggctgcctcgctctgtctctccttgaactcctgggttttaacctcacctttgtcttcctggcaagcctccttgttctcattgagccggtggcagcaggttccgggatacccgaggtcaaatgctatctgaatggcgtaaaggtgccaggaatcgtccgtctccggaccctgctctgcaaggtccttggagtgctgttcagtgtggctggagggctcttcgtggggaaggaaggccccatgatccacagtggttcggtggtgggagctggcctccctcagtttcagagcatctccttacggaagatccagtttaacttcccctatttccgaagcgacagagacaagagagactttgtatcagcaggagcggctgctggagttgctgcagctttcggggcgccaatcgggggtaccttgttcagtctagaggagggttcgtccttctggaaccaagggctcacgtggaaagtgctcttttgttccatgtctgccaccttcaccctcaacttcttccgttctgggattcagtttggaagctggggttccttccagctccctggattgctgaactttggcgagtttaagagtcttagagagcctccttgtgtctctggtaaccaccgtggtggtgtttgtggcctcgatggtgttaggagaatgccgacagatgtcctcttcgagtcaaatcggtaacagcccagcccaccctctcctggtgctgcctggggaggcaaatcatgctcactccggcgggcacagctggctggggctgttccggggcatggaagattcccagttacccactcactcagaaagccgggagtcatcggacaccttgctggtcagaggccctgggggtggttttgaaccatcagagcttggacttttctgacttccccagcaaggatcttcccacttcctgctccctgtgttcccaccctccagtgttggcacaggcccacccctggctccaccagagccagaagcagaggtagaatcaggcgggccccgggctgcactccgagcagtgttcctggccatctttgctactttcctagagaacccggctgttgccttaaatgtgtgagagggacttggccaaggcaaaagctggggagatgccagtgacaacatacagttcatgactaggtttaggaattgggcactgagaaaattctcaatatttcagagagtccttcccttatttgggactcctaacacggtatcctcgctagtttgttttaagggaaacactctgctcctgggtgtgagcagaggctctggtcttgccctgtggtttgactctccttagaaccaccgcccaccagaaacataaaggattaaaatcacactaataacccctggatggtcaatctgataataggatcagatttacgtctaccctaattcttaacattgcagctttctctccatctgcagattattcccagtctcccagtaacacgtttctacccagatcctttttcatttccttaagttttgatctccgtcttcctgatgaagcaggcagagctcagaggatcttggcatcacccaccaaagttagctgaaagcagggcactcctggataaagcagcttcactcaactctggggaatgctaccattttttttccaaagtagaaaggaagcacttctgagccagtgaccactgaaaggtatgtgctatgataaagcagatggcctatttgaggaagagggtgtctgcccttcacaaacacctctctctcccctgcactagctgtcccaagcttacatacagaggcccttcaggagggcctcctgtgccgcagggagggtgcgtggggaagatgcttcctgccagcacgtgcctgaaggtttcacatgaagcatgggaagcgcaccctgtcgttcagtgacgtcattcttctccaggctggcccgccccctctgactaggcacccaaagtgagcatctgggcattgggcattcatgcttatcttcccccaccttctacatggtatcagtcccagcaggcatccctggggcagacgtgctttggctcaagatggccttcatttacgtttagttttttttaaaaccgtggaggttgcccacgggcctcggcacctggccctggcagcacagctctcaggcccagccctgggcgacctccttggccaagtctgcctttcaccctggggtgagcatcagtcctggctctgctggtccagatcttgcgctcagcacactctagggaataattccactccagagatggggctgcttcaaggtcttttctagctgattgtggcccctccattttccccattttcttatctccctgaccaaaattgctttgacttctaaatgtttctgcttcccagaatgcacctgacttatgaaatggggataatactcccaggaaatagcgcaggacatcacaaggaccaaaaaggcaattcttatttaaatgttactatttggccagctgctgctgtgttttatggcagtgttcagagcttgatcacgttatttcttccttttattaagaaggaagccaattgtccaagtcaggagaatggtgtgatcacctgtcacagacactttgtcccctctccccgccccttcctggagctggcagagctaacgccctgcaggaggaccccggcctctcgagggctggatcagcagccgcctgccctgaggctgccccggtgaatgttattggaattcatccctcgtgcacatcctgttgtgtttaagtcaccagatattttgttcccatcagtttagcccagagatagacagtagaatgcaaatacctccctcccctaaactgactggacggctgccaaggaggccccaaacccaggccccatgcaaaggcacgtggtttccttttctcctctctctgcatctgcgctttccagataagcccaaagacagcaacttctccactcatgacaaatcaactgtgaccctcgctccttccatttctgtccattagaaaccagccttttcagcatctcacccattagcagccccatcacccagtgatcagtcgcctcagtaaagcagatctgtggatggggagcctacgggtggtaagaagtggtgttttgtgtttcatctccagcttggtgttccatggcccctaggcgaggtgatcagggagtggggccaatgggcccccggccctggctttgggaccttgtgctgagggatgatttgctcctgaccttgattaacttaacagttcccagctggaagggacactttcaggacccagtccactgtatggcatttgtgatgcagaattatgcactgacatgaccctgggtgacaggaaagcctttcgagaggcccaaggtggcctcgccagccctgcagtattgatgtgcagtattgcaccacagctctgcggaccttggccattgccgcagtcgcagcttccttttttctgtttgcactgtttgtttgtatgatgttagctaattccactgtgtatataaattgtattttttttaatttgtaaaatgctatttttatttgaacctttggaacttgggagttctcattgtaaccctaacatgtgagaataaaatgtcttctgtc

SEQ ID NO: 30564 - DNA, 3077 bp, Homo Sapiens
tttcttgttaaacaaacacctaatttatttcttggaggttttgttcagctgtcctaatttatgactttacattccttctggtgctaaactgctcaagtagcctcttgtatcaagtgtgacctgattccttaagaattttacttaatgagaacctctaagctagaaactcttgctaggtgtttcatgcaccttattttctttaatcattacaacaactctaagattgggttctctccaccttataaatgatgactgttttagagaggttaaggttgcttaaaattggtgagttagtgaggggtagagccacgaatggatttctggtcgctgcctccatcgtcagggcaagcttttcccacgactccagcgcttccatttgtcagtccccaggctagaaagccacagtgctaatttagtatttatcaagcgtttgtagtgtcctgggatctggcacttcgatgagaaagctgtgacggccccaacttctaacagcgagtggtaaggaggacgagggacacaggagggaggagactctccccaaagcttagcaccaacagaagtggtcccccgcaggttgctctgcgagcgccacctcttccctccaaccgaggagaaagtggcgcgcctttgaggagtccgaggtcccggcccaggcggcagcttgggtcctggcgggttccggacgggcgcctcagggacctggaagcaaccgcaccgaacgcgacggagagcggcgagacgactccaggaggcgcccgagctacatcccccggccacaccaaacccgggtttgctggcagacgcggctcacgacaccccttagggtcgcagcccctcccccggaagtgacgtgtagcgactacggcgtctgggagggacccaggagcagtcggggggtttgagagtggcggcggccgcggagggcctggcaggccccgccgctgcaaggaacgccccgaacgcgcgcgcccggcgtgtagcggccccaagacccgcgccgccgctgccgcgtgcgggggcggggagggcggggcgccaggagccgcggcggcgggagatgcgggcggctgcgggcacccggcgggctcggcttggccgccgccgccttctacggctccgccgcgggggtcgcagcggctgccgcgccgtcctcgagtttccagcgtgaggaggaggctgagggcggagaggcgcatcgtgttcgaggcggagaccgagggggagccccgcgcgcggcgtcgctcattgctatggacagtgctatcaccctgtggcagttccttcttcagctcctgcagaagcctcagaacaagcacatgatctgttggacctctaatgatgggcagtttaagcttttgcaggcagaagaggtggctcgtctctgggggattcgcaagaacaagcctaacatgaattatgacaaactcagccgagccctcagatactattatgtaaagaatatcatcaaaaaagtgaatggtcagaagtttgtgtacaagtttgtctcttatccagagattttgaacatggatccaatgacagtgggcaggattgagggtgactgtgaaagtttaaacttcagtgaagtcagcagcagttccaaagatgtggagaatggagggaaagataaaccacctcagcctggtgccaagacctctagccgcaatgactacatacactctggcttatattcttcatttactctcaactctttgaactcctccaatgtaaagcttttcaaattgataaagactgagaatccagccgagaaactggcagagaaaaaatctcctcaggagcccacaccatctgtcatcaaatttgtcacgacaccttccaaaaagccaccggttgaacctgttgctgccaccatttcaattggcccaagtatttctccatcttcagaagaaactatccaagctttggagacattggtttccccaaaactgccttccctggaagccccaacctctgcctctaacgtaatgactgcttttgccaccacaccacccatttcgtccataccccctttgcaggaacctcccagaacaccttcaccaccactgagttctcacccagacatcgacacagacattgattcagtggcttctcagccaatggaacttccagagaatttgtcactggagcctaaagaccaggattcagtcttgctagaaaaggacaaagtaaataattcatcaagatccaagaaacccaaagggttagaactggcacccacccttgtgatcacgagcagtgatccaagcccactgggaatactgagcccatctctccctacagcttctcttacaccagcatttttttcacaggtagcttgctcgctctttatggtgtcaccattgctttcatttatttgcccttttaagcaaatccagaatttatacactcaagtttgctttctgttacttaggtttgtcttagaaaggttatgtgtgactgtcatgtgaaagttaccccatttctcatcttaattaggattgctaaaatagaaagtttggagtattttcttaaaaaattcattgttctacaagtaaataaatattttgatttttctatttcctcctaaagaaagtacacacactctctcgctctctctcggtcttataaaactcgttggtgtcttataaaacaaacagtgataatctcaagttagaaaacagtaggtcctgagaaccataagaaaaatgactggtgtgatgttgagtaacaagttggtacagttactttagctatttattaacttgctcatctcatagaacattttagtagatttttcacacacctcattattaaaaaaaaacaaacatgctggtgtcttggttacccattattcctctgtacctgaattcaggttggtttttctatttggaaaagactttataaatgttggcttaaaaagaggttgagcaccagaatctcagaatttaccaccaaagaactcatccatgtaaccaaaaaccacttgtacccccaaaaactattgaaataaaaatttaaaaaattttaaaaaaaaaaaaaaaaaaaaaaaaaaaaaaaaaaaaaaaaaaaaaaaaaaa

SEQ ID NO: 30565 - DNA, 3473 bp, Homo Sapiens
tcgagcctggcggtagaatcttcccagtaggcggcgcgggaggaaaagaggattgaggggctaggccgggcggatcccgtcctcccccgatgtgagcagttttccgaaaccccgtcaggcgaaggctgcccagagaggtggagtcggtagcggggccgggaacatgaggcagtctctcctattcctgaccagcgtggttcctttcgtgctggcgccgcgacctccggatgacccgggcttcggcccccaccagagactcgagaagcttgattctttgctctcagactacgatattctctctttatctaatatccagcagcattcggtaagaaaaagagatctacagacttcaacacatgtagaaacactactaactttttcagctttgaaaaggcattttaaattatacctgacatcaagtactgaacgtttttcacaaaatttcaaggtcgtggtggtggatggtaaaaacgaaagcgagtacactgtaaaatggcaggacttcttcactggacacgtggttggtgagcctgactctagggttctagcccacataagagatgatgatgttataatcagaatcaacacagatggggccgaatataacatagagccactttggagatttgttaatgataccaaagacaaaagaatgttagtttataaatctgaagatatcaagaatgtttcacgtttgcagtctccaaaagtgtgtggttatttaaaagtggataatgaagagttgctcccaaaagggttagtagacagagaaccacctgaagagcttgttcatcgagtgaaaagaagagctgacccagatcccatgaagaacacgtgtaaattattggtggtagcagatcatcgcttctacagatacatgggcagaggggaagagagtacaactacaaattacttaatagagctaattgacagagttgatgacatctatcggaacacttcatgggataatgcaggttttaaaggctatggaatacagatagagcagattcgcattctcaagtctccacaagaggtaaaacctggtgaaaagcactacaacatggcaaaaagttacccaaatgaagaaaaggatgcttgggatgtgaagatgttgctagagcaatttagctttgatatagctgaggaagcatctaaagtttgcttggcacaccttttcacataccaagattttgatatgggaactcttggattagcttatgttggctctcccagagcaaacagccatggaggtgtttgtccaaaggcttattatagcccagttgggaagaaaaatatctatttgaatagtggtttgacgagcacaaagaattatggtaaaaccatccttacaaaggaagctgacctggttacaactcatgaattgggacataattttggagcagaacatgatccggatggtctagcagaatgtgccccgaatgaggaccagggagggaaatatgtcatgtatcccatagctgtgagtggcgatcacgagaacaataagatgttttcaaactgcagtaaacaatcaatctataagaccattgaaagtaaggcccaggagtgttttcaagaacgcagcaataaagtttgtgggaactcgagggtggatgaaggagaagagtgtgatcctggcatcatgtatctgaacaacgacacctgctgcaacagcgactgcacgttgaaggaaggtgtccagtgcagtgacaggaacagtccttgctgtaaaaactgtcagtttgagactgcccagaagaagtgccaggaggcgattaatgctacttgcaaaggcgtgtcctactgcacaggtaatagcagtgagtgcccgcctccaggaaatgctgaagatgacactgtttgcttggatcttggcaagtgtaaggatgggaaatgcatccctttctgcgagagggaacagcagctggagtcctgtgcatgtaatgaaactgacaactcctgcaaggtgtgctgcagggacctttccggccgctgtgtgccctatgtcgatgctgaacaaaagaacttatttttgaggaaaggaaagccctgtacagtaggattttgtgacatgaatggcaaatgtgagaaacgagtacaggatgtaattgaacgattttgggatttcattgaccagctgagcatcaatacttttggaaagtttttagcagacaacatcgttgggtctgtcctggttttctccttgatattttggattcctttcagcattcttgtccattgtgtgtaacgtcgaaatgctgagcagcatggattctgcatcggttcgcattatcaaaccctttcctgcgccccagactccaggccgcctgcagcctgcccctgtgatcccttcggcgccagcagctccaaaactggaccaccagagaatggacaccatccaggaagaccccagcacagactcacatatggacgaggatgggtttgagaaggaccccttcccaaatagcagcacagctgccaagtcatttgaggatctcacggaccatccggtcaccagaagtgaaaaggctgcctcctttaaactgcagcgtcagaatcgtgttgacagcaaagaaacagagtgctaatttagttctcagctcttctgacttaagtgtgcaaaatatttttatagatttgacctacaatcaatcacagcttatattttgtgaagactgggaagtgacttagcagatgctggtcatgtgtttgaacttcctgcaggtaaacagttcttgtgtggtttggcccttctccttttgaaaaggtaaggtgaaggtgaatctagcttattttgaggctttcaggttttagtttttaaaatatcttttgacctgtggtgcaaaagcagaaaatacagctggattgggttatgagtatttacgtttttgtaaattaatcttttatattgataacaggcactgactagggaaatgatcagtttttttttatacactgtaatgaaccgctgaatatgaagcatttggcatttatttgtgagaaaagtggaatagttttttttttttttttttttttttgccttcaactaaaaacaaaggagataaatttagtatacattgtatctaaattgtgggtctatttctagttattacccagagtttttatgtagcagggaaaatatatatctaaatttagaaatcatttgggttaatatggctcttcataattctaagactaatgctcagaacctaaccactaccttacagtgagggctatacatggtagccagttgaatttatggaatctaccaactgtttagggccctgatttgctgggcagtttttctgtattttataagtatcttcatgtatccctgttactgatagggatacatgtcttagaaaattcactattggctgggagtggtggctcatgcctgtaatcccagcacttggagaggctgaggttgcgccactacactccagcctgggtgacagagtgagatctgcctc

SEQ ID NO: 30566 - DNA, 4039 bp, Homo Sapiens
agagccgcgggggccgtaggaagccaaccttccctgcttctccggggccctcgccccctcctccccacaaaatcagggatggaggcgcctccccggcaccctcttagcagccctccccaggaaaagtgtcccccctgagctcctaacgctccccaacagctacccctgccccccacgccatggggcccggggccccttttgcccgggtggggtggccactgccgcttctggttgtgatggcggcaggggtggctccggtgtgggcctcccactccccccatctcccgcggcctcactcgcgggtccccccgcacccctcctcagaacggcgcgcagtgtacatcggggcactgtttcccatgagcgggggctggccagggggccaggcctgccagcccgcggtggagatggcgctggaggacgtgaatagccgcagggacatcctgccggactatgagctcaagctcatccaccacgacagcaagtgtgatccaggccaagccaccaagtacctatatgagctgctctacaacgaccctatcaagatcatccttatgcctggctgcagctctgtctccacgctggtggctgaggctgctaggatgtggaacctcattgtgctttcctatggctccagctcaccagccctgtcaaaccggcagcgtttccccactttcttccgaacgcacccatcagccacactccacaaccctacccgcgtgaaactctttgaaaagtggggctggaagaagattgctaccatccagcagaccactgaggtcttcacttcgactctggacgacctggaggaacgagtgaaggaggctggaattgagattactttccgccagagtttcttctcagatccagctgtgcccgtcaaaaacctgaagcgccaggatgcccgaatcatcgtgggacttttctatgagactgaagcccggaaagttttttgtgaggtgtacaaggagcgtctctttgggaagaagtacgtctggttcctcattgggtggtatgctgacaattggttcaagatctacgacccttctatcaactgcacagtggatgagatgactgaggcggtggagggccacatcacaactgagattgtcatgctgaatcctgccaatacccgcagcatttccaacatgacatcccaggaatttgtggagaaactaaccaagcgactgaaaagacaccctgaggagacaggaggcttccaggaggcaccgctggcctatgatgccatctgggccttggcactggccctgaacaagacatctggaggaggcggccgttctggtgtgcgcctggaggacttcaactacaacaaccagaccattaccgaccaaatctaccgggcaatgaactcttcgtcctttgagggtgtctctggccatgtggtgtttgatgccagcggctctcggatggcatggacgcttatcgagcagcttcagggtggcagctacaagaagattggctactatgacagcaccaaggatgatctttcctggtccaaaacagataaatggattggagggtcccccccagctgaccagaccctggtcatcaagacattccgcttcctgtcacagaaactctttatctccgtctcagttctctccagcctgggcattgtcctagctgttgtctgtctgtcctttaacatctacaactcacatgtccgttatatccagaactcacagcccaacctgaacaacctgactgctgtgggctgctcactggctttagctgctgtcttccccctggggctcgatggttaccacattgggaggaaccagtttcctttcgtctgccaggcccgcctctggctcctgggcctgggctttagtctgggctacggttccatgttcaccaagatttggtgggtccacacggtcttcacaaagaaggaagaaaagaaggagtggaggaagactctggaaccctggaagctgtatgccacagtgggcctgctggtgggcatggatgtcctcactctcgccatctggcagatcgtggaccctctgcaccggaccattgagacatttgccaaggaggaacctaaggaagatattgacgtctctattctgccccagctggagcattgcagctccaggaagatgaatacatggcttggcattttctatggttacaaggggctgctgctgctgctgggaatcttccttgcttatgagaccaagagtgtgtccactgagaagatcaatgatcaccgggctgtgggcatggctatctacaatgtggcagtcctgtgcctcatcactgctcctgtcaccatgattctgtccagccagcaggatgcagcctttgcctttgcctctcttgccatagttttctcctcctatatcactcttgttgtgctctttgtgcccaagatgcgcaggctgatcacccgaggggaatggcagtcggaggcgcaggacaccatgaagacagggtcatcgaccaacaacaacgaggaggagaagtcccggctgttggagaaggagaaccgtgaactggaaaagatcattgctgagaaagaggagcgtgtctctgaactgcgccatcaactccagtctcggcagcagctccgctcccggcgccacccaccgacacccccagaaccctctgggggcctgcccaggggaccccctgagccccccgaccggcttagctgtgatgggagtcgagtgcatttgctttataagtgagggtagggtgagggaggacaggccagtagggggagggaaagggagaggggaagggcaggggactcaggaagcagggggtccccatccccagctgggaagaacatgctatccaatctcatctcttgtaaatacatgtccccctgtgagttctgggctgatttgggtctctcatacctctgggaaacagacctttttctctcttactgcttcatgtaattttgtatcacctcttcacaatttagttcgtacctggcttgaagctgctcactgctcacacgctgcctcctcagcagcctcactgcatctttctcttcccatgcaacaccctcttctagttaccacggcaacccctgcagctcctctgcctttgtgctctgttcctgtccagcaggggtctcccaacaagtgctctttccaccccaaaggggcctctccttttctccactgtcataatctctttccatcttacttgcccttctatactttctcacatgtggctccccctgaattttgcttcctttgggagctcattcttttcgccaaggctcacatgctccttgcctctgctctgtgcactcacgctcagcacacatgcatcctcccctctcctgcgtgtgcccactgaacatgctcatgtgtacacacgcttttcccgtatgctttcttcatgttcagtcacatgtgctctcgggtgccctgcattcacagctacgtgtgcccctctcatggtcatgggtctgcccttgagcgtgtttgggtaggcatgtgcaatttgtctagcatgctgagtcatgtctttcctatttgcacacgtccatgtttatccatgtactttccctgtgtaccctccatgtaccttgtgtactttcttcccttaaatcatggtattcttctgacagagccatatgtaccctaccctgcacattgttatgcacttttccccaattcatgtttggtggggccatccacaccctctccttgtcacagaatctccatttctgctcagattccccccatctccattgcattcatgtactaccctcagtctacactcacaatcatcttctcccaagactgctcccttttgttttgtgtttttttgaggggaattaaggaaaaataagtgggggcaggtttggagagctgcttccagtggatagttgatgagaatcctgaccaaaggaaggcacccttgactgttgggatagacagatggacctatggggtgggaggtggtgtccctttcacactgtggtgtctcttggggaaggatctccccgaatctcaataaaccagtgaacagtgtgactcggcaaaaaaaaaaa

SEQ ID NO: 30567 - DNA, 2973 bp, Homo Sapiens
attctggggctcgggggatcccggacaccctctcagctcctgcccgggggcccatgtagtcccttctgccctgtgcctcggtgcctgtgacctgagccccttggttgaccctgcactcgtccaacttgggccaaacgactgcccctccttctggcagtgggctggaccagccggccagcgggagcccccttggcagaagccggtcgtaaaggatcataaactggcggcgtctggctggggcgaaggtcgctgaggtaggaactgcgccagtcctagacgccagacccgctcagaccctcctgccaggtgacagccgccaagatggggtcttgggccctgctgtggcctcccctgctgttcaccgggctgctcgtccgacccccggggaccatggcccaggcccagtactgctctgtgaacaaggacatctttgaagtagaggagaacacaaatgtcaccgagccgctggtggacatccacgtcccggagggccaggaggtgaccctcggagccttgtccaccccctttgcatttcggatccagggaaaccagctgtttctcaacgtgactcctgattacgaggagaagtcactgcttgaggctcagctgctgtgtcagagcggaggcacattggtgacccagctaagggtgttcgtgtcagtgctggacgtcaatgacaatgcccccgaattcccctttaagaccaaggagataagggtggaggaggacacgaaagtgaactccaccgtcatccccgagacgcaactgcaggctgaggaccgcgacaaggacgacattctgttctacaccctccaggaaatgacagcaggtgccagtgactacttctccctggtgagtgtaaaccgtcccgccctgaggctggaccggcccctggacttctacgagcggccgaacatgaccttctggctgctggtgcgggacactccgggggagaatgtggaacccagccacactgccaccgccacactagtgctgaacgtggtgcccgccgacctgcggcccccgtggttcctgccctgcaccttctcagatggctacgtctgcattcaagctcagtaccacggggctgtccccacggggcacatactgccatctcccctcgtcctgcgtcccggacccatctacgctgaggacggagaccgcggcatcaaccagcccatcatctacagcatctttaggggaaacgtgaatggtacattcatcatccacccagactcgggcaacctcaccgtggccaggagtgtccccagccccatgaccttccttctgctggtgaagggccaacaggccgaccttgcccgctactcagtgacccaggtcaccgtggaggctgtggctgcggccgggagcccgccccgcttcccccagagcctgtatcgtggcaccgtggcgcgtggcgctggagcgggcgttgtggtcaaggatgcagctgccccttctcagcctctgaggatccaggctcaggacccggagttctcggacctcaactcggccatcacatatcgaattaccaaccactcacacttccggatggagggagaggttgtgctgaccaccaccacactggcacaggcgggagccttctacgcagaggttgaggcccacaacacggtgacctctggcaccgcaaccacagtcattgagatacaagtttccgaacaggagcccccctccacagatgtccccccatccccagaggctggaggaacaactgggccctggaccagcaccacttccgaggtccccagaccccctgagccctcccagggaccctccacgaccagctctgggggaggcacaggccctcatccaccctctggcacaactctgaggccaccaacctcgtccacacccggggggtccccgggtgcagaaaacagcacctcccaccaaccagccactcccggtggggacacagcacagaccccaaagccaggaacctctcagccgatgccccccggtgtgggaaccagcacctcccaccaaccagccacacccagtgggggcacagtacagaccccagagccaggaacctctcagccgatgccccccagtatgggaaccagcacctcccaccaaccagccacacccggtgggggcacagcacagaccccagaggcaggaacctctcagccgatgccccccggtatgggaaccagcacctcccaccaaccaaccacacccggtgggggcacagcacagaccccagagccaggaacctctcagccgatgcccctcagcaagagcaccccatcttcaggtggcggcccctcggaggacaagcgcttctcggtggtggatatggcggccctgggcggggtgctgggtgcgctgctgctgctggctctccttggcctcgccgtccttgtccacaagcactatggcccccggctcaagtgctgctctggcaaagctccggagccccagccccaaggctttgacaaccaggcgttcctccctgaccacaaggccaactgggcgcccgtccccagccccacgcacgaccccaagcccgcggaggcaccgatgcccgcagagcccgcaccccccggccctgcctccccaggcggtgcccctgagccccccgcagcggcccgagctggcggaagccccacggcggtgaggtccatcctgaccaaggagcggcggccagagggcgggtacaaggctgtctggtttggcgaggacatcgggacggaggcagacgtggtcgttctcaacgcgcccaccctggacgtggatggcgccagtgactccggcagcggcgatgagggcgagggcgcggggaggggtgggggtccctacgatgcgcccggtggtgatgactcctacatctaagtggcccctccaccctctcccccagccgcacgggcactggaggtctcgctcccccagcctccgacccgaggcagaataaagcaaggctcccgaaacccaaaaaaaaaaaaaaaa

SEQ ID NO: 30568 - DNA, 2671 bp, Homo Sapiens
gtacttgggcagagctccccggggttcattgtcttcgcttcacaggatctgtttgagtcctgtccaccggatcctacggggggtaccttcgaaaaaaaacgggctatgctgctgttgcgtgtgggtaccctctcctgacgcctccgccgcccgggtcatgtggaccctcgtgggtcggggctgggggtgcgcacgcgctctcgcgccacgagccactggggccgcgcttctggtggccccggggccccggtccgcgccgacccttggggctgctccagagtcctgggctaccgacaggctctacagctccgcagaattcaaggaaaaacctgacatgtctaggtttcctgttgaaaatattagaaatttcagtattgttgcacacgtggatcatggcaaaagtactttaactgacaggctcctagaacttacagggacaattgataaaacaaagaataataagcaggttcttgataaattgcaagtggaacgagaaagaggaatcactgttaaagcacagacagcatctctcttttacaattgtgaaggaaagcagtaccttttaaatctcattgatacaccgggccatgttgattttagttatgaagtatccaggtcactttctgcttgccagggtgttttacttgtggttgatgcaaatgagggaattcaagcccaaactgtagcaaacttctttcttgccttcgaagcacagctatcggtaattccagttataaataagatagatctgaagaatgctgatcctgaaagggttgaaaaccaaattgagaaagtgtttgatattccaagtgatgaatgtattaagatttctgctaaacttggaacaaatgttgagagtgttcttcaggcaattattgaaagaatcccccctcctaaagtgcatcgcaaaaatcctctgagagctttggtatttgactccacctttgaccagtatagaggtgtgatagccaatgtagcattatttgacggagtggtttccaaaggagataaaattgtatctgcacatactcaaaagacatacgaagttaatgaagtaggagtcttgaatcctaatgagcagccaactcataaattatatgcaggacaggtgggctatctgattgctgggatgaaagatgtcactgaagcgcaaataggagatacattatgtttacataagcaaccagtggagcccttgcctgggtttaaatcagcgaaaccaatggtatttgcaggaatgtatcctctagaccaatctgaatataacaatctgaagagtgctatagaaaaactgactttaaatgattccagtgtgaccgttcatcgggatagtagccttgctctgggtgctggctggaggctaggatttcttggacttttgcacatggaagttttcaaccagcgaccggagcaagaatataatgcttctgttattttaacaacccctactgttccatataaagctgtactgtcatcatcaaaattgataaaggaacatagagaaaaagaaattacaattatcaatcctgcacaattccccgataaatcaaaagtaacagaatatttggagccagttgttttgggcactattatcacaccagatgaatacactggaaaaataatgatgctttgcgaggctcgaagagcagttcagaagaatatgatatttattgatcaaaatagagttatgcttaaatatctctttcctttgaatgaaattgtggtagatttttatgactctttgaaatccctatcttctggatatgctagttttgattacgaagatgcaggctaccagactgcagaacttgtaaaaatggatattctactgaatggaaatactgtagaggagctagtaactgttgtacacaaagacaaagctcattcaattggcaaagccatatgtgaacggctgaaggattctcttcctaggcaactgtttgagatagcaattcaagctgctattggaagtaaaatcattgcgagagaaacagtgaaagcctataggaaaaacgttttggcaaaatgttgtggtggtgatattacccgaaaaatgaagcttttgaagagacaagcagaagggaaaaaaaagctgaggaaaattggcaacgttgaagttccaaaagatgctttcataaaagttctgaaaacacaatcttctaaataattggtgggaaaacaaagaattttcattgcaatttgtaatatgctgacaacagaaagaaaattataaaatttgcttgttactttcagggtattcaggttcaaataacctactagtctttcgttgaaagggagtagttagtgggtaggcaagagcttagattttgaagccatgttgcctgttctcaaatatctgttccaaccactcactagtaaggtgaccgtggccagattaacctttgtttcctcttcagtaaaatcgagattatactactacctacataagttgttgttgtgaagattaaatgaggtaatacgttaaatattcagaggtgcaagacacatagtaagcactcaattgtaactacagttaagtccttaaatgccatcgaaaggttcttagaaactgactttaagcaaaatgacacgtagcacaatgttcttgaatgatgtcatttccttaagtggtttgtaacatcgatgaggaaaaaaaattggtttatgcgtc

SEQ ID NO: 30569 - DNA, 1406 bp, Homo Sapiens
gagggcgccatgaggagcctgtgctgcgccccactcctgctcctcttgctgctgccgccgctgctgctcacgccccgcgctggggacgccgccgtgatcaccggggcttgtgacaaggactcccaatgtggtggaggcatgtgctgtgctgtcagtatctgggtcaagagcataaggatttgcacacctatgggcaaactgggagacagctgccatccactgactcgtaaagttccattttttgggcggaggatgcatcacacttgcccatgtctgccaggcttggcctgtttacggacttcatttaaccgatttatttgtttagcccaaaagtaatcgctctggagtagaaaccaaatgtgaatagccacatcttacctgtaaagtcttacttgtgattgtgccaaacaaaaaatgtgccagaaagaaatgctcttgcttcctcaactttccaagtaacatttttatctttgatttgtaaatgatttttttttttttttttatcgaaagagaattttacttttggatagaaatatgaagtgtaaggcattatggaactggttcttatttccctgtttgtgttttggtttgatttggcttttttcttaaatgtcaaaaacgtacccattttcacaaaaatgaggaaaataagaatttgatattttgttagaaaaacttttttttttttttctcaccaccccaagccccatttgtgccctgccgcacaaatacacctacagcttttggtcccttgcctcttccacctcaaagaatttcaaggctcttaccttactttatttttgtccatttctcttccctcctcttgcattttaaagtggagggtttgtctctttgagtttgatggcagaatcactgatgggaatccagctttttgctggcatttaaatagtgaaaagagtgtatatgtgaacttgacactccaaactcctgtcatggcacggaagctaggagtgctgctggacccttcctaaacctgtcactcaagaggacttcagctctgctgttgggctggtgtgtggacagaaggaatggaaagccaaattaatttagtccagatttctaggtttgggtttttctaaaaataaaagattacatttacttcttttactttttataaagttttttttccttagtctcctacttagagatattctagaaaatgtcacttgaagaggaagtatttattttaatctggcacaacactaattaccatttttaaagcggtattaagttgtaatttaaaccttgtttgtaactgaaaggtcgattgtaatggattgccgtttgtacctgtatcagtattgctgtgtaaaaattctgtatcagaataataacagtactgtatatcatttgatttattttaatattatatccttatttttgtc

SEQ ID NO: 30570 - DNA, 2151 bp, Homo Sapiens
ctagccttccatggcatcctgctccaccgccgcctttgacaagcagccgcagagccgcgagcgcggcatcacgctcgatctgggcttctcgtgcttctcggtgccgctgcccgcgcgcctgcggtcgtctttgcccgagttccaggcagcgcccgaggccgagcccgagcccggcgagccactgcttcaggtcacgctggtcgactgccccgggcacgcctccctcatccggaccatcatcggcggggcccagatcattgatctgatgatgctggtcatcgatgtgaccaaggggatgcagacccagtcagcggaatgccttgtgatcggccagattgcctgccagaagctggtcgtggtgctgaacaaaatagacctcttacctgaaggaaagagacaggcagcaattgataaaatgaccaagaaaatgcagaagaccctagagaacaccaagttccgaggtgcaccgattatacccgtggcggccaagccggggggaccagaggcccccgaaactgaagctccacagggcattccagagctcattgagctcctgacgtcccagatttccatcccaacgagagacccctcgggaccgttcctcatgtctgtggaccactgtttctccatcaaaggccaaggcactgtgatgacagggaccatcctttcaggctccatcagcctcggtgacagtgtggagatccctgccctcaaggtggtgaagaaggtgaagtccatgcagatgttccacatgcccatcacttcagccatgcaaggagaccggctgggcatctgcgtcacccagtttgaccctaagctgctggagcgcgggttggtgtgtgcccccgagtccctgcacactgtccatgcggccctcatctctgtggaaaagataccgtatttccgggggcccctgcaaaccaaggccaagttccacattacagtgggccatgaaacagtcatgggccggttgatgttcttcagtcctgctccagataactttgaccaggagcctatactggactctttcaacttctctcaagaataccttttccaggagcagtacctgtccaaggatttgacaccagcagtgacagacaatgatgaggccgacaagaaggccggccaggccacagagggccattgtcctcggcagcagtgggccctggtggagtttgagaagcccgtcacctgccctcggctgtgcctggtgattggctccaggctagatgcggacattcacaccaacacgtgccggctagccttccatggcatcctgctccacgggctagaggacaggaactacgccgacagcttcctgcccaggctgaaggtgtacaagctgaagcacaagcatggccttgtggagcgggcgatggatgactacagtgtgatcggccgctccctgttcaaaaaggaaaccaacatccagctcttcgtggggctcaaggtgcacttgtccactggggaactgggcatcatcgacagtgccttcggccagagcggcaagttcaagatccacatcccaggtggcctcagccccgagtccaagaagatcctgacacccgccctcaagaagcgggcccgggctggccgtggggaggccaccaggcaggaggagagcgccgagcggagcgagccctcacagcatgtggtgctcagcctgactttcaagcgttatgtcttcgacacccacaagcgcatggttcagtctccctgagtgtccggtgacctcccccagggcctccttgcccagcccagtccaggctgctgtgccaaatcccaaccagccacgcctcagcctctcccagtctctccctgcagtcctgcagcagcagcccccacccccaagcttggtgctgagccctggtgaggagctgagggggatgggttgctggggccaggagggtctctcctccagcccctgcacactcccacccaggacagcccccagcccaactaggaaagggccatgggcagagggctggtagccagtatcttccactgccccatctgttggccacctgcaggccagtctcaaccctcccccaggtgggcaggcacttgatggctacaaataaatgtcccgtggccccagcccacaaaaaaaaaaaaaaaaaaaaaaaaaaaaaaaaaaaaaaaaaaaaaaaa

SEQ ID NO: 30571 - DNA, 3194 bp, Homo Sapiens
cgctgccgcttcctgggctgagtccgcccgcggtcccggcggcgccaggtgcgttcactctgcccggctccagccagcgtccgccgccgccgtagctgccccaggctccccgccccgctgccgagatggcgacgcgctcctgtcgggagaaggctcagaagctgaacgagcagcaccagctcatcctatccaagcttctgagggaggaggacaacaagtactgcgccgactgcgaggccaaaggtcctcgatgggcttcctggaatattggtgtgtttatttgcatcagatgtgctggaattcatagaaatcttggggttcatatatccagggtcaaatcagtcaacctagaccaatggacagcagaacagatacagtgcatgcaagatatgggaaatactaaagcaagactactctatgaagccaatcttccagagaactttcgaagaccacagacagatcaagcagtggaatttttcatcagagataaatatgaaaagaagaaatactacgataaaaatgccatagctattacaaataaagaaaaggaaaaaaaaaaggaagagaaaaagagagaaaaggagccagaaaagccggcaaaaccacttacagctgaaaagctgcagaagaaagatcagcaactggagcctaaaaaaagtaccagccctaaaaaagctgcggagcccactgtggatcttttaggacttgatggccctgctgtggcaccagtgaccaacgggaacacaacggtgccacccctgaacgatgatctggacatctttggaccgatgatttctaatcccttacctgcaactgtcatgcccccagctcaggggacaccctctgcaccagcagctgcaaccctgtctacagtaacatctggggatctagatttattcactgagcaaactacaaaatcagaagaagtggcaaagaaacaactttccaaagactccatcttatctctgtatggcacaggaaccattcaacagcaaagtactcctggtgtatttatgggacccacaaatataccatttacctcacaagcaccagctgcatttcagggctttccatcgatgggcgtgcctgtgcctgcagctcctggccttataggaaatgtgatgggacagagtccaagcatgatggtgggcatgcccatgcccaatgggtttatgggaaatgcacaaactggtgtgatgccacttcctcagaacgttgttggcccccaaggaggaatggtgggacaaatgggtgcaccccagagtaagtttggcctgccgcaagctcagcagccccagtggagcctctcacagatgaatcagcagatggctggcatgagtatcagtagtgcaacccctactgcaggttttggccagccctccagcacaacagcaggatggtctggaagctcatcaggtcagactctcagcacacaactgtggaaatgaaaactgcaatacaagtttcatccagaactaccacctgacattccttgctgaaacgcatctagttcccctgtttattcatatgcatattttttttctttttacccatttgttcatattaagaatgatctgattgaccgtgttggtctgtactgattcaatttgatgtggtgaaaagcaggttgataaatcattttatgtcaagggcagctttgctcatatttcccatgatttcatgtactgcattatttgagaagctgctcaacttgcaaaatcagttttcctctcaataaaattatagctctaatgtttgcatataagggaagtagttatcatgttagtaatacctctaatagtataaaccccaccccaaaattagccagtaatcctgtaggaaggtactgtatgatcaaatgtttaatcatataaatagaatgtaaatgtctcactgagcactgttttctagtgtatcaaaatgctcttatttcatcattcacttcactgtgctgttgttatgatgtgcttaacagggaacgtgattagtgaaaggaagataaacgtggatgttactccaaaacttcgtttaatgaatgcttaaagaattcaaattttatctgcctctcttgtaatttggatctcttcttaatgtacatagtgctaacatgaagacctttttctgcactatatgcaaacagggtaactaactaaaacaaagccactttcaatcttcaatccttgaaggtatatctaggtttatgacagtaattgtgtttacattttatggtgcctagtattgacaaaatgttatttccctacattaaacatgactccatagaccttttcatttgtgggtttttatttcctatgatgtatactgccactaaccttccaaaaattacttagtattgcaaagtcaggaatcatcaggaacgtttagctgacaaaatacttgtctgttttaaaaacctgttcaagtctaccaacctgttcaagtctaccaattataagggcaaattggagaaaaagaaaaaatatatactcaagagtggtatcttgcagtatcggcactgtacaaaaaaatcttccaatttagttgttgtagagaaaacatgcagaacaaatgaagacaaaacatacattttgtaccaaccatccaattagcttatggtaactgacaagctccatttaaacagatgtccatcagatgacaagaaaggctgctgtactgaagtaaaacaaacaatacctgaatgctctgtagcctaaactccaaacatcctcttccatatggatccactggctggacaaactgcaccagttgctgcttcaatttatacctcaattttcactgtgtccaggtggtactttggctcgttggctagattaaccttctctgtccgagtgtgccacacgagaacctgaaggggaaggaaatagcttgggtagcgcactcttcatggtgacactcgaggtcgggcagcacaagtgtaatgaataccttagtgcagttatttgctttcggttccagttcttcgactgttgttatctgtttgagaaagtcagattcttgcatccctggctgggatccacgacgcttaaatacagcttttggattggacaaaatgacttgaagacttacagcaaatcctttgtgaaaaataaaaaaaaaaaaagagactttaaaaaaaaaaaaaaaaaaaaaaaaaaaaaaaaaaaaaaaaaaaaaaaaaaaaaaaaaaaaaaaaaaaa

SEQ ID NO: 30572 - DNA, 6740 bp, Homo Sapiens
tgagccctcccttcttcctctcagttcctagagtccgaccgccgccgccgccgagagagaggagaaggagggggagtggccacagcaggtcctatctggtggtgagtggctgtcatgatctctacagcaccgctctacagcggcgtgcacaactggaccagttctgaccggattcgcatgtgtggcatcaacgaggagagaagagcacctctttctgatgaggagtcaacgacaggcgactgccagcactttggatctcaggagttttgtgtcagcagcagtttttccaaggtggagctcacggcagttggaagtggcagcaatgcccggggggcagacccagatggcagtgctacagaaaaacttgggcacaagtcagaagacaagcctgacgatccccagccaaaaatggactacgctgggaacgtggcagaggctgagggcttcttggtgcccctgagcagcccaggagacgggctcaagcttcccgcatctgacagcgccgaggccagcaacagcagggccgactgctcctggactccactcaacacccaaatgagcaaacaggttgactgctcacccgccggagtaaaggctttggactctcggcaaggtgttggagagaagaatactttcattttggcaactctgggaactggagtccctgtggaggggaccctgcccctggttaccactaacttcagtcctctgccagcccctatctgtccccctgctcccggttcggcctctgtgccccactctgttccagatgcattccaggttcccctctccgtccctgccccagtcccccattcagggcttgttccagtccaagttgccacttcggttccagctccttcccctcccttagcacctgtcccggctctggctccagcgccaccgtcagtgcccacgctcatctctgactcgaaccccctttctgtttcggcctcagtcttggtgcctgtgccagcttctgctcccccttcaggcccggttcccttgtcggctccagctcctgccccgctttcagtcccagtttcagctcctcccttggctctcatccaggctcctgtgcccccttcagctccgaccttggttctcgctcccgtccccactccggttctggctcccatgccagcatccacgcctccagcggcccctgcccctccgtctgtgcccatgcccactccaaccccatcttccggcccaccttctacccccaccctcatccccgcctttgctcctacaccggtgcctgcacccaccccagcccccatctttactccagcccctacacccatgcctgctgccacgccagctgccattcccacctctgcacccatcccggcctccttcagtttgagtagagtgtgctttcctgcagctcaggcaccagctatgcaaaaagtccccctgtcctttcagccagggacagtgctgaccccgagccagccgctggtatatatcccgcctccaagctgtgggcagccactcagtgtggccacactgccaaccactctaggggtttcctccactcttacgctccctgtcctgccgtcctacctgcaggacaggtgtctcccaggcgtgctagcctcccccgagctccgttcttacccgtatgcattttctgtggcccggcctctgacttcggattccaagctggtatctctggaggtgaacaggctcccctgcacttccccatccggtagcaccaccacccagcctgcacccgatggggtccctgggcctttggcagatacctcccttgttactgcttctgccaaggtgcttccaactccacagcctctgctgccagcccccagtgggagctcagccccaccgcaccccgccaagatgcccagtggcaccgagcagcaaacagaagggacttccgttaccttctctcctcttaagtcaccgccacagctggaacgagagatggcctctccacctgagtgcagcgagatgccccttgatctgtcctccaagtccaaccgccagaagcttccattgccgaaccagcgcaagacaccccccatgcctgtgttgacccccgtgcacaccagcagcaaggccctcctctccacagtcctgtctaggtctcagcgcacaacccaggctgccggtggcaatgtcacctcctgcctgggctccacttcctcgccctttgtcatctttcccgagatcgtgaggaatggggacccgagcacctgggtgaagaactcaactgcactgatcagcaccattcctggcacctacgtgggagtggccaacccagtgcctgcatccctgctgctgaacaaagaccccaacctgggcctcaaccgtgacccccgccatctccccaagcaggagcccatctccatcattgatcaaggagagcctaagggcactggtgccacgtgtggcaaaaagggcagccaggctggtgctgagggacagccaagcacagtgaaacgatatactccagcccgcattgcccctgggctgccagggtgccaaaccaaggaactctctttgtggaaacccacggggccggcaaatatttatccccggtgttcagtcaatgggaaacctaccagcacccaggtcctgcctgttggctggtccccgtaccaccaggcgtctctgctttccattggcatttccagtgccgggcagctgacccccagtcagggggcgcccatcaggcccaccagcgttgtttcggagttttctggtgtgccatctctcagctccagcgaagccgtgcacggacttcctgaggggcaaccacggcctgggggctccttcgttccagagcaggaccctgttacaaagaacaaaacttgccggattgctgccaagccttatgaagaacaagtcaatcctgtcctcttgaccctcagccctcagactgggaccctggcactgtctgttcagcctagcggtggggacattcgaatgaatcaggggcctgaggaatcagagagccacctctgctctgacagcactcctaagatggaaggcccccagggggcttgtggcctgaagctggcaggagacacgaagcctaagaaccaagtgctggccacctacatgtcccatgagctggtcctggccaccccccagaacctgcctaagatgcctgagctgcctttgctacctcacgacagccaccccaaggaacttatattggacgtggttccgagcagcaggaggggctccagcacagagcgcccacagcttggaagccaggtggatctggggcgagtgaaaatggagaaggtggatggtgatgtggtcttcaatttagccacctgcttccgggctgatggcctcccagtggctccccagaggggccaagctgaagttcgggctaaggccgggcaggctcgagtgaaacaggaaagcgtaggggtctttgcttgcaagaacaagtggcagccagatgatgtgacggaatctctgccgcccaagaagatgaagtgcggcaaagagaaggacagtgaagagcagcagctccagccacaagccaaggccgtggtccggagttcccacagacccaagtgccggaagctgcccagtgacccccaggaatccaccaagaaaagccccaggggggcttcagattcaggaaaagagcacaatggagtcaggggaaagcacaagcaccggaagccgacaaagccggagtcccagtctccaggaaaacgagccgacagccacgaggaaggttccttggaaaagaaagcaaagagcagtttccgtgactttattcctgtggttctgagcacccgcacgcgcagtcagtctggaagcatctgtagctcctttgctggcatggcagacagtgacatgggaagccaggaagtcttccccacagaagaagaagaggaggtaacccccaccccagctaagcgtcgaaaggtgagaaagacccaacgggacacccagtatcgcagccaccatgcccaggacaagtctctgctgagccagggccgaaggcacctgtggcgagcccgagaaatgccctggaggacagaggctgcccggcaaatgtgggacaccaatgaggaggaggaggaagaagaggaggagggcctgctgaagaggaagaaacgaagacggcagaagagccgaaaatatcagactggggagtacctgacagagcaagaagacgagcagcggcggaaagggagagcagatttaaaggcccgtaagcagaagacttcctcctcccaaagtttggagcaccgcctcaggaacaggaaccttctcttgcccaacaaagtccaggggatctcggattcaccaaacggtttcctcccaaataacctggaagagccagcctgccttgaaaattcagaaaagccatcaggaaaacgaaagtgcaagaccaagcacatggcaaccgtctcagaagaggcaaaggatgttgttctctactgcctccagaaagacagtgaagatgtgaatcaccgtgacaatgctggctacacagccctgcatgaggcttgttcccggggctggaccgacatcctgaacatcctgctggagcacggggccaacgtgaactgcagtgcgcaggacggcacgaggccagttcatgatgcggtggtcaatgacaacctggagaccatctggctcctgctgtcctatggggccgatcccacactggctacctactcgggtcagacagccatgaagctggccagcagcgacaccatgaagcgctttctcagtgatcacctctcggatcttcagggccgggcagagggtgatcccggtgtatcctgggatttttacagcagttctgtgttggaggaaaaagacgggtttgcctgtgacctcctacataatcctcctgggagctcagatcaagaaggagacgatccgatggaggaggatgatttcatgtttgaactctcagacaagcctcttctcccttgctacaacctccaagtgtcagtgtcccgcgggccctgcaactggttcctcttttccgatgtcttgaagaggctgaagctttcctcgaggatctttcaggcccggttcccgcactttgaaatcaccaccatgcccaaggccgagttctacaggcaggtggcctccagtcagctgctgacccctgccgagaggcctggaggcttggacgacagatcccccccaggctcctctgagactgtggagctggtgcggtacgagccagacctacttcggctcctagggtccgaggtggaattccagtcttgcaacagttgaccgggaaaacagcccctcctcttctttctccttccgagttcgcccttcccccacctccttgtctttccccgaccgagcaccagactgcagaatgaggcaataatacggaccaacaagaagccgccttatcaatgccagcattagcgactggactgtttttgtttttttggttacaattagttctcatctccctgtcgtcgtcattgttatcgtggttgctgatgggggtggaaagttgaactccatgtctgaggacaagaggtcccgggggtggtgggaggtggcgccggggtcccttggactggcctccttgttcatgaccaagaccaaacctgggccctggatggccttggcctgtcccgaggagaaatgagaaaatcccagatctctgagcgccccccaactccattcccctgtgttcttctgtcttctgtagtatttattttattagtatttaatttgtattgtttcattggtttctgataagtctgtatcactgtgacgatttgagacaacttgttgtattgagggactttctgtacctccttttctttttctttgttgatgagctctgacaaagctattccctggtgtttttttcccccactggggagggggtgaggtggaatggggtgggggaacatggacttgtgactaacgaagctggttgctgctggcccagggctgggggcttgggggtaaatcctgaggctttggtgctcccccacccacccattcccgccctttgcagcagccccgctatcttgagattagtgttgacagggaggggaggattgtgaggtgaggggttaataagttactctaataaaggagcgtggagaagggatctgaggggtgagggtggcccccctcctcacgccttcttcactgcccccctcagagtgcacaatacgagtttgttcctgcctccactctcccaccccgttctggcctccctgtctcaagatactgagcctctcacctcccagccctcagccacccccatccctgccccttctgagactcacagcacccctttccttcctctcctcccacctcctccctcagcccctcattctccttgggaatctgcagagggctctgggactcactgccggatgtgaaatccaggcgtcagctgtttcctaggcaagggcaggaaagtggtctccagcccttgctccactcatgcctgggggcctggggctgagtggtatccctacctggcctccccctggcctctgggcctccagcgctgggtttgtcgagtgagagagagagaggagcttgggttgcttccctgtccccgccccctctgtggcattgtccctcccactcttatttttctaccaattgctatttttccgaacaatccttgtagagtatgtaccatccaaaggcaggagggcctcgccgtggccggctctggttggagatggtacagttttattgtacaggtgctaaaacaacaacaacaaaaaagaaaatgg

SEQ ID NO: 30573 - DNA, 5300 bp, Homo Sapiens
ctcgcccctccgcgctcgcaacttcggcctcccccggctcccgcccgctctccctcctttgttgcgcgatgagggtcgggtttcggatctgaccgagccgccgccgcgggatggagccgctcagccaccggggcctgccgcgcctgtcctggatcgacaccctctacagcaacttcagctacgggacggacgagtacgacggagaggggaatgaggagcagaaggggcccccggagggctcagagaccatgccgtacatcgatgagtcgcccaccatgtccccgcagctcagcgcccgcagccagggcgggggggatggcgtctccccgactccacctgagggactggctcctggggtggaagcagggaaaggcctggagatgaggaagctggttctctcggggttcttggccagcgaagagatctacattaaccagctggaagccctgttgctgcccatgaaacccctgaaggccaccgccaccacctcccagcccgtgctcaccatccagcagatcgagaccatcttctacaagatccaggacatctatgagatccacaaggagttctatgacaacctgtgccccaaggtgcaacagtgggacagccaggtcaccatgggccacctcttccagaagctggccagccagctcggtgtgtacaaagcgtttgtcgataactataaagtcgctctggagacagctgagaagtgcagccagtccaacaaccagttccagaagatctcagaggaactcaaagtgaaaggtcccaaggactccaaggacagccacacgtctgtcaccatggaagctctgctctacaagcccattgaccgggtcactcggagcaccctagtcctacacgacctgctgaagcacacacctgtggaccaccccgactacccgctgctgcaggatgccctccgcatctcccagaacttcctgtccagcatcaacgaggacatcgacccccgccggactgcagtgacaacgcccaagggggagacgcgacagctggtgaaggacggcttcctggtggaagtgtcagagagctcccggaagctgcggcacgtcttcctctttacagatgtcctactgtgtgccaagctgaagaagacctctgcagggaagcaccagcagtatgactgtaagtggtacatccccctggccgacctggtgtttccatcccccgaggagtctgaggccagcccccaggtgcaccccttcccagaccatgagctggaggacatgaagatgaagatctctgccctcaagagtgaaatccagaaggagaaagccaacaaaggccagagccgggccatcgagcgcctgaagaagaagatgtttgagaatgagttcctgctgctgctcaactcccccacaatcccgttcaggatccacaatcggaatggaaagagttacctgttcctactgtcctcggactacgagaggtcagagtggagagaagcaattcagaaactacagaagaaggatctccaggcctttgtcctgagctcagtggagctccaggtgctcacaggatcctgtttcaagcttaggactgtacacaacattcctgtcaccagcaataaagacgacgatgagtctccaggactctatggcttccttcatgtcatcgtccactctgccaagggatttaagcaatcagccaacctgtactgtaccctggaggtggattccttcggctattttgtcagcaaagccaaaaccagggtgttccgggacacagcggagcccaagtgggatgaggagtttgagatcgagctggagggctcccagtccctgaggatcctgtgctatgagaagtgctatgacaagaccaaggtcaacaaggacaacaatgagatcgtggacaagatcatgggcaaaggacagatccagctggacccacaaaccgtggagaccaagaactggcacacggacgtgattgagatgaacgggatcaaagtggaattttccatgaaattcaccagccgagatatgagcctgaagaggaccccgtccaaaaagcagaccggcgtcttcggtgtgaagatcagcgtggtgacgaagcgggagcgctccaaggtgccctacatcgtccggcagtgtgtggaggaggtggagaagaggggtatcgaggaggttggcatctacaggatatcgggcgtggccacggacatccaggcgctcaaggccgtcttcgatgccaataacaaggacatcctgctgatgctgagtgacatggacatcaacgccatcgccgggacgctcaagctgtacttccgggaactgcccgagccgctcctcacggaccgactctacccagccttcatggagggcatcgccctgtcagaccctgctgccaaggaaaactgcatgatgcacctgctccgctccctgcccgaccccaacctcatcaccttcctcttcctgctggaacacttgaaaagggttgccgagaaggagcccatcaacaaaatgtcacttcacaacctggctaccgtgtttggacccacgttactgagaccctcagaagtggagagcaaagcacacctcacctcggctgcggacatctggtcccatgacgtcatggcgcaggtccaggtcctcctctactacctgcagcacccccccatttccttcgcagaactcaagcggaacacactgtacttctccaccgacgtgtagcccgaggcagggtggctgcgggcgggtggtggaaccagcccctccagcctggggtccaactcagacttgaaagactgcaatagaaaactcccaaacccagcactccagactcgagggaagccagcttccaagaactggaatgcgtacgtcttttgtgccaccttgtacaaagccggctgcccagccccagcctcaccaccgcatcccacctcctgccctccatacctctagttgtgtctgatgctccgtgctgttcgggaattgttttatgtacacttgtcaggcagaaaaggtagtgaccggcccggcgtgggcacacagacagcccgctttgttctttcatttcctccagcactttctttccgcctgagtccagcccaaggccttttattttgcgctgtgtaactgctgccagcttctctcttggccctgctcccagatggcggtctcctggcagcctcccctcagtcttcctccacccgctcttccttcccagcctgcctgcatgcatgtgcacccttggtcttcgctccatcgccttgaaagctctgaagaggccctgggttgccgcggcagcagtggtctgtttgatgctgccgtttgccgctgccggcccctcctcagactccgcctttgggagcacacctgctttgccttgctgcctgtgcaaatgttggacaagcagacacactcacactcgtccccagcttagcacagagctggagcgcccatttctggaattttccgtttgggaatctccacttctggggtttacctgttcggcctcctgtctatcagtgaggcatctctgactgtttcttctactgcttttcagttcccttccctgctgttctatttcctttgagtgtaaagactcacaggtgacctgctatcgagatagccagagggtcaggagagaatgggggaggaggcggtcaggctgctgaggaaacaccacaggctgaacgggggaggaatgcacatgccacgctgggtgtcccgggtcgcggggaggcagctcagctcttaggagcaagttgtgggggcttttcaagaggggccaggcttcctggagggtgactgatgtggccgaagcaggtgtccaggcaggtaggctgcagccaggagctccctggcaccgcaggacctcgtggtactcttgccttagattttacacacactccacagccaagcactgccacggtcctccaggacctgggaagcaaaggcacaggcccacggtggccagccattgtggtgccgccccagcttctggatacagccttttgggtaaacactgggaactccagaagttgtggggagagtggggaatcagacagccgcctctaggggctgggttctgctggggcctccttgttggtgctgtaggcacccgccagggagcagggacccgacttgcagacgcattgcccggtactaggaaggagtgaggtgtgttcccaccgtacacttcccacacgagctgcggctgccagcctcgggccatcagcctaggagagcagatgcagctccaggggctcgacttatagccagttacagctccccggctcttctgtgtggcagagcgtcgtttccgggccctcagggctggggagctcagttcccattgcttgtgctcagggctgagtcttaaagaagggtttgccggccctaacgctgcagcgcgtgcgcggtgagaggccctttttgagcctgtttactcctgtggccttgggcagaacagtaaatactctgtgcacggaggaaagacatgcccaagaggaaggaagtactgaccatcggctgcctgtgagcagcttagcaaggagcccttgctccctgggaaaggcggtgaacttgagtctaaagatgcagtgcctggcccttcctaaggtccctgcctggcatccgagtgtcggtgtgtggcacagaaggctcctgcttgcttccaaagtgatggacaggaaggggcagagtgagtcacggcccagactgggcaccttcgcgtctcagcctcagggagccccacagccccaagctcgctgaggcaacgtgagaacaggctatgggaaggctgcaaaggctgagaaatgcaaaggctcatatttataaatcccacccccagagtggggagggtcaggtgccagacctggactaaactgcaccaaggaaacacccagcagggtctcctgtgagccggggaccatgcagcccgaaacctccagtcactgcgcccggcaggagtcaggagccagggactgtgcagcctggaacctccagtcactgtgcccagcagggtgggctgtgcccagcaggagtcaggctaagaaacgccaggtctgcctgttcttgctgggcaatggctgatggctgccagtttctgctgatacacaggtaggatgggacccttcatgaatatctgactttaataagttggtaaggatatatttttttgtctatgttctgtttcaacttatgtagattattataaattgatgtaaaccacgtgagaggaaaatgttaataaaaaatgcaaagccccatcatttgcacaaaactcaaaaaaaaaaaaaaaaaaaaaaaaaaaaaaaaaaaaaaaaaaaaaaaaaa

SEQ ID NO: 30574 - DNA, 2496 bp, Homo Sapiens
ctctcttgcctgccgccatgtgcctttcgccttctgccgtgattgtgaggcctccccagccatatggaagttcaggatgtctgcccgtggcccggctatcggcatcgacctgggcaccacctattcgtgcgtcggggtcttccaacatggcaaggtggagatcatcgccaacgaccagggcaatcgcaccacccccagctacgtggccttcacggacaccgagcgcctcatcggcgacgccgccaagaaccaggtggccatgaaccccaccaacaccatcttcgacgccaagaggctgattggacggaaattcgaggatgccacagtgcagtcggatatgaaacactggccgttccgggtggtgagcgagggaggcaagcccaaagtgcaagtagagtacaagggggagaccaagaccttcttcccagaggagatatcctccatggtcctcacgaagatgaaggagatcgcggaagcctacctggggggcaaggtgcacagcgcggtcataacggtcccggcctatttcaacgactcgcagcgccaggccaccaaggacgcaggcaccatcacggggctcaatgtgctgcgcatcatcaacgagcccacggcggcggccatcgcctacggcctggacaagaagggctgcgcgggcggcgagaagaacgtgctcatctttgacctgggcggtggcactttcgacgtgtccatcctgaccatcgaggatggcatcttcgaggtgaagtccacggccggcgacacccacctgggcggtgaggacttcgacaaccgcatggtgagccacctggcggaggagttcaagcgcaagcacaagaaggacattgggcccaacaagcgcgccgtgaggcggctgcgcaccgcttgcgagcgcgccaagcgcaccctgagctcgtccacgcaggcgagcatcgagatcgactcgctctacgagggcgtggacttctatacgtccatcacgcgcgcccgcttcgaggagctcaatgccgacctctttcgcgggaccctggagccggtggagaaggcgctgcgcgacgccaagctggacaagggccagatccaggagatcgtgctggtgggcggctccactcgtatccccaagatccagaagctgctgcaggatttcttcaacggcaaggagctgaacaagagcatcaaccccgacgaggcggtggcctatggcgccgcggtgcaggcggccatcctcatcggcgacaaatcagagaatgtgcaggacctgctgctactcgacgtgaccccgttgtcgctgggcatcgagacagctggcggtgtcatgaccccactcatcaagaggaacaccacgatccccaccaagcagacgcagaccttcaccacctactcggacaaccagagcagcgtactggtgcaggtatacgagggcgaacgggccatgaccaaggacaataacctgctgggcaagttcgacctgaccgggattccccctgcgcctcgcggggtcccccaaatcgaggttaccttcgacattgacgccaatggcatccttaacgttaccgccgccgacaagagcaccggtaaggaaaacaaaatcaccatcaccaatgacaaaggtcgtctgagcaaggacgacattgaccggatggtgcaggaggcggagcggtacaaatcggaagatgaggcgaatcgcgaccgagtcgcggccaaaaacgccctggagtcctatacctacaacatcaagcagacggtggaagacgagaaactgaggggcaagattagcgagcaggacaaaaacaagatcctcgacaagtgtcaggaggtgatcaactggctcgaccgaaaccagatggcagagaaagatgagtatgaacacaagcagaaagagctcgaaagagtttgcaaccccatcatcagcaaactttaccaaggtggtcctggcggcggcagcggcggcggcggttcaggagcctccgggggacccaccatcgaagaagtggactaagcttgcactcaagtcagcgtaaacctctttgcctttctctctctctctttttttttgtttgtttctttgaaatgtccttgtgccaagtacgagatctattgttggaagtctttggtatatgcaaatgaaaggagaggtgcaacaacttagtttaattataaaagttccaaagtttgttttttaaaaacattattcgaggtttctctttaatgcattttgcgtgtttgctgacttgagcatttttgattagttcgtgcatggagatttgtttgagatgagaaaccttaagtttgcacacctgttctgtagaagcttggaaacagtaaaatatataggagcttaaattgtttatttttatgtactactttaaaactaaactgaacattgcagtaatgttaaggacaggtatactttttgcaaacaaatgcataaatgcaaatgtaaagtaaagctgaaattgatctcaaaaaaaaaaaaaaaaaaaaaaaaaaaaaaaaaaa

SEQ ID NO: 30575 - DNA, 3405 bp, Homo Sapiens
gctgctcgcgggagccagagggccctgcggtcctcggtggtcttgccagcccctcgtcatcccagggccctccgcgcctgtgaggactccctcaggtcggccacgggacctgacgcaacaggatggacgagtcccctgagcctctgcagcagggcagagggccggtgccggtccgacggcagcgcccagcaccccggggtctgcgtgagatgctgaaggccaggctgtggtgcagctgctcgtgcagtgtgctgtgcgtccgggcgctggtgcaggacctgctccccgccacgcgctggctgcgtcagtaccgcccgcgggagtacctggcaggcgacgtcatgtctgggctggtcatcggcatcatcctggtgccgcaggccatcgcctactcattgctggccgggctgcagcccatctacagcctctatacgtccttcttcgccaacctcatctacttcctcatgggcacctcacggcatgtctccgtgggcatcttcagcctgctttgcctcatggtggggcaggtggtggaccgggagctccagctggccggctttgacccctcccaggacggcctgcagcccggagccaacagcagcaccctcaacggctcggctgccatgctggactgcgggcgtgactgctacgccatccgtgtcgccaccgccctcacgctgatgaccgggctttaccaggtcctcatgggcgtcctccggctgggcttcgtgtccgcctacctctcacagccactgctcgatggctttgccatgggggcctccgtgaccatcctgacctcgcagctcaaacacctgctgggcgtgcggatcccgcggcaccaggggcccggcatggtggtcctcacatggctgagcctgctgcgcggcgccgggcaggccaacgtgtgcgacgtggtcaccagcacggtgtgcctggcggtgctgctagccgcgaaggagctctcagaccgctaccgacaccgcctgagggtgccgctgcccacggagctgctggtcatcgtggtggccacactcgtgtcgcacttcgggcagctccacaagcgctttggctcgagcgtggctggcgacatccccacgggtttcatgccccctcaggtcccagagcccaggctgatgcagcgtgtggctttggatgccgtggccctggccctcgtggctgccgccttctccatctcgctggcggagatgttcgcccgcagtcacggctactctgtgcgtgccaaccaggagctgctggctgtgggctgctgcaacgtgctacccgccttcctccactgcttcgccaccagcgccgccctggccaagagcctggtgaagacagccactggctgccggacacagctgtccagcgtggtcagcgccaccgtggtgctgctggtgctgctggcgctggcaccgctgttccacgacctacagcgaagcgtgctggcctgcgtcatcgtggtcagcctgcggggggccctgcgcaaggtgtgggacctcccgcggctgtggcggatgagcccggctgacgcgctggtctgggcaggcaccgcggccacctgtatgctggtcagcacagaggccgggctgctggctggcgtcatcctctcgctgctcagcctggccggccgcacccaacgcccacgcaccgccctgctggcccgcatcggggacacggccttctacgaggatgccacagagttcgagggcctcgtccctgagcccggcgtgcgggtgttccgctttggggggccgctgtactatgccaacaaggacttcttcctgcagtcactctacagcctcacggggctggacgcagggtgcatggctgccaggaggaaggaggggggctcagagacgggggtcggtgagggaggccctgcccagggcgaggacctgggcccggttagcaccagggctgcgctggtgcccgcagcggccggcttccacacagtggtcatcgactgcgccccgctgctgttcctagacgcagccggtgtgagcacgctgcaggacctgcgccgagactacggggccctgggcatcagcctgctgctagcctgctgcagcccgcctgtgagagacattctgagcagaggaggcttcctcggggagggccccggggacacggctgaggaggagcagctgttcctcagtgtgcacgatgccgtgcagacagcacgagcccgccacagggagctggaggccaccgatgcccatctgtagcagggccaggcctgcccagcagcctctgctccctcctggggacccacagcagacgtctgcaagccactgctgagacccttcccagggaggagccacccaagagctgcactcttgtgccacagctgccctggggaaaccggggaaccccaactgggaaaggaggccctctgatcacacgcaggacccaaacactcagaaatcaagaacctctgcctccgagacaggctggcccacagtgctggctgggccccaatgcaccgtccctcagctcaggagggatgggcctgacctgacgctcagggttgacatcttatttgaacaagggtcccccgccatcatgcagcctccaaggtgccaagaggactccctatgcccaggcctgcccggtgcccaccctgctggtaggagccagcggctctggccaagtgcacgagggtctctgtgtttccagaaggccccacacacccaagtgcccctcacacctcgtgcctccccctcacagggtggccacctgcaccagcgtcagggcccagggtgctgtgaccgatgagacctcagctcagccctcaggtgcagtggccctacccagcctggccagcagacacacacagggatgctcacgggtgcaccaggagccaggtgcggcgcagccaaccctgagcctgcagggagacctgcaggaagcccaccgtgccccatgcaggggctccctccagcacacagccctcaccccagcacagccagcaaggacacgctctccccaacagggtgcttcggcgggaggtgggggaacaaggggtcttccgagcagcccccagccctcccctcccatctgtgcctctgtaaggggctctgggacgcccagaccctgcccgccgcccacctggtggtgacaagctccagcagccagtgggtccggacctgcttgatgccgcggtgagggacggcgcccacataggcgaggttgagctgctggtcccagctgaggacgtactggtcagcctggctgtgtggcagcggggggctggggacaacaaaggggcggctcagtcccgagcctcagcatggctggcagcgcggctgacacacacgttcaagcccaggactgcccgggcgcaggatccaggcgctgcccgtgcgttcagtgactaataaaatgacccttagggccaggaaa

SEQ ID NO: 30576 - DNA, 3081 bp, Homo Sapiens
gatgtggaagccgagacctaaagttggggggtgatctctgaggagatggatcggtacctgctgctggtgatctggggggaaggaaaattcccgtcggcggccagtagggaggcagaacatgggccagaggtgtcgtcgggtgagggtactgagaatcagccggacttcacagcagcaaatgtttatcacctcttgaaaagaagcattagtgcttcaattaatccagaagatagtactttccctgcctgttcagtgggaggtatacctggttccaagaagtggttctttgcagtgcaggcaatatatggattttatcagttttgtagttctgattggcaagagatacattttgatacagaaaaagataaaattgaagatgttcttcaaacgaatatcgaagaatgtttgggtgctgttgagtgttttgaagaagaagacagtaatagcagggaatcattatccttggctgatctctatgaagaagctgcagaaaatttgcatcagctgtcagacaagcttcctgctcctggtagagcaatggtagatataatactgttgctttctgacaaagatcctcctaaattgaaagactatttacctactgtaggagcattaaaacatttgagagaatggtattcagcaaagatcactatagcaggaaatcattgtgaaataaactgtcagaaaattgcagaatacctttctgctaatgttgtatctttagaagatctcagaaatgttattgactcaaaggaattatggagggggaaaatacagatatgggaaagaaagtttggatttgaaattagttttcctgaattttgtttaaagggagtcacacttaagaattttagtacttctaatttaaatactgacttccttgccaaaaagatcataccatcaaaggataagaatattttgccaaaggttttccattattatggccctgctttagaatttgtgcagatgataaaattatcagatctaccctcctgctatatgtcggatattgaatttgagttaggattgacaaacagtaccaaacagaattctgtgttgctgttggagcagatttcttctctgtgtagcaaggttggtgctctttttgtattgccatgtaccattagtaacatactgattccacctcccaaccaactcagttcaagaaaatggaaggaatatatagctaaaaagcctaaaacaatcagtgttccagatgttgaagtgaaaggagagtgttctagctattatctcttgttacaaggtaatggcaatagaagatgtaaagccacattgattcactcagccaaccagatcaatggctcatttgcactcaatttaattcatggaaagatgaaaacaaagacagaagaagccaaattgagttttccttttgacttattatcacttccacatttttctggggagcagattgtacagagagagaaacagttagctaatgttcaagttttagctttggaagaatgcctaaaaagacgaaagttggcaaagcagcctgaaacagtttctgttgctgaactcaaaagtctgttagtactcacaaggaaacactttttagattattttgatgctgtgattcctaaaatgattctaagaaagatggacaaaattaaaaccttcaatatattaaatgattttagtccagtggaacctaattcctcaagtctaatggaaaccaatcctctggaatggccagaaaggcatgttcttcaaaatttggaaacttttgaaaaaactaaacaaaaaatgagaactggttcattacctcattcatctgaacagttgctgggccacaaagagggtcctcgggactcaatcacattgttggatgctaaagaattgctgaagtactttacctcagatggattacccattggagatcttcaacctttaccgattcaaaagggggaaaagacttttgttttgacaccagaacttagtcctgggaaacttcaggtcttaccttttgagaaagcctcagtatgtcattatcatggaattgaatattgcttggatgaccgaaaagctttggaaagagatggaggattttctgaacttcagtctcgtcttattcgttatgaaactcaaactacctgcaccagagaaagttttccagtacctactgtgttgagccctcttccatctcctgtagtttcgtcagatcctggaagtgtccctgacggagaagttttacaaaatgaacttcgaactgaagtatcccgattgaaacggagatctaaagatctgaattgcctttatcccagaaaaagacttgtgaaatctgaaagttcagagtctcttctttctcagacaactggtaatagtaatcactatcatcatcatgtgacatccagaaagccacaaacagaacggtccttaccagtgacttgtccattggttccaattcctagctgtgaaactccaaaacttgctacaaagaccagttcaggtcaaaaaagtatgcatgaatcaaaaacatcaaggcaaattaaggaatcaagatcacagaaacacacacggatactgaaagaagtagttactgaaaccctgaagaaacacagtattaccgagactcatgaatgtttcactgcatgcagccagcgtctctttgaaatctctaagttctatctaaaggatcttaaaacttcaaggggtctatttgaagaaatgaagaaaacagcaaacaacaatgctgtacaggtgattgactgggtattagaaaagacaagcaagaaatgatacataatcattctctttaagacaattataaattggatggagctattattcactacttcttttcttagtttgaaaattataaacaaattttaagctttattcaaagaatagatgttatatttctaaagaatttcatgaatatatattctatatttgtatagtttgagggatgctatgttaatgtatttttaattagatacatattttgtaaagtgttactatattttaaagttatttttatatgttttaaaatgtttactcttatttaattattacaataaacagaatttttttttttttaaaaaaaaaaaaaaaaaaaaa

SEQ ID NO: 30577 - DNA, 5163 bp, Homo Sapiens
ttaggggcagaaaaacatttgtaataattaatggctttgagagacacaaggctttgtttgccccagagtattagttaacccacctagtgctcctaatcatacaatattaaggattgggagggacattcattgcctcactctctatttgtttcaccttctgtaaaattggtagaataatagtacccacttcatagcattgtatgatgattaaattggttaatatttttaaaatgcttagaacacagattgggcacataacagcaagcaccacatgtgtttataagataaattcctttgtgttgccttccgttaaagtttaaataagtaaataaataaataaatacttgcatgacattttgaagtctctctataacatctgagtaagtggcggctgcgacaatgctactggagttccagaatcgtgttggtgacaagattgttcaccagcatatggtgtggtgaaaactcactaatttggaattagttcagattattaagcctgaataggtgaaaatcctgaaatcaaggatctttggaactatttgaaatcagtattttatattttcctgttgtattcattaaagtgttgcaagtgttctatttgatggattaagtatatttaggatatacatgttcaatttgtgattttgtatacttaattggaacaagaaagctaataaaggttttgatatggacatctattcttttaagtaaacttcaatgaaaatatatgagtagagcatatagagatgtaaataatttgtggacacaccacagactgaaatagcaaatttaaaagaaattgttggaagaatcaagtgtttgtggaatgagtcctcctagtaaagttcctgctcttgtgaataattaagcctcatgtataattactatagcaaaaggaagcctaagaagtattagactctacttgtatttaaattacattttacataatttatgtgtatgaaaaatgttttaaatgcttattttcgtaagccatgagatagctcctttatattttaagaatttctgaattaatttgcttggattttattagtgcaaatggcagagctagcaattcctttttctgtgttcccattccatcctattcatccctcttttaggaaactctgaactctggattgtccttgtttacatacctgcctcctgcattggactatgtgtctctgagtgtagtatgactaattcatttgtttgtcaaggactctcaatgcatttgttgaacagcctaattagtaatgtctgcaacaatgacattttactgtatttaataaagctctgggaaagtaggatacacataagacaggtctaggtctaaattctttacagaaacttggatttttagttcggtttgaaatttgaagatgtgagtatatttatctcagtttcccaaaggacaagctaattggaattatcatcctctttcacttgattggatccccagaatgccatttacgcatgcagcaggattttataacagttttaaattctgtatatttgatgaagaggttttatatttttggattcaagcctctttttaaacttctacaatatggtttacaataattccttatatcctgcttttgaaatacatattacaactttttaagtttggaaggctatatttcaaggactgaagttacagtatactcaagtgatacacaagcctagcaccccactttccacatagtgttcgataaagattgataaactcgaaatcacagaccttttaattcttaagacaaatagcagcagaaagaaacatctttggcttatttctggtaaggtttttatgctctgtaaaacaaagaattgtattcatccgcgcagcacagattctattaaaaataaatgtgagagtcgttaatgtagtactgctcatttaccatcaaaattcacttttcaggaataatcccatcagtttaaattggatattggaatgagcattgattacatttaacttggtagcccaaaatttcttcatggggttttgaactcggcgggatttcaaaggttttaaaaatgagtttttgattttttttaaaaccctcaaatttcattacctttaaactaggtcgaaacggggcgcaagagattggattaacaccatagtaatacttattttgttcttaaccatttcagggcttcttgaaatagaggctgtatggtgtaatggaaaaaacagccttggaatctgggagcctgattcctggattcagtcccagttttgcgtgaccttgggcaagttactttacttctctgaatttccgtttcctcctctgcaaaatgaggatcgcaatagccaccttgcaaccttgactggagcgagcctcgcacaccccgcgccggcctggaggaagagcagccatgattacgccgccttcgctccgctacccgcttgcggctggcgccctcctccagcaggtgtaggcgctgccgcgctgccccacgcctttccgccgctcgcgggcctgcgcctcggcgtccccgaggaggccgctgcgggctgaggtagcgcaccggcctctcggcgtcccagtccggtcccgggcggagggaaagcgggcgacccacctccgaggcagaagccgaggcccggccccgccgagtgcggaggagcgcaggcagcccccgcccctcggccctccccccggccctcccggccctccctccgccccctccgccctcgcgcgccgcccgcccgggtcgccgcggggccgtggtgtacgtgcagagcgcgcagagcgagtggcgcccgtatgccctgcgctcctccacagcctgggccgggccgcccgggacgctgaggcggcggcggcggccgagggggccggtcttgcgctccccaggcccgcgcgcctgagcccaggttgccattcgccgcacaggccctattctctcagccctcggcggcgatgaggcgctgaggcggctgccggcgctgcgccggagcttaggactcggaagcggccgggccgagggcgtggggtgccggcctccctgaggcgagggtagcgggtgcatggcgcagtaacggcccctatctctctccccgctccccagcctcgggcgaggccgtccggccgctacccctcctgctcggccgccgcagtcgccgtcgccgccgccgccgccgccatggccaatgacagcggcgggcccggcgggccgagcccgagcgagcgagaccggcagtactgcgagctgtgcgggaagatggagaacctgctgcgctgcagccgctgccgcagctccttctactgctgcaaggagcaccagcgtcaggactggaagaagcacaagctcgtgtgccagggcagcgagggcgccctcggccacggagtgggcccacaccagcattccggccccgcgccgccggctgcagtgccgccgcccagggccggggcccgggagcccaggaaggcagcggcgcgccgggacaacgcctccggggacgcggccaagggaaaagtaaaggccaagcccccggccgacccagcggcggccgcgtcgccgtgtcgtgcggccgccggcggccagggctcggcggtggctgccgaagccgagcccggcaaggaggagccgccggcccgctcatcgctgttccaggagaaggcgaacctgtaccccccaagcaacacgcccggggatgcgctgagccccggcggcggcctgcggcccaacgggcagacgaagcccctgccggcgctgaagctggcgctcgagtacatcgtgccgtgcatgaacaagcacggcatctgtgtggtggacgacttcctcggcaaggagaccggacagcagatcggcgacgaggtgcgcgccctgcacgacaccgggaagttcacggacgggcagctggtcagccagaagagtgactcgtccaaggacatccgaggcgataagatcacctggatcgagggcaaggagcccggctgcgaaaccattgggctgctcatgagcagcatggacgacctgatacgccactgtaacgggaagctgggcagctacaaaatcaatggccggacgaaagccatggttgcttgttatccgggcaatggaacgggttatgtacgtcatgttgataatccaaatggagatggaagatgtgtgacatgtatatattatcttaataaagactgggatgccaaggtaagtggaggtatacttcgaatttttccagaaggcaaagcccagtttgctgacattgaacccaaatttgatagactgctgtttttctggtctgaccgtcgcaaccctcatgaagtacaaccagcatatgctacaaggtacgcaataactgtttggtattttgatgcagatgagagagcacgagctaaagtaaaatatctaacaggtgaaaaaggtgtgagggttgaactcaataaaccttcagattcggtcggtaaagacgtcttctagagcctttgatccagcaataccccacttcacctacaatattgttaactatttgttaacttgtgaatacgaataaatgggataaagaaaaatagacaaccagttcgcattttaataaggaaacagaaacaactttttgtgttgcatcaaacagaagattttgactgctgtgactttgtactgcatgatcaacttcaaatctgtgattgcttacaggaggaagataagctactaattgaaaatggtttttacatctggatatgaaataagtgccctgtgtagaatttttttcattcttatattttgccagatctgttatctagctgagttcatttcatctctcccttttttatatcaagtttgaatttgggataatttttctatattaggtacaatttatctaaactgaattgagaaaaaattacagtattattcctcaaaataacatcaatctatttttgtaaacctgttcatactattaaattttgccctaaaagacctcttaataatgattgttgccagtgactgatgattaattttattttacttaaaataagaaaaggagcactttaattacaactgaaaaatcagattgttttgcagtccttccttacactaatttgaactcttaaagattgctgctttttttttgacattgtcaataacgaaacctaattgtaaaacagtcaccatttactaccaataacttttagttaatgttttacaagg

SEQ ID NO: 30578 - DNA, 2543 bp, Homo Sapiens
tcccgggtcagctggtgctggcgtcaggcgctgggcgggctcgccaggacctggcaaggcttgtttactatggccgatgatctggagcagcagtctcaaggctggctgagtagctggctgcccacgtggcgccccacttccatgtctcagctgaagaatgtggaagccaggatcctccagtgtctccagaataagttcctggccagatatgtatccctcccaaaccagaataagatctggacggtgactgtgagccccgagcaaaacgaccgcacccccttggtgatggtgcatggttttgggggcggcgtgggtctctggatcctcaacatggactcactgagtgcccgccgcacactgcacaccttcgatctgcttggcttcgggcgaagctcaaggccagcattcccaagggacccggagggggctgaggatgagtttgtgacatcgatagagacatggcgggagaccatggggatccccagcatgatcctcctggggcacagtttgggaggattcctggccacttcttactcaatcaagtaccctgatagagttaaacacctcatcctggtggacccatggggctttcccctccgaccaactaaccccagtgagatccgtgcacccccagcctgggtcaaagccgtggcatctgtcctaggacgttccaatccattggctgttcttcgagtagctgggccctgggggcctggtctggtgcagcgattccggccggacttcaaacgcaagtttgcagacttctttgaagatgataccatatcagagtatatttaccactgcaacgcacagaatcccagtggtgagacagcattcaaagccatgatggagtcctttggctgggcccggcgccctatgctggagcgaattcacttgattcgaaaagatgtgcctatcactatgatctacgggtccgacacctggatagataccagtacgggaaaaaaggtgaagatgcagcggccggattcctatgtccgagacatggagattaagggtgcctcccaccatgtctatgctgaccagccacacatcttcaatgctgtggtggaggagatctgcgactcagttgattgagctgctctctgaagaggaagaggagaaagccagagagtcactcttacctccctgtctgcttactcacccactctgtcctttcctcaccaactaacatgtgccagccaggcagagtcttgtgctgttcccagaacaggacgacagtgaaaagaacactcttgaccctacactgaaggctgaaggcagaagccacaagaggccttgagtgccacccccagggaagaacataaagggttgcacaatgccacccatccactccttgccaagtgttacccagatggtggaggatgtgaagggattgcaccaagccacattcactctctctgtggcctttcttcctctgggcaaagaagggcttccagtggcctttcctcactctgtagtgtttgtggggataggttccatgcaagaacaccttcctcctccatcccccacttcaccccatcccataccagttccatccagggtctgcttaactgccaagagcaggtcctggagttcccttcacctgcagagtccttttcatgacctaggaggtcttattcaaagccctcattgacagaggaggaaacaggccaaggcaggacatggctggaccatggtgatacagctctgtgtgattcaagttctggcagagcttgtaaggctagagcccaggtctgccgacaccctgtgcttgttgcacacttgatttgctaaggctggagacaggcaccattgccatggggctggtcctagtcactggccgaggataagcccgtccctgtcccacattctagccccactatgcgggggtgctgttgtcctgcctgtgtctcatccccggctgcctaagctagggacactcaagtgcttccttccttgccccatcttcctcccaactggaggcctctgagcctcccctgtgccttgggccctgaagccccatatgtagtatagagcaaaggtggctcctggtgaagagagggtggaaaggcccttcagccccagggccatgtctgggttctccatgcccatcagtctctgcagtttctctacctgcccccagagctgaggccatctgcaagcccctgcccatggcccaatggggagcctccagccacaagttccctgtccttatcagccactgggtggttcccactgcatgaccctctatccctgccatctgtccccatggtttccagctcaatccacccctgacccatctgtcagctttttcccagggagccgtttcaggggttctgggcagtaggctgggcctggcctcagaacctggtggctcctgcctgctccttcacttttgtaaaaccatccccttcaccagaatggtattaactcctggtgctttgtactactggtccagctgccctgggctccttttctatattaataaagaaacgagtaaaaattaaaaaaaaaaaaaaaaaaaaaaaaaaaaaaaaaaa

SEQ ID NO: 30579 - DNA, 2329 bp, Homo Sapiens
caaaagggaactttatatggaaaagcttcaagaacatttaatcaaagcaaaagcctttaccataaagaagacgctggagatctatgtgcccatcaaacagttcttttacaacctcatccacccggagtatagcgccgtgactgacgtgtatgtactcatgttcctggctgacactgtggacttcatcatcattgtcttcggcttttgggcctttgggaaacactcagcagctgcagacatcacctcttcactgtcagaggaccaggtcccggggccgtttttggtgatggtcctcattcagtttggaaccatggtggtggaccgagccctctacctcaggaagactgtactgggaaaggtcatcttccaggtcattcttgtgttcggaattcacttctggatgttcttcatcttacctggtgtgactgagaggaaattcagccagaacctggttgcccagctttggtactttgtgaaatgtgtttacttcgggttgtctgcttaccagatccgttgtggctacccaacgcgagtcctggggaacttcctcaccaagagctacaattacgtcaacctcttcttattccaagggtttcgcctcgtgccctttttgactgagctgagggcagtgatggactgggtgtggacggacacaactttgagcctgtccagctggatctgtgtggaggacatctatgctcacatattcatcctgaagtgttggcgggagtcggagaagcctattttcacaatgagtgcccaacaaagccagttgaaagttatggaccagcagagctttaacaaatttatacaagctttttctagggacaccggtgctatgcaatttctggaaaattatgaaaaagaagacataacagtagcagaactggaaggaaactcaaattctttgtggaccatcagcccacccagtaagcagaaaatgatacacgaactcctggaccccaatagtagcttctctgttgttttttcatggagtattcagagaaacttaagtctgggtgcaaaatcggaaatagcaacagataagctttcttttcctcttaaaaatattactcgaaagaatatcgctaaaatgatagcaggcaacagcacagaaagttcaaaaacaccagtgaccatagaaaagatttatccatattatgtgaaagcacctagtgattctaactcaaaacctataaagcaacttttatctgaaaataatttcatggatattaccatcattttgtccagagacaatacaactaaatataacagtgagtggtgggttctcaacctgactggaaacagaatatacaatccgaactctcaggccctggaactggtggtcttcaatgacaaagtcagtcccccaagtctggggttcctggctggctatggtattatgggattatatgcttcagttgtccttgtgattgggaaatttgtccgtgaattcttcagtgggatttctcactccatcatgtttgaagagcttccaaatgtggatcgaattttgaagttgtgcacagatatttttttagttcgagagacaggagaactggagctagaagaagatctctatgccaaattaatattcctatatcgctcaccagagacaatgatcaaatggactagagaaaaaacaaattgaaaccttagaacacagactgcaaataatgttaacatttgaattttttttaaaagcacaatattctcataagagctaagcatttctagttcgacggaaatggtttgtttctcttctgataggtagacaaaaggagctgatatccttctgcagtaaaagctacctggcaagttaaggcactgttgaaaatgttatttgtaactccatttctctgaaatcagggctacttgctttatgttttagtcaacagtgtctcgcattctgattgatcatgtgaaggaatcatttatgggccccgtccctaagagaaacagaagaggagtcagaaagaaagatgcctgtgttttcctctgtggggcccgtgcacttcctggagagatgctacaatgcaatatacagcgctccatccccactggggaagctgctgtgatgagactagatgagccttcaacacactcagaaaatgcaacagcaatagggggcagacagctcctacctgtgtttctaggagcaaaagagagggaactaattgcccgtgaagacgccagtggaaggatcagcctcattctaagcaaaaacatagtattagtgatactcttactgccttatcttaaccaaggactaataggatacctttccattaaacaccagtgacttctcaggaaaaaaaaaaaaaaaaaa

SEQ ID NO: 30580 - DNA, 3945 bp, Homo Sapiens
gagaaaagatggctgctgtgcaagttgtcggttcgtggccttccgtgcagccgcgggaggcaccgcgggaagcaatccctgagcgaggcaatgggtttcgcctcttgtctgccaggctctgcgccctgcgcccggatgacagcagctccgcccgcaccgagatccacctgctcttcgatcagctcatctccgagaactacagcgagggcagtggcgtggccccggaggacgttagtgctcttcttgtccaggcttgccgactggtacctcttaatcagaatcatcttgtcagcaaagtgagccagcttatccaccatttacttaacagattacaggtaattgttgatgaacagcacttggatttcctgttggcatatactatttcggctattcatcagtgtagttcctggacacacagggaaattcttcaagccctggcagctctggtgtactgcaatggctccaaatgtcaaaagtacctcccagagctgctaggcaacaccggactcttaatgaagttgagtgacttggctcagtctgatcctgaagtcaggagagctgcagtacattgtatggcaaacttatgtctcagtgtgccaggacagccgtatttggaggagccctaccaaaatgtctgtttccaagcttttctgactattttacagtctccaaaatcatctgatatggatgatatcacattttgcatgttattgcaaaatgcattaaaaggtatacagtcacttctaaatggtgggagaatgaaactaacacagactgatgaacttggagcacttttagctgtgctaaagaaattcatgtttcacggactccctggactaaacatagagatgcccacggtgttatacccaactccgcttcctcagtatgatgggcgaacacctatcaaaccacagcaatcagaatccagtgcttctcgaccaactttgaataaaaagaaaaaatccaaagtaaaaccaaagaaaatccagcaaggagaggaggaggaaaaggaatccagtggtgaaatagaggcagccccagtcactggcacaggcagagtgaacctgcatgaagggaacacttggtgtccctcctccctgggtgtccagagtttgcctttagatggaagtggagctgcagaaaaagatggagtctcctcatccttcagttcttccagttggaaaagggtcagcagtagtgagtcagacttttctgatgctgaaggaggcatgcagagtaaaatgaggtcttaccaagctaaagttcgccaaggagccttagtttgttttctttctactataaaatcgatagaaaaaaaagttctttatggctactggtcagcttttattcctgatacgcctgaacttggcagcccacagtcagtgtccttgatgactcttacattgaaagacccttctccaaagacatgtgcctgtgctctgcaagttttatctgccatcttggaaggctcaaagcagtttctttctgttgctgaagataccagtgaccacagaagggcttttacccccttctccgtaatgatcgcttgcagcattagagagttgcacagatgtcttttgttagctttggtggcggagtcatcctcacagaccgttactcagataattaagtgccttgcaaatttagtatcaaatgcaccttatgatcgtctaaaactcagcctgctgaccaaagtctggaaccagataaagccttatattcgccacaaagatgttaatgttcgtgtgtcaagtctcacactcttgggagctatagtgtccacccacgcacctttacctgaagtccaactacttctgcaacagccatgttcttctggactcggtaatagcaattcagcaacccctcacctcagccctcctgattggtggaagaaagcccctgcaggaccctctctggaagaaacgtcagttagctcacctaaggggtcttcagagccctgctggctcattcgactctgcatttccattgtcgtactgcccaaggaggattcctgttcaggtagcgatgctggctctgcagcaggaagcacctacgaaccatcccccatgcgactggaggccttacaggtattgactcttctggcaaggggctacttttcaatgactcaagcctacttgatggagcttggagaggtgatttgcaagtgcatgggggaagcagatccatccattcagcttcatggagcaaagcttctggaagaactgggcacaggcttaatacagcagtataaaccagactccactgcagcacctgatcagagagcaccagtcttcttggtggtgatgttctggactatgatgctgaacggtcctttacccggagccctgcagaattcagaacacccaactctccaggcgagcgcctgtgatgccctgtcttccatcttgccagaggccttcagcaatctgccgaatgacaggcagatgctgtgcatcacagtgctgctcgggctgaatgacagcaagaatcgcttagtgaaagctgcaacttcacgggccctgggagtctatgtgctttttccctgtctcagacaggatgtcatatttgttgcagacgcagcaaatgcaatattgatgtcacttgaagacaagtctctgaatgttcgagccaaagcagcctggtccctgggcaacctgacagacactctgattgtcaacatggaaacaccagacccaagtttccaggaagagttctctggtctcctgctcttgaaaatgttacgatcagctatagaagcatccaaggataaagacaaggtaaaaagcaatgcagtccgggcccttggaaatttgcttcattttctgcaaccctctcatatagaaaaacccacatttgcagaaatcattgaggagtctatccaggccctaatttctactgttctaacagaagctgccatgaaagtccgatggaatgcttgttatgcaatgggaaatgtatttaaaaatcctgcccttcctttagggacagccccatggacctcccaggcctacaatgccctgacatcggtcgtgacatcatgcaagaacttcaaagtgcgcatcagatctgcagccgccctttccgtcccggggaagagagagcagtacgggtctgttgaccagtatgctcggatctggaatgcattggtcaccgctttacagaagagtgaagacaccatagactttttggaattcaagtactgtgtcagcctacggacccaaatctgccaggcactgattcacctcttgagcttggccagtgcctcggacctcccttgtatgaaagaaacccttgaactgagtgggaatatggtccagtcctatattctacagtttttaaaatcaggagcagagggagatgacactggagcaccccacagcccacaggaaagagaccagatggtcagaatggcccttaaacacatgggcagcatccaggcaccaactggagacacagccagaagggccatcatgggctttttagaagagatcctggccgtttgttttgactcatctggatcacaaggggcactcccagggttaacaaatcagtgaagatcccaccatactttctagatgtcgaaggcggcagtaggaagacctgagcttgagcataagatctgtgggatttcatcttaggggcagaaacaatccgttcactatttatttagaatgacttagcagccatttaaattttcacagagggctcaaccacctttggagtgactccatagcactggccatggtcagggttgttggaacatctgacctgtgcatccaggagccgaggagtcaggttgtaatacaggccaagcagacgggctttgagggcatttagtctcagaaaaaaaaaatgtagaaggatttcggaattagaattttgtgtattgtatctgtagttttgtaataaactaacgaaaaatagtgaaaaaaaaaaaaaaaaaca

SEQ ID NO: 30581 - DNA, 2880 bp, Homo Sapiens
attttttgctcagcccgcctgcgccgcttgggacgcctctgcctttccctccctcccttccccgacggcttctggcggccaagcggatgtggcgggtgatcgagccaccctgcccaggggcgcccagcactggttcagtgaacagcattttggacaggacatttggtgccaggtctgagtagccagtttgctgaattattgtcccagtcagccaggattgtgagctgtttgggaagtttcgtggaagcgcccaagtgccagcacaggtggagggacacctggaggccagtttcaggaacttttgccacaagtataaaagacttcagaagtgcaaagatgctgaaacagatactgtcggagatgtacatagatcctgatctactggcagagctcagcgaagaacagaaacagatcctgttcttcaagatgagagaggaacagatccgacgatggaaagaaagagaagcagctatggaaagaaaggagtccctgccagtgaaacccagaccaaagaaagagaatggcaaatcggttcattggaaacttggagctgataaggaagtctgggtatgggtgatgggcgaacaccatctagataaaccctatgatgtgctctgtaatgaaattattgctgagagggcccggctgaaagcagaacaggaggcagaagagcccagaaaaactcactctgaagaattcaccaatagcttgaaaacaaaatcacagtaccatgatctgcaggctccggataaccagcagactaaagacatctggaagaaagtggcagaaaaggaggaactggagcaaggatctaggccagcaccaaccctggaagaagagaaaatccgatcactctccagttcttcaagaaatattcaacaaatgttggcagattcaatcaatcgtatgaaggcatatgcatttcaccagaagaaagaatctatgaagaaaaaacaagatgaagaaataaatcaaatagaagaagagagaacgaagcagatttgtaagagctggaaagaagactcggaatggcaggcatctctgcgaaaatccaaagcagctgatgagaagagacgctccttggctaaacaagcacgagaagactacaagaggttgtccctcggggcccagaaaggaagaggcggtgagaggctgcaaagccccttgcgtgttccgcagaaaccagaaagacctccccttccacccaagcctcagttcctaaactcaggggcatatcctcaaaaacctcttagaaatcagggagtggtgaggacactgtccagctctgcccaagaggacatcatccggtggtttaaagaggagcagctaccacttcgagcgggctaccagaaaacctcagacaccatagccccctggttccatggaattctcacactcaagaaagcaaatgaacttcttctgagcacaggcatgcccggcagttttctcatccgagtcagtgaaaggatcaaaggctatgccctgtcctatctgtcggaggacggctgtaaacatttcctcatcgatgcctctgcagacgcctacagcttcctgggcgtggaccagctacagcatgccaccttggcggatttggtggaatatcacaaggaggaacccatcacttccctggggaaggagctccttctctatccctgtggtcagcaggaccagctgcctgactacctggagctgtttgagtgacagcctccatcagggtcatcctacagcctccaagcgggctttcccctggacaaatgccactgcaacatttatgtgtgaagccaaaatcaccctgcagcagagccaatactgatcaactgaaagtaaagtatccatggagtcctcattgacacctcttttctgcacaaatactggaattcaatgtcaagagaaaatgacctctgctcaaaagggagaagagtctcaatttcagcaagtacctgtcatgaagggtatgaccttaatgatgtacataaaataaaacaaatgaagaaatggaaaacttttagaaattaaggtgtacttgaaaacgaatatctatcatatgacccctgcactccctctgtatcatctcaggaggtttcaggggcctgttgacatgaagtttcgaagtttcatgttggctttggaatggtagcaaaagcctttcctggctgagatgatgcttaaaacacacctcacttattgtacatgttggaaccaggacatgagagacatagaaaaacagaagtcatgaatgtaaattgaatgagaggcttaacatgcatgaaaatacagatggacctgcaggaaagtgagcaaacatcgctgagtttgttttcttgttcgggagaatggggccggggctggcctggcctcccctggatatactctatagtgcaccaaaaggataaagcatctgtacatgtatttttttattttttatcagaagtgcttagacaagaacagaataagcaggctgtttggatgctacttgtggttgaattgtgttcccccaaaatatatggtgaagtcttaacccccatccccgtgaatgggaccttgtttggaaatagggtctttgcagatatagtcaagatgaggtcacattggattagggtgggccccaaatccaatgactggcatccttaggagaagagagagttttggtaatagacacaaatgcagtgggaagaagaccaggggacaagaggcaagttggagtgatgcagccggaagggaagggacaccaaggatctccggccaccagcagaagccagcagagaggcatgggacaggttccccacaagccttagaaggaagcatggccctgacttcagaattccagactccagaactggaagaataaatgtctgttgttttaaaaaaaaaaaaaaaaaa

SEQ ID NO: 30582 - DNA, 2516 bp, Homo Sapiens
ccacgcgtccgccgggcctggctgaggcggaggttgttgcggatgcttctctctccaggcgcaccgcagattcctgcccgggggttggacccgaggaaccgccgtctctactggttccgacggccagaggctgggccctaggctgagcggagagtgggactggagcctgaaacgggcgcctaaaagaagcccgtgcatcccataggcctgcgcctcaggcttggagacgggcgggcggagaccgcgctgagtctttttttttttcctagcagctggcgttcttatctcacccgggaggctgtaaaaatctccgtccttaacagtaacaccatcaggtcctatcagttaagagctgcttgttatttgcatgcattcttgtaattaaatctcctaacaaccctgtaagccacattctctggcacagaactttggaaactttggggatcacttacttatcttggagacagaatgttttctaagcaaaattctgtggcatctctggaatactacctgagaatttttgtgtgccatgtcgaagaaacgcaaatgggatgatgactatgttcgctactggttcacctgtacaacggaagtagatggaactcagcgtccacagtgtgtgttgtgtaactcagtattttcaaatgctgacctcagaccatcaaaactgtcagaccattttaacagacagcatggtggtgtagctgggcatgatctcaatagcctgaagcatatgccagcaccatctgatcagagtgaaaccttgaaagcatttggagttgcatctcatgaggatactttattacaagcatcgtatcaatttgcgtatttatgtgccaaggagaagaatcctcatacagtagctgaaaagttagtgaaaccttgtgcactggaaatagcacaaatagttttgggaccagatgcacaaaaaaagcttcagcaggtacccttatcagatgatgtgatccattctagaattgatgaaatgagccaggatatcttacagcaagttctagaagatatcaaagccagtcctcttaaagtgggtattcagcttgctgagacaactgacatggatgactgcagtcagctaatggcatttgtgcgctatataaaagaaagagagatcgtagaagaatttctcttctgtgaaccattgcagctatccatgaaaggaatagatgtgttcaatctcttcagagacttctttctgaagcataagatagcacttgatgtatgtggctctgtttgtactgatggtgcctcctctatgctaggagaaaattccgagtttgttgcctacgtgaaaaaagagatacctcatatcgtagttacacattgtttattgaatcctcatgcacttgtcataaagacattgcctacaaaactgagggatgctctgtttactgtggtgagggtaataaatttcatcaaagggagagctccaaatcatcgcctatttcaggctttctttgaagaaattggcatagaatatagtgtcctccttttccatactgaaatgaggtggctttcccgaggccaaatacttactcacatttttgaaatgtatgaagaaataaatcagtttcttcaccacaagagcagtaatttagttgatggctttgaaaataaagagtttaaaattcacctagcataccttgcagatttattcaaacacttaaatgaactcagtgcatctatgcagaggactgggatgaacacagtatcagctagagagaagttatctgcttttgttaggaagtttccattttggcaaaaacgaattgagaaaagaaattttaccaattttccttttcttgaagaaataattgtttcagataatgaaggcatattcattgcagctgaaataacactgcatctgcaacaattgagcaacttcttccatggatatttttccattggagatcttaatgaggcaagtaaatggatattggatccatttctttttaatatcgattttgttgatgatagttatttaatgaaaaatgatcttgctgaattacgagctagtggccaaatcctaatggaatttgagacaatgaagcttgaggatttctggtgtgcccaattcacagcatttccaaacctggcaaagacagctctagaaatccttatgccatttgcaactacatacctttgtgagttgggattttcatcacttttacatttcaaaacaaagtccagaagctgctttaatctgagtgatgatatccgtgtggctatttcaaaaaaagttcctcgtttctcggacatcattgaacaaaagctacagctacagcagaagtcactgtaagctgatatacttttttaatgaataatttcaatcttaatatcattgtaaaattaagctgtaattctgtctctttcatatttatgatatactgaattctatgtctaaaaaacttaagaactttaattttgaatgaggcatgtgaaaatatgttttgagaataaaaacacagcagaaaagaaaaaaaaaaaaaaaaaaaaaaaaa

SEQ ID NO: 30583 - DNA, 4462 bp, Homo Sapiens
cgcagcggaggaaagaggatggcgacctcgtcgatgccggagtcagagaggaacgtggctacgaaagcctcggagtgaagttcccagaccctacgccccgctgtcaggcagcccgccgatcagatggaggagaacgaggtggagagcagcagcgacgcggcccctgggcctggccggcccgaggagccctctgagagcggcctgggtgtgggcacctcagaagccgtgtccgccgacagcagcgacgccgcggccgccccggggcaggcagaggccgatgactctggcgtggggcaaagctcggaccgcggcagccgttctcaggaggaggtatctgagagcagctcgagcgcagaccccctgcctaatagctacctccctgattcatcgtctgtgtctcatgggccagtggcaggggtgacaggcggtcccccagcacttgtgcactctagtgcactcccagaccccaacatgctggtgtccgactgcacagcttcctcctcggacctgggctcggccatcgacaagatcatcgagtccaccatcgggcccgacctcatccagaactgcatcactgtgaccagtgctgaggatggcggggccgagaccacacggtacctgatcctacagggcccagatgatggagcccccatgacatcaccaatgtccagttccaccttggcccacagcctagcagccattgaggccctggcagatggccccacatccacatccacatgcctggaggcacagggtgggcccagctccccggtgcagctgcccccagcctccggtgccgaagagccggacctgcagagcctggaggccatgatggaggtggtggtggtgcagcagttcaaatgcaagatgtgccagtaccggagcagcaccaaggccacactgctgcgccacatgcgggaacgccacttccgtccagtagcagcagccgcagcagcagctggtaaaaaaggacgtctacggaagtggagcacctccaccaagagccaagaggaagagggaccagaggaggaggacgatgatgacattgtagacgctggagccattgatgacctggaggaggatagcgactataatccagctgaggatgagccccgaggccggcagcttcggctccagcgccccacccccagtaccccaaggccccgaaggagacctggccggccccggaagctgccccgcctggagatctcagacctcccagatggtgtggaaggagagcctctagtgagttcccagagtggacagagccctccagagccacaggatcccgaggctcccagctcctcaggcccaggacacctggtggccatgggcaaggtgagcaggacccctgtggaagctggtgtgagccagtcagatgcagagaacgcagccccctcctgcccggatgagcatgacactctgccccggcgccgaggtcgaccttccaggcgcttcctaggcaagaaataccgcaagtactattacaagtcgcccaaaccacttttgaggcccttcctgtgccgcatctgtggttctcgctttctgtcccacgaggacctgcgcttccacgtcaactcccatgaggctggcgatccccagctcttcaagtgcctgcagtgcagctatcgttcccgccgctggtcctcgctcaaggagcacatgttcaaccacgtgggcagcaagccctacaagtgtgacgagtgcagctacaccagtgtctaccggaaggacgtcattcggcacgccgctgtgcacagccgggaccggaagaagaggccagatccgactccaaagctgagctctttcccctgccctgtgtgtggccgtgtgtaccccatgcagaaaagactcacgcagcacatgaagacgcacagcactgagaagccccacatgtgtgacaagtgtggaaagtcctttaagaagcgctacaccttcaaaatgcacctgctcacgcacatccaggctgttgccaaccgcaggttcaagtgtgagttctgtgagtttgtttgtgaagacaagaaggcactgctgaaccaccagttgtcccacgtcagtgacaagcccttcaaatgcagcttttgtccctaccgcaccttccgagaggacttcttgctgtcccatgtggctgtcaagcacacaggggccaagcccttcgcctgtgagtactgccacttcagcacacggcacaagaagaacctgcgcctgcacgtacggtgccgacacgcaagcagcttcgaggaatgggggaggcgccaccctgaggagcccccctcccgccgtcgccccttcttctctctgcagcagattgaggagctgaagcagcagcacagtgcggcccctggaccacctcccagttccccaggacctcctgagatacccccagaggcgacaactttccagtcatctgaggctccctcattgctctgttctgacaccctgggcggcgccaccatcatctaccagcaaggagctgaggagtcgacagcgatggccacgcagacagccttggatcttctgctgaacatgagtgctcagcgggaactggggggcacagccctgcaggtggctgtggtgaagtcggaagatgtggaagcagggttagcatcccctggtgggcagccctcccctgaaggtgccactccacaggtggtcaccctccacgtggcagagccagggggcggtgcagcagccgagagccagctaggccctcctgacctaccgcagatcaccctggcacctggtccatttggtgggactggctacagtgtcatcacagcaccccctatggaggagggaacatcagctcctggcacaccttacagcgaggagcccgcaggagaggcagcccaggctgtggttgtgagtgacaccctaaaagaagctggcacccactacatcatggctactgatggtacccagttgcaccacattgagctcaccgcagatggctccatctccttcccaagtccagatgctctggcctctggtgccaaatggcccctgctgcagtgtgggggactgcccagagacggccctgagcccccatctccagccaagacccactgcgtaggggactcccagagctctgcctcctcacctcctgcaaccagcaaagccctgggcctggcagtgcccccgtcaccgccatctgcagccactgctgcatcaaagaagttttcctgcaagatctgtgccgaggccttccctggccgagctgagatggagagtcacaagcgggcccacgctgggcctggtgccttcaagtgccccgactgccccttcagtgcccgccagtggcccgaggtccgggcgcacatggcacagcactcaagcctacggccccaccagtgtagccagtgcagctttgcctccaagaacaagaaggacctgcgtcggcacatgctgactcacacaaaggagaagccttttgcatgccacctctgcgggcagcgtttcaaccgtaacgggcacctcaagttccacatccagcggctgcacagtcctgatgggaggaagtcaggaacccctacagcccgggcccctacccagaccccaacccagaccatcatcctgaacagtgatgacgaaacactggccaccctgcacactgcactccagtccagtcacggggtcctgggcccagagcggctacagcaggcactgagccaggaacacatcatcgttgcccaggaacagacagtgaccaatcaggaggaagccgcctacatccaagagatcaccacggcagatggccagaccgtacagcacctggtgacctccgacaaccaggtgcagtatatcatctcccaggatggtgtccagcacctgctcccccaggaatatgttgtggtccctgaaggccatcacatccaggtacaggagggccagatcacacacatccagtatgaacaaggagccccgttccttcaggagtcccagatccagtatgtgcctgtgtccccaggccagcagcttgtcacacaggctcaacttgaggctgcagcacactcagctgtcacagcagtggctgatgctgccatggcccaagcccagggcctgtttggtacagacgagacagtgcccgaacacattcaacagctgcagcaccagggcatcgagtacgacgtcatcaccctggccgatgactgagccccgagggcccaacacagatcatggatttgcggccagctctcctgggggtagggggccaccaggactcacctccctcttcatttaggatctccagatactggatagccagcatcctctcattcccagggagccagacctgtgctgttggggttaggggcagccatgggccccagccaggacatgctgggtgccccagcctgcaggcaggctttgggagagaaatttatttttgtttgggtggacccactggcctgtcagtctcaataaagggaccggagtccagtcctgaacagcttaaaaaaaaaaa

SEQ ID NO: 30584 - DNA, 3839 bp, Homo Sapiens
ccccgccccctgcgctcacctgcccgcgcgctcgccttccggggacccggggcccatggacacatacacccagccctgctgtcccgcgcgccagctcaccagccctacccaagggacatcattcacgcctgggcgcctccgccgggctccgggagcccaaggtcgcggctgggccagcgctgagcgtcagaggacgagagcaggggcctccccggtcgccccagcaggcccaggcacataggtgcccagagatccctggcttctgatcgcccggaagactaagagtcccatgaagtgggcaccattgctattgccagttcacagatgcagaaactgaggtaaaaactagctttagttttggtccagaaagcattttcaaggagctggtcaagcatggctttagcagataagagacttgagaacttacagatctacaaagttcttcaatgtgtgcggaacaaagacaagaagcagatagagaagctgaccaagcttggataccctgaactaatcaattatacagaacccattaatggacttagtgctttgcacttagcctcagtttccaatgatattgatatggtcagctttctccttgaccttggtgctcaccctgatgtgcaagaccgaatgggctgtactcccacaatgagggctgcagaactgggccatgaattgtcaatggaaatattagcaaaggcaaaggctgatatgactatagttgataatgaaggaaaaggtgttttgttttactgcattttaccgactaagcggcattatcgctgtgctctgatcgcccttgaacatggtgcagatgtcaacaattctacctatgaaggaaagccaatattccttagagcttgtgaagatgcacatgatgttaaagatgtgtgcctgacatttttggaaaaaggagccaatcctaatgcaatcaactcatccacaggccgcacagctttaatggaagcgtcaagagaaggggtagtggaaatagttcgaggcatattggaaagaggaggtgaagtgaatgcatttgacaacgacaggcatcacgctgctcattttgctgctaaaggaggctttttcgatatattgaagcttctttttgcctacaatggagacgtggggctgatttcgataaatgggaacacaccacttcattatgctgccatgggtggttttgcagactgctgtaaatatatagctcagcgaggatgtgacctgaaatggaagaatttagatcataaaacgcccagggctgtggctaaggaaggcggcttcaaagcagcaagcaaagaaatacgccgagcagagagaatcgctaataaactagccaggccaggagccaaaaatccaaatccactgtgggcccttagactgcacgattggtccgtagaacgtgaggctttcctccgggaagcctttgcggttttagacaggggtgatggaagcatcagcaagaacgacttcgtgatggtgttggaggaaaggcaggattatgcaagctcagaacagctggctgccatcgctcaccttcatgagaaaacccggggaggaggggtcaatattaatgaattctttaaaggaaccagatatttaaacaagtcttttgtcttaggatcgtatggacctaagaaaaaggaaaaagggatgggcaaaaaaggaaagaaagggaaatttgtcttaccccttccaatctgtgtcattcctgagtacgcgtttccacgccggcaggatggtgggccaccgtattacatgattgagacctacaagaatgtcactgatagcagccggtttaatagagatcatcccccagaacatcccattcaggatgactctgtttggtacattgatgattcagagaaggtattttcaaacattaatattatcaccaaagcaggggatctggcttctctgaaaaaggcctttgaatcaggaatacctgtggatatgaaggataattattacaaaactccgctaatgacggcgtgtgcaagtggaaacatagatgtggtcaagtttcttcttgaaaaaggagctaacgttaatgcaacagataactttctgtggactccacttcattttgcatgccatgcaggccaacaagacattgttgagcttcttgttgaatctggagctttaatagatgcagcttcaatcaacaactcaactcctttaaatagagccattgaaagctgcagactggatacagtaaaatacctacttgatattggtgctaaattccagctggaaaatagaaaagggcatagtgccatggacgttgcaaaggcatatgctgattatagaataattgatctgattaaagaaaagctagataacttgccgaaaccagcagaaaatcaaaaactaaaaggcaagacacctcctatactgaagactgaaggccctgaaattaagaaagaagaggaactgctgtcatcaatttatggtgtaccaaccacatcagagggaaagaaagtacagaagggtaatgtggttcatctgaattcattgattaccagtggttatactaagaaagtggatatcacatttattccacggaggatttggagtcctgaagccacaacagcagagctgatcaggaagagggaactacggcgagagaggtttacacatgaggtggacttcgacgattttatgatgccttttcagaagaacatcacagagaaagctcgagcactggaagctgccttgaagacctaagtcatagcagttatttcttggggtaaatgctttgaggcccagggaccaatctttggagaaagtagatatttccatcaaagccaaagcaatccatacaccaagaacttgttaccaagaatttctttttgctttaacaactataaatattcttagctgtctagagaaaagatgtatgttattttgaaatgaatggtatgtcattctggataaatccccaagcccctttatgaatgtagtgaaatacatggcatgtgggttataaacgttgctgtcaaaagatttaccaggtctacaccattatgcttattatttttttaattatcctttttatttattaaatagagacagagtctcactatattgccccagctggtctcgaactcttgagctcaggcagtcctcccaacttggccgtcgaaagtgctgggattataggcatgagctactgtgcccagcctgcttattgaagatacatttctagtggaaattgatgaaacaatttaggttttggaaaaagaagtaatatttaatcttttaaggaaggagtttatttctcacatgccattataaactatgtgtattagataccttgggttgaatacacttttaacagccctagatcgatagccctagccctagatagatagccctagccctagatagatagctattaggttggtgcaaaagtaattgtggtttttgccataacctttaattgcagcaaaaactgcaattacttttgctccaacctgacagctaggtatctagctagctagaaaggcagatagacagatatatagatgatagatagatagatgatagatagatagatagatgatagatagatagatagatagatagatagatagatagatagagatttattgcaaataattggtttacataattttgggccccagatggttaagtgctaaatttgtagggtaggctatcaggaagtgcaggctggaaacatgcaggagctgtccctgaagtccacaagtggaatttcttcttcatcatggaaacctcagttttgttcatacacctaaatacttcagtatgtctttcctaaaataaaaggcatccatttacctaaaaaaaaaaaaaaaaaa

SEQ ID NO: 30585 - DNA, 1081 bp, Homo Sapiens
agtttgtagcggacaacatggcggccttcatgctgggctcgctgctgcggacgttcaagcagatggttccttcatcagcttcaggccaagttcgaagtcactatgtagactggagaatgtggcgcgatgtgaagagacgaaaaatggcctatgaatacgcagatgagaggctacgtattaattcactcaggaagaataccattttgccaaaaattcttcaggatgtggctgatgaagaaattgctgccctcccccgggatagctgtcctgttagaatcagaaatcggtgtgttatgacgtcccgtccgcgtggtgtgaagcggcgctggaggcttagtcgtatagtcttccgtcacttagctgaccatgggcaactttctgggatccagcgagcgacatggtaaatgagctccagaacctattgagcttgcagggaagccaagcttgcagttccagcaagcaaagattttttttaatagaccaaaccctaatctctacaggggcccagtacagttgtttggcctacctgatgctatctctaaactacttttaaaatgaagacatttgggtgtttcatgtcagtgaattatcttttctcttggacttaacaaacatactgttcccatacatagtacaaagagtagcataataaatattttctgtgaatgttttttataccctccttttaagtttaatcttttagtaacatataggggtttttgtattaagagcattatttcataaaatgctatcttatacataatccaactaattgacatgtagctcatgtatggcagtttgtaatcctggactagctttgctgacctgcagagctccccttaactattattgttagataaacagattggatagcaaggctgctgttctggattatctaatgctccacttcttcttgtgatggctgaacaaaagaaccactaagtgttttcttgtccatccttaagggactttaaaacaaattatgcctctttaagtccttgaaagtctccatctaaagaggaaaagtttgttggaacagtatatattccctatttttatgtttatttaatccataacagaa

SEQ ID NO: 30586 - DNA, 3825 bp, Homo Sapiens
agcctcgtcacgtgtccgctgcagtcgcgaaacagttccggtggtgaggagacctttccaaatataagaggaataaagaagtcacctccccagctgtcatcatcttccagcagattgagcaagaatattttgagcactacaggaaagacagtccatcaaacccgagatgatgatcagccacgtgattttttcaagaagaggaatagggtgaatgaatctcatcagaaaagcagcaatatgaatgctggcccatcttggaataaagtgcaacattcaaagaattcttcaggaaaaaggcagagtaaatcccaagtaccccacgcttcttcccagccgagaagcagcctcacagctgtcacccagcctactgaagaaaaacttaaagaaagcatttccccggaagcaagacgcaaaaggaatccactcggttccaggtgtcagggggcctcagggaataaactgtttcttgattttcagtcaatgaaaattattaaagagaatgctgatgaggacagtgcaagtgatctctctgattcggaaagaattcccattcctccttctcccctcacacctccagatctcaatcttcgagctgaagaaattgatccagtttactttgatcttcaccctggtcagggccatacaaaacctgaatactattatcctaatttccttccatcccctttcagctcctgggacctacgagatatggccctgcttctgaacgcagagaacaaaacggaagccgtgccccgagtgggaggacttcttgggaagtatatcgatagacttattcagcttgagtggctgcaagtccagactgtacagtgtgaaaaagcaaaggggggcaaagcaaggccccccactgcccctgggacctcaggggcactgaaaagccctgggagaagtaagctaattgctagtgctctgtccaagccactacctcaccaggaaggggcttcaaagtcaggcccttcccgaaagaaagcttttcaccatgaagaaatccacccatcacattatgcatttgagacttcccctagacccattgatgtgcttggtggtaccaggttttgttctcagaggcaaacccttgaaatgaggacagaagaaaagaaaaagaaatcaagtaagagtacgaagctgcagcgctgggatctgtccggcagtggaagcagctctaaggtggaaaccagcggtcacattcgagttcccaaacaggcagctgtgattctggactcagcagattcctgtaaggcctccaaaacacaagcacatgcacatcctaggaaaaagggaaaggcagagagctgtggtcatgccactgtatcgagtgagaaaaaactgaaaacaaacggagtaaagcaaaacacatataaactaaaataaatatctaaaatgctgaattgccaagacctgcaggtacctcaatgttagagcgcttccaaaagtcaaaatactgtgaattttaaggaattttacaaatactgacatttaagtagttgactggcatttttgtccacctttatttctaccctgagtggggttattttcaaagggaagtgtctttcaataagcctttctttgtattgtcagtcttaggcaaatgagagccctttagataaaaattatgtaaaatatgtgccatataaaggaataaaatggcacctctccagggaaagtgtcagtgaaacctcagctacagtagccggtctgtgtagagcagctagtggtgttacctccccattttcacatgcacgtaagtatatgaaatagtgcagactgtttcaaatggtgtggaatcctaaatgtttaaaataaggtccttcttgcccactccctcgcttacttttttataaactcctcaagcaaaatttctgttcattttacccttaggagaagctttagttcttcctcaagtcagggagtagtgagtttgtattttgagtagtcatttctcactaagctggttgctttctagagagacagtggaatctagtactttaatacattttctctgacatggttttttttttcttttttgaggggcattttaaacttagaggtggtggtaaaacctacttttgagttctccgaactgaggttaaaataacttgcagaattttccaaagtcaatgggcttagcatgattactgctgtttggtggggctgagaatgaaatatttgacattctggaattgctggcatgtaaagcttctccagagaggcaccccagggaaatcactctttacaatttgtaaaggaagggcctgtaaaaggatcaaaacacatggacctacattcagtgtaatagttacaaagttactgatttgggttccacaccctgtggtccttagtcaaaaataatgatctgtttcagtttgcaagagcaggattttattattttgcttggggtgaggggcgggagagtggaatatgagtaaggttgctgaatgaattctaaactcgcttatctggtcttcaggcttcccaactctctccaagccttcttatttcactgcagttaaataacatcttcttgttcctatagttgtgctgtgagttttctgttcatatttgcgcagtgtattttaatacggcccatgtcattatagttgattttatccctttaaacaattactgtatttgtttttgacgtagaggtttcaattttttcaccttgggggcaaatgaaaaacttggcatttttcatttgggaacatataatagcttgtaaacttttcagacagcagtaaatgtctgaaaaaatatcaaaaacagcataaagacaagattatgtagctctaattatacgtatataattataaaaaacaatgtgcaagggttatattttaaggtcttttaaaatctgattttgatcataccaaatgacataatattttttatggtagccttttactttcaagacttaattttcagacttgtacaagttccttcttacattctttccctctcacaccatcctactggagaaagcatacttttatgctaagatcttactttaagctttttatgtgaacaaaagatgtacatatagtaagtattacttccgtagtcctcaaatttactataacttttgtacttagtatatgttttatatttggaaaacagcactacgcttagttttcctgtagttcctgagtgatgtctgtgtgttccttgcctgcccttttttgtgagcacagattagtctgttatccatggctggcacttcacttatgatcctttctctgctagatttttatgcagctctctatgaagtttcatggcccatagatattcaaaagcaagatattctatacatatgtgtatatgtatatatactccttatgttaatactaaagtgtttatgctgagttgctgcctttccccgtcatgtatccatgtgcatgctcttagagaccttgaatggttgagggtaaagtgatttattagtaattctacttgccttgtgtatgtctgagctgaaaacaatcgtgattaagaaatttagaggtggctgggcgtggtggctcacgcctgtaatcccagcactttgggaggccgaggcaggcggatcacctgaggtcgggagttcaagaccagcctgaccaacatggagaaaccctgtctccactaaaaatacaaaattagccgggtgtggtggtgcatgcctgtaatcccagctactcggaagtttgagacgagaatctcttgaacccgggaggcggaggttgtggtgagccaagatcgtgccattgcactccagcctgggcaacaagagggaaactccgtttcaaaaaaaaaaaaaaaaaaaaaaaaaaa

SEQ ID NO: 30587 - DNA, 8726 bp, Homo Sapiens
gacaatgctggggagatgaagatagtgtgtggctgcttctggactcaaggaggaggagagagattccgcgagccgacaccatgcgatccaaggcgagggcgaggaagctagccaaaagtgacggtgacgttgtaaataatatgtatgagcccaaccgggacctgctggccagccacagcgcggaggacgaggccgaggacagtgccatgtcgcccatccccgtggggccaccgtcccccttccccaccagcgaggacttcacccccaaggagggctcgccgtacgaggcccctgtctacattcctgaagacattccgatcccagcagacttcgagctccgagagtcctccatcccaggggctggcctgggggtctgggccaagaggaagatggaagccggggagaggctgggcccctgcgtggtggtgccccgggcggcggcaaaggagacagacttcggatgggagcaaatactgacggacgtggaagtgtcgccccaggaaggctgcatcacaaagatctccgaagacctgggcagtgagaagttctgcgtggatgcaaatcaggcgggggctggcagctggctcaagtacatccgtgtggcgtgctcctgcgatgaccagaacctcaccatgtgtcagatcagtgagcagatttactataaagtcattaaggacattgagccaggtgaggagctgctggtgcacgtgaaggaaggcgtctaccccctgggcacagtgccgcccggcctggacgaggagcccacgttccgctgtgacgagtgtgacgaactcttccagtccaagctggacctgcggcgccataagaagtacacgtgtggctcagtgggggctgcgctctacgagggcctggctgaggagctcaagcccgagggccttggcggtggcagcggccaagcccacgagtgcaaggactgcgagcggatgttccccaacaagtacagcctggagcagcacatggtcatccacacggaggagcgcgagtacaaatgcgaccagtgtcccaaggccttcaactggaagtccaacctcatccgccaccagatgtcccacgacagcggcaaacgcttcgaatgtgaaaactgcgtgaaggtgttcacggaccccagcaaccttcagcggcacatccgctcgcagcacgtgggcgctcgggcccacgcctgccccgactgcgggaagaccttcgccacgtcctccggcctcaagcagcacaagcatatccacagcacggtgaagcctttcatatgtgaggtctgccacaagtcctacacgcagttctccaacctgtgccggcacaagcggatgcacgccgactgccgcacgcagatcaagtgcaaggactgtggccagatgttcagcactacctcctccctcaacaagcaccggcgcttctgcgagggcaagaaccattacacgccgggcggcatctttgccccgggcctgcccttgacccccagccccatgatggacaaggcaaaaccctcccccagcctcaatcacgccagcctgggcttcaacgagtactttccctccaggccgcacccggggagcctgcccttctccacggcgcctcccacgttccccgcactcacccccggcttcccgggcatcttccctccatccttgtacccccggccgcctctgctacctcccacatcgctgctcaagagccccctgaaccacacccaggacgccaagctccccagtcccctggggaacccagccctgcccctggtctccgccgtcagcaacagcagccagggcacgacggcagctgcggggcccgaggagaagttcgagagccgcctggaggactcctgtgtggagaagctgaagaccaggagcagcgacatgtcggacggcagtgactttgaggacgtcaacaccaccacggggaccgacctggacacgaccacggggacgggctcggacctggacagcgacgtggacagcgaccctgacaaggacaagggcaagggcaagtccgccgagggccagcccaagtttgggggcggcttggcgcccccgggggccccgaacagcgtggccgaggtgcctgtcttctattcccagcactcattcttcccgccacccgacgagcagctgctgactgcaacgggcgccgccggggactccatcaaggccatcgcatccattgccgagaagtactttggccccggcttcatggggatgcaggagaagaagctgggctcgctcccctaccactcggcgttccccttccagttcctgcccaacttcccccactccctttaccccttcacggaccgagccctcgcccacaacttgctggtcaaggccgagccaaagtcaccccgggacgccctcaaggtgggcggccccagtgccgagtgcccctttgatctcaccaccaagcccaaagacgtgaagcccatcctgcccatgcccaagggcccctcggcccccgcatccggcgaggagcagccgctggacctgagcatcggcagccgggcccgtgccagccaaaacggcggcgggcgggagccccgcaagaaccacgtctatggggaacgcaagctgggcgccggcgaggggctgccccaggtgtgcccggcgcggatgccccagcagcccccgctccactacgccaagccctcgcccttcttcatggaccccatctacagggtagaaaagcggaaggtcacagaccccgtgggagccctgaaggagaagtacctgcggccgtccccgctgctcttccacccccagatgtcagccatagagaccatgacagagaagctggagagctttgcagccatgaaggcggactcgggcagctccctgcagcccctcccccaccaccccttcaacttccggtccccacccccaacgctctccgaccccatcctcaggaagggcaaggagcgatacacgtgcaggtactgtgggaagatcttccccagatcagccaatctcaccagacacctgaggacgcacactggggagcagccgtacaggtgtaagtactgcgaccgctccttcagcatctcttcgaacctccagcggcacgtccggaacatccacaacaaggagaagcctttcaagtgccacctgtgcaaccgctgcttcgggcagcagaccaacctggaccggcacctcaagaagcacgagcacgagaacgcaccagtgagccagcaccccggggtcctcacgaaccacctggggaccagcgcgtcctctcccacctcagagtcggacaaccacgcacttttagacgagaaagaagactcttatttctcggaaatcagaaactttattgccaatagtgagatgaaccaagcatcaacgcgaacagagaaacgggcggacatgcagatcgtggacggcagtgcccagtgtccaggcctagccagtgagaagcaggaggacgtggaggaggaggacgacgatgacctggaggaggacgatgaggacagcctggccgggaagtcgcaggatgacaccgtgtcccccgcacccgagccccaggccgcctacgaggatgaggaggatgaggagccagccgcctccctggccgtgggctttgaccacacccgaaggtgtgctgaggaccacgaaggcggtctgttagctttggagccgatgccgacttttgggaaggggctggacctccgcagagcagctgaggaagcatttgaagttaaagatgtgcttaattccaccttagattctgaggctttaaaacatacactgtgcaggcaggctaagaaccaggcatatgcaatgatgctgtccctttccgaagacactcctctccacaccccctcccagggttctctggacgcttggttgaaggtcactggagccacgtcggagtctggagcatttcaccccatcaaccacctctgacgggctgggcagccgggggccggtggccagagcgagggcaccagccacgaaggacggaggcgggcggggccccggagaaccctgtccctgcgtgtggccactcctcagcatcctccccacccaccatggttcattccgacttttccaatggaaactcagatcccaaaagtccctaaagcagtcgtagagtctcaccatctccaaggattggtcttgagaacactgttcagtgacggccatgcaggtggccgtccaaagacagccaacggagctgcctcgcagaatcagccagtgggcaggtggacgctctgctgagacagaagctggtggccactgccgggtgcccgcgtggggtcgcggaagggaatggatagactggtgtgctcaaaagagagagatcactcaaatgatttttataatgaaatgacaagaataacccttttggtaaccgtattgactgcagagtctatttaagcatgtggttttaaaaatagacagtattttttaaaaatcaaaaaatgacttgcaaattgttttttaaaagtaattttgcattgctttgaaatttgagctcatttgcaaacccgagtctgcctgggaacccgcactgtgcctgggtgtattctttatactgtagataatggagaaattttctatctctgtccctatttgtataagccaaggtgatgctgggtgccccgaggcagaacaagaggcgcggggccacacccgtgaaccatgcagacggccgaagaagtcttaggcagggcgccctgggctgcaggcctgcccgaggctgggatgggaagtgtgcctgccctcgtgtgacatggaattggtgtcaggaccgccacgtggccttcagaggaatccacaggtccccacccaagatccctcaattatatggggaagtcgagggcctgtggcttggatccgccatgcagagatgtggccgggcacccatcttccttccctcctctgtccctgcctcggccaccccacgcgggaacccagcgccgtcctctgaaggcagggccttggccacgtcctgggtctcccacctcccacctgaccccagcggctccggtgtcctccacgtggctgccctggggagcaatcccagcggatcgctccgggccaccaagccgcacctgtgcctgagactccggatggacgacacagtcgtcacgtcgctcttcctgcgggttcttggcgagacacagcttgagaacagaagggcgtcgggggaacctgccgcaaggagcagagacagcacagccccccgggcccagccgcctccctctcttgggacgcaacttcttccccactcggatgggctttaaattattcccataggggccaatttcaaataataatttttttccctgatggaatttaccttaatctgtatataacttgtaattttttctaattcatttcttttcttattttatttcctccttaacagtatttttggcattagacattcttattgtgaagaaataatgttaatataagtatctggtgaaggaccaaaaccgtgtgataaggttgtgtgtcgtgtgggagtggggcgattttttatgtgccaaatacccccgtcccccccatgaatcctgctgtccctgctgccgtttaccagacaatcatatgtttttgttaaatttgcgtttcagttacatttgcatttaagacaagtgttctatttatttcttgtattgtttggaagaaaaaatgatgatagagtcccaaaaagaagagaaaaaaaatgcccaagttgccctttaaaaaaaaagagcgtaaatacaaacaggagtggtgcaagccgccttggtgtgggtttgtgtcacgtgtggacatctcctcaggctttgtgtcacgcgtggacatctcctcaggctgtccccagcggtgacgggaggtgtcctggctgctccaggacaaaagacaatcgtctctgtgggtgccgggtggtccaggcttgcactgaagacgtgccacggggaggctcctgcaggaggctcaacccgacggatcacagtgaaagggattcctcccacgccagatctgcacaacgaggcaagacaggacccacctgtgcgtgcgctggggccatggggtggccccgccggggcagcgggggagctgcctgcagaagagccagctggcgtgtcgggaaggatccaggatctgcaaacacaactgctcaggccttctcacgcgtttccacaacatcccctgggtcagacccaccaggtaccccgtaggaatttccagtttcccttgatctagatgggattcttataaaaattcaacctcagacataaacaccccatttctgtaaacccaaattatatggtttcttctgcgaaagagtaaggtgtgtgcttttttttttttgcaatatgaccccgtctctctgaagtgggacattcggacggatggagccctcagcgtgtcttttcagcaggagcagaaccgatgagagccgcccttaccgttggtctccggatcccccagtcccatcccgccgttttcggctgtcttcctaaccgtcctgtcttctcttggcgctctttccttccacctttcccaagagtcctggttgcacgttttaagtcatatattttcgtccccctgaaaatgatggcaagcccagtttctcctgagcattcagacccccaggccccagcacttggcgttttcaggaggccctgttcttagagcccctgacaaaggcagcacttatttcctgggctggtgcgccccaaaacacggccccgacacttagtgtggccccaggccccagcgagcctcgccctcccagttttgctctgcccagcagtgttggtgcccagagatgacaagggccagggagcctggcccgggtgtgagaattcagagattctggcctccagctgtcaccacaccgtaacggggccatgtaactgtgcagcatggacagggatgcgacggggcagctggctgtgtccatggccaggtggccagggtcagggctgcaagccaggggtccagggcccttccgttcagcccaaatgctgccccaatgctaactccttggattgtcaacccccatcccccaaatggaaattccgaaggaggcctcctcgcacctgccctccgctgctcctcagaccccagcccccagcgagccgacgtccccacccgttcctgctctcatccccaggttgggcacgtggggttcctcctctgtgggcctggcagacccttcatgagtgggacccaagatatcactgacttcaacccagaggatcgagcccctgcaccctgcctggggccctggggtgtggagcagtggctggggtgggcgtggtgtggcctgagagactgcccagctggagaggccttcctttacaaggccacgcgtgcagctgtcccatccagaccccgactggccaagacctccacgtccccagagtccagccctggaaattccaagggccctggcgtcctctgccttccccgcttccccatgagcgtctgcaaaacacttgcctgaatacatatcacgtattttagactcgaagcctcaaagcactggattgtggtcccctgccccctctgtcccgtccccctgcccaagtgactgaaacctactgagctatattcactgtgctgtcctagggggagggagagcagagctcgcccctgcactgcagccttgtgggggagggcaaggctctcctcccagccagggacgccaggacatagctgctcctggtcagtggaggtcagccgggtatcaaaagccatgaaactgtgtctctgtagcaatgagtgatactgtgacaaaaccatccttgcattcttcctagaagagttcctctgctccttccattccatttttgtgtttgttttgttcttttctgtcactgatccgtattaccacttttggaaaaaaataaataaataaataaataaaaggcagcttgagtttccaaacgtgtgattcacttgtgaacaaaagtcattctaacaattgccttcagcgtcacgtgcattgccactgcgctttcggcacgagggatgctgagccctggtgtcagagtcgtaatttaaagcgtgtgtgtatatggactttgtcccttaaggtcgatataaagaatcctcgcagaatcacagacctgtgccgcccgccaccttctgccattgttacattacagatttggtttagttttgttttgttttgttttttcttttagaactgtatagtattgaaaaagaaatcaaatgtaaatgtctggttttcatataatgtttaaaaagaccattgagaaggaggctggcgctcgccccatgtcccccttgattgtaaattgcttctgttctgtttataagtaaactgtgcatgactcctgcttagcggtcattatcgtgtctgttggtgaaatttttattaaaaggaaaattctgtagatgcacttattgaatatgtgattaggatctacgtctgagactaggagtcctgaactgctgacgcgaaagaggcgcagttcccaattaatacggaaatcgctgtgggagaagaatgaaataagacgtgaagtgtaggaaatcatgaaaagaacaattttgcaaattgcattctgatgcttgtgatgaacacaaatgtacttgtgtagagacatttccttaagagaaagcctaggagaagccgatttggaggttaatgctgtagaataggactgtataccaaatgtaatctttccaatgctccaatgaatttatacatgagattgatatgcaataaatctgtgtgcttttctaaaaaaaaaa

SEQ ID NO: 30588 - DNA, 3624 bp, Homo Sapiens
tagggccgctgtggatggtttctaaaatgatcattgaaaacttcgaggcactcaagtcctggctcagcaagactctcgagcccatctgtgatgcagatccatccgccctagcaaaatatgttctggctttggtaaagaaagacaaaagtgaaaaagagttaaaggcattatgtattgatcagctggatgtatttcttcagaaagagacacagatatttgtggaaaaactttttgatgctgtgaatacaaagagttacctacctcctccagagcagccatcatcaggaagcctgaaggtagaattttttccacaccaagaaaaagatataaagaaggaagagatcactaaggaggaagagcgagagaagaagttttctagaaggctaaatcacagtcctccccagtcaagctcccgatacagggaaaatagaagccgtgatgagaggaaaaaagatgatcgttctcgcaaaagagattatgatcgaaaccctcctcgaagagattcatacagagaccggtacaatagaagacgagggcggagtcgcagttatagcaggagtcgaagtcgaagttggagtaaagagaggcttcgtgagagggacagagatagaagcaggactagaagcagaagcagaacacgaagcagggaaagggatctggtaaaacctaaatatgacctggatagaacagatccattagaaaataattatactccagtctcttcggtacctagtatttcatctggccactaccctgtacctactttgagcagcactattacagtaattgctcctactcatcatggaaacaacactaccgaaagttggtctgaatttcatgaagaccaagtggaccataactcttacgtaagaccacccatgccaaagaaacggtgtagagactatgatgaaaagggtttttgtatgagaggagacatgtgtccttttgatcatggaagtgatccagtagttgtagaagatgtgaatcttcctggtatgctgcctttcccagcacagcctcctgttgttgaaggaccacctcctcctggactccccccacctccaccaattcttacacccccacctgtgaatctcaggcccccagtaccaccgccaggtccattgccacccagtctcccacctgttacaggaccaccacctccacttcctcctttgcagccatctggcatggatgctcctccaaactctgcaaccagttctgttcctactgtagtaacaactggcattcatcaccagcctcctcctgctccaccctctctttttactgcagatacatatgacacagatggctacaatcctgaagccccaagcataacaaacacttccagacctatgtatagacacagagtgcatgcacaaaggcccaacttgataggactaacatcaggggatatggatttgccacccagagaaaagcctcccaataaaagcagtatgaggatagtagtggactcagaatcaaggaaaagaaccattggttctggagagcctggagttcctacaaagaagacttggtttgataaaccaaattttaatagaacaaacagcccaggctttcagaagaaggttcaatttggaaatgaaaataccaagcttgaacttagaaaagttcctccagaattaaataatatcagcaaacttaatgaacattttagtcgatttggaaccttggttaacttacaggttgcttataatggtgatcctgaaggtgccctaatccaatttgcaacatacgaagaagcaaagaaagcaatatcaagtacggaagcagtattaaacaatcgctttattaaggtttattggcacagagaaggaagcacccaacagttacaaactacttctccaaagcctttagtccagcagcccattttgcctgttgtgaagcagtcagtcaaagagcggctgggtccagtaccttcaagtactattgaacctgcagaagcccagagtgcctcttcagaccttcctcaggtgttgtctacatctactggcctaacaaaaacagtgtataatccagctgctttgaaggctgcacagaaaaccttacttgtttccacctctgcagttgataataatgaagcacagaaaaaaaaacaggaggcattgaaacttcagcaggatgtaaggaaaaggaaacaagaaattttagaaaagcacattgaaacacagaagatgttaatttcaaaactggagaaaaacaaaacaatgaagtctgaagataaagcagaaataatgaaaactttagaggttttgacaaaaaatattaccaagttgaaagatgaggtcaaagctgcttctcctggacgctgtcttccaaaaagtataaaaaccaagactcagatgcagaaggaattacttgacacagaactggatttatataagaagatgcaggctggagaagaagtcactgaacttaggagaaagtatacagaattacagctggaagctgccaaacgagggattctttcatctggtcggggcagaggaattcattcaagaggtcgaggtgcagttcatggccgaggcagggggcgagggcgagggcgaggtgtgcctggtcatgctgtggtggatcaccgtcccagggcattggagatttctgcatttacggagagcgatagagaagatcttcttcctcattttgcgcaatatggtgaaattgaagattgtcagattgatgattcctcacttcatgcagtaattacattcaagacaagagcagaagctgaagcagctgcagttcatggagctcgtttcaaagggcaagatctaaaactggcatggaataaaccagtaactaatatttcagctgttgaaacagaagaagttgagcctgatgaagaagaatttcaggaagagtctttggtggatgactcattacttcaagatgatgatgaagaagaagaggacaatgaatctcgttcttggagaagatgatttgactgatcattgatctgcatatgctagaactctacctgtgtttcattagtattatctaatgtacttttacatatttgtaaaaacaatttttggtaaaatgtgatgaagatggatttcacaaatagacaaaaaagaagaaaactaccttctgatcttgtattttgaaagattgatgtttgcattttacttcagtaaacaattgctaaagacatcacactagaaacatatgcaatgtttttattacatacttctactggacatcacagaattctttgggttctttgtaatttaatgaataggtctgaaaacttatgaccaatacttgttataacttagaggactttgttttattccaaataaggaatgaatttgcatttaaaatcttaatgaatgttttcaaaactgaatagataacatagtactctaactaaagtctccaagttatgtattataatattacatagtagtatgcttaggctttactatgtattagccttttgttggactgtgtatgtattttaccatatgggttttaatgataatggtgtatgactgctttacatgagtccttatgcatccagatgttataataaagtggaatggtctctttaaaaaaaaaaaaggaaagaaaagagaaaagcaatgacaaaaaaaaaaaaaaaaa

SEQ ID NO: 30589 - DNA, 2209 bp, Homo Sapiens
ctaaatgaagagcgcttgggacctgaacaaccagcagcgatacccaggtacaaaggacctccagaccagagccagccagcagcaaaaagagcatggagctgaggagtacagcagcccccagagctgagggctacagcaacgtgggcttccagaatgaagaaaactttcttgagaacgagaacacatcaggaaacaactcaataagaagcagagctgtgcaaagcagggagcacacaaacaccaaacaggatgaagaacaggtcacagttgagcaggattctccaagaaacagagaacacatggaggatgatgatgaggagatgcaacaaaaagggtgtttggaaaggaggtatgacacagtatgtggtttctgtaggaaacacaaaacaactcttcggcacatcatctggggcattttattagcaggttatctggttatggtgatttcggcctgtgtgctgaactttcacagagcccttcctctttttgtgatcaccgtggctgccatcttctttgttgtctgggatcacctgatggccaaatacgaacatcgaattgatgagatgctgtctcctggcagaaggcttctaaacagccattggttctggctgaagtgggtgatctggagctccctggtcctagcagttattttctggttggcctttgacactgccaaattgggtcaacagcagctggtgtccttcggtgggctcataatgtacattgtcctgttatttctattttccaagtacccaaccagagtttactggagacctgtcttatggggaatcgggctacagtttcttcttgggctcttgattctaaggactgaccctggatttatagcttttgattggttgggcagacaagttcagacttttctggagtacacagatgctggtgcttcatttgtctttggtgagaaatacaaagaccacttctttgcatttaaggtcctgccgatcgtggttttcttcagcactgtgatgtccatgctgtactacctgggactgatgcagtggattattagaaaggttggatggatcatgctagttactacgggatcatctcctattgaatctgtagttgcttctggcaatatatttgttggacaaacggagtctccactgctggtccgaccatatttaccttacatcaccaagtctgaactccacgccatcatgaccgccgggttctctaccattgctggaagcgtgctaggtgcatacatttcttttggggttccatcctcccacttgttaacagcgtcagttatgtcagcacctgcgtcattggctgctgctaaactcttttggcctgagacagaaaaacctaaaataaccctcaagaatgccatgaaaatggaaagtggtgattcagggaatcttctagaagctgcaacacagggagcatcctcctccatctccctggtggccaacatcgctgtgaatctgattgccttcctggccctgctgtcttttatgaattcagccctgtcctggtttggaaacatgtttgactacccacagctgagttttgagctaatctgctcctacatcttcatgcccttttccttcatgatgggagtggaatggcaggacagctttatggttgccagactcataggttataagaccttcttcaatgaatttgtggcttatgagcacctctcaaaatggatccacttgaggaaagaaggtggacccaaatttgtaaacggtgtgcagcaatatatatcaattcgttctgagataatcgccacttacgctctctgtggttttgccaatatcgggtccctaggaatcgtgatcggcggactcacatccatggctccttccagaaagcgtgatatcgcctcgggggcagtgagagctctgattgcggggaccgtggcctgcttcatgacagcctgcatcgcaggcatactctccagcactcctgtggacatcaactgccatcacgttttagagaatgccttcaactccactttccctggaaacacaaccaaggtgatagcttgttgccaaagtctgttgagcagcactgttgccaagggtcctggtgaagtcatcccaggaggaaaccacagtctgtattctttgaagggctgctgcacattgttgaatccatcgacctttaactgcaatgggatctctaatacattttgaggtcagccacttctccagtggaactctgaagtacagatgct

SEQ ID NO: 30590 - DNA, 2578 bp, Homo Sapiens
aagtgccttgaattccttggtaattatttccttttaagcgtgtaactcttattattgctaaactgctttttaagttaatggtagttgttgtccaaaggaagtctgatctgtgtttttgaaacctcaatgatcgtctgtttctaattaaggaattggatgaagacatgcatcagaaaattgcaagggagatgaacctctctgaaactgcttttatccgaaaactgcacccgacagacaactttgcacaaagttcctgctttggactgagatggtttacaccagcgagtgaggtcccactctgtggccatgccaccctggcttctgcagctgtgctgtttcacaaaataaaaaacatgaacagcacgctcacgtttgtcactctgagtggagaactaagggccagacgagcagaggacggcatcgtcctggacttgcctctttatccagcccacccccaggacttccatgaagtagaggacttgataaagactgccataggcaacacactggtccaggacatctgttattctccagatacccaaaagctcctcgtccgcctcagtgacgtttacaacaggtcgtttctggagaacctgaaagtgaacacggagaatctgctgcaagttgaaaacacagggaaggtgaaagggcttattcttacccttaaaggagagcctggtgggcagacccaagcatttgacttttactcaagatattttgcaccgtgggttggtgtggctgaagacccagtgacagggtctgcacacgctgttctcagcagctactggtcccagcatctggggaagaaagaaatgcatgcttttcagtgttcccaccgaggaggagagctgggaatttcccttcgtccagacggaagggttgacattagaggaggtgcagctgttgttttagagggcacactgacagcctagaggtggttatgctgtgacgctgctgtctctaaccaccaagtattttctgcttaaaaagaaatgtaaggggctgcctttagcaaatgtgcgtagtagtctacttaatcctcatgttaaaaatcgaaaaatgggccaggcgcagtggctcatgcctgtaatcgtagcactttgagaggccaaggtgggtggatcacctgaggtcaggggttcgacaccagcctggccaacatggtgaaacctcgtctctactacaaatacaaaaattagctgggtgtggtgccacatgcctgtaattccagctacttgggaggctgaggcatggagaatcgcttgaacccaggaggcagaagttgcagtgagcagagatcacaccactgcactccagcctgggcaacagagtaagactccatccacacacacacacacacacacaaaattgaaaagtgaagacattttaatggagatttaatagtgctttccagactaatgaactaatggagttttggctccactcatgagtgtatttgaaatgtaagtaaccagctacaaagaataatgtcacttcatttgattatgactaccaatcaagagaaggaggaatacatttctgaggagtgatactaaaccatttgagcttaaatgagtacctgattttgcagccattaaaatgagtcaataactatgtggaaatatagaaaaatattttataatataatactaagaaagaggacagtaggccataaagtgttagcagtgttatgctatgtctatataaataagcatgggccattaaaaatagcaaactgaaaacagttcatgtgtggggggcaagtttagaagtaattttaatgtatctaagaagtgatttcctttattgttgtactcaggtacgaagactaaaaatcaggatgaatccagaaaattaacacaaaaaagtatgtattaggctacttcctgtcatagtgaaattaaacactcaaagtaatgtaatctcagctgggcgtggcggctcatgcctgtaatcccagcactttggcaggacaaggcaggaggatcacttgaacctaggagttcgagaccagcctgggcaacacagcgagaacttgtctctattaaaaaaaaaaaaaaaggaatgtaatttcaatctttttcttgatatatggcttgagaatgataatgtaaaagggaattcttctcttacttcaataaaatgggttttaacataactttaaattcagttaaatatacaatattgaatacctatagttgactttgggatggggactttttcaagtcattaagagtgtttgtttaaggtgatctcattgatggtagttctcagccgtctcaaaaactgcaagctaatcagtcagacattctttaatgaccccaattttttcactttaattgttaccatgttttctatttttactgatttttgctaaagcatgtaagagtgaatttattatagcagtaatcttgtgtttctcctgatgtgcaataaatcaataattcaccagcaaaaaaaaaaaaaaaaaaaaaaaaaaaaaaaaaaaaaaaaaaaaaaaaaaaaaaaaaaaaaaaaaaaaaaaaaaaaaaaaaaaaaaaaaaaaaaaaaaaaaaaaaaaaaaaaaaaaaaaaaaaaa

SEQ ID NO: 30591 - DNA, 2329 bp, Homo Sapiens
aggacctgagctcagcttccgccccagccagggaagcggcaggggaaagcaccggctccaggccagcgtgggccgctctctcgctcggtgcccgccgccatgtgggccgtcctgaggttagccctgcggccgtgtgcccgcgcctctcccgccgggccgcgcgcctatcacggggactcggtggcctcgctgggcacccagccggacttgggctctgccctctaccaggagaactacaagcagatgaaagcactagtaaatcagctccatgaacgagtggagcatataaaactaggaggtggtgagaaagcccgagcacttcacatatcaagaggaaaactattgcccagagaaagaattgacaatctcatagacccagggtctccatttctggaattatcccagtttgcaggttaccagttatatgacaatgaggaggtgccaggaggtggcattattacaggcattggaagagtatcaggagtagaatgcatgattattgccaatgatgccaccgtcaaaggaggtgcctactacccagtgactgtgaaaaaacaattacgggcccaagaaattgccatgcaaaacaggctcccctgcatctacttagttgattcgggaggagcatacttacctcgacaagcagatgtgtttccagatcgagaccactttggccgtacattctataatcaggcaattatgtcttctaaaaatattgcacagatcgcagtggtcatgggctcctgcaccgcaggaggagcctatgtgcctgccatggctgatgaaaacatcattgtacgcaagcagggtaccattttcttggcaggaccccccttggttaaagcggcaactggggaagaagtatctgctgaggatcttggaggtgctgatcttcattgcagaaagtctggagtaagtgaccactgggctttggatgatcatcatgcccttcacttaactaggaaggttgtgaggaatctaaattatcagaagaaattggatgtcaccattgaaccttctgaagagcctttatttcctgctgatgaattgtatggaatagttggtgctaaccttaagaggagctttgatgtccgagaggtcattgctagaatcgtggatggaagcagattcactgagttcaaagccttttatggagacacattagttacaggatttgctcgaatatttgggtacccagtaggtatcgttggaaacaacggagttctcttttctgaatctgcaaaaaagggtactcactttgtccagttatgctgccaaagaaatattcctctgctgttccttcaaaacattactggatttatggttggtagagagtatgaagctgaaggaattgccaaggatggtgccaagatggtggccgctgtggcctgtgcccaagtgcctaagataaccctcatcattgggggctcctatggagccggaaactatgggatgtgtggcagagcgtatagcccaagatttctctacatttggccaaatgctcgtatctcagtgatgggaggagagcaggcagccaatgtgttggccacgataacaaaggaccaaagagcccgggaaggaaagcagttctccagtgctgatgaagcggctttaaaagagcccatcattaagaagtttgaagaggaaggaaacccttactattccagcgcaagggtatgggatgatgggatcattgatccagcagacaccagactggtcttgggtctcagttttagtgcagccctcaacgcaccaatagagaagactgacttcggtatcttcaggatgtaactggaataaaggatgttttctgttggacatgtactgaaaattaacacatgtagtagccttaaaattttagacttctcgaacatgaggctgttacagtaatttttttaacactgtgcattgtacttttctaccttaaaaaaatcagtgaggatatttatttaatgaacatcaattccttttaaattttcttagagaaatttctctgtggctcagttttaccacccataaagcggagacagtaatttatggttatcctttctgacccacaaagtatgaaaagttctgtaatctgtaaactcagttctgtaatctgtattattgagatgattaatataaagttgtattttcactgaaatgattgttttgctggttatgcttggtgatattttagcgggcttatttttgaaaggcatctgttacttcagttgcataaagtgccctcacactgctgtgcagccattaccaccattcatctccagaatttgttctcagtcccaaactgaaactataccattcaaacaacagcgctccccatttc

SEQ ID NO: 30592 - DNA, 2332 bp, Homo Sapiens
aggatgcgcggggacgcgccaccgccctccgcgcccagttccgccggcgcttccccggcggctcccgggcgctgactctcccgggcttttccgcctttctcgctcccgccccgccgggcggttcggcggccggtccccggaccccgccgggagctgctcgtctcaccctcgccacggcgcggacaataaattaatgcatcgcgcttgagtggagggggcggctgggcgcctcggtggtagctttctctcctggctggagacgaccacaaccgacatgggctgtttctgcgctgttccggaagaattttactgcgaagttttgctcctggatgaatccaagttaacccttaccacccagcagcagggcatcaagaagtcaacgaaaggttccgttgtccttgaccacgtattccatcacgtaaaccttgtggagatagattattttgggctacgttactgtgacagaagccatcagacgtattggctggatcctgcaaaaacccttgctgaacacaaagaactgatcaacactggacctccatatactttgtattttggtattaaattctatgctgaagatccatgtaaacttaaagaagaaataaccagatatcagtttttcttgcaggtgaagcaagatgtccttcagggccgtctgccctgtcccgtcaacactgctgctcagctgggagcgtatgccatccagtcggagcttggagattatgacccatataaacatactgcaggatatgtatctgagtaccggtttgttcctgatcagaaggaagaacttgaagaagccatagaaaggattcataaaactctaatgggtcagattccttctgaggctgagctgaattacttgaggactgccaaatccctggagatgtatggcgttgacctccatcccgtctatggagaaaacaagtctgagtatttcttaggattaactccggttggtgttgttgtgtacaagaataaaaagcaagtggggaagtatttctggcctcggattacaaaggttcacttcaaggagactcaatttgaactcagagtactgggaaaagattgtaacgaaacctcattcttttttgaagctcggagtaaaactgcttgcaagcacctctggaagtgcagtgtggaacatcatacattttttagaatgccagaaaatgaatccaattcactgtcaagaaaactcagcaagtttggatccatacgttataagcaccgctacagtggcaggacagctttgcaaatgagccgagatctttctattcagcttccccggcctgatcagaatgtgacaagaagtcgaagcaagacttaccctaagcgaatagcacaaacacagccagctgaatcaaacaccatcagtaggataactgcaaacatggaaaatggagaaaatgaaggaacaattaaaattattgcaccttcaccagtaaaaagctttaagaaagcaaagaatgaaaatagccctgatacccaaagaagcaaatctcatgcaccgtgggaagaaaatggcccccagagtggactctacaattctcccagtgatcgcactaagtcgccaaagttcccttacacgcgtcgccgaaacccctcctgtggaagtgacaatgattctgtacagcctgtgaggaggaggaaagcccataacagtggtgaagattcagatcttaagcaaaggaggaggtcacgttcacgctgtaacaccagcagtggtagtgaatcagaaaattctaatagagaacaccggaaaaagagaaacagaatacggcaggagaatgatatggttgattcagcgcctcagtgggaagctgtattaaggagacaaaaggaaaaaaaccaagccgaccccaacagcaggcgatccagacacagatctcgttcgagaagccccgatatccaagcaaaagaagagttatggaagcacattcaaaaagaacttgtggatccatccggattgtccgaagaacaattaaaagagattccatacactaaaatagaggacacaaggtgacccaatccgcatcaggcattctcattcgccacgaagttaccgccagtatcgcaggtcccagtgttcagatggggagcgatcagttctctcggaagtgaattcaaaaacagatcttgtaccaccacttccggtgacccattcttcggatgctcagggttctggggatgctacagttcatcagagaagaaatgggtctaaagatagcctgatggaagaaaaacctcagacatctacaaacaacctggctggaaaacacacagcaaaaacaataaaaactatacaagcttcccgcctcaagaaaaaaaa

SEQ ID NO: 30593 - DNA, 1684 bp, Homo Sapiens
gtgctgagatctctccttctcgaaccctgctatgcctttgcatacgctgttttctccacctgccacgttctcaccccttcttcttccactgcaaactcctatgcagccgtcaaggccccattctcctctggaaagccttcccgatccccttggcaacaaccaccaccaatatttattcactgagcccactttgtgccaagcattgttctagacacggagaggaggaagctcctgccggctgagcgggcctggaggaagtgagcagcggggctcctgcctcccggcctggtccccgaagaccccagaagaacccggaacttgcttccattcggaatccagggaccaccctttgcactcagtaggcctttgttttcctgcgtggaaagcggttgggcttgggaggcgatggagccggagttcttgtacgacctgctgcagctccccaagggggtggagcccccagcggaggaggagctctcaaaaggaggaaagaagaaatacctgccacccacttcccggaaggaccccaaatttgaagaactgcagaaggtgttgatggagtggatcaatgccactcttctccccgagcacattgtggtccgcagcctggaggaggacatgttcgacgggctcatcctacaccacctattccagaggctggcggcgctcaagctggaagcagaggacatcgccctgacagccacaagccagaagcacaagctcacagtggtgctggaggccgtgaaccggagtctgcagctggaggagtggcaggccaagtggagcgtggagagcatcttcaacaaggacctgttgtctaccctgcacctccttgtggccctggccaagcgcttccagcccgacctctccctcccaaccaacgtccaggtggaggtcatcactatcgagagcaccaaaagtggtctgaagtcagagaagttggtggaacagctcactgaatacagcacagacaaggacgagcctccaaaggacgtctttgatgaattatttaagctggctccggagaaagtgaacgcagtgaaagaggccatcgtgaactttgtcaaccagaagctggaccgcctgggcctgtctgtgcagaatctggacacccagtttgcagatggggtcatcttactcttgctgattggacaacttgaaggcttcttcctgcacttaaaggaattctacctcactcccaactctcctgcagaaatgctgcacaacgtcaccctggcgctggagctgctgaaggacgagggcctgctcagctgccctgtcagccctgaagatatcgtgaacaaggatgccaagagcacactgcgggtgctctatggtctgttctgcaagcacacgcagaaggcacacagggacaggacgccccatggagccccgaattgaccctcactgcctccaaagcccagagcctgcctgtcagcccagctggagggcccgaggctgcagggtgtcctcccacagtcccgctgtttcctgtgcattcgtgacccgcttccctcccaccctgtctcctgtctccatcgttggattatctttgaacccccttgtgtggatcattttgagccgcctggccttgctcagtttattttaataaaagtatttctgggaaaaaaaaaaaaaaaaaaaaaaaaaaaaaaaaaaaaaaaaaaaaaaaaaaaaaaaaaaa

SEQ ID NO: 30594 - DNA, 1466 bp, Homo Sapiens
actccatggagcagctgctgcgcgccgagctgcgcaccgcgaccctgcgggccttcggcggccccggcgccggctgcatcagcgagggccgagcctacgacacggacgcaggcccagtgttcgtcaaagtcaaccgcaggacgcaggcccggcagatgtttgagggggaggtggccagcctggaggccctccggagcacgggcctggtgcgggtgccgaggcccatgaaggtcatcgacctgccgggaggtggggccgcctttgtgatggagcatttgaagatgaagagcttgagcagtcaagcatcaaaacttggagagcagatggcagatttgcatctttacaaccagaagctcagggagaagttgaaggaggaggagaacacagtgggccgaagaggtgagggtgctgagcctcagtatgtggacaagttcggcttccacacggtgacgtgctgcggcttcatcccgcaggtgaatgagtggcaggatgactggccgacctttttcgcccggcaccggctccaggcgcagctggacctcattgagaaggactatgctgaccgagaggcacgagaactctggtcccggctacaggtgaagatcccggatctgttttgtggcctagagattgtccccgcgttgctccacggggatctctggtcgggaaacgtggctgaggacgacgtggggcccattatttacgacccggcttccttctatggccattccgagtttgaactggcaatcgccttgatgtttggggggttccccagatccttcttcaccgcctaccaccggaagatccccaaggctccgggcttcgaccagcggctgctgctctaccagctgtttaactacctgaaccactggaaccacttcgggcgggagtacaggagcccttcgttgggcaccatgcgaaggctgctcaagtagcggcccctgccctcccttcccctgtccccgtccccgtctccgtctccccgtccctgtccccccgtcccccgtccctgtgcccccgtccctgtccccctgttcccgtctccccgtccctccgtctccatccccccgtccccccatcctcctgtccccgtccccccgtccccgtccctccatccctgtcccccgtccccctgtccctgtccccctgtccacataccaatccccctgtccccgacccccatccccgtcccccatctccgtccccgtcccccctgccccgtccccgtctccgttcccccgtccccatcctccatccccgtctcccatcgccgtccccccgtccccgtcccccgtccccccgtgcccccgtccccgtcccccctgtccctgtcccccttcccccgacccctcccagatcctggggaccaataaagcccgcagcgggcctcggctggcgaaaaaaaaaaaaaaaaaaaaaaaaaaaaaaaaaaaaaaaaaaaaaaaaaaaaaaaaaaaaaaaaaaaa

SEQ ID NO: 30595 - DNA, 1015 bp, Homo Sapiens
gagaacgaaagatggcggcgcccgtaaggcggacgctgttaggggtggcggggggttggcggcggttcgagaggctctgggccggcagtctaagctctcgcagcctggctcttgcagccgcaccctcaagcaacggatccccatggcgcttgttgggcgcgttgtgcctgcagcggccacctgtagtctccaagccgttgaccccattgcaggaagagatggcgtctctactgcagcagattgagatagagagaagcctgtattcagaccacgagcttcgtgctctggatgaaaaccagcgactggcaaagaagaaagctgaccttcatgatgaagaagatgaacaggatatattgctggcgcaagatttggaagatatgtgggagcagaaatttctacagttcaaacttggagctcgcataacagaagctgatgaaaagaatgaccgaacatccctgaacaggaagctagacaggaaccttgtcctgttagtcagagagaagtttggagaccaggatgtttggatactgccccaggcagagtggcagcctggggagacccttcgaggaacagctgaacgaaccctggccacactctcagaaaacaacatggaagccaagttcctaggaaatgcaccctgtgggcactacacattcaagttcccccaggcaatgcggacagagagtaacctcggagccaaggtgttcttcttcaaagcactgctattaactggagacttttcccaggctgggaataagggccatcatgtgtgggtcactaaggatgagctgggtgactatttgaaaccaaaatacctggcccaagttaggaggtttgtttcagacctctgatgggccgagctgcctgtggacggtgctcagacaagtctgggattagagcctcaaggacattgtgtgattgcctcacatttgcaggtaatatcaagcagcaaactaaattctgagaaataaacgagtctattactaaaaaaaaaaaaaaaaaaaaaaaaaaaaaa

SEQ ID NO: 30596 - DNA, 4207 bp, Homo Sapiens
gcgaccgcgggagctgcggggagcgcgggggcggcccggagcgtgccggggtccccgcgcctcgctcgccgaccgcgctccgaagatggtggcggcgccgtgcgcccggaggctggcccggcgctcgcactcggcgctgctcgcggcgctcacggtgctgctgctgcagacgctggtcgtgtggaatttcagcagcctcgactccggggccggggagcgccgcgggggcgcagcggtcggcggcggggagcagccgcccccggccccggccccgcgccgggagcgccgggacctgcccgccgagccggctgcagcccgaggaggaggaggaggcggcggcggaggaggaggaggacgggggccccaggcgcgggcgcggggaggcggccccggagaaccgcggggacagcagccggccagccggggggcactgcccgcccgggctctggatccacacccaagtccgctcatcaccctggagactcaggatggctacttttctcatcggccgaaagagaaagtgcgaacagacagcaacaacgagaactctgtccccaaagactttgagaatgtggacaacagcaacttcgcacccaggactcaaaagcagaagcaccagcctgagttggcgaagaagccaccgagtagacagaaggagcttttgaaaaggaagctggaacagcaggagaaaggaaaaggacatacattccctgggaaaggccccggtgaggtgctgcctcccggggacagagccgcagccaacagcagccacgggaaggatgtgtccagaccgcctcatgccaggaaaactgggggcagctcccccgagaccaagtatgaccagccccctaagtgtgacatctcaggcaaggaggccatctctgccctgtcccgtgctaagtccaagcactgccgccaggagattggggagacttactgccgccacaagttagggctgctgatgcctgagaaggtgactcggttctgccccctcgagggtaaagccaacaagaacgtgcagtgggacgaggactccgtggagtacatgccagccaacccggtcagaatcgcctttgtcctggtggtccacggccgtgcctctcggcagttgcagcgcatgttcaaggccatctaccacaaagaccacttctactacatccacgtggacaagcgctctaattacctgcatcggcaagtgctccaggtctccaggcagtacagcaatgtccgcgtcaccccctggagaatggccaccatctggggaggagccagcctcctgtccacctacctgcagagcatgcgggacctcctggagatgaccgactggccctgggacttcttcatcaacctgagtgcggccgactaccccatcaggacaaatgaccagttggtggcgtttctctcccgataccgagatatgaatttcttgaagtcacacggccgggacaatgcaaggttcattcggaagcagggcctggatcggctcttcctggagtgcgacgctcacatgtggcgcctgggagatcggcggatcccagagggcattgccgtggatggcggttcggactggttcctgctgaaccggaggtttgtagaatatgtgaccttctccacagacgatctggtgaccaagatgaaacagttctactcctacaccctgcttcctgctgagtccttcttccatacggtcctggagaacagcccccactgcgacaccatggtggacaacaacctgcgcatcaccaactggaatcgcaagctgggctgcaagtgccagtacaagcacatcgtggactggtgcggctgctcccccaatgacttcaagccgcaggacttccaccgcttccagcagacagcccggcctaccttctttgcccgcaagtttgaagccgtggtgaatcaggaaatcattgggcagctggactattacctgtacgggaactaccctgcaggtaccccgggcctgcgctcctactgggagaatgtctacgatgagcctgacggcatccacagcctgagcgacgtgacactcaccttgtaccactcctttgcccgcctgggtcttcgacgggctgagacgtccctgcacacggatggggagaacagctgccgatactacccaatgggccacccagcatctgtgcacctctacttccttgctgaccgcttccagggctttctgatcaagcatcatgctaccaatctggctgtgagcaaactagagactctggagacctgggtgatgccgaaaaaagtcttcaagatcgcaagcccacccagtgactttgggaggcttcagttttccgaggtcggcactgactgggatgccaaggagaggctattccgcaactttgggggtcttctggggcccatggatgagccggtgggtatgcagaagtgggggaagggacctaatgtgaccgtgaccgtcatttgggtggatcccgtcaatgtcatcgcagccacctacgacatcctcattgagtccactgccgaattcacacactacaagccccctttgaacttgcccctgaggcctggggtctggacagtgaaaattctccaccactgggtgccagttgcagagaccaaattcctcgttgcgcctctgaccttctcgaacaggcagcccatcaaacctgaggaggcactgaagctgcacaatgggcccctccgcaatgcctacatggagcagagcttccagagcctaaaccccgtcctcagcctgcccatcaaccccgcccaggtggaacaggcacggaggaacgcagcctccacgggcacagcgctggagggatggctggactcgttggtgggcgggatgtggactgccatggacatctgtgccacgggccccacagcctgcccggtcatgcagacctgcagccagacggcctggagctccttcagccctgaccccaagtcggagctgggtgccgtcaaacctgatggccggctcaggtagcactgggcacgaggagtgggccacagcaggatctcaacgggaaagcagccagaggggttgtggggcctgaaccccggcctccaccctgggggaggccctctgtgaatgggtctctcctggccatagaatgatggaaagggaaggtcagcaggtcaaagcaggatcagccaacaacctgcctttggcaagctgcgggtgggatggctcagtccctgcactgtgactgtctcacctcttctgsttgatcctcaagtcctacaggttccttgtcttccccttccagtgacccacccctgaccccagacgtgtgattttcagacttttctttcgagcagcagaacttcgtttacggagcacagtcataagtgraggttcagggtgctgacgaaatccaagctgctctggttgaagctgacaagtgcgaggttccctcccaaagctcagccctctgggcggtccccttgcccagggtatctcctacggtacctcttcagaacccaagggctctgcaaatgccagtttgacaagcactgcccagaccaaccatgggttcaaactccagccctgccctttggttcatttttctgcttctcttggctgggggactctggtgccagccttgaaagtcatggtcgtgggccctttcccatggaggctgcagccttaggagagctctgagcctctcagcagccctccttgggttgaactattctccttagtaactaggtaagtgggaaagccttttgatgtggcatggccaaggtccagccacaagtgcaactgccacctgtccaggggtctgggcctccttccctcaaggctgccacacaaagtagcagaaataggatgatgtttgtgagcaccagactcaagaccatgaccttctttgatccttgaaaatgggaactttgacagccatgaccatgaaactcacaaggcaacgcggatgaaactcacaaagcaatgcttggagcaaaactcctgagctagacagcacagcagcacccatcccctgccagagcccttccgtttgaggtcagacacacaaaaccttcgtcaattgcacaccggtgctgttgggagtgaccaaaccacatgaaccagacttttcccgtccaggaaatagcatttcagatttggtttttaatttcatgcccttcggccacaggctcaacgggacatgcaacataaaaatgggaaggttattcaacccgcgggaaaaaaaaaaaaaaaaaaaaaaaa

SEQ ID NO: 30597 - DNA, 3434 bp, Homo Sapiens
gccccgctgcccacctgcccgcctgcccacctgcccaggtgcgagtgcagccccgcgcgccggcctgagagccctgtggacaacctcgtcattgtcaggcacagagcggtagaccctgcttctctaagtgggcagcggacagcggcacgcacatttcacctgtcccgcagacaacagcaccatctgcttgggagaaccctctcccttctctgagaaagaaagatgtcgaatgggtattccacagacgagaatttccgctatctcatctcgtgcttcagggccagggtgaaaatgtacatccaggtggagcctgtgctggactacctgacctttctgcctgcagaggtgaaggagcagattcagaggacagtcgccacctccgggaacatgcaggcagttgaactgctgctgagcaccttggagaagggagtctggcaccttggttggactcgggaattcgtggaggccctccggagaaccggcagccctctggccgcccgctacatgaaccctgagctcacggacttgccctctccatcgtttgagaacgctcatgatgaatatctccaactgctgaacctccttcagcccactctggtggacaagcttctagttagagacgtcttggataagtgcatggaggaggaactgttgacaattgaagacagaaaccggattgctgctgcagaaaacaatggaaatgaatcaggtgtaagagagctactaaaaaggattgtgcagaaagaaaactggttctctgcatttctgaatgttcttcgtcaaacaggaaacaatgaacttgtccaagagttaacaggctctgattgctcagaaagcaatgcagagattgagaatttatcacaagttgatggtcctcaagtggaagagcaacttctttcaaccacagttcagccaaatctggagaaggaggtctggggcatggagaataactcatcagaatcatcttttgcagattcttctgtagtttcagaatcagacacaagtttggcagaaggaagtgtcagctgcttagatgaaagtcttggacataacagcaacatgggcagtgattcaggcaccatgggaagtgattcagatgaagagaatgtggcagcaagagcatccccggagccagaactccagctcaggccttaccaaatggaagttgcccagccagccttggaagggaagaatatcatcatctgcctccctacagggagtggaaaaaccagagtggctgtttacattgccaaggatcacttagacaagaagaaaaaagcatctgagcctggaaaagttatagttcttgtcaataaggtactgctagttgaacagctcttccgcaaggagttccaaccatttttgaagaaatggtatcgtgttattggattaagtggtgatacccaactgaaaatatcatttccagaagttgtcaagtcctgtgatattattatcagtacagctcaaatccttgaaaactccctcttaaacttggaaaatggagaagatgctggtgttcaattgtcagacttttccctcattatcattgatgaatgtcatcacaccaacaaagaagcagtgtataataacatcatgaggcattatttgatgcagaagttgaaaaacaatagactcaagaaagaaaacaaaccagtgattccccttcctcagatactgggactaacagcttcacctggtgttggaggggccacgaagcaagccaaagctgaagaacacattttaaaactatgtgccaatcttgatgcatttactattaaaactgttaaagaaaaccttgatcaactgaaaaaccaaatacaggagccatgcaagaagtttgccattgcagatgcaaccagagaagatccatttaaagagaaacttctagaaataatgacaaggattcaaacttattgtcaaatgagtccaatgtcagattttggaactcaaccctatgaacaatgggccattcaaatggaaaaaaaagctgcaaaagaaggaaatcgcaaagaacgtgtttgtgcagaacatttgaggaagtacaatgaggccctacaaattaatgacacaattcgaatgatagatgcgtatactcatcttgaaactttctataatgaagagaaagataagaagtttgcagtcatagaagatgatagtgatgagggtggtgatgatgagtattgtgatggtgatgaagatgaggatgatttaaagaaacctttgaaactggatgaaacagatagatttctcatgactttattttttgaaaacaataaaatgttgaaaaggctggctgaaaacccagaatatgaaaatgaaaagctgaccaaattaagaaataccataatggagcaatatactaggactgaggaatcagcacgaggaataatctttacaaaaacacgacagagtgcatatgcgctttcccagtggattactgaaaatgaaaaatttgctgaagtaggagtcaaagcccaccatctgattggagctggacacagcagtgagttcaaacccatgacacagaatgaacaaaaagaagtcattagtaaatttcgcactggaaaaataaatctgcttatcgctaccacagtggcagaagaaggtctggatattaaagaatgtaacattgttatccgttatggtctcgtcaccaatgaaatagccatggtccaggcccgtggtcgagccagagctgatgagagcacctacgtcctggttgctcacagtggttcaggagttatcgaacatgagacagttaatgatttccgagagaagatgatgtataaagctatacattgtgttcaaaatatgaaaccagaggagtatgctcataagattttggaattacagatgcaaagtataatggaaaagaaaatgaaaaccaagagaaatattgccaagcattacaagaataacccatcactaataactttcctttgcaaaaactgcagtgtgctagcctgttctggggaagatatccatgtaattgagaaaatgcatcacgtcaatatgaccccagaattcaaggaactttacattgtaagagaaaacaaagcactgcaaaagaagtgtgccgactatcaaataaatggtgaaatcatctgcaaatgtggccaggcttggggaacaatgatggtgcacaaaggcttagatttgccttgtctcaaaataaggaattttgtagtggttttcaaaaataattcaacaaagaaacaatacaaaaagtgggtagaattacctatcacatttcccaatcttgactattcagaatgctgtttatttagtgatgaggattagcacttgattgaagattcttttaaaatactatcagttaaacatttaatatgattatgattaatgtattcattatgctacagaactgacataagaatcaataaaatgattgttttactctgcaaaaaaaaaaaaaa

SEQ ID NO: 30598 - DNA, 1854 bp, Homo Sapiens
gcccgctgcggtcacgctgcgcccggcgccgcagggtgggcggcgaggcactcacgagggggacgctgagggcttccgcgcgggccacccgggtcaagcgcgctccgccgggaaacttctgcgggcgccgggctgaagctccgggcagggctgggaaggaaaggaaataccaaaatatttgcagactggatccaaatcaggagcccagatgaacttaaagaagcgagcatgggattcttagtttttcaagatccgtacacacgaagcctttaatcagcatcaactccagtgtccgttttctctggttttgtgaagactgcacaaaactctcatgatggagaaccaaaggacttagttacctgtttcagtgtcatctaaagtcaactgaaaagtgaagcaggcagtaatacagccatggaaagaaattcaagtttatggaagaacctaatagatgaacacccagtctgcacaacctggaagcaagaggccgaaggagccatttatcatcttgccagtattttatttgtagtaggtttcatgggtggcagtggattcttcgggctcctttatgtcttcagtttgctggggttgggttttctctgttctgctgtctgggcttgggtagatgtctgtgcagctgacatattttcctggaattttgtactgtttgtcatctgcttcatgcaatttgttcatattgcatatcaagttcgcagcataacctttgcccgagaattccaagtgttgtacagctcccttttccagcccctggggatctctttgcctgtcttcagaacgattgctttgagctctgaagtggttactttggaaaaggaacactgttatgccatgcaggggaaaacttccattgataaactctccttgcttgtttcaggaaggatcagagtgacagttgatggcgaatttctgcattacattttcccccttcagttcctggattctcctgagtgggattcactgagacccacagaggaaggcatttttcaggtaaccctcactgcagaaactgattgtcgatatgtgtcttggaggagaaagaaattatatctgctctttgctcagcatcgctacatctcccgccttttttcagtgctaattggcagtgacattgcagataaactctatgccttgaatgacagggtatatataggaaaaagatatcactatgatattcggctacccaacttctatcaaatgtcaactccagaaatacgcagatcacccctgacacaacattttcagaattccagacgatactgtgataaatgacatcaaagtctgaaatttataagtataaaaaaagactctctcttcatcattccccagtgaaatagcaaaatacaaaaaaagagctccctaatgtttttataaatcaaattcagaagcgagatgccattgccaactgttttattcctttcaacaactgcattgtgaataaactttacaaatttttcttgtatttctcattgttataattggggagggggtggataactatgggcagtttgcccttttctgcatcaaaactgggagaatgaaattccactttctcaattcttttctcacatttactcaaatgcattgtcttgccctatggactcaggagttgcttctcaagaaacagccagcaagtattctcagcctgagggtgggttgctactgtccacataggcatttccggaattcacttttttgctacaacctccagtgaaagcaattattttaaatgtgcagttacttgatgtgactaaaaagtagaataaatgcaagagataataatatgtgaatcttgaagcctattttattgctacaaataaaataacatttaaaaag

SEQ ID NO: 30599 - DNA, 2510 bp, Homo Sapiens
tttccgacacaatccgtacacggccttccctcccgcagtgcccgggctgcctccgggcctcccgccggccgtctcctttggctccctgcagggggccttccagcccaagagcacgaaccctgagctgccaccacgactggggccggtgccgagcgggctctcccagaaggggacacagatccccgaccatttccggccacctttgaggaaaccagggaagtggtgtgccatgcacgtgcgtgtggcttacatgatcctgagacaccaggagaaaatgaagggtgactcccacaagcttgactttcggaatgacctcctgccctgccttccggggccctatggggccctgccccctgggcaggagctctcccacccggcctccctcttcactgcgactggtgccgtccacgctgcagccaaccctttcacggcagctcccggggcccacggacccttcctgagccccagcacccacattgatccctttgggcgtcccacaagcttcgcctctttggctgccctctccaacggggcctttggaggcctgggcagccccacattcaactccggcgccgtctttgcccagaaagaaagcccaggggccccaccagccttcgcctccccaccggacccatggggccgcctgcaccgcagtcctctgacctttcctgcctgggtccggccccctgaggccgcccggactccaggctcagacaaggagcggcctgtggagcggagggagccctccatcaccaaggaggagaaggacagggacctccccttctcacggccccagctccgagtttctcctgctactcccaaggcccgggctggtgaggaggggcctcggccaaccaaggaatctgtgcgggtaaaggaagagcggaaggaggaggctgccgccgccgctgccgctgctgctgccgccgccgctgccgccgccgcagcagccactgggccccagggccttcacctgctgtttgagaggccccggccgcccccgtttctgggccctagcccaccagatcgctgtgctggcttcctggagccaacctggttggcagcacccccacgcctggcaaggccaccccgcttctatgaggcgggtgaggagctaactggacccggggccgtggccgctgcccgcctctacggtctggaacctgctcaccccttgctctacagccgcttggctcctccaccaccacctgctgcggccccgggaacccctcaccttctcagcaagaccccaccgggagcccttttgggggcaccacctccgcttgtgcccgccccccggcccagttccccacctaggggccctggcccagctcgggctgacaggtgaggggaacgggggggggtcggggcaaagctccatctccccttcctttaaccaggtcctagggctgaggttttaagccagggctggagggcaaaggtcataacctcaccagccacctctgaggtcatggaacctgggaacagaagcctcaacccccacaagaccaagcatcacatggagtgtagggtcactgggagagcagaggtcacagcctctagagaagggagaggggcgtgtgcatgggagtgtggctcatctcgggggccatggggcctcctgaggtacacctttgcccctgtaagggcctctaggccctgggcctgcctccccaagggctcactaagccagaggccaaagtgccccctcccgttcacctaccacccaagtcctcatgccctccgagggctgggggaggaggggctcaaggaaggggggttccatgtacatatttatcacccctttcacatagccccaagaccttttgtacatttttacaggggtgcccctcccaacagttcccttcctggttaattaaaccctcagactggtgctgtgttcctagcctctggcctctctgtggggaaaggggactgcagggggaagagccgggaagggacagtcaggcttctccctgggaaggtggggccagcaggagatgaccaacagggggcaggacctggggacctgggctggagggaagggcagaagcttcctacttggctgacagccccggttcccccaacatgttcccgttcactctgcccccacccccaaaggctcagcctctaaatctcagactccaccacctcttaatggctcagtccccttcaccccatttccaagtgcccccaggactcctgggccctgcttccctgaaccctgttctccaaaaccctgccccaggctaagggtggccagagaaggtcaccatgtaccacacaccaaagaagggggtcggcccaggggtgggcgacacaggcagcttcttcggcagcctcacggcagcaaccccagccttcccaaagcagcaggcgcctccaggctggggcccaacctagaaggcaggggtcaatctaacaaaaccctaacgttgacttttttccctggtggggcttcttctgtaacatgacttgcgaatatttatataaaaacgagtgttacaatg

SEQ ID NO: 30600 - DNA, 2781 bp, Homo Sapiens
gccggtgtcgtggtcgcggtacctgttccaacacggctcgcgggcccgtgccggctccggtccccggcgcggctgtccgagcccctgcggcgggcggacgatggtgtggcggagcacgcggacgcgggcggcgcggcggcgggcatgaaggaggatggaagggcaggacgaggtgtcggcgcgggagcagcacttccacagccaagtgcgggagtccacgatatgtttccttctttttgccattctctacgttgtttcctacttcatcatcacaagatacaagagaaaatcagatgaacaagaagatgaagatgccatcgtcaacaggatttcgttgtttttgagcacgttcactctcgcagtgtcagctggggctgttttgcttttacccttctcaatcatcagcaatgaaatcctgctttcttttcctcagaactactatattcagtggctaaatggctccctgattcatggtttgtggaatcttgcttcccttttttccaacctttgtttatttgtattgatgccctttgcctttttctttctggaatcagaaggctttgctggcctgaaaaagggaatccgagcccgcattttagagactttggtcatgcttcttcttcttgcgttactcattcttgggatagtgtgggtagcttcagcactcattgacaacgatgccgcaagcatggaatctttatatgatctctgggagttctatctaccctatttatattcctgtatatcattgatgggatgtttgttacttctcttgtgtacaccagttggcctttctcgtatgttcacagtgatgggtcagttgctagtgaagccaacaattcttgaagacctggatgaacaaatttatatcattaccttagaggaagaagcactccagagacgactaaatgggctgtcttcatcggtggaatacaacataatggagttggaacaagaacttgaaaatgtaaagactcttaagacaaaattagagaggcgaaaaaaggcttcagcatgggaaagaaatttggtgtatcccgctgttatggttctccttcttattgagacatccatctcggtcctcttggtggcttgtaatattctttgcctattggttgatgaaacagcaatgccaaaaggaacaagggggcctggaataggaaatgcctctctttctacgtttggttttgtgggagctgcgcttgaaatcattttgattttctatcttatggtgtcctctgttgtcggcttctatagccttcgattttttggaaactttactcccaagaaagatgacacaactatgacaaagatcattggaaattgtgtgtccatcttggttttgagctctgctctgcctgtgatgtcgagaacactgggaatcactagatttgatctacttggcgactttggaaggtttaattggctgggaaatttctatattgtattatcctacaatttgctttttgctattgtgacaacattgtgtctggtccgaaaattcacctctgcagttcgagaagaacttttcaaggccctagggcttcataaacttcacttaccaaatacttcaagggattcagaaacagccaagccttctgtaaatgggcatcagaaagcactgtgagacgcacagacggcgtcttctgccaccaagagacccgagaactccagattcacgacattcctgtcccatgtagaagcatttccattcaaccgtggcccctcttcagaacctagacctatcagtgccatttttttttcataatctacgaagaacttggctatggctgatcttttttaaatttaactttctgatggaccctgtagtttccagttaagtgcagattccttacagacatatagaacagcgcattcttctgtagacatttgctcatgttggtaaatacaatcacccatatgaaaaaattgttttcacctgatatgaaaatgttagaaaaggcaaactccgggacttctaaagatttacttaaatcccattatgtactttattcagaatgtagaagctgacttgaaaggcatccttggtactaagtgaagcttattcagaaaatgcatttttcaaatgcaatggcaactgcttgtagatatcatttttgcagtgtatgttggagctgtaatggttgcaattatgtttcttatttccttaaaagcaaaaagcgtagtttctgatttatgttatagaatgatactgattagactttgagccaaggggaaaatactaaattcttttaaacctggagccttagagagccacaggaatatcttctgttgtacagtctaataagctgtggtaggaagtatcatgtaatcacagtttaatgacagtttatgtatatatataattcagtattccctctgataacatagttgccagtgtttaatacacttgtaacttggatttttaccttataggctatatgtatactcagttttttaaagcatttttttcagagatcacttaattccccatgcttctgcaatgcatataaaaactataaatgccgagtggtagaaactcctctttcttcatagtcctcaggctttggttacatttgcatatgccatttgaagcctccagcttttaccagtttaacatccaaagttcacagcatcagcattcatggtgtaagaacagttttgcagtataacacgatctgataatcattcagttattaaattgtaaataattattgggatggtttcttggctttaagtccactgaataaaaactatgaaattgcaaaaaaaaaaaaaaaa

SEQ ID NO: 30601 - DNA, 8256 bp, Homo Sapiens
gcaccaccttccatggtcaataatgaacaacgccagcatgcagagcacatattcttatcatttaggaaatcaaaatcaccatttgcagtttgcaagcatattttggaaactagtaaagtggactatgtcctctttcaagctgccacagccataatggaagcagttgtccgagagtggattctcttggaaaaaggtagcatcgagtctctgcgaacattccttttaacctatgtcttacaaaggcccaaccttcaaaagtatgttcgggaacagattctactagcagtagcagtaattgtaaaaagaggatcattagataaatcaattgactgcaaaagcatttttcatgaagtcagccagttgattagtagtggcaatcccactgtgcaaactctggcctgttctattctgactgcgctattgagtgaattttcaagttcaagtaaaactagcaacattggattgagcatggaattccatggtaactgcaaaagagtttttcaggaagaagaccttcgtcagatcttcatgttaactgttgaagttctgcaggagttcagcaggcgggaaaacctcaatgctcagatgtcttcagtatttcagcgttaccttgcactcgccaatcaagtcttgagctggaactttcttcctccaaatttgggcagacattatatagctatgtttgaatcctcgcaaaatgtgctgttgaagccaacagagtcctggcgggagactcttctggacagcagagttatggagcttttcttcacagtacatcgaaaaatcagagaagattcagatatggcacaagattctctgcagtgccttgcccagttagcttctcttcatggacccatcttcccagatgaaggatcacaagttgattatctagcacacttcattgagggattactgaatactatcaatggaattgaaatagaagattctgaagctgtggggatctccagcattatcagcaacctgataaccgtgttcccacgaaatgttttaactgccattccaagtgaacttttctcctcctttgttaactgcctcacacacctcacttgttcttttgggcgaagtgctgcattggaagaagtgcttgataaagatgacatggtatacatggaagcatatgataaattgttggagtcctggttaactttggttcaagatgacaaacatttccataaaggcttttttacccaacatgcagttcaagttttcaattcctatattcagtgccacctagctgctccagatggcacaagaaatttgactgccaatggtgtggcctctcgtgaggaggaagaaataagtgaacttcaagaggatgatcgagaccagttttctgatcaactggccagtgtaggaatgctaggaagaattgctgcagaacactgtatacctcttctgacaagtttattagaagaaagagtaacaagactccatggtcagttacaacgacatcagcaacagttacttgcttcaccgggttcaagcactgttgacaacaaaatgcttgatgatctctatgaagatattcactggcttattttagttacaggctacctcttagctgatgatactcagggagagactccgctaatacctccagaaataatggaatattccattaagcattcatctgaagttgacattaatacaacacttcaaattttgggatctccaggagaaaaggcttcttccatcccagggtacaacagaacagattctgtgattaggctgttgtctgccattctcagagtttcagaagttgaatctcgagcaataagagcagatctcactcatctactaagtccccagatgggcaaagatattgtttggtttttaaaacgctgggcaaagacttatctcctggtggatgaaaaactgtatgatcagataagtctgccattcagtacagcgttcggagcagatacagagggttctcagtggataattggctacctcttacaaaaagtcatcagtaacctctcagtctggagtagtgagcaggaccttgcaaatgacactgtgcagctccttgtcactttggtggaaagaagagaaagggcaaacttagtaattcaatgtgagaactggtggaatttagctaagcagtttgcaagccgaagcccacctcttaatttcttgtcaagtcctgtgcagaggacattgatgaaggctctagtcttaggaggttttgcacatatggacacagaaaccaaacagcagtattggacagaggttcttcagccacttcagcagcgattcttaagagtgataaaccaagaaaacttccagcagatgtgtcagcaagaggaagtcaagcaggaaatcactgccacactagaggccctgtgtggcattgctgaggctacccagattgacaacgtagcaatcctgtttaattttttaatggacttccttaccaattgcattggattgatggaagtttacaagaataccccagagactgtcaatctcattatagaagtttttgttgaagttgcacataaacagatatgctatcttggagagtccaaagctatgaacttatatgaagcctgccttactttgttgcaagtgtattctaagaataatttagggcggcaaagaatagatgttacagcagaagaagagcaataccaagacctgcttctcattatggaacttcttactaacctgctgtcaaaagaattcatagatttcagtgatacagatgaagtgtttagaggacatgagccaggtcaagcagcaaacagatctgtgtcagcagcggatgttgtgttgtatggagtaaacctaattctgcccttgatgtcacaggatctcttgaagtttccaaccctttgtaatcagtactacaaattaatcacatttatctgtgagatttttcctgaaaaaataccacagcttcctgaggatctgtttaaaagtctgatgtactccctagaattaggaatgacatcaatgagttcggaggtttgccagctttgcctggaggccttgacaccgttagctgaacagtgtgcaaaagcacaagaaacagactcaccactttttctagcaacacggcactttcttaagctggtttttgatatgctggttttgcaaaagcacaacacagagatgaccactgcggctggcgaagctttctacacgttggtgtgtttgcaccaggctgaatattctgaactggtcgaaacattactatcaagtcagcaagacccagttatttaccagagattagcagatgccttcaacaagctcactgcaagcagcactcctcctacgctggatcggaagcagaagatggccttcttaaagagtttagaagaatttatggcaaatgttggtggtctcctttgtgtaaaataaacaacagaactttatgcttaatttagatcctttctgcaaagtgcactgaattgctgaaagttgacttgagtcttgtcctattcctcagttcatttggccattttggattttggagagcctgaaactttgatatgtatgtaatacagtgaaacaggagaggtcaacttggcatcagcttctgctgttaagtgttagccacaatctgtcatatatatgtcttttagattctgaatggtgatttaaaattttcaaaatgaaattccatatatgtgcaaacagatatgggcaccacgaaatacatatgcagtgccttttttccttttaacataggtggctagccaaagtttagaatttttgtcattaaatatgaaatggatatatgctaggcagtgtttctcaaaatctccatagatcgcctgcatcacttgaggagctggtgaaaaggcagattcttaggcccaactgtagaccttcagagtcagaatgtctggttgttgggcccaggagtcttcatgttaataagcttctccctttcgtcaccccaaaagttttgaatcaatgaaagagacattgaaaactcttaagaggttttgtgctttctagcttttcctccctttgatgattgggttttataattcagcaggaaggggaaacatcaccaggggtttgttggctttttcttagcttgctttcttgcttgcttgctttcttgcttttcttgctttctgtctctctctttcttttctctctctctctcacatcaacccagtgctgcaggttttgtgtaatacaagtcactaatcatactctgatgcctgaacttgaggaggaaaatacatgtatatttttgttccgtaaaaataaccttaggaactgtagccatttcattgccttaattttaagaggaaaatacaaaaacagctgatttgttttagtaagaaaccacgtcttgatgcttcagagttggtttagggtgttagctgctatgaacctgttgcccctttcgatcgtgtatttatgtaggtttatcagtgaaatgaaaggcttgtttccgtctagtctaactttttgagtgtgtttctatccagccacatagcccatatctactctaaatggcttgcttaagcaataattattttaaaggatgtgaatcactgattcacacagactattgcacgttggggcattaggggcaataattcttatccagacatgggagccagtgaatttaatttcagagattaaaaattcactttagatcctctagtttgatctcttaatcaggatttttatacagctgccaggctcccctaattcagtgtgccagcttacaatgtggaaatgaaagctaatttatacacagcaggcatatgaaactccactcattgcagtactttcacagcacagtgacaggtagaggactctggcacaggtgcactcatgaaactctgcttccaccatgttcctgacacctatctattaaaccattctgcaaatacggtttttctacctgattgcatatagcatatgtgtcattacatgtgatgctgtgcaaaactttgtataattctgtgttattaacagttaacaaaactggagcatctgaattacatccaacctgtgcatgtgatgttaggtagatgtgaatgcagggccttgggccataacttacatttctctcaatttgattagctttgagtcacaattaaggggaagcaaaaacatcttgaaaagactgctaggaaggaaattaatatcagtcatccagaagtacacgtttctgtattttaaaaaatactttgatgcatttatttttaggtgttttttttttccccttaaaaaacttgaagtgatatgcagcagtaatctatttgttttgcattgttcttggtgttttgtgtttcccagatccctcaagctttctcagctgttgcgaattatgtgtatctgtgtgtgtgctaagtacagtctctttaccaaagggcactgaaacacacaattgactggacaggtccacgcgccatgacaaaactataatcaagttattaaaactaaagaggagtgggaaaggaatgccttggtaagtaaaaaggcatctatatttaataacttttatccagatggcaacatatttgcaaaatttgcccagatcctattacaatactaaaaatagaaaatttcacctccatattcctgaggtgtaatttcattagactagttttagtttaaaaagaccttcttcagattggaccaaataatacttataagatcagcagaatgttgaatattagctcactggggtggggagaagccactaccattttttaggtgatggggatgccactgagttgcaacggctagaccttttcagggtggttgtgtccatgtttgcctgattggatgcttattcactttgtgttttcttttgttttattttgtccaattttgtctttagctgtgtttattaacttctccggtcttgttttgttttaatgctcttggcccagtgggtgtcaagaacactggcttaattcaagtcagttgattttttttctattaaaactgttgttaaaatattttttaaaacaaaaacattatttgtgccctcttttatatatgtcaaagggacactgtcaagtatttcatttttagatttttgttttataaaatttctgttgttcatatagtatcctttaacctctagttttccatacatcctttgtttgtttctcattttattttccttgacccatttatttcccaaggcacaatcactaaagactttgtactttcacagtctgttaatgtggtagcacctgtaactgtgttcttgttctgttaaaaggattgatttgcttttatagtccttgtgctggatgagtggctgcctcagtagcaaaactacctgacagtatttgacagtgtcctttccagcaccattatttgggtctttcagggtggccatctctgttagaagacagtagcatgttaacatcactgcattgagtttttgtctggtgtaaagtatgacttttaatgtaaacaaactgcaggtttttttcaaactaattttaagaatttagtcttatttcgttgtaaactgtgtatctaattatattacattactctgttcagatgggatggttactaccacttgtccatgattttcatttgaaaagcaagtatctatatcatttccccccagtcagcattatttaacactccccttaactgtctttgaactttctcttttaacaaaaatgtcaagtctttatagttgtaatatcaccatgtttcccatttctgttaatacttctatgaacccctaaagtattgaagggaactagctgtcagtttcaaggattacaagtttgagtctcctagtattcaacatcattctgaaccctgaaataatatttttctctgttaaacaatttttatctgtttgccacctctgttgttagaggtggttgtcaattgaccttactaagttagctgtctttgatgaggaattattgttattggttcctgaataaaacattaaccttttaagtcagaaggaacctcggtacttcttaaggtttgtttgtgttttctaaaaccagagaataaggaactgatttggctatgaggtttaacattataattttctgtaagctttcccacaaaaaaacattgttgatttgaggatataataatgttttaatctttttaaaatataagtggttattctctgacttggtaactatgttctgaaaacactgcatttaagaatttttaaaaattggttttctaaaattaaaatgtccaaattaggcatattgctgagctcaaattgatgtgaaatgccatggttccagttgaattttaagcatattttcatttagatataaaatatatgaagtatgctttgttgattatagtgagaacccatgacatagttaaccaaagaatatgtttggttcaaataaaaatagaagcttaatactgggcattcatactttttaaagagaatgaatgaagaaatcggtttcctgctgtagttctctatgggtaagtcttagtaaagacgagaatgctgaagtcggccgtggcgattccctcctaggaactgggaggtgtggcttgcccattacccgcttgaagctcacatctttaccctcctctcccactgtggtttgatcttcacctattcccaggccctcccagcaattggagaggtgtctttttttttggttttggttttttttctccccgtctgcattcttaggcctcttagctattaggaactgtcagatacatactagtagctaattttcctagcctgaaattatatactgcatctgcactatgtacctactagggatctgacctcaagtgttttctgagcccaggcttcctggtgtggtgtcttttaccacataaaattattacaaattgcaaatgttggtattgtgatttgattatctgtacaaagaaagaagctctatgcagtgagtttgtggtttaatggtcacaaaaatgttagcactgctaccactcagcacgtgtaaaattttttaaatttataaatattaaaattttaaacttacactaagacttttcagttttatttaaagacccagggatgagtgtactgtttaaatatttacctctattaacataactaatgaaggtataaaattgcatttagtttttcagaagatgctgcaatatgattttaggaaataaggctatgtattgagccagttataggctgaatatcaggttgataaaattttatttgtatttttaaaattcataaatgggagttaaaatgtgtcttttcactaaatatttttattacaaaaaaaaaaaaaaaaaaaaaaa

SEQ ID NO: 30602 - DNA, 3113 bp, Homo Sapiens
gaacctggcttcgctaacgccctcccagctccctcgggcctgacttccggtttcctcgcgcgtccctggcgccgagcccgcggacagcggcagccccttttccggctgagagctcatccacacttccaatcactttccggagtgcttcccctccctccggcccgtgctggtcccgacggcgggcctgggtctcgcgcgcgtattgctgggtaacgggccttctctcgcgtcggcccggcccctcctgcctcggctcgtccctccttccagaacgtcccgggctcctgccgagtcagaagaaatgggactccctccgcgacgtgcccggagcagctcccttcgctgtggaagcggcggtgtcttcgaagaaaccggaagcccgtggtgacccctggcgacccggtttgttttcggtccgtttccaaacactaaggaatcgaaactcggcggccttgggggcggccctacgtagcctggcttctggttgtcatggatgcactggtagaagatgatatctgtattctgaatcatgaaaaagcccataagagagatacagtgactccagtttcaatatattcaggagatgaatctgttgcttcccattttgctcttgtcactgcatatgaagacatcaaaaaacgacttaaggattcagagaaagagaactctttgttaaagaagagaataagatttttggaagaaaagctaatagctcgatttgaagaagaaacaagttccgtgggacgagaacaagtaaataaggcctatcatgcatatcgagaggtttgcattgatagagataatttgaagagcaaactggacaaaatgaataaagacaactctgaatctttgaaagtattgaatgagcagctacaatctaaagaagtagaactcctccagctgaggacagaggtggaaactcagcaggtgatgaggaatttaaatccaccttcatcaaactgggaggtggaaaagttgagctgtgacctgaagatccatggtttggaacaagagctggaactgatgaggaaagaatgtagcgatctcaaaatagaactacagaaagccaaacaaacggatccatatcaggaagacaatctgaagagcagagatctccaaaaactaagcatttcaagtgataatatgcagcatgcatactgggaactgaagagagaaatgtctaatttacatctggtgactcaagtacaagctgaactactaagaaaactgaaaacctcaactgcaatcaagaaagcctgtgcccctgtaggatgcagtgaagaccttggaagagacagcacaaaactgcacttgatgaattttactgcaacatacacaagacatccccctctcttaccaaatggcaaagctctttgtcataccacatcttcccctttaccaggagatgtaaaggttttatcagagaaagcaatcctccaatcatggacagacaatgagagatccattcctaatgatggtacatgctttcaggaacacagttcttatggcagaaattctctggaagacaattcctgggtatttccaagtcctcctaaatcaagtgagacagcatttggggaaactaaaactaaaactttgcctttacccaaccttccaccactgcattacttggatcaacataatcagaactgcctttataagaattaatttggaagagattcacgatttcaccatgaggacacttatctctttcagtggtcctcccaagaaattatttaacaaactgaaaggagattttgattaaaattttgcagaggtcttcagtatctatatttgaacacactgtacaatagtacaaaaaccaacatagttggttttctagtatgaaagagcaccctctagctccatattctaagaatctgaaatatgctactatactaattaataagtaaacttaaggtgtttaaaaaactctgccttctatattaattgtaaaattttgcctctcagaagaatggaattggagattgtagacgtggttttacaaaatgtgaaatgtctaaatatctgttcataaaaataaaaggaaaacatgtttcttcaaattgcataatggaacaaatggcaatgtgagtaggttacatttctgttgttataatgcgtaaagatattgaaaatataatgaaataaaagcatcttaggttataccatctttatatgctattgcgtttcaatatttaagatttaaagtgattttttggtcacagtgttttgttgataaaatttttttagaattgaagtttgaattctaagacttgaaacaacctgatcactgaagccaactttgtcccagcacattccttaagtcctaattgggaaaaaaaaaaaaaaaaatgaaatagttgaaaaactctggggtgtaaacaaatgattgtaaccctacacactattcaataagtagtagaaggagcatcacacagatttcagtctaatctgcccttctgtgggccataatataaacataaatgtgtgtaatgataaaaagtcattttcttcaaagagactacagctagctgcacattgtgtagagcagcttctaaattgttagactttgtgttgaaatgtaatattctatttattgagaaagtgatttaaaattattatttttaatcatagaaatcagggtttgggctgtattgatattgtcgatcatgaaatgtccacactttctaagtggccaattatttggaaataaagaaggaaataaagatggcttcacatggaaatttaagttctttcagggtggagatttacttggttcatacaccttttgcctgaattaaagtatttcatgtaggaggacttttatcctttttgatagacagtttcatatatcttgaactcaatatctcagatctcttctactgtattactgaatagcatacatacatagacaatgttcgccattcactagatatttttttctattatcttacacttattcaagcttgtctgtgattaatggaattggtgtcagatgctggaatttattctgaccaatgaacacagctgactcaggggagtacaatctcctgccaagtaatagaaccaaacccaatatgcataaaagaaatacaatactccaggcttta

SEQ ID NO: 30603 - DNA, 2916 bp, Homo Sapiens
agtcggagacacaacaaagatggcggcggtgactgtgacggtgacgaagacggcggcggcggcgacggcatttaacaaggcggtgtggtttactccatgcagttgtcaggagacctctgtatggcttttcaattttagttgaaattctctctccatggccttttggagtcgcttgctgtatctccgaagtaaatttcaattactctacatttcatcaatgttggagtggcaagaaaaaggaggaacagatttggggtgaaaagttttgttttctaggtctaacaaactgtaaatgttaaaaaagcaaagatgggtgaaaaaaaaccagagcctttggacttcgtgaaagattttcaggaatacctgactcagcagacccatcacgtgaacatgatttctggatcagttagtggggacaaagaagcagaggctcttcagggagctggaacagatggtgatcaaaatggacttgatcacccatctgttgaagtttccttggatgaaaactcaggaatgttagtagacgggtttgaaaggacctttgatgggaagcttaagtgtcggtactgcaactatgccagcaaaggaacagcccggcttattgaacacatcagaatccacacaggtgaaaaacctcatcgatgtcatctttgtccatttgcatctgcttatgagcgtcatctggaagcccatatgcgttctcatactggagaaaaaccatacaaatgtgaattatgttccttccgctgcagtgatcgaagtaacttgtcccatcatcgaaggcgcaagcataaaatggtaccaattaaaggtactaggtcttccttaagcagcaagaaaatgtggggggttttacagaagaaaacaagcaatctgggctatagcagaagagcactaatcaacttaagtccaccttccgtggtggttcagaaaccagactaccttaacgattttacccacgaaatcccaaatatccagactgactcctatgaaagtatggcaaaaaccacaccaactggtggccttccaagggacccccaagaactcatggttgataaccctttgaatcagctctcgactctagcagggcagttgtccagtctgccacccgaaaaccaaaaccctgcatcacctgatgtagttccctgccctgatgaaaagcctttcatgattcagcagccctctacccaagcagtagtttctgccgtatcagcaagtattcctcagagctcctctcccacaagcccagaacctcggccatcccatagtcaaaggaactatagtccagtggcaggtccaagcagtgagccaagtgcccacacgagcactcccagcataggaaacagccagccaagcaccccagccccagccctgccggtccaggaccctcagcttctgcaccactgccagcactgtgatatgtactttgcagacaacatcctttacactattcatatgggatgtcatgggtatgaaaatccttttcagtgtaatatatgtggatgcaaatgtaaaaacaagtatgattttgcctgtcattttgcaagagggcacataaccaacattgattgaaaatagtcatattttacttagttttgctgtttttgtggtttggttttttttgttttttgttttggtcatccctaataaagtgtctgctaattcaaggcttatacattatatttatagaatataaatttgtcagtggaataaaatttcccctttttttcataaaaatctggtcagggtcatttatatattagaacagttagacacattggtgtctcttttttcctttccttttgacattggagaattggagtgcagtcataatcttacaagatgttcatttgaatttctcacatttatggtccataaaaacttcaaggcttatccatacttttgatgtttcaatatgcattgaactggatgttatttctgccatatttcaaaatggtagaataaattacagaatttattactactcatttcagtgtttagtacagaaattgccttaaaaattgctattaattgaaatatcatttagttcacattccttaagttgaatcggtagtttcatttcaactgataatagtaaagctatttcagtttagtaaaaattttcttttttccacaagaggaaatgtaaaacagttaagacttgaaattgaaaattcttttaatatttaaaataacttgtttattcaatgtctaaacacatgtcagttttccactggatttttattttcacaggtaaatacactagagtgctagatgcctttttcccctgtcagtttgactttcatttaaatccttcattctgatatcattactgttaggtgaggtggataactataatgagaatctcttattcttcctattcctttgatgacaaaagagataaagtgaagtcatccttattattaaaatgcagcctccaaacaaatttctcaagattccttttccttccttctatccattttctgcccataatttccaagaaaaggtgggtatggaaacacatgagagaatgtgatagtgaagtcatatttacaaaactgagaacatgtccaaaatggattcttgtctcctcttcagaattagccatttaaaatattttctgtgacttcaaattgtaattcttatttgcagttttaccagtcttcatgtacagtgacgaaactgtgtagaaactaaatcatcgctttagtaagaaaggataaaaaggtgtggaaatgaatataaaatgcatctaaacatgacatttaatttgtttataaaaataagacttactaaatatagagtaattcattttgaataggaggctattgtttttatattgtgtaataactcacgtactctgaagagagcttggtcaaacaataaaatacattgttacgaaaaaaaaaaaaaaaa

SEQ ID NO: 30604 - DNA, 3557 bp, Homo Sapiens
gattcccgggcccacccgacccagcggcgcgaccctggccctccgggaccctccgctgactccaccgcgcacttcccgggacccccacacacatcccagccctccggccgatccctccctactcggtgccgggtgccccccgccctctccaggcccggatctcctcccccaggtccccgggtcggccccagccaggcccccttcgaaccccgccggcggcccgggctggggcgcaccatgcggctgcggctccggcttctggcgctgctgcttctgctgctggcaccgcccgcgcgcgccccgaagccctcggcgcaggacgtgagcctgggcgtggactggctgactcgctatggttacctgccgccaccccaccctgcccaggcccagctgcagagccctgagaagttgcgcgatgccatcaaagtcatgcagaggttcgcggggctgccggagaccggccgcatggacccagggacagtggccaccatgcgtaagccccgctgctccctgcctgacgtgctgggggtggcggggctggtcaggcggcgtcgccggtacgctctgagcggcagcgtgtggaagaagcgaaccctgacatggagggtacgttccttcccccagagctcccagctgagccaggagaccgtgcgggtcctcatgagctatgccctgatggcctggggcatggagtcaggcctcacatttcatgaggtggattccccccagggccaggagcccgacatcctcatcgactttgcccgcgccttccaccaggacagctaccccttcgacgggttggggggcaccctagcccatgccttcttccctggggagcaccccatctccggggacactcactttgacgatgaggagacctggacttttgggtcaaaagacggcgaggggaccgacctgtttgccgtggctgtccatgagtttggccacgccctgggcctgggccactcctcagcccccaactccattatgaggcccttctaccagggtccggtgggcgaccctgacaagtaccgcctgtctcaggatgaccgcgatggcctgcagcaactctatgggaaggcgccccaaaccccatatgacaagcccacaaggaaacccctggctcctccgccccagcccccggcctcgcccacacacagcccatccttccccatccctgatcgatgtgagggcaattttgacgccatcgccaacatccgaggggaaactttcttcttcaaaggcccctggttctggcgcctccagccctccggacagctggtgtccccgcgacccgcacggctgcaccgcttctgggaggggctgcccgcccaggtgagggtggtgcaggccgcctatgctcggcaccgagacggccgaatcctcctctttagcgggccccagttctgggtgttccaggaccggcagctggagggcggggcgcggccgctcacggagctggggctgcccccgggagaggaggtggacgccgtgttctcgtggccacagaacgggaagacctacctggtccgcggccggcagtactggcgctacgacgaggcggcggcgcgcccggaccccggctaccctcgcgacctgagcctctgggaaggcgcgcccccctcccctgacgatgtcaccgtcagcaacgcaggtgacacctacttcttcaagggcgcccactactggcgcttccccaagaacagcatcaagaccgagccggacgccccccagcccatggggcccaactggctggactgccccgccccgagctctggtccccgcgcccccaggccccccaaagcgacccccgtgtccgaaacctgcgattgtcagtgcgagctcaaccaggccgcaggacgttggcctgctcccatcccgctgctcctcttgcccctgctggtggggggtgtagcctcccgctgatggggggagccatccagaccgaacagcgccctccacggccgagtcccccgccgctggacctggtcgggggttgtgaggcgctgcggaggccccttgtctgttcccacggacgggggctcgggcgcggactaagcaggggggatctcccgcgcaggggcggcggcggcggggaccggtcgcctggcgctgggctcagtctcctcagggtctgagaccccggcgctgccaccggaacccgccttcaggggcgcacgcgcgctgggaccatgcgtcggtcgtcgcccccgtcgttccctcccggctgccgccagggggcggtcggaccccgcctcccgagcccggggaggggcggggaggacaaggggcgggcccgcggcctcacccggagggacggcagccccggtcgcgcgctggccccgcaggaccttccttttccaggaagagccagcttttctcggagcgcagtcctgggactctccgcagccccgccccgcctggccactgcgtctggcattcctgggtcgttagaggacaggcctgactgcgaagctgtgccttgcccctctcccacccgcagtttctcaccccgttctgctcccacaaggcccccctacagtcactgccacactggtggggacctgggacccagacccggaaccagcccagatatcacccctgaggacccatgcgccacgtcctgggtggtggaatcagtggctggagggacgacccttgctctccaggctgttaaccttttccgttgctcccccgccacccacctcctcctccccaggccacccagcttgggcacctccctgggcccagaactgccttccattcaatggggaacccttctatccccaagaaccccttccctgcttgcaccctggagagaacagcttgactcccatcaactcaacgctggtggaaagacagggaccgaaccctggctcaggcctggtcattgcctcctcagcactccctcctgggaggccttagctctagagtgaggggtgggtggaacctgggggcacctcgttcaccctgtccccactccccacagttttaggatctaaatgattgcctctggaactattcttctagactatcccacatcagaatcactgggaaatttaagtttgcagatcccacactcaccctgaatcctcactcagggtggggtcaggaatctgcattttaactagtcgcggggattgtggggggcagtagctggctgtttcgtggcatttctgtggctctgcagtgttcctccaccccaggaccaatatgttcaggccacaccgatggcctgaaccccatgggtagagtcacttaggggccacttcctaagttgctgtccagcctcagtgaccccctagtgcttcctggagctgaggctgtgggcggctgtcccagcaaccatgcgaggggttgccccagttgctcatacaaacagatcagcatgaggacagaaggcaggagactttggtcagttacctgggaattctgggctgccaggaaacgatttgggcctctgtcagtttcttttccatgtatgaggagggggaaatttgtatattagaaacttattcatcccactcaggacaataaaaacgaatgtacaaaaaaaa

SEQ ID NO: 30605 - DNA, 3525 bp, Homo Sapiens
ggtggagagccggccgacgggagccgcggcggagcctgttgagctcgcgcgggctgccgggagtggtctctgaggcggcggcggcggcggggatcgtctccggcactggcgcaccatgtcggtcagtgtccatgagacccgcaagtcgcggagcagcacggggtccatgaacgtcaccctcttccacaaggcctcccacccggactgtgtgctggcccacctcaacacgcttcgcaagcactgcatgttcaccgacgtcacactctgggcgggcgaccgtgccttcccctgtcaccgtgccgtgctggccgcctctagccgctattttgaggccatgttcagccatggccttcgggagagccgggatgacactgtcaacttccaggacaacctgcacccggaggtgctggagctgctgctggactttgcctactcctcacgcatcgccatcaacgaggagaacgctgagtcactgctggaggcaggcgacatgctgcagttccacgatgtgcgggatgctgccgccgagttcctggagaagaaccttttcccctccaactgcctgggcatgatgctgctctcggacgcccaccagtgccgccggctgtatgagttctcctggcgcatgtgcctggtgcactttgagacggtgaggcagagcgaggacttcaacagcctgtccaaggacacactgctggacctcatctcgagtgatgagctggagaccgaggacgagcgggtggtcttcgaggccatcctccagtgggtgaagcacgacctggagccacggaaggtccacttgcccgagctcctccgcagcgtgcgtctggccttgctgccgtccgactgcctgcaggaggccgtctccagcgaggccctcctcatggcagacgagcgcaccaagcttatcatggatgaggccctgcgctgcaagaccaggatcctgcagaatgatggcgtggtcaccagcccctgtgcccggccacgcaaggcgggccacacgctactcatcctggggggccagaccttcatgtgtgacaagatctaccaggtggaccacaaggccaaggagatcatccccaaggccgacctgcccagcccccggaaggagttcagcgcctcagcgatcggctgcaaggtctatgtgacggggggcaggggctccgagaacggggtctccaaggatgtctgggtgtacgacaccgtacatgaggaatggtccaaggcggcgcccatgctgattgcccgctttggccatggctcagctgagctggagaactgcctctatgtggtggggggacacacatccctggcaggggtcttcccggcctcgccttctgtctccctgaaacaagtggagaaatacgaccctggggccaacaagtggatgatggtggcccccttgcgggatggcgtcagcaatgccgcagtggtgagtgccaagctgaagctctttgttttcggaggaaccagcatccaccgggacatggtgtccaaggtccagtgctatgacccctcggagaacaggtggacgatcaaggccgagtgcccccagccttggcggtacacagccgctgccgtcctgggcagccagatcttcatcatgggaggtgacacggaattcacagccgcctcggcctaccgctttgactgtgagaccaaccagtggacgcggattggggacatgactgccaagcgcatgtcctgccatgccctggcttccggcaacaagctctatgtggtcgggggctactttgggacccagaggtgtaagactctggactgctatgaccccacttcagatacatggaactgcatcaccacagtgccctactcacttatccccacggcctttgtcagcacctggaagcacctgcccgcgtgaggagcacctgctgagcccagccagaccgcggccttcagtgtcacagcgtggccttgcttgtctgccacagcgggagctaagccggccctgggccagcactccgagaggtggaaggggccctgccagctctggggagcagcagccttgggctgttctgagctttaggcaagagaagagaagcatctcttgcatccgtgcccctgggggcctcttcagctttgcagtggtttgtgggaagacatacctcccagaggggcatggactgccaccaggactgaccctggcgtcggggagaaggacacttgcagagccttgagatcacctgtttggcaggtcctggactggggccgggcaggcaggggcagggaggcgccccgggtgggctttggggctgcggcactgccacacatcctttccctcctggcctgccctgctggggctctactgccatctatagatggtgtcctgggcctgggaaactaggttcccaggggttgagaccagaaaggtgaccaagacagattttttaaggtgcagaaactgcaggggggcctcagtgacatccatgaggccttattagcaaaggacacccagacctccaaggtttgtgggccccttccacaaagctgtaagtcccagcccacctactcagggccttgctcagtgctgtggcccggtggggacacagttgctcgtggccactcagtggagctgggcctgcagcagactcaaggctccgagtgccctgggggtcacccctcccctcccctcctcagagcccaccctgagaggcagcagtgacccccatggcacacacctgccaacagcactgggggcttctccccaggagaccacgctgccctccaagaccaggagcagctgtgagctggagacagcagagggaccccagggtgtcccctgcagatcccaccagggccgcatccatctcagtgtggaggacagtgacgggaccctcaccatcctcttgcgttttggcccccatttgctccctgagctccaagataagaatggccccgagagaactgctgaacatttgttcattgctgtcacctcctgagtcactggggtccctcaccagcacctccctgacacctgggctatggagaggttggcgcctgtcagtgaccatcctaatgcctctcgctcactcccaagccaccatttgagagggaggggtgttggtgccctgacagggactgggcagggtgtccaaacttggggcttcccaggcacctgcagtgtgaacactgcttggctggctcaagattagggccgcggagggggctgtgcacataccagttacttaagcagccacgagtgtcccccatgccttggtgcgggtcctggaggcctcttgggggtgggacctttgggcagggtttgcccactgacgcgcccgccatggggcactggctgcatggggctccttggaccctgtagacccagcaggagcctggccgcggggactgcagggagggtgcctggacccgtggggttgcttcattgagataaagcacacttatcacatagcacaaaggacgtgccatggtgctttccccaaaagttgtgttgcttttatcagttttctaacttaataaaaagagttgagaaaaaaaaaa

SEQ ID NO: 30606 - DNA, 5539 bp, Homo Sapiens
ctcagttggatgtgcagtcaggcaggagcagagctttgacccagacccagggtgggcaggaactgaggggccaactctagcactgacttactgtgaacctggggcaagccccttcccctctctgggcctcagtttccttaacttcaaatgaagtcccttccctaagtagagagccattgctgttgttctgggatggctctgcttccagatcgcaggcctttcagcatctttctttggaggaagattggaggctggtgctcactgtccaggcctcagactctggggcagagagggggattctcagcctgagccctcccttcaccctgcccctccccccagcaatggcctgagcccccatggctgcccctcaggacctggacatcgctgtgtggctggccacggtgcacctggagcagtatgcagacacgttccgacggcatggcctggctacagcaggtgcagcccggggcctgggccacgaggagttgaagcagttgggcatcagcgccacagggcaccggaaacgcattctacgcctgctacagacaggcaccgaagagggctccctggatcccaaatcagatagtgccatggaaccatcccccagcccagccccgcaagcccagccccctaagcccgtgccgaagcccaggaccgtgtttggtggactcagtggccctgccaccactcagagacctgggctgagcccagccctcgggggaccaggagtgtccaggagcccagagcccagcccaaggcctcctcctctccccacttcctcctctgagcagtcttcagccctaaatactgtggagatgatgcctaattccatctacttcggcctggactcaagaggcagggcacaggcagctcaggacaaggccccagacagctcccaaatctctgcccccacccctgccctcaggcccacaacaggcacagtgcacatcatggatcctggttgcctgtactatggtgtccaacctgtggggactccaggagcccccgacagaagagagagcagaggtgtttgtcagggcagggctgaacacaggctcagcagacaggatctggaggcacgggaggatgctggctatgccagccttgagctacctggagactccaccctcttatcgcccaccctggaaacagaggagaccagtgatgacctcatttcaccctatgccagcttctccttcacggcagaccgcctcacgcccctgctcagtggctggctagacaagctctcccctcagggaaactatgtcttccagagacgctttgtgcagttcaatgggaggagtctgatgtactttggcagtgacaaggaccccttccctaagggtgtgatacctttgactgccattgagatgacccgcagcagcaaggacaacaagttccaggtcatcaccggccagagggtgttcgtgttccgcacagagagcgaggctcagcgggacatgtggtgctccacgctgcagtcctgtctgaaggagcagcgcctcctgggccacccccggcccccccaaccaccccgacccctccgcacgggcatgctggagctgcgtggacacaaggccaaggtgtttgctgccttgagccctggagagctggcactgtacaagagtgagcaggccttctctctgggcatcgggatctgcttcatcgaactgcagggctgcagcgtccgggagaccaagagtcgaagctttgacctgctcacaccccatcgctgcttcagcttcacagccgagtctgggggtgctcggcagagctgggcggccgctctgcaggaagcagtaaccgagaccctgtctgactacgaggtggctgagaagatctggtctaatcgggccaaccggcagtgtgcggactgtgggtcctcccgcccagattgggctgctgtcaatttgggggtggtcatctgcaagcagtgtgcaggtcagcaccgggccctgggttctgggatctccaaggtgcagagcctgaagctggacacgagtgtctggagtaatgagatagtacagttattcattgtcctgggaaatgatcgtgccaaccgcttctgggcagggaccctacccccaggtgagggactacatccagatgcgacccctggcccccggggagagttcatctcccgaaagtaccgtctgggtctcttccggaagccccaccctcagtacccagatcatagccagcttctccaggcactgtgtgcagctgtggcaagacccaacctgctgaagaacatgacccagctcctctgtgttgaggcctttgaaggcgaggagccctggttccccccagcccctgatggcagctgccctggcctcttgccctcagacccctcccctggtgtgtacaatgaggtggtggtgcgtgctacttacagcggcttcctgtactgcagtcccgtcagcaacaaagctggaccctcaccccctcgcaggggccgggatgctcccccgcgcctttggtgtgtgctgggagcagctctggaaatgtttgcatcggaaaacagccctgaacccctcagcctcatacagccccaggatattgtatgtctgggtgtgagccccccacccactgacccaggtgacaggttccccttttcctttgagctcatcctcgctggggggaggatccagcattttggcacagatggagctgacagtctggaggcctggactagtgctgtgggcaagtggttctccccgctgagctgccaccagctgctgggccccgggctgctgcggctgggccgcctatggctgcggtccccctcccatacagccccggcccctggtctctggctgtcagggtttggcctccttcgtggtgaccacctcttcctgtgctcagcgccgggcccaggccccccagcccctgaggacatggtgcatctgcggcggctacaggagatcagtgtggtttctgcagctgacaccccagataagaaagagcatttggtcctggtggagacaggaaggaccctgtatctgcaaggagagggccggctggacttcacggcatggaacgcagccattgggggcgcggctggtgggggcggcacagggctgcaggagcagcagatgagccggggtgacatccccatcatcgtggatgcctgcatcagttttgttacccagcatgggctccggctggaaggtgtataccggaaagggggcgctcgtgcccgcagcctgagactcctggctgagttccgtcgggatgcccggtcggtgaagctccgaccaggggagcactttgtggaggatgtcactgacacactcaaacgcttctttcgtgagctcgatgaccctgtgacctctgcacggttgctgcctcgctggagggaggctgctgagctgccccagaagaatcagcgcctggagaaatataaagatgtgattggctgcctgccgcgggtcaaccgccgcacactggccaccctcattgggcatctctatcgggtgcagaaatgtgcggctctaaaccagatgtgcacgcggaacttggctctgctgtttgcacccagcgtgttccagacggatgggcgaggggagcacgaggtgcgagtgctgcaagagctcattgatggctacatctctgtctttgatatcgattctgaccaggtagctcagattgacttggaggtcagtcttatcaccacctggaaggacgtgcagctgtctcaggctggagacctcatcatggaagtttatatagagcagcagctcccagacaactgtgtcaccctgaaggtgtccccaaccctgactgctgaggagctgactaaccaggtactggagatgcgggggacagcagctgggatggacttgtgggtgacttttgagattcgcgagcatggggagctggagcggccactgcatcccaaggaaaaggtcttagagcaggctttacaatggtgccagctcccagagccctgctcagcttccctgctcttgaaaaaagtccccctggcccaagctggctgcctcttcacaggtatccgacgtgagagcccacgggtggggctgttgcggtgtcgtgaggagccacctcgcttgctgggaagccgcttccaggagaggttctttctgctgcgtggccgctgcctgctgctgctcaaggagaagaaaagctctaaaccagaacgggagtggcctttggaaggtgccaaggtctacctgggaatccgcaagaagttaaagcccccaacaccgtggggcttcacattgatactagagaagatgcacctctacttgtcctgcactgacgaggatgaaatgtgggattggaccaccagcatccttaaagcccagcacgatgaccagcagccagtggtcttacgacgccattcctcctctgaccttgcccgtcagaagtttggcactatgcctttgctgcctatccgtggggatgacagtggagccaccctcctctctgccaatcagaccctgcggcgactacacaaccggaggaccctgtccatgttctttccaatgaagtcatcccaggggtctgtggaggagcaagaggagctggaggagcctgtgtacgaggagccagtgtatgaggaagtaggggccttccctgagttgatccaggacacttctacctccttctccaccacacgggagtggacagtgaagccagagaaccccctcaccagccagaagtcattggatcaaccctttctctccaagtcaagcacccttggccaggaggagaggccacctgagccccctccaggccccccttcaaagagcagtccccaggcacgggggtccctagaggaacagctgctccaggagctcagcagcctcatcctgaggaaaggagagaccactgcaggcctgggaagtccttcccagccatccagcccccaatcccccagccccactggccttccaacacagacacctggcttccccacccaacccccatgcacttccagtccaccctccagccagcccctcacatgaccctaggaccagcagtctgagagggtaggtaccagaagacccagaaactcttatcgtggcactgttgcagcttcctctgccctggctggaaagactccagaatccagtgtggtgctgtggaaggagcactggactaaaggcttcagtggctgcgtgtcccaggacaggtcatggcccctctctgggcccagcccatttatctataccatgaggtaactgaagtaaggagagcagtgaatgtcaaactgtgtttcttagagccataagccccacatattatccctgaacaagggcagctcctgctttatatatttgatacgtaggggttccatgagagattttgggttttaaaggaatggttttactgcattaaagaaaaaaaatgctttggaaaccagaggcctgggtgatgttaaagtctatcctgtcccacttcctacattctgggactaccgtgaagcctggagtagggagagcgagtttgggagctgggactcggggagtcaaaaatagatgagtaattgtcaataaacctgggaaccaaaaga

SEQ ID NO: 30607 - DNA, 3944 bp, Homo Sapiens
ggggggatttcggcggcggaaacatggcggtcgcggccgggccggtaacggagaaagtttacgccgacactggcctgtattagcgcgtatggcctcgggccctcgttccccaaggcgtgccgcctccctgttctcagtcgcaggctgaagccttgtctgctctcctcctttttggtttggttttggaactgactccgagggttgggagagcgcgttggtggcgacggccgagtcagatcactataaacaaaatttccacaagagaaaatgttgaaataggagttgcggatacattggatatactggatgaaatacaagcggttaatttttgtaacgtgagggaaaagcccacattgctggttacatgtgtaaatcactgcgttattgctttagtcattgtctctatttagcaatgacaagactggaagaagtaaatagagaagtgaacatgcattcttcagtgcggtatcttggctatttagccagaatcaatttattggttgctatatgcttaggtctatacgtaagatgggaaaaaacagcaaattccttaattttggtaatttttattcttggtctttttgttcttggaatcgccagcatactctattactatttttcaatggaagcagcaagtttaagtctctccaatctttggtttggattcttgcttggcctcctatgttttcttgataattcatcctttaaaaatgatgtaaaagaagaatcaaccaaatatttgcttctaacatccatagtgttaaggatattgtgctctctggtggagagaatttctggctatgtccgtcatcggcccactttactaaccacagttgaatttctggagcttgttggatttgccattgccagcacaactatgttggtggagaagtctctgagtgtcattttgcttgttgtagctctggctatgctgattattgatctgagaatgaaatctttcttagctattccaaacttagttatttttgcagttttgttatttttttcctcattggaaactcccaaaaatccgattgcttttgcgtgtttttttatttgcctgataactgatcctttccttgacatttattttagtggactttcagtaactgaaagatggaaaccctttttgtaccgtggaagaatttgcagaagactttcagtcgtttttgctggaatgattgagcttacattttttattctttccgcattcaaacttagagacactcacctctggtattttgtaatacctggcttttccatttttggaattttcaggatgatttgtcatattatttttcttttaactctttggggattccataccaaattaaatgactgccataaagtatattttactcacaggacagattacaatagccttgatagaatcatggcatccaaagggatgcgccatttttgcttgatttcagagcagttggtgttctttagtcttcttgcaacagcgattttgggagcagtttcctggcagccaacaaatggaattttcttgagcatgttcctaatcgttttgccattggaatccatggctcatgggctcttccatgaattgggtaactgtttaggaggaacatctgttggatatgctattgtgattcccaccaacttctgcagtcctgatggtcagccaacactgcttcccccagaacatgtacaggagttaaatttgaggtctactggcatgctcaatgctatccaaagattttttgcatatcatatgattgagacctatggatgtgactattccacaagtggactgtcatttgatactctgcattccaaactaaaagctttcctcgaacttcggacagtggatggacccagacatgatacgtatattttgtattacagtgggcacacccatggtacaggagagtgggctctagcaggtggagatacactacgccttgacacacttatagaatggtggagagaaaagaatggttccttttgttcccggcttattatcgtattagacagcgaaaattcaaccccttgggtgaaagaagtgaggaaaattaatgaccagtatattgcagtgcaaggagcagagttgataaaaacagtagatattgaagaagctgacccgccacagctaggtgactttacaaaagactgggtagaatataactgcaactcctgtaataacatctgctggactgaaaagggacgcacagtgaaagcagtatatggtgtgtcaaaacggtggagtgactacactctgcatttgccaacgggaagcgatgtggccaagcactggatgttacactttcctcgtattacatatcccctagtgcatttggcaaattggttatgcggtctgaaccttttttggatctgcaaaacttgttttaggtgcttgaaaagattaaaaatgagttggtttcttcctactgtgctggacacaggacaaggcttcaaacttgtcaaatcttaatttggaccccaaagcgggatattaataagcactcatactaccaattatcactaacttgccattttttgtatgctgtatttttatttgtggaaaataccttgctacttctgtagctgctctcactttgtcttttcttaagtaattatggtatatataaggcgttgggaaaaaacattttataatgaaagtatgtagggagtcaaatgcttactgtaaatgcataagagacgttaaaaataacactgcactttcaggaatgtttgcttatggtcctgattagaaagaaacagttgtctatgctctgcaatggtcaatgatgaattactaatgccttattttctaggcatataataatagtttagagaatgtagaccagataaatttgtttactgttttaagaaaactaccagtttacttacagaagattcttttttccaaacagtaggtttcatccaagaccatttgaagaactgcaaactctttctcttagaaaagaaagagggcagcctaaaataaacgcaaaatttgcttatactccatcacattcagatgtcttggttgtgacttattaccagtgtggcagagaacccaagttacattttagatcaaaatattctttatgtaggtattgttaaaaggctagagcctacaagttgctcttccatgcgttggtcagggggccctgaaaacactggtaatattaagagtctttctcagggtaacttaatgttttcttaatgaacagtgtttccagctacaaattcttccaataaattgtcttcctttttgaaaagtactctcatagaagaaatttagcaatttctcgttgactgactcagtctattttaagtattcagaaaagattttgatccccattgagttaatgctctgccttgaaaattatttttctgatccttgttagtgataacattttttttctactgaaggtcagaggataggaaacaagtatttctcttctggtatacatgtaatgtattctgtaaaaaagtattcatattggcaattttagttaggcataatattgtggttgtaatttttaaaacttagtgttttgtctgattaaagcaggcactgatcagggtatctcctaagaggtaattcacttcttattcctttccaataattattacattctaaattttcatctatgagaaataacaaacaagaagggaatagaattaaattggggtataatctaatcttcattgtttaaatggtttgccttctcaccattgaagccatttttttatagcctcagaaagaggaaataatgcctccaccattttctacctggtgacttgaaaattgaacttttaagttaggaagaagttagagtcagggaacttgtataccactatctatgcagcattgttatagtctgattatttctgtgttttgaatatgattttcctaatgctctaaataaaattttgttaaaaatcaaaaaaaaaaaaaaaaaatcgac

SEQ ID NO: 30608 - DNA, 3010 bp, Homo Sapiens
cgggaggaggcgcgggcgcgccgggagggaccggcggcggcatgggccgggggccctgggatgcgggcccgtctcgccgcctgctgccgctgttgctgctgctcggcctggcccgcggcgccgcgggagcgccgggccccgacggtttagacgtctgtgccacttgccatgaacatgccacatgccagcaaagagaagggaagaagatctgtatttgcaactatggatttgtagggaacgggaggactcagtgtgttgataaaaatgagtgccagtttggagccactcttgtctgtgggaaccacacatcttgccacaacacccccgggggcttctattgcatttgcctggaaggatatcgagccacaaacaacaacaagacattcattcccaacgatggcaccttttgtacagacatagatgagtgtgaagtttctggcctgtgcaggcatggagggcgatgcgtgaacactcatgggagctttgaatgctactgtatggatggatacttgccaaggaatggacctgaacctttccacccgaccaccgatgccacatcatgcacagaaatagactgtggtacccctcctgaggttccagatggctatatcataggaaattatacgtctagtctgggcagccaggttcgttatgcttgcagagaaggattcttcagtgttccagaagatacagtttcaagctgcacaggcctgggcacatgggagtccccaaaattacattgccaagagatcaactgtggcaaccctccagaaatgcggcacgccatcttggtaggaaatcacagctccaggctgggcggtgtggctcgctatgtctgtcaagagggctttgagagccctggaggaaagatcacttctgtttgcacagagaaaggcacctggagagaaagtactttaacatgcacagaaattctgacaaagattaatgatgtatcactgtttaatgatacctgtgtgagatggcaaataaactcaagaagaataaaccccaagatctcatatgtgatatccataaaaggacaacggttggaccctatggaatcagttcgtgaggagacagtcaacttgaccacagacagcaggaccccagaagtgtgcctagccctgtacccaggcaccaactacaccgtgaacatctccacagcacctcccaggcgctcgatgccagccgtcatcggtttccagacagctgaagttgatctcttagaagatgatggaagtttcaatatttcaatatttaatgaaacttgtttgaaattgaacaggcgttctaggaaagttggatcagaacacatgtaccaatttaccgttctgggtcagaggtggtatctggctaacttttctcatgcaacatcgtttaacttcacaacgagggaacaagtgcctgtagtgtgtttggatctgtaccctacgactgattatacggtgaatgtgaccctgctgagatctcctaagcggcactcagtgcaaataacaatagcaactcccccagcagtaaaacagaccatcagtaacatttcaggatttaatgaaacctgcttgagatggagaagcatcaagacagctgatatggaggagatgtatttattccacatttggggccagagatggtatcagaaggaatttgcccaggaaatgacctttaatatcagtagcagcagccgagatcccgaggtgtgcttggacctacgtccgggtaccaactacaatgtcagtctccgggctctgtcttcggaacttcctgtggtcatctccctgacaacccagataacagagcctcccctcccggaagtagaattttttacggtgcacagaggacctctaccacgcctcagactgaggaaagccaaggagaaaaatggaccaatcagttcatatcaggtgttagtgcttcccctggccctccaaagcacattttcttgtgattctgaaggcgcttcctccttctttagcaacgcctctgatgctgatggatacgtggctgcagaactactggccaaagatgttccagatgatgccatggagatacctataggagacaggctgtactatggggaatattataatgcacccttgaaaagagggagtgattactgcattatattacgaatcacaagtgaatggaataaggtgagaagacactcctgtgcagtttgggctcaggtgaaagattcgtcactcatgctgctgcagatggcgggtgttggactgggttccctggctgttgtgatcattctcacattcctctccttctcagcggtgtgatggcagatggacactgagtggggaggatgcactgctgctgggcaggtgttctggcagcttctcaggtgcccgcacagaggctccgtgtgacttccgtccagggagcatgtgggcctgcaactttctccattcccagctgggccccattcctggatttaagatggtggctatccctgaggagtcaccataaggagaaaactcaggaattctgagtcttccctgctacaggaccagttctgtgcaatgaacttgagactcctgatgtacactgtgatattgaccgaaggctacatacagatctgtgaatcttggctgggacttcctctgagtgatgcctgagggtcagctcctctagacattgactgcaagagaatctctgcaacctcctatataaaagcatttctgttaattcattcagaatccattctttacaatatgcagtgagatgggcttaagtttgggctagagtttgactttatgaaggaggtcattgaaaaagagaacagtgacgtaggcaaatgtttcaagcactttagaaacagtacttttcctataattagttgatatactaatgagaaaatatactagcctggccatgccaataagtttcctgctgtgtctgttaggcagcattgctttgatgcaatttctattgtcctatatattcaaaagtaatgtctacattccagtaaaaatatcccgtaattaagaaaaaaaaaaaaaaa

SEQ ID NO: 30609 - DNA, 2432 bp, Homo Sapiens
gtagatgcgatggcgccgattccaaagactgtggggcggatcaagctagactgctctctacggcccagctgcccactggaggtcgctgctgcacccaaactttgcaaggaattcggtccagaggattacggcgaagaggacatagtggattttcttcgacggcttgtggagagtgatccccagggcctgcaccggatccatgtggatgggagcagcgggcggctgcagctgtggcaccatgattacctcctgggccacttggatgatgaagggaaatcaactggacagagtgacaggggcaagggggctgagggactgggcacctactgtggtctccgcaagtccttcctgtatcctccccaagagtctgagccctgccctcaaagcccctctgcctctgccaccttccccagtgtctcagacagcctgcctcaggtggccatgccccagaagctcctggtgacagaagaggaagccaatcgcctggctgaggagctggtggctgaggaggagcgcatgaaacagaaagcagagaaaaagcgactcaagaagaagcgtcaaaaggaacggaagcgacaggagcgtttggagcagtactgtggggagcccaaggccagcactacctcagatggagatgagagccccccatccagccctggaaacccagttcagggacagtgtggtgaagaagaggactcactggatctatctagcacttttgtgtctctggctttgcgcaaggttggggattggcccctcagtgcccgcagagagaagggactgaaccaggagccccaaggcaggggtctggccctccagaagatgggtcaagaggaagagagccctccagccacttccccatgctgagctggcaccctcaggcctacgttccctcaggtgccctcgaagcactgctttgaggtcccctggcctgtctccactcttgcattatccttcatgtcaccgaagccaccccaaccagcccctctcccagactcagagtagaaggccccatcctctcaagccccaggacccttcaaagggctgggacatcctgggacttgggctccagcatctgtctcaggccagatgagggggcaccggtccctcatagggcagggccaagtatatatcccttggtgggggacatagtgtggtgacagttcactgcatattttgagaccttattctctagatccatagttaatgatgccctggcagtcatacctcttgccatggggaagcttctgatgagagaaaggagccccacatccactgaaacatcctttggttctcaagcttcttctggaggcagcaaggaaaaataaaacccaccaaggctcaagaagggaactatagaaaagttcaggtttttaggctatagcagagacagtgagaaagcatctgggcctttctcttcctcttggtccaggggacctcattcaccaactagagcttggtgtacaggaacggggtcacagtgctgagggggcttgagtcccacctttcagcttgatggatgctcacctcttctcagccccagctcgtgccctgtttttctagccatagcccccagattactcacagctcctcatgccatttcctgtccagattgctatgtatgactctgacctctcttgtccagtggtctggtgctcacctcctctcactgctagaatattcaccaagggtttgcatttgggaagtcccttaccagctcctgcttagagctggtagggccatacatgtccacactcccaactggtggctctcccgctgaatggggcctcagcaggtgcccaagctgctacaaccttggccactctgtttctccaccccagcactgggcatggtaattagcctttccccatgttaatttattcagttttttcaagggtcaactgaattccccacttcctgggtaagaagcatgatctccttttaatttcacgtctaagatcctggcagcttcccctagctggttcctctgtagtcctgctgggactgtcagctcatttaaatgtgggtctgcagaaggctttaggtctcccccaacccccttacctttcacagaggaacctttcatcaggataaatgattattgctgccctgtgggtcttgctcaatactgttcatacctggagagagaaggtattgaaacatctcctttatgtgtgactttcccaaatttttaaaaattgtttatggtttaggccccttaaatactgtgtagcaggatgaagtctaccattaccagctgggtcaccttggatgggtctgtcaacatctaagcctcagttccctcacctgtaaaaatgagggtagtccctacctcataagggatattgtgaggatggaaagcgaaagtgtgagaaaatacctcccaagtgcctggtacatagtgggtgctaaataaaccactttttgtctgc

SEQ ID NO: 30610 - DNA, 4314 bp, Homo Sapiens
gagagcagaggacgagccgggacgcggcgccgcggcaccagggcgcgcagccgggccggcccgaccccaccggccatacggtggagccatcgaagcccccacccacaggctgacagaggcaccgttcaccagagggctcaacaccgggatctatgtttaagttttaactctcgcctccaaagaccacgataattccttccccaaagcccagcagccccccagccccgcgcagccccagcctgcctcccggcgcccagatgcccgccatgccctccagcggccccggggacaccagcagctctgctgcggagcgggaggaggaccgaaaggacggagaggagcaggaggagccgcgtggcaaggaggagcgccaagagcccagcaccacggcacggaaggtggggcggcctgggaggaagcgcaagcaccccccggtggaaagcggtgacacgccaaaggaccctgcggtgatctccaagtccccatccatggcccaggactcaggcgcctcagagctattacccaatggggacttggagaagcggagtgagccccagccagaggaggggagccctgctggggggcagaagggcggggccccagcagagggagagggtgcagctgagaccctgcctgaagcctcaagagcagtggaaaatggctgctgcacccccaaggagggccgaggagcccctgcagaagcgggcaaagaacagaaggagaccaacatcgaatccatgaaaatggagggctcccggggccggctgcggggtggcttgggctgggagtccagcctccgtcagcggcccatgccgaggctcaccttccaggcgggggacccctactacatcagcaagcgcaagcgggacgagtggctggcacgctggaaaagggaggctgagaagaaagccaaggtcattgcaggaatgaatgctgtggaagaaaaccaggggcccggggagtctcagaaggtggaggaggccagccctcctgctgtgcagcagcccactgaccccgcatcccccactgtggctaccacgcctgagcccgtggggtccgatgctggggacaagaatgccaccaaagcaggcgatgacgagccagagtacgaggacggccggggctttggcattggggagctggtgtgggggaaactgcggggcttctcctggtggccaggccgcattgtgtcttggtggatgacgggccggagccgagcagctgaaggcacccgctgggtcatgtggttcggagacggcaaattctcagtggtgtgtgttgagaagctgatgccgctgagctcgttttgcagtgcgttccaccaggccacgtacaacaagcagcccatgtaccgcaaagccatctacgaggtcctgcaggtggccagcagccgcgcggggaagctgttcccggtgtgccacgacagcgatgagagtgacactgccaaggccgtggaggtgcagaacaagcccatgattgaatgggccctggggggcttccagccttctggccctaagggcctggagccaccagaagaagagaagaatccctacaaagaagtgtacacggacatgtgggtggaacctgaggcagctgcctacgcaccacctccaccagccaaaaagccccggaagagcacagcggagaagcccaaggtcaaggagattattgatgagcgcacaagagagcggctggtgtacgaggtgcggcagaagtgccggaacattgaggacatctgcatctcctgtgggagcctcaatgttaccctggaacaccccctcttcgttggaggaatgtgccaaaactgcaagaactgctttctggagtgtgcgtaccagtacgacgacgacggctaccagtcctactgcaccatctgctgtgggggccgtgaggtgctcatgtgcggaaacaacaactgctgcaggtgcttttgcgtggagtgtgtggacctcttggtggggccgggggctgcccaggcagccattaaggaagacccctggaactgctacatgtgcgggcacaagggtacctacgggctgctgcggcggcgagaggactggccctcccggctccagatgttcttcgctaataaccacgaccaggaatttgaccctccaaaggtttacccacctgtcccagctgagaagaggaagcccatccgggtgctgtctctctttgatggaatcgctacagggctcctggtgctgaaggacttgggcattcaggtggaccgctacattgcctcggaggtgtgtgaggactccatcacggtgggcatggtgcggcaccaggggaagatcatgtacgtcggggacgtccgcagcgtcacacagaagcatatccaggagtggggcccattcgatctggtgattgggggcagtccctgcaatgacctctccatcgtcaaccctgctcgcaagggcctctacgagggcactggccggctcttctttgagttctaccgcctcctgcatgatgcgcggcccaaggagggagatgatcgccccttcttctggctctttgagaatgtggtggccatgggcgttagtgacaagagggacatctcgcgatttctcgagtccaaccctgtgatgattgatgccaaagaagtgtcagctgcacacagggcccgctacttctggggtaaccttcccggtatgaacaggccgttggcatccactgtgaatgataagctggagctgcaggagtgtctggagcatggcaggatagccaagttcagcaaagtgaggaccattactacgaggtcaaactccataaagcagggcaaagaccagcattttcctgtcttcatgaatgagaaagaggacatcttatggtgcactgaaatggaaagggtatttggtttcccagtccactatactgacgtctccaacatgagccgcttggcgaggcagagactgctgggccggtcatggagcgtgccagtcatccgccacctcttcgctccgctgaaggagtattttgcgtgtgtgtaagggacatgggggcaaactgaggtagcgacacaaagttaaacaaacaaacaaaaaacacaaaacataataaaacaccaagaacatgaggatggagagaagtatcagcacccagaagagaaaaaggaatttaaaacaaaaaccacagaggcggaaataccggagggctttgccttgcgaaaagggttggacatcatctcctgatttttcaatgttattcttcagtcctatttaaaaacaaaaccaagctcccttcccttcctcccccttcccttttttttcggtcagaccttttattttctactcttttcagaggggttttctgtttgtttgggttttgtttcttgctgtgactgaaacaagaaggttattgcagcaaaaatcagtaacaaaaaatagtaacaataccttgcagaggaaaggtgggagagaggaaaaaaggaaattctatagaaatctatatattgggttgtttttttttttgttttttgttttttttttttgggtttttttttttactatatatcttttttttgttgtctctagcctgatcagataggagcacaagcaggggacggaaagagagagacactcaggcggcagcattccctcccagccactgagctgtcgtgccagcaccattcctggtcacgcaaaacagaacccagttagcagcagggagacgagaacaccacacaagacatttttctacagtatttcaggtgcctaccacacaggaaaccttgaagaaaatcagtttctagaagccgctgttacctcttgtttacagtttatatatatatgatagatatgagatatatatataaaaggtactgttaactactgtacaacccgacttcataatggtgctttcaaacagcgagatgagtaaaaacatcagcttccacgttgccttctgcgcaaagggtttcaccaaggatggagaaagggagacagcttgcagatggcgcgttctcacggtgggctcttccccttggtttgtaacgaagtgaaggaggagaacttgggagccaggttctccctgccaaaaagggggctagatgaggtggtcgggcccgtggacagctgagagtgggattcatccagactcatgcaataaccctttgattgttttctaaaaggagactccctcggcaagatggcagagggtacggagtcttcaggcccagtttctcactttagccaattcgagggctccttgtggtgggatcagaactaatccagagtgtgggaaagtgacagtcaaaaccccacctggagcaaataaaaaaacatacaaaacgtaaaaaaaaaaaaaaaa

SEQ ID NO: 30611 - DNA, 1485 bp, Homo Sapiens
atggaggagccgcagccgccccgcccaccagcgagcatggccttactgggcagccagcactccggcgccccctccgcggccggcccacctggcgggacttcctccgcggccacggcggccgtgctctccttcagcaccgtggcgaccgcggcgctggggaacctgagcgacgcaagcggaggcggcacagctgccgctcccggtggcggcggccttggcgggtccggggcagcgcgggaggcgggggcggcggtgaggcggccgctaggcccggaggcggcgccgctgctgtcgcacggagctgcagtggcggcccaggcgctcgtcctcctgctcatcttcctgctgtctagccttggcaactgcgcggtgatgggggtgattgtgaagcaccggcagctccgcaccgtcaccaacgccttcatcctgtcgctgtccctatcggatctgctcacggcgctgctctgcctgcccgccgccttcctggacctcttcactccgcccgggggttcggcgcctgccgccgccgcggggccctggcgcggcttctgcgccgccagccgcttcttcagctcgtgcttcggcatcgtgtccacgctcagcgtggcgctcatctcgttggaccgttactgcgctatcgtgcggccgccgcgggagaagatcggccgccgccgcgcgctgcagctgctggcgggcgcctggctgacggccctgggcttctccttgccctgggagctgctcggggcgccccgggaactcgcggcggcgcagagcttccacggctgcctctaccggacctccccggaccccgcgcagctgggcgcggccttcagcgtggggctggtggtggcctgctacctgctgcccttcctgctcatgtgcttctgccactaccacatctgcaagacggtgcgcctgtcggacgtgcgcgtgcggccggtgaacacctacgcgcgcgtgctgcgcttcttcagcgaggtgcgcacggccaccaccgtcctcatcatgatcgtcttcgtcatctgctgctgggggccctactgcttcctggtgctgctggccgccgcccggcaggcccagaccatgcaggccccctcgctcctcagcgtggtggccgtctggctgacctgggccaatggggccatcaaccctgtcatctacgccatccgcaatcccaacatttcgatgctcctagggcgcaaccgcgaggagggctaccggactaggaatgtggacgctttcctgcccagccagggcccgggtctgcaagccagaagccgcagtcgccttcgaaaccgctatgccaaccggctgggggcctgcaacaggatgtcctcttccaacccggccagcggagtggcaggggacgtggccatgtgggcccgcaaaaatccagttgtacttttctgccgagagggaccaccagagccggtgacggcagtgaccaaacagcctaaatccgaagctggggataccagcctctaa

SEQ ID NO: 30612 - DNA, 7267 bp, Homo Sapiens
ctgctccttgcaccccgctccctgcctggacacaggctcactcgctgccttcttctgggggaaaccagcttcttgccagccacagctgctgcctccgccactggccaccgcccctgtcctgggagtcccttggcccagacacccacctgacttagtggctcctctgcaggaaaggtggctgccccctgcgttcctccatccaaccatgagctggtgcccatcaccactgagaatgcaccaaagaatgtagtggacaagggagaaggagcctcccggggtggaaacacacggaaaagcctcgaggacaacggctccaccagggtcaccccgagtgtccagccccacctccagcccatcagaaacatgagtgtgagccggaccatggaggacagctgtgagctggacctggtgtacgtcacagagaggatcatcgctgtctccttccccagcacagccaatgaggagaacttccggagcaacctccgtgaggtggcgcagatgctcaagtccaaacatggaggcaactacctgctgttcaacctctctgagcggagacctgacatcacgaagctccatgccaaggtactggaatttggctggcccgacctccacaccccagccctggagaagatctgcagcatctgtaaggccatggacacatggctcaatgcagaccctcacaatgtcgttgttctacacaacaagggaaaccgaggcaggataggagttgtcatcgcggcttacatgcactacagcaacatttctgccagtgcggaccaggctctggaccggtttgcaatgaagcggttctatgaggataagattgtgcccattggccagccatcccaaagaaggtacgtgcattacttcagtggcctgctctccggctccatcaaaatgaacaacaagcccttgtttctgcaccacgtgatcatgcacggcatccccaactttgagtctaaaggaggatgtcggccatttctccgcatctaccaggccatgcaacctgtgtacacatctggcatctacaacatcccaggagacagccagactagcgtctgcatcaccatcgagccaggactgctcttgaagggagacatcttgctgaagtgctaccacaagaagttccgaagcccagcccgagacgtcatcttccgtgtgcagttccacacctgtgccatccatgacctgggggttgtctttgggaaggaggaccttgatgatgctttcaaagatgatcgatttccagagtatggcaaagtggagtttgtattttcttatgggccagagaaaattcaaggcatggagcacctggagaacgggccgagcgtgtctgtggactataacacctctgaccccctcatccgctgggactcctacgacaacttcagtgggcatcgagatgacggcatggaggaggtggtgggacacacgcaggggccactagatgggagcctgtatgctaaggtgaagaagaaagactccctgcacggcagcaccggggctgttaatgccacacgtcctacactgtcggccacccccaaccacgtggaacacacgctttctgtgagcagcgactcgggcaactccacagcctccaccaagaccgacaagaccgacgagcctgtccccggggcctccagtgccactgctgccttgagtccccaggagaagcgggagctggaccgcctgctgagtggctttggcttagagcgagagaagcaaggcgccatgtaccacacccagcacctcaggtcccgcccagcagggggctcggctgtgccctcctctggacgccacgttgtcccagcccaggttcatgtcaatggtggggcgttagcatctgagcgggagacagacatcctggacgatgaattgccaaaccaggatggtcacagtgcgggcagcatgggcacactctcttctctggacggggtcaccaacaccagtgaggggggctacccagaggccctgtccccactgaccaacggtctggacaagtcctaccccatggagcctatggtcaatggaggaggctacccctacgagtctgccagccgggcggggcctgcccatgctggccacacggcccccatgcggccctcctactctgcacaggagggtttagctggctaccagagggaggggccccacccagcctggccacagccagtgaccacctcccactatgcccatgaccccagcggtatgttccgctctcaatccttttcggaagctgaaccccagctgcccccagctccggtccgagggggaagcagccgggaggctgtgcaaaggggactgaattcatggcagcagcagcagcagcagcagcagcagcctcgcccacctccacgccagcaggaaagagcccacttggagagtcttgtagccagcaggcccagccctcagccattggcagagacccccatccccagtctccctgagttcccgcgagcagcctcccagcaggagattgaacagtccatcgaaacactcaatatgctgatgctggacctggagccagcctccgctgctgccccactacacaagtcccagagtgtccccggggcctggccaggggcttctccactctcctcccagcccctctctggatcctcccgtcagtcccatccactgacccagtccagatctggctatatccccagtgggcattcgttgggaacccctgagccagccccacgggcctctctggagtctgtccctcctggcaggtcttactcaccttatgactatcagccatgtttggctgggcctaaccaggatttccattcaaagagcccagcctcttcctccttgcctgccttccttccgaccacccacagccctccagggcctcagcaacccccagcctctctccctggcctcactgctcagcctctgctctcaccaaaggaagcgacttcagacccctcccggactccagaggaggagccattgaatttagaagggctggtggcccacagggtagcaggggtacaggctcgggagaagcagcctgcagagcccccagcccctctgcggaggcgggcggccagtgatggacagtatgagaaccagtctccagaagccacatcccctcgtagccctggggttcgctcccctgtccagtgtgtctccccggagctggctcttaccatcgctctcaatcctggagggcggcccaaagagccccatttgcacagctacaaggaggccttcgaggagatggagggaacctccccgagcagcccaccacccagtggggtgcggtcccccccgggtctggccaagacacccctgtctgctctgggcctgaaacctcacaacccagcggacatcctgttgcaccccacaggagttaccagaagacggatccagccagaggaagatgaggggaaggtggtggtcaggctgtcagaagagccccggagctatgtggagtctgtggcacggacagcggtggctggaccccgagctcaggactctgagcccaagagctttagtgctccagccacccaggcctatggccatgagatacccctgaggaacgggaccctgggtggctcctttgtctcccccagccccctctccaccagcagccccatcctcagtgctgacagcacttcagtggggagtttcccgtcgggagagagcagtgaccagggtccccggacgcccacccagcctctgttggagtctggcttccgctcaggcagcctgggacagcccagcccgtctgcccagagaaactaccagagctcttctcctctcccgactgtgggcagtagctacagcagccccgactactcacttcagcatttcagctcctctccggaaagccaggctcgagctcagttcagtgtggctggcgtccacacggtgcctgggagccctcaggcgcgccacagaacagtgggcaccaacactccccctagtcctggcttcggctggcgggccatcaatcccagcatggctgcccccagcagtcccagtttgagccatcaccagatgatgggtccaccaggcactggcttccatggtagcactgtctccagcccccagagcagtgcagcgaccaccccggggagccccagcctgtgtcggcacccagcaggggtctaccaggtttctggcctccacaacaaagtggccaccaccccggggagtcccagcctgggccggcaccctggggctcaccaaggcaacctggcctccggtcttcatagcaatgcaatagccagccctggaagccccagcctgggccgtcacctcggagggtctggatctgtggttcccggcagcccctgcttggaccggcatgtggcctatggcggctattctaccccggaggatcggagacccacactgtcccggcagagcagtgcctctggctaccaggctccttccacgccctccttccctgtctcccctgcctactaccctggcctgagcagccctgccacctccccgtcaccagactccgcagccttccggcaagggagcccaacaccagccttgccagagaagcgaaggatgtcagtgggagaccgggcaggcagcctccccaactatgccaccatcaatgggaaggtgtcttcgcctgtcgccagcggcatgtccagtcccagcgggggcagcaccgtctccttctcccacactctgcccgacttctccaagtactccatgccagacaacagcccggagacgcgggctaaagtgaagtttgtccaggacacttctaagtattggtacaagcctgagatctccagggagcaggccatcgcgctcctcaaggaccaggagccgggggccttcatcatccgcgacagtcactccttccgaggcgcgtacgggctggccatgaaggtgtcttcgccacctccaaccatcatgcagcagaataaaaaaggagacatgacccatgagctggtcaggcattttctgatagagactggccccagaggagtcaagctcaagggctgccccaatgagccaaacttcggatcgctgtctgccctggtctaccagcactccatcatcccattggccctgccttgcaagctggtcattccaaaccgagaccccacagatgaatcgaaagatagctccggccctgccaactcaactgcagacctgctgaaacaaggggcagcctgcaatgtgctcttcatcaactctgtggacatggagtcactcactgggccacaggccatctctaaagccacatctgagacgttggctgcagaccccacgccagctgccaccatcgttcacttcaaagtctctgcccagggaatcactctgactgacaaccagagaaagctctttttcagacgccactaccctctcaacactgtcaccttctgtgacctggatccacaggaaagaaagtggatgaaaacagagggtggtgcccctgctaagctcttcggcttcgtggcccggaagcagggcagcaccacggacaacgcctgccacctctttgctgagcttgaccccaaccagccggcctctgccatcgtcaacttcgtctccaaggtcatgctgaatgccggccaaaagagatgaaccctgccccttgcccagggccagtgccatggggaaggggcttgtggggaggggacccatgaatcctgaccactcttgaacccagaaggaggactttgggccaatttcggaggagagaagaaagtgcaacgtggggagagggaagtgaattgcagaggggagggggaaaagagagagagagagagagagagagagagagagagagagaaagatggaggagaagaacttggattcccctgggtagatggaaactgcaaaaacccaaagcctccaaaactaaccaggtccacctaacaccccctccctcccctaagaagatggatgtcctcaaaagagaaggaacaaacctccttgggaatccacattttttgggggaatggaaaagctctgtctccctaactcaactgctttgcaaggggaaatcaagctgggagaatctttttctggccacctgtagggtaggttgtcaaaccaaacagagccaccgtgggacatcaagtggaagaacttgtttgcttgaaagtatctcagacccaaggcacctcaggtctctttgctgtgcctccactatattgtcgtgtgggtgtgtgtctgcacccacatcctcacacattgatctagatctgcctttatccactcgaattataaacagctcggcttgtccttgtcccatgtgtttgtagacacacatgcatactgtccaaagattagggttggtggtggcagtgcagcaggggagggacaaacaaccaagctatgggtgacagaggctctctcctggtgcctgcacctgcactctagtgaccctgggtgccgccagacccttctcttctacaaagaccccagcaggagtgggagggtctgcaatggcatcgccctgtcctgccttggccagaagcctggagctttggtttgaggaggtagagatatgtgtatccataggaagagatctgtcagaacaggcagctgttgagctcggggtgtcttccccaaggcatgtggctcagcagcaagaaaggcaagttgctcctgctggggccctggactctgccttagctcccacctctcagccttgttattgggtttcatgcccctggaccagccttatctcagacctgcttacctgcatgatgcctttttgggggctggggattgagtcttgctgctctgcccagccctgttctattctgcagggtccctgtgttggaattctccctggggaacctactttctgctcagtgaggctccggccagaaacctggagtccttatcctcccctctgtaagtgttttagggtctggcttttgcaggcaccctctgacctcagcagagctcctgggcctgctgcctgcacaccacatcgcctacctacaatgccaaagcctcactgtcaccctttctgccttggtttccctagctgagccacgctgcccatgcagcagagggcagaaggcttgcacttgggccaaagggcctaaggtccactggacagttgggaaaacacctgaccaccatttaaggactctaagccagaatggaaaattcaccaggactccattcttaagcctatgcgagtcccctagagagaggcattgtactgatatataaatattatataatatatacatgagacatactgacagaatctgtaagctaataaaatgtaagaaaaggttaaaaaaagaaaaaaaaaaaa

SEQ ID NO: 30613 - DNA, 4461 bp, Homo Sapiens
ggcggtcggtcggtgaggctttcccggctgtggtttggctgcgggcggcttgggcagcccgcgggcgcctcaggtagaagaagaaaggtgccactccggcatgaagacagactcgcttagtcgccagtcacttaagctgagtgcattgtgatttccaataattgaggcagtggttctaaaagctgtctacattaatgaaaagagcaatgtggccagcttgactaagccgccagcgcacagcgcggcaggacgcgcccgggtctcagcggacttgtgcatgttagctgtgtagatttatgtgagggcttgtaaaactctggtcttgtaaactagtcttaagcgcttttaatatggagacagatgagagcccctctccgctcccgtgtgggcccgcaggagaagcggtgatggagagccgagctcgccccttccaagcgctgccccgtgagcagtctccaccacctcccctgcaaacgtccagtggtgcagaggtaatggacgttggctctggtggtgatggacagtccgaactccctgctgaggaccccttcaacttctacggagcttctcttctctccaaaggatccttctctaagggccgcctcctcatagacccgaactgtagtggccacagcccgcgcaccgcccggcacgcacctgcggtccggaagttctcccctgaccttaagttgcttaaggatgtaaagattagcgtgagctttaccgagagctgcaggagtaaggacaggaaggtgctgtacacaggagcagagcgcgacgtgcgggcggagtgcggtctgctccttagccctgtcagtggggacgtgcatgcttgtccctttggcgggagtgttggtgacggggtaggcatagggggtgagagtgctgataagaaggatgaggagaatgagctggatcaggaaaagagagtggagtatgcagtgctcgatgagttagaagattttactgacaatttggagctagatgaagaaggagcaggcgggttcacggctaaagcaatcgttcagagagacagagtggatgaagaggccttgaatttcccctacgaggatgactttgacaacgatgtggatgctctgctggaagaaggcctttgtgcccccaaaaagaggcgaacagaggaaaaatatggcggagacagcgaccatccgtccgatggagagacaagtgtgcagccgatgatgaccaagattaaaacagtgctcaaaagtcgtggccgcccacctacagagccgctgcccgacgggtggatcatgacattccataactctggagtcccggtgtacctacacagagagtctcgggtggtcacctggtccaggccatacttcttgggaacgggaagcatacggaaacacgaccctcctctgagtagcatcccttgtctgcattataagaaaatgaaggacaacgaggaacgggagcaaagcagtgacctcacccctagtggggatgtgtcccccgtcaagcccctgagccgatctgcagagctggagtttcccctggatgagcctgactctatgggtgctgacccggggcccccggacgagaaagacccactaggggctgaggcagcccctggggccctggggcaggtgaaggccaaagtcgaggtgtgcaaagatgaatccgttgatctcgaggaatttcgaagctacctggagaagcgttttgactttgagcaagttactgtgaaaaaattcaggacttgggctgagcggcggcaattcaatcgggaaatgaagcggaagcaggcggagtccgagaggcccatcttgccagccaatcagaagctcattactttatcagtgcaagatgcacccacaaagaaagagtttgttattaaccccaacgggaaatccgaggtctgcatcctgcacgagtacatgcagcgtgtcctcaaggtccgccctgtctataatttctttgaatgtgagaacccaagtgagccttttggtgcctcggtgaccattgatggtgtgacttacggatctggaactgcaagcagcaaaaaacttgcgaagaataaagctgcccgagctacactggaaatcctcatccctgactttgttaaacagacctctgaagagaagcccaaagacagtgaagaactcgagtattttaaccacatcagcatcgaggactcgcgggtctacgagctgaccagcaaggctgggctgttgtctccatatcagatcctccacgagtgccttaaaagaaaccatgggatgggtgacacgtctatcaagtttgaagtggttcctgggaaaaaccagaagagtgaatacgtcatggcgtgtggcaagcacacagtgcgcgggtggtgtaagaacaagagagttggaaagcagttagcctcacagaagatccttcagctgctgcacccacatgtcaagaactgggggtctttactgcgcatgtatggccgtgagagcagcaagatggtcaagcaggagacatcggacaagagtgtgattgagctgcagcagtatgccaagaagaacaagcccaacctgcacatcctcagcaagctccaagaggagatgaagaggctagctgaggaaagggaggagactcgaaagaagcccaagatgtccattgtggcgtccgcccagcctggcggtgagcccctgtgcaccgtggacgtgtgagggaggtggcacgggccagggcgcgggggccgccagccgcacttctgaggagaccagcagtcatgcatcgtgcaccacagtgtcaggcctccaacccacgctccttccctgtggccaacctgtgggcccggccttagggtggaggctttagtgtacagggacagccatggccacacagcacacatgtggagcagcggctctccctggaaagctccaggcctgaatggatggactcagcgactgcaccagtggcagctggtgactgtggacagtggtggaccctgcttctgtgcacctgctgcaggctctttttatgaaggctttcatgaattttagtatgtaatacgcactgacgacacatgatgcttggatgacagatgagaggggatggctgagtcctgtggctggcccgtgatgccaggtggcccatgtgcccagggcgcctgcagggctgctacagggacctggtcaggaggtgcacatggtgccctgccctcacccaccctctgtgtttccccttctttgaaaaggtagaagagaaaggaatattttaaacctttttggcttaaacagaattttagcatcagaactagctttctgggattggaggcaaaccatcaaggtggtccctctccagtctggacacgatgccagcaaggatgacgtcctgccacctcctggagttaccctggcctcctagggtccctttttctgatgaagtcttaattccctaaaagcgcctctttggacactgaggccctctctgcctttcctggcctccggcaacagttttttacaaagattttttgcagtcgagtccatatgtccacccattgatttttaaagcttttgtgatattttagcattttgaaagactttcacagtgagagtagaaggtagatttggaatcatgcattttagcaagtggacttgttgaaacaggaagcaagggccttcagtgtagcccattcttgatccagagctgttgcctgtgacagcggtttctctggatgtcaaaggcagctgcctggtgcccagcttgcttctcgactggtggcccctatgggtgggtgtgcgatggaaatgtgttcctgccggagtctgaggcaccagggtgtgctcaaaggctggccctggtggtggactggcacctgtgcagagtgccgtgtgcttgtggtgcgccatctgaagcaagagtccagcgttctgccgtgtctgtcccccaccatgccccctacaggcggtactgatggcgcttttttttttttttctgtcaggaaaacaatgttggcctgtgggccgcccacaacatatccttccctcactacctgtgtgaccaaggttggcttctgttgacctttaaaaaagaaaccctcaactcaaattgctataattagacacttgcttctgtcttgcctcctgtctgcagctgtgaatagtcatttgactgtgactgttgcccttagccagccagatgcgcctgtgaaccaaagcttcgtgcacatgtgttcccctaaaggttggggagcctcgctgtgtcttgctgttcccaggcaccaccacagcaggtgctgccatactcttgtggtctctgtgcgccccccccccccccccacccgtctgccaagcatgggtatgaatcgtgcacacagccatgcttcaaggccggggcaggggagcctgtgctgatgccatccagggcactgggctgtgcctggaaggcgagccttgattgtctgaacacataaagcaaactgtccagaagggaaaaaaaaaaaaaaaaaaaaaa

SEQ ID NO: 30614 - DNA, 1977 bp, Homo Sapiens
ggggtgatcatggacgcttgacaacctgcgggcaggcgccgggaggccgagccagcgactaagaggaccgagaggtggcgtggacagatttcaaggccagagaatggcaggggaacagaaaccctcaagtaatctcctggagcagtttattttactagccaaaggtaccagtggctcagccctcactgctctcataagccaggtcttagaggctcccggagtgtatgtctttggagaacttctggagctggccaacgtgcaggagcttgcggaaggagctaatgctgcttatttgcagttgttgaacctgtttgcctatgggacatacccagattacatagccaacaaggagagcctgccagaactgagcacagctcagcagaacaagctgaagcatcttaccatcgtgagcttggcatcaagaatgaagtgtatcccctactccgtgttgctgaaagacctggagatgcggaatctccgggaactagaagaccttatcattgaggctgtctacactgacatcatccagggcaagctggaccagcgaaaccagctgctggaagtggatttctgcattggccgtgacatccgaaagaaggatatcaataatattgtcaagaccctgcatgaatggtgtgatggctgtgaagcagttctactgggcatcgagcagcaagttctgagagccaaccagtacaaagagaaccacaaccgaactcagcagcaggtagaagcagaggttaccaacatcaagaagacactcaaagccaccgcatcctcctcggctcaggagatggagcagcagctggctgaacgggagtgtccccctcacgctgagcagaggcagcccaccaagaagatgtccaaagtgaaaggtctggtctccagccgccactagggccggctggggcagctggcactcaccaggcctgggtcaggtggggaggggacaccaagggcccatttcctcccctctctacctgcagtgagttccagacctgcccgtcccctcaccagcgcctccccaccctgttggtactgttccagaaaaactgttactccccctcacccactccctccttccccagttgttcccttcagactcaggggctccaccaatgccatcccaaaacagggtcagacactgctcagcttccctccaggaggttcttgtctctgtgtaagggcttgtctccctcccagtttttcttttgctccacgtcattttgtcaggctggttataagccggaggcagctttaaccagcccccagggatgattgtgaaggaggcccctccccttgtgaggagggggcactcctctccagcccctggtaccacagtcctcacgatggtgcagtgatttctagccaggcgtcaagatgcgctgctttccctctcctgcctcattccttgttggcagctccagttcaggccgtggagggacgtgatgctgggctgtgtttactaaacccacgggttttcagcctcttaagcccagctccgatctccaattagttgagagcgctgggttgactaacctctggtatctgagcacagacagagggtgctgtgggtctgctgggtggcagaaatggttccttccggcttggcgttctctcctggccactcttcctgctgcctctgactactcagccttgttttcggtgtgtaggccccagctgcccactggaactgccggctaatgcttgctctcccaagatctttaactcctcctggctgcacctgggtagggatggtggcatcgatgcccctctgtctgctgaaggacctgttgctgcttctgtcttttcacccctccttggctgatgacccagagccctctgatgatggcattctcctggcaagagaaaaagacttaactagacttctgaacttgaacagtttcaggttatattttaatttttttttttttgtacaggttctgattctaatacatttcaacatgcttttgtccc

SEQ ID NO: 30615 - DNA, 3581 bp, Homo Sapiens
atacgtggctgccgtctgtccccgctgaggaggtgcagcagccggagatggcggcggtgctgaacgcagagcgactcgaggtgtccgtcgacggcctcacgctcagcccggacccggaggagcggcctggggcggagggcgccccgctgctgccgccaccgctgccaccgccctcgccacctggatccggtcgcggcccgggcgcctcaggggagcagcccgagcccggggaggcggcggctgggggcgcggcggaggaggcgcggcggctggagcagcgctggggtttcggcctggaggagttgtacggcctggcactgcgcttcttcaaagaaaaagatggcaaagcatttcatccaacttatgaagaaaaattgaagcttgtggcactgcataagcaagttcttatgggcccatataatccagacacttgtcctgaggttggattctttgatgtgttggggaatgacaggaggagagaatgggcagccctgggaaacatgtctaaagaggatgccatggtggagtttgtcaagctcttaaataggtgttgccatctcttttcaacatatgttgcgtcccacaaaatagagaaggaagagcaagaaaaaaaaaggaaggaggaagaggagcgaaggcggcgtgaagaggaagaaagagaacgtctgcaaaaggaggaagagaaacgtaggagagaagaagaggaaaggcttcgacgggaggaagaggaaaggagacggatagaagaagaaaggcttcggttggagcagcaaaagcagcagataatggcagctttaaactcccagactgccgtgcagttccagcagtatgcagcccaacagtatccagggaactacgaacagcagcaaattctcatccgccagttgcaggagcaacactatcagcagtacatgcagcagttgtatcaagtccagcttgcacagcaacaggcagcattacagaaacaacaggaagtagtagtggctgggtcttccttgcctacatcatcaaaagtgaatgcaactgtaccaagtaatatgatgtcagttaatggacaggccaaaacacacactgacagctccgaaaaagaactggaaccagaagctgcagaagaagccctggagaatggaccaaaagaatctcttccagtaatagcagctccatccatgtggacacgacctcagatcaaagacttcaaagagaagattcagcaggatgcagattccgtgattacagtgggccgaggagaagtggtcactgttcgagtacccacccatgaagaaggatcatatctcttttgggaatttgccacagacaattatgacattgggtttggggtgtattttgaatggacagactctccaaacactgctgtcagcgtgcatgtcagtgagtccagcgatgacgacgaggaggaagaagaaaacatcggttgtgaagagaaagccaaaaagaatgccaacaagcctttgctggatgagattgtgcctgtgtaccgacgggactgtcatgaggaggtgtatgctggcagccatcaatatccagggagaggagtctatctcctcaagtttgacaactcctactctttgtggcggtcaaaatcagtctactacagagtctattatactagataaaaatgttgttacaaagtctggagtctagggttgggcagaagatgacatttaatttggaaatttctttttacttttgtggagcattagagtcacagtttaccttattgatattggtctgatggtttgtgaactcttgctgggaatcaaaatttccttgagactctttagcattcatactttggggttaaaggagattcctcagactcatccagcccttgggtgctgaccagcagagtcactagtggatgctgaagttacatgagctacatgttaaatatttaaagtctccaaaataaaacaccccaacgttgaccttacccggctgatggttagccccttgctgcctgctccatgtgtcttatgagagcccgtagttacagtgtcctctaatttgaaatccataagttaacaagtctatatcaggtgcagctggctttgattaaaggccatttttaaaacttaaaaactcaacacctcacagattataatagaaaaagaaatggcctcagtttgatctcgttcagaatgacccagattgtttctgctttgggtgcagctgtttagttcagagttatattacagagaattattttctgagataatcttaaactagaatgttcaaaactaattgataattgaagtatcaagatacgtagaacacctcagagatttttcttcaggaacttccacaaactttgaatccttgtatctttatttggtattcatactactagtagcaaaatacaggttttttgttttgttttgttttgttttggcttcatagagtatctcaaattgaaacttttctgcacaaagaataaaattaaggattttataaactcaaattggcacctactgaattaaaatacataaaatcatttaaatataattcagcatatgggaagtaacattgcactaatatggaaatcactgccagagacagtctattttcttttaatttgttactacttagtcacaaaccccacattattccagtttggaattacttattaaggagaattggaaatacatatgcccatgcttaaattttatagctttaatttgtgttatttctttattgacgggaagaggtacatctttttttccttactgaaaacaaatatggattaattgcctcaaatttgtataagtgattggctagtgattcttgttttcagaagggagagtggtatagatagaaaatgacaaagatggcaatatacacttaatgttgttattgtatgttgttactgaagtacttagatttttaaaatttcaaatcctaaatcacttcttgtaggagggttttcattaactgcagtatatacagttcactacatatgggttgtttgagttttttgtgtgctgtatttctttctgttttttaatacctggttttgtacatatctaactctgttctcttttggttgttcagaaactggattttttttttcttaagcagtgcttaatttgtgttttttaattttgattcagaagtagtcccagctcataggtgttcatactgttacatccagaacatttgtcaggctctctgtcagctttcatgtacatatggtatagaaaccatggagttaggcacttcctggattttttttttatgagaaaaatactgtatttaaaatgtaaaataaacttttaaaaagcaggcactaatatatatttcttccagcctttgattacaaatttgtccttgcacatgttaagatgaattatctcctaaaaatatcattgttcttgggagcagtgtatgttactttacatagcagcggttcctgtcatgtgttcatgtcagaatatttttggttttaaactttcttattgcctttggctgttgattagtacagtacaagtgcgatttcaaaaagatcttgaaagtaatatatttaatcaattaaaatgtttatctgtaaaaaaaaaaaaaaaaaa

SEQ ID NO: 30616 - DNA, 3780 bp, Homo Sapiens
agagcgctgccgccgccgctttcgcccgggagccgggggccgggcgccatcatgctgagccggctcggggcgctgctgcaggaagccgtgggggcgcgcgagcccagcattgacctgctgcaggccttcgtggagcactggaagggcatcacgcactactacatcgagagcacagatgaaagcacccccgccaagaagacagacattccctggcggctgaagcagatgctggatatcctggtgtatgaagagcagcagcaggcggccgcgggtgaggcagggccctgcctggagtacctgctgcagcacaagatcctggagactctctgcacgctgggcaaggccgagtaccccccaggcatgcggcagcaggtgttccagttcttcagcaaggttctggcgcaggtgcagcaccccctgctgcattacctcagcgtccacaggcctgtgcagaaactcctccgacttggtgggactgcttccggatccgttacagaaaaggaggaggtgcagttcaccaccgtcctctgctccaagatccagcaggacccagagctgctcgcctacatcctggaaggtaaaaagattgtaggtaggaagaaagcatgcggagaacccactgccctgcctaaggacacaaccagccacggggacaaggactgctcccacgatggtgctcctgccaggccccagctggacggggagtcctgtggggcccaggccttgaacagccacatgcctgctgagaccgaggagctggacggtgggaccacagagagcaacctgattacctccctgcttgggctgtgccagagcaagaagagtcgggtggccttgaaggcccaggagaacctgctgctcctggtgagcatggcctccccagcagctgccacctacctggtacagagcagcgcctgctgccctgcgatcgtccggcactttgccagttgtaccggtccatgcctgtcttcctggaccccgcagacattgccaccttagagggcatcagctggaggttacccagtgccccgtctgatgaggcttccttccctggcaaggaggccttggctgccttcttgggctggtttgattactgcgaccacctcatcacagaggcacacacggtggttgcggacgccttggcgaaggctgtggctgagaacttcttcgtggagaccctgcagccccagctcctgcacgtgtccgagcagagcatcttgacctccaccgccctcctcacagccatgctgcgccagcttcgctcccctgcgctgctgcgggaggccgtggctttcctcctgggcacagaccggcagcctgaagcccccggggacaacccccacaccctgtatgctcatctcatcgggcattgtgaccacctctctgatgagatcagcatcaccacactccggctgtttgaggagctgctgcagaagccccacgaggggatcatccacagcctggtcctgcgcaaccttgagggccgcccttacgtggcctggggctcaccagagcctgagagctatgaggacaccctagacctggaggaagacccctacttcaccgacagcttcctggattccggctttcaaactcccgcaaagcctcgcctagctcctgctaccagttacgatggcaaaacagcagtgaccgagatcgtcaacagtttcctgtgcctggtccccgaggaagccaagacctctgccttcctggaggagacaggctatgacacatacgtccacgatgcttatggcctgttccaggagtgcagctcccgcgtcgcctcctggggctggcctctgacccccacacctttggacccccatgagcccgagcgacctttcttcgagggccacttcctccgagtgctgtttgaccgcatgtcccggattctggatcagccatacagcctgaacctgcaggtgacctcggtcctgtcccggcttgccctcttcccccacccccatattcatgagtacctgctggatccgtacatcagcctggcccccggctgcaggagcctattctccgtgttggtgagggtgatcggggacttgatgcagagaatccagagggtaccccagttcccaggcaagctgctcctggtgcgcaagcagttgacgggccaggctcctggggagcagctggaccaccagaccctcctccagggcgtggtggtgctggaggagttctgcaaggagctggctgccattgccttcgtcaagtttcccccacatgatcctcgccagaacgtctccccagccccggaagggcaggtctgagccagcaccagggcggtgggagactcctgtccacacctctgccccagagctgcctcctgcctggcactgccgccacactcccctcctgggatggggcttctgctcccgggctcactcaaggagactgcggcatgttgaccacaccagactgggtttcagggaatgggcatgccaggtgccaaggagccaaacagatggctttccaggcagcaaggtccttggggccttcttggaggagcttgggtgacagccaggtgagcacccagaccccagaccctcatgtgctgtgtgcctggccccttctgtactggccatttgtggccagggccaagcctgtgactcaactccaggggcaagatggggagtgagctgatggctccgagactggtcaggagcccaggccagtgagatggggcctggagccttgtctgtgtcacattaggtaccatgggagctgctgagacctgacattttgtcccctgcctacatggcttggcccatggagaaggagcagtgaatgggatcgtcggggaagcccctcttcctgctctgctcccctggaaactgttgcaaaactcccagccgcctcatggcaaatgcccaaagcatgttccgcacccaggcgggggcccctgctaatgagaaccttggtgcagctgcagccaggaggggagcgggcccaggagccaggctcaggtccagctggttcctctctggcgccttctgaacccgtctcagcaggtccacagcacctgggcagaggtcagagaccaggggaggccgggccttgccctcccttctgcccagggcccagtgttcttgatagaagacccttctggggagccagggagctcaggggacagataagggaaggacgccccctgactccaggcccctgagcctggcgggaagtggctgcggcccaggcagccagtcctggtggtgttctccctgcatgccctccgtggctgggctgccaccccacccggcccgaatctgtcttgacctgcaggaatacacgggcggcgccaggcattacctcacagcgggactacacagttgctggctttgctcctgggcaaggaggagcaggccagagcctcttttgcttccttttcttgcccatgccgcttctagaagccaggcacaggttgccaagaggtgacacgaaacaggaggaaactcagtgacctctgcctctcccacattcctccccgcgggggaggacctcgccgctctgaagagcaccgtgcacatgtgggtgcacaaacgtgggtgttggtgtggacggggcgcagatctccgtggatgaactgcgtctggactcttagattcataaaatattcgagggtttgggagtcacagaccctcccctctcctcagtgcactttggcatttgcacggtgtcttccccggacagcacagcaataaatggtgtgattgcgtggaaaaaaaaaaaaaaaaaaaaaaaaaaaaaaaaaaaaaaaaaaaaaaaaaa

SEQ ID NO: 30617 - DNA, 3055 bp, Homo Sapiens
gcgggtggtgccggtggcggcggcgggggagcgcgggacaggaggcttcggggaagatggacccggcgccctcgctgggctgcagcctcaaggatgtgaagtggagctcggtggccgtgccgctcgacctcctggtcagcacttaccggctgccccagatcgcgcgcctggacaacggagagtgcgtagaagggctgcgggaaaatgactatctgctgattcattcctgccgccagtggaccaccatcactgcccacagcttggaggagggtcactatgtcattgggccaaagatagagattccggtacattatgcagggcaattcaagctgctggaacaagaccgagatataaaggagccagtgcaatatttcaacagtgtggaggaggtggctaaggcatttcctgaacgcgtgtacgtcatggaggatatcacattcaacgtgaaggttgcttcaggtgaatgcaatgaagacactgaagtttacaacatcaccctgtgtactggggatgaactcactctaatggggcaggcagaaatcctttatgcaaagacattcaaggaaaagtcacgactcaacacaatcttcaaaaagattgggaagctcaattccatcagcaagctgggaaaaggcaaaatgccgtgcctcatttgtatgaatcaccggaccaacgaaagcattagccttccattccagtgcaagggcagatttagcacccgaagtcccctggaacttcagatgcaagagggcgaacacaccatccgcaacattgtggagaaaaccaggcttcctgtgaatgtgactgtgccaagccctccaccgagaaacccatacgacctccacttcatccgtgaggggcaccgctataagtttgtgaacatccagaccaagacggtggtggtttgctgtgtgctgcggaacaacaagatcctccccatgcactttcctttgcacttgactgtccccaagttcagcctcccagaacacctggtgaagggagagagctggcccgaaaccctggtccatcactggctaggtatctgccaagaacagttcgacatcgatgagtattcacgggctgtccgtgatgtgaaaaccgactggaatgaagaatgcaagagccccaagaagggtcggtgctctggccacaaccacgtgcccaattcgctcagctacgcccgcgatgagctcacccagtccttccaccgactctcggtctgtgtgtatggcaacaatctccatggcaacagtgaggtgaaccttcatggttgcagggacctggggggagattgggctccctttcctcatgacatcctgccctatcaggactctggagatagtgggagcgactaccttttcccagaagctagtgaagaatcagcaggcatcccgggaaagtcagaacttccctacgaagagctgtggctggaggaaggcaagcccagccatcagcctctcactcgctctctgagcgagaagaacagatgtgatcagtttagaggttctgtccgatccaaatgtgcgacttctcctcttcccatccctgggactctgggagcagcagtgaagtcttcagatactgccctacctccacctccagtgcctcccaaatctgaagccgtcagagaagaatgccggctcctgaacgccccacctgttccaccccgaagcgcaaagcctttgtccaccagtccctccatccctcctcgcacagtcaagccagcgcggcaacagactcgctctcccagccccaccttgtcctactattcttcagggctacacaacatcgtcactaaaactgacacaaatccttctgaaagcactcctgtttcctgctatccatgtaaccgagtgaaaactgattctgtggacctgaaatccccgtttggaagtccttctgctgaagctgtgtcctctcggctctcatggcctaaccattattcaggagcatcagaaagccagaccaggagtgacttcctgctggatccaagcaggagttatagttaccctagacaaaagacgccaggcacacccaagagaaactgcccagcaccttttgattttgatggctgtgagctcctggccagccccactagcccagtcactgcagaattcagtagcagcgtctctggttgtcccaagtcagccagctactctctggagagcacagatgtgaaatctcttgcagctggtgtgacaaagcagagtacgtcatgccctgccttaccccccagggctccaaaactagtggaagagaaggtcgcctccgaaacatctcctttgcctctgaaaattgatggtgctgaggaagaccccaagtctgggtcaccagatctctcggaggaccagtattttgttaaaaagggcatgcaggacatcttctctgcctcctaccctttctcatctccgctccatctccagctggcccccagatcctgtggcgacggttccccatggcagccacctgctgacctatcaggactctctatagaggaagtgtccaagtcactacggttcattggtttgtccgaagatgtcatatcattctttgttactgaaaagattgatgggaacctgcttgttcagctaacggaagaaatcctctcagaggatttcaaattgagcaaattgcaggtgaagaagataatgcaattcattaatggctggaggcccaaaatatagccaaataacccccggccagcatggaacaaaactgatcaatgcgtgtgctagaaggggtgggctgggacacaatttcatgtttttgcactaaaaaccttctctgtaaatagggataagagaaactcttactatgcagattacgtttttgaatggtgaacaggctattttgtacatcaataaaaatgctgtacagaacacttggaggtgtgccttgtacgtcactcaacaaacactcagcagctgctaaaagaaaaaaaggcatgtgcagagaaatcattcttacccaagtaggtttatgtgagaaggtatgatatttattacaaaatagccaaagctgaaagacataaaaatctttaaaaaaaaaaaaaaaa

SEQ ID NO: 30618 - DNA, 3606 bp, Homo Sapiens
gatgagaagaaggagctgcattggatggaaggcccacccccgagccaccccctctaccacaccatgccaccgccctgcccaggcagccctgggcacaggagcccacagagatgagaggcaagaagacccagggagaaggccactgagatgaggggagagggctacagagatgaagagaaatgaagagaagagagacagccgtcaagactgtccagagaagtgggctgaggcccacaaaccccacaaggacaaggacaggaaaagcccagggataagaaagaaaggcccatggagacaagggagcagcctacagagacaagcaaaaggacctcggagacaaggggcagtaatgtggacatagagacctcccgcgaaggaaaacgggagaagccagagacacaagagagaggcccctggaaacagaaagcactcctcagatatggggagcggtccacagggcagggagagagccaaggagagccgaagaaggtcacagaaacaagggaggcctacagacaccagggtaccaaaaagacaaggatgtggctcatagacacaagagagccactgaggcaggagctgccagcctggagatgcggggcaagcctcccccaatataaatagctcctatagagcccagggccttgctgccgccatgactgaggaatcagaggagacagtcctgtacattgagcaccgctatgtctgctctgagtgcaaccagctgtatggatcactggaagaggtgcttatgcaccaaaactcccacgtgccccagcagcactttgagctggtgggcgtggctgatcccggagtcactgtggccacagacacagcttcaggcacgggcctctatcagacccttgtgcaggagagccagtaccagtgcctggagtgtggtcaactgctgatgtcacccagccagctcctggagcaccaggagctgcacctgaagatgatggcaccccaggaggcagtgccagctgagccatcacctaaggcaccacccctgagctccagcaccatccactacgagtgtgtggattgcaaggccctctttgccagccaggagctctggctgaaccaccggcagacgcacctccgggccacacccaccaaggctcctgcccctgttgtcctggggtccccagttgttctagggcctcctgtgggccaggcccgagtggctgtggagcactcataccgaaaggcagaagagggtggggaaggggcgactgtcccatctgccgctgccaccaccactgaggtagtgactgaggtggagctgctcctctacaagtgctctgagtgctcccagctcttccagctgccggcggatttcctggagcaccaggccactcacttccctgctcctgtacccgagtctcaggagcctgccttacagcaggaggtgcaggcctcgtcacctgcagaggtgcctgtgtctcagcctgaccccttgccagcttctgaccacagttacgagctgcgcaatggtgaagccattgggcgggatcgccgggggcgcagggcccggaggaacaacagtggagaagcaggcggggcagccacacaggagctcttctgctcagcctgtgaccagctctttctctcaccccaccagctacagcagcacctgcggagtcatcgggagggcgtctttaagtgccccctgtgcagtcgtgtcttccctagcccttccagtctggaccagcaccttggagaccatagcagcgagtcacacttcctgtgtgtagactgtggcctggccttcggcacagaggccctcctcctggcccaccggcgagcccacaccccgaatcctctgcattcatgtccatgtgggaagacctttgtcaaccttaccaagttcctttatcaccggcgtactcatggggtagggggtgtccctctgcccacaacaccagtcccaccagaggaacctgtcattggtttccctgagccagccccagcagagactggagagccagaggcccctgagccccctgtgtctgaggagacctcagcagggcccgctgccccaggcacctaccgctgcctcctgtgcagccgtgaatttggaaaggccttgcagctgacccggcaccaacgttttgtgcatcggctggagcggcgccataaatgcagcatttgtggcaagatgttcaagaagaagtctcacgtgcgtaaccgcctgcgcacacacacaggggagcggcccttcccctgccctgactgctccaagcccttcaactcacctgccaacctggcccgccaccggctcacacacacaggagagcggccctaccggtgtggggactgtggcaaggctttcacgcaaagctccacactgaggcagcaccgcttggtgcatgcccagcacttcccctaccgctgccaggaatgtggggtgcgttttcaccgtccttaccgcctgctcatgcaccgctaccatcacacaggtgaatacccctacaagtgtcgcgagtgcccccgctccttcttgctgcgtcggctgctggaggtgcaccagctcgtggtccatgccgggcgccagccccaccgctgcccatcctgtggggctgccttcccctcctcactgcggctccgggagcaccgctgtgcagccgctgctgcccaggccccacggcgctttgagtgtggcacctgtggcaagaaagtgggctcagctgctcgactgcaggcacacgaggcggcccatgcagctgctgggcctggagaggtcctggctaaggagccccctgcccctcgagccccacgggccactcgtgcaccagttgcctctccagcagcccttggaagcactgctacagcatcccctgcggcccctgcccgccgccggggtctagagtgcagcgagtgcaagaagctgttcagcacagagacgtcactgcaggtgcaccggcgcatccacacaggtgagcggccatacccatgtccagactgtggcaaagcgttccgtcagagtacccacctgaaagaccaccggcgcctgcacacaggtgagcggccctttgcctgtgaagtgtgtggcaaggcctttgccatctccatgcgcctggcagaacatcgccgcatccacacaggcgaacgaccctactcctgccctgactgtggcaagagctaccgctccttctccaacctctggaagcaccgcaagacccatcagcagcagcatcaggcagctgtgcggcagcagctggcagaggcggaggctgccgttggcctggccgtcatggagactgctgtggaggcgctacccctggtggaagccattgagatctaccctctggccgaggctgagggggtccagatcagtggctgactctgcccgacttcctctttggcacctccattccctgttgctgaaggccctccagcatccccttaagcatctgtacatactgtgtcccttcctcttcccatccccaccaccttgtaagttctaaattggatttattctctcgtgaggggggtgctctggggtccttgacacacataaaggtgcccccccaccttccacctcttagcactggtgaccccaaaaatgaaaccatcaataaagactgagttgccaaaaaaaac

SEQ ID NO: 30619 - DNA, 2611 bp, Homo Sapiens
cttttttcacctcgtctgaaatggctgcctcccagtgtctctgctgctcaaaatttctcttccagagacagaacctcgcctgtttcctcacaaacccacactgtggcagccttgttaatgcagatggccatggtgaagtgtggacagactggaataatatgtccaagtttttccagtatggatggcgatgcaccactaatgagaatacctattcaaaccgtaccctgatgggcaactggaaccaggaaagatatgacctgaggaatatcgtgcagcccaaacccttgccttcccagtttggacactactttgaaacaacatatgatacaagctacaacaacaaaatgccactttcaacacatagatttaagcgagagcctcactggttcccaggacatcaacctgaactggatcctccccgatacaaatgcacagaaaagtcaacttacatgaatagctattcaaagccttaaattgggcatcactcaggatgtgtataagatcttaatattgatagtttcacatccaggtttctaagaaatgataagatacttcacttttccagagtgaaatgtaggagggagcacattctaagtacagctaaaaatttagctcactgtaacacagtttcactctctgaataaataaagcaaaaaacacagtaaatattctttatccctttttttgttgttgttttaaccaagatttaaatgtcaaatttaatacagcaactcagttctacatttggggtgttgtagaagggccttaaaaagaattattttaggccaggcacggtggctcatgcctgtaatcccagcactttgggaggccgaggcaggtggatcacgtgaggtcaggagttcgagaccagcctgaccaacatggtgaaacactgtctctactaaaaacacaaaaattagctgagcatggtggctcacgcctgtaatcccagctactcaggaggctgaggcaggggaatcgcttgaacctgagaagtggaggttgtggtgagctgagatcatgccactgcactttagcctgggtgacagagcgagactctgtctcaaaaaaaaaaaaaaaaaaagaattatttctctgaagtctacaaccactgtggtcttcccttccttctgtcgtagcaagacctcagaatctagcataacttaggctaggtttggctagatgctttctgggtataagccagagtcgtatagtgcaactttgctgtgaccttagtgaacatcccctcttgaggactacaaaaacaaacgtaactttttaaaattattatggagaattttacgtaaaacaaaagtagacaggctagtctaatgaactcccatgtatcattacccagcatcaactatttatgactaatcttacctacttctactttgtcttattgaattaattttggagcagatcttagaaatagaatttaatctataaaaatcttggtgggctgggtacggtggctcatgcctgtaatcccagcactttgggaggctgaggtgggtggatcacctgaggtcaggagtccaagaccagcctggccaatgtggtgaaactccatctcttctaaaaatacaaaaattagctggtcttggtggcgggcgcctgtaatcccagctacttgggaggctgaggcaggagaattgcttgaacccaggaagcagaggttgcagtgagctgagacggtgccattgctctccagcctgggcgacaagagcgaaactccgtctcaaaaaaaaaaaagaaaagaaaaagaaaaaaaaaatcttggtatactggctgggcacagtggctcacacctaatcccagcactttgggaggctgaggcaggaggatagcttgaggctgggagttcaaaaccagcctgggcaacatagcaagaccccatctctaccaaaaaaaatttttttaaagatttcaggtatatttctcaaaaagataaggactgtcaattgtctactcccccccaacaaaggtcactaaggaaacctgttgactaaacaaagctcattaaacctattgtagtgtagcaaaggagaccatcaacttgacacagagtcttggtaatgattcaaagggaggatgttagagtaaggtatttataaggatttgagataagggtccaactggtttaaaatgagtcaaaatagggaactagtagagactgagaaagggttgtgaatagcttaggtttggtaaacttaggaaatcaacagttttaattttaatatggttaaactgattagtatttcctatttttttatctactgtgtaagaagaccctataatatatgggcattactgagagatactgcccatatgttgtcctcgtaagcaaggagatattttttatctcccatatattacctttcaaacctttgttactttagtttcgagatatagatccagtttatgttgttactcagtagtgaggaagtttcttttttttttttaaatggctatcaagttgtccccccattagttattgaaaagaccataattttttcactcctattcaatgccatttttattgtaaataaactatgtacatgtaaaaaaaaaaaaaaaaaaaaaaaaaaaaaaaaaaaaaaaaaaaaaa

SEQ ID NO: 30620 - DNA, 6894 bp, Homo Sapiens; identical to SEQ ID NO: 22634

SEQ ID NO: 30621 - DNA, 2308 bp, Homo Sapiens
aagcgtcgcacagcgactgcatcaccatggagccgagggcagtaggtgtctccaaacaggacatacgtgaacaaatttggggctacatggaatcacaaaatttagctgactttccccgacctgttcatcacaggatacccaactttaaggggtcttatctggcttgccaaaacatcaaagacctagacgtttttgccagagcacaggaagttaaagtggaccctgataaaccactggaaggcgttcggctgctggtgctgcagagcaaaaaaacattgttggttccaacaccacgactgagaacgggattgtttaataagatcacaccaccccctggggcaactaaagacatcttgagaaaatgtgccacctctcagggtgtgaggaactacagtgtccccataggcttggactccagagtcctcgtggatttagttgtggtgggatccgtcgccgcttctgaaaaaggctggagaatcgggaagggagaaggctacgccgatctggaatatgccatgatggtatccatgggcgccgtcagcaaggagacgccggtggtcaccatcgtccacgactgccaggtcgtggacatccctgaagagcttgttgaggagcacgacatcactgtggactacatcctcactccaaccagagtcatcgccacaggctgcaagcgcccaaagccaatgggaatcacctggttcaagatcagcctggagatgatggagaaaatccccatactgaggagcctccgcgcccgagagcagcaggctgggaaggatgtcaccctccagggtgagcaccagcaccttccggaaccaggctgccagcagacagtgcccctgagtgttggcaggaggcccccggacacacccggaccagaaaccaattccatggaggcagcccctggctccccaccaggggagggtgccccgcttgcagccgatgtttacgttgggaacctcccccgggacgcccgtgtgagtgacctgaagagagccctgcgggaactcggctccgtgcccctgcggctcacctggcagggcccgcggcgcagagccttcctccattacccggactctgccgcagccagcaggccgtctcctgcttgcagggcctgcgcctgggcaccgacaccctgagggtggcgctggccaggcagcagagggacaagtgacctcgtggacagccacggagctcactgcagactcgccatccccgtcccctgccgctccggttccgatggcactcgagaggcctgcgtggcaagacgtgtcggagccaccgcctgagctgctcgggtctcaattcttctcagaagtcaccgctcagtgaacgcccaggccctcctgtgagtggggaagccgccctgcggttcatctcacagcgcgcagagactgcagcctcccaatcgtgcaggctcgggccttgagtcggtttctgtttctctggagggacagagcagaggggccagggactgagtgagtggctaagcaggggagggtgatgtgaaggtgatctcgagtttgccaggggtgggctgaacaggagaagatgaacaaaggatccggctctcaaaaggccctggcagggactggatgctgggtacagaagcgcgcccttgggcttcaggctcctgagctggcagcacggcagggagagctccatccatgtcgcaggagcccaggaagctcagcccctgggtaaaaagtgctcactgcagctcagatcagtcctcaggtcacatttcggggagccagcctcccctcttcccctccccagccccgctcctccctctgtggacacactccgggccctcagccagctggctgcatgaggagcagctttgtgctgtgggagagaccggctctgggagaatgggtttcatcccagcctacgtcacatttgcccagtgccttatgttttctgggtttttcttcctccagttctgtttctaaaaaccagcttgagtttggctgaactgtcctttctcaacagaagcgcttttgcaattgatcccgggcaacaagtcaaaataagcttttaagtggagattttgtttttttcaaatgtatatgctttggaaattttgattttttagccagagggttttaccaagtgttctttgaagcacattacgatgcctcgagagggcggcccgtgcacgcgctttcaagaaaatgttctcgggacactcggtcttctctttgaaaggacattttctcattggttttgccgtgaaaatcctgtggagacttcgcaaagaaaacgcagccttacatttgctcattaaagacagatttccttc

SEQ ID NO: 30622 - DNA, 3074 bp, Homo Sapiens
ccggaagagacacgcggggcttcaggctgctgccccattggaagattactccccaggcttcccttgccccaagcagtgagctgactggaatggtaccccgggaggcccctgagtctgctcagtgcctgtgcccttccctcaccatcccaaatgccaaggatgtgcttcggaagaggcacaagagaaggagccgacagcaccagcggttcatggcccggaaggccttgctgcaggagcaggggctgctgagcatgcctccagaaccagggtcctccccactgcccacccctttcggggcagcgacagcaactgaagctgccagcagtgggaagcagtgtctgagggctggatctggcagtgccccatgcagcagaaggcctgctcccgggaaagcctcagggcccttgcccagcaagtgtgtggctatcgactgtgagatggtgggcacgggaccccgagggcgggtaagcgagctggcccgctgttccattgtgagctaccatggcgatgtcctctatgacaagtacatcaggcctgagatgcccatcgctgactaccgtacccgctggagtggcatcactcggcagcacatgcgcaaggctgtccccttccaggtggcccagaaagagatccttaagctcctgaagggcaaggtggtggtggggcacgcgctgcacaacgacttccaggcgctcaagtatgtccaccctcggagccagacccgggataccacctatgtcccaaacttcctcagcgagcccggcctccacacccgggcccgggtctctctaaaggacctggccctgcagctgctgcacaagaagatccaggtgggccagcacgggcactcatcagtagaagatgccacgacagccatggagctctaccggctggtggaggtgcagtgggaacagcaggaggcccgcagcctctggacctgccccgaggacagagaacctgacagcagcacagacatggaacagtacatggaggaccagtactggcccgatgacctggcccacggcagcagaggaggagccagggaggcacaggacagaaggaattgagaagggggcggggctccctggctgggcttccggtgtggccggtaggaagtgggggccaggagagcagcgggcactccttcctgggcagggtggggcaggatgcagtgagccagccccagggccagaggagttggggtcatctgttaccttgacaccctctgcacacagcatagccctctctctctccagggctgttggttctttctcctgactcctgtggttttgctaatggcactttacagactccatggagatgtcaggtggaccatcttctagggcccagcaggagtagggaatgtgccaacagactgcccaggttgccgtggccttccccaccccccagatctcctgagtcatcatgctgtgctaatgaaagggatcatatcatcctctctggggatggtgggtgggggtgtcaatatcctggagctcccttaccccaactcaatgacttgggggtaaagttctcttccttttgttgcctacctcttcctccactcatttgggttcagaataaacatgccctgaagttaaaggggagttaagtcctaaaggaggcatttcttccccacctccctgacctggaactctggctacagccattgtaggaactccgtgcctggcctgtcagctccctgctaggctacagtggaatagcagagcccacaggcttctcgtggggagttggctccttaacatttcttggcaacagaaagccccaggcacagctcagggaggagggaaggcaggtaagctttggacgagaactggcatatttattttgacccaaatcagggatttccccagtccacccagtactgggctcttaagcaaaagtctgagaaacaagacagtggtttgaattctggggcctttgtgtaggattgtgcctgacctttatttatttattaacagcagggccactcgtctagggcagtggagtctgcgtgtctcctggggctggggcagggcattggcagttacgcagtggccctgaacctggtctggtgcccccgaacctggtctgatgccccctcagctctttgacaatcactgtggctgttgggttttctcctatttctaaaaatgttctcttctttcctaagtgacagttttgaagtattggataaccaagagctcaggtcacacagaccttggagccccatctttgcttgcagcttagctttgagatactaagcaagcgagggacttcactcttgagcctgttttttcctcatctgtaaagtggggatagtggtacggcctacctcatagggttgtaatgagcactaaatgtgaagtgcttggcacagtgcctggcacatggtgagccacagctactgtgagtttctgtttatccccctttttttttttttaagcccattgtttattctttgagaatttgttgtaacttcttcaggataacacctgagtccacaggctgagcagctgtggcccagacagaactgctccggcttggctgttccagcaggtggggcgctggcctcggtgagggcacagcagcaaggttcacggatatccgtgtgtcttgtctgtggccaccaggcacaggtttggcttccggtcagtgtcccgacactgtgcgggaggtgacaacagagcaaagcagcgcaggggtcagggaggtggagacactgctgaaatcacactaccccaccctcagctgaagccccacgttccacaaacttggggtcatagattgtccagtcactggctccctccctgtcagcacagcacagaggaaggggctaactgaatcttttaccacttctggcctggctccagaactttgttctagattccttaaaagtcggtagctgatgtcaaactcaattgagcagtagctttgatcccttggtctgggggtcgaaggaagatggcgctgttatcagcggggaaatgtactatttaagatcagctttgttgtaaaaccatttgttctagaataaaactcaattggaaacgtgaaaaaaaaaaaaaaaaaaa

SEQ ID NO: 30623 - DNA, 4431 bp, Homo Sapiens
tctgttaaatgttccgaagccactgccaaaacaactgtgggagaccaaggagattcagtccctgtcaggacgccctcgatcctgtgatgttggaggtggcaatgcttttccacataatggtcaaaacctaggcctctcacccttcttggggaccttgaacactggagggtcattgccagatctaaccaacctccactactcgacacccctgccagcctccctggacaccaccgaccaccactttggcagtatgagtgtggggaatagtgtgaacaacatcccagctgctatgacccacctgggtataagaagctcctctggtctccagagttctcggagtaacccctccatccaagccacgctcaataagactgtgctttcctcttccttaaataaccacccacagacatctgttcccaacgcatctgctcttcacccttcgctccgtctgttttcccttagcaacccatctctttccaccacaaacctgagcggcccgtctcggcgtcggcagcctcccgtcagccctctcacgctttctcctggccctgaagcacatcaaggtttcagcagacagctgtcttcaaccagcccactggccccatatcctacctcccagatggtgtcctcagaccgaagccaactttcctttctgcccacagaagctcaagcccaggtgtcgccgccacccccttaccctgcaccccaggagctcacccagcccctcctgcagcagccccgcgcccctgaggcccctgcccagcagccccaggcagcctcctcactgccacagtcagactttcagcttctcccggcccagggctcatctttgaccaacttcttcccagatgtgggttttgaccagcagtccatgaggccaggccctgcctttcctcaacaggtgcctctggtgcaacaaggttcccgagaactgcaggactcttttcatttgagaccaagcccgtattccaactgcgggagtctctcgaacaccatcctgccagactccagcaccagcctgttcaaagacctcaacagtgcgctggcaggcctgcctgaggtcagcctgaacgtggacactccatttccactggaagaggagctgcagattgaacccctgagcctggacggactcaacatgttaagtgactccagcatgggcctgctggacccctctgttgaagagacgtttcgagctgacagactgtgaacagaaggcagtggaacagaagaatgtttttctgcaacagccaaaatagaatggaatagaatgaagccagctgataccacgggctttcgttatcttgacatagaaggaagcaatgccacggctccagggtttcagatgagatcccatctcagacactgtggcttcctccagatcacacagctttgtactgcctctcccgcctgtggccaaagtcgtgttgcagcaggcaggctgcttggagcttcccatgaactggaaagctcacctccactgcatctttttactggccatccagtcagccgatgtgtaagagtaggaaatactgtgtcactggaggcctccgtagcattgtgtagtgtgctcagaaccactgatctccgtccgcaccgaaggcgggcccggagtgggaggctcggcctggggcggcggcaccggagagggcacctcgatgcctgctctgacctgacccagagggcgaggccctccagcgggggacattcccaggctgagtggaccccacggctctctcccacgcctggattacgacatgaagtttttaccacaagcccgagggcaggcttgagttaggcagactgaaggctaattttcattttctcccagctggtttctgctgcttcagaaaagtacaccttttccttatggaccagaggaagaggaagaccattttatcagtcactgaaaagagtcccctggcactgatgagcctgaagagaactgtgctcctcctcgggggctggggaaggaagacagggactgcaggtgtctcatactcagtggcctccagacaaactccagacaagcacagacctccccactaagagcagccagagggagctggtgaggccctaaccccacccaccgagcaactgagcttccccatccctccccagagctgtgtctctgtgggctgggagtctaatgtcacccccctagaccgtaagctccttgagggcagggacagtgccttatcattgttgaacccgtagcacctaacacgtgcgtggcagcacagtcgtgtgctggagtgagtgctgcagaaccgtgcgtgcagcgcatgatgaatgagtgcgtccgccatgccgtaaggcaggctcacctgtagctatccccttccctgccagatcttctcagagctttagcttttctagcactcgtgcctatggtgaagcatgcactttaatatgcttttaacactaggtgaccaaatcacagtgaagccggacactgcattctccttgggctgtgctccacgcgggtgggtgggagctgtcttctgagtacatccggaagggctgagcaggtgagtgccctgagcatcctggctgggccccacccaggaagatcttccttctcagatccacgtttggctctaaattgcttcaagtagagattcattctttgaggttgaaaaaatagtttatagtaaaacgaaggcctaattcatggaagcatcattagtcatcaataccttctcataaaatagatgggccagatttccaccaccgcctgcctcctctaacttgggtgatgccagtaggtttgaagggggcagagcactgcagggggaggggggggtctaggctgtgagaggacagggtggagaggaggagaaccctgaaggagagacggaagatgccaggacctttgcttggacagccattgcccttccaggagaccctggagtgtactgagggttgctggactgttccacccagaggagcaaggctgtacaatgagggtctggatctggcacacctgtcccttatgtaaaaggagtcgtggtcacaagaccctgggctggttagcctctcccgacctcattccatttctatcttctgaccttgcctctcatctttaaaataaccctcatggggtgcccctccaccttcctctggaatccaagtattcctgtttcacatttgccccaaatctttgctgtggaattgggaaatcaaaccagagtcctcctcgcctgatttccagctcaggaagggcctgctggcctgccctgttcccagttacactttcagatccctttgtgctcaagatctcagagggggtggctttttgttaaagagccttcagtcgcaatgctacccagcaccccatgtgccaaaagaaaccagctcctgtgtcaaagggcttccaaacctgatctcactctcaacaggcgatggtgctgatgtttcaagaattgtgtttttataaaacagaggtctcagcatagtcactcttcacatagtgccttacccatgggtatcgtcatatccgggtcccagttcagtttgtctgcacagcagccaccctgcctggcaacagagaccccaagacctacacagtgaaccctactgccccaaaggcgttctccaggtgacttgtgaaaacagacctccggggaagtgatttattgggggtgtacactgggggcaatatggtttagcactgaattcaatttgtccttaggtctatgagtgagtccgatcttttcttgtgaaaggttttgggcatcgtacaacccactctgcctagaaggtgtggaggactcaccacgggcagggtcgccctggcccacagcacgtgagcctgcactcactgcggcctttgtaacaaaaccagttgtggtcctcagcatttgaagcagctgcatacttcagagtaaactatttttcattatttagttttgtcacaagaaatcgaccattgtactactctcacttacagcagttaaacagcatagaactaaaaacctgtctgcatttccattttttctttctgtatggttgtgggttttaggacatagggggttaggagaaggggtttcttgatcatgtcatgaattctcctttgtcctgtttctcctgtttcatttctcctccgcctgctgtatattacctgagctggtgttgtatcttcaagtccatatgcgtatttgcagacctttcctgttcccactcttgttggctcttctgatttatgcacagatggttcccagcatgtgtccagtgcttcatggatgggaccatcccagcaactaatcagacttcctgccagtgtcctaacccccagggcaccctgttcaaccatatttaaaaattggaatttgtataaagttgcttccaagttttataatgcatcattttacatcttttgtaattaaaagcatcacaatgaggttgtctctgcaaaaaaaaaaaaaaaaa

SEQ ID NO: 30624 - DNA, 3228 bp, Homo Sapiens; identical to SEQ ID NO: 26610

SEQ ID NO: 30625 - DNA, 2600 bp, Homo Sapiens
acatgcgccctgacagcccaacaatggcggcgcccgcggagtcgctgaggaggcggaagactgggtactcggatccggagcctgagtcgccgcccgcgccggggcgtggccccgcaggctctccggcccatcttcacacgggcaccttctggctgacccggatcgtgctcctgaaggccctagccttcgtgtacttcgtggcattcctggtggctttccatcagaacaagcagctcatcggtgacagggggctgcttccctgcagagtgttcctgaaggacttccagcagtacttccaggacaggacaagctgggaagtcttcagctacatgcccaccatcctctggctgatggactggtcagacatgaactccaacctggacttgctggctcttctcggactgggcatctcgtctttcgtactgatcacgggttgcgccaacatgcttctcatggctgccctgtggggcctctacatgtccctggttaatgtgggccatgtctggtactctttcggatgggagtcccagcttctggagacgggattcctggggatcttcctgtgccctctgtggacgctgtcaaggctgccccagcatacccccacatcccggattgtcctgtggggcttccggtggctgatcttcaggatcatgcttggagcaggcctgatcaagatccggggggaccggtgctggcgagacctcacctgcatggacttccactatgagacccagccgatgcccaatcctgtggcatactacctgcaccactcaccctggtggttccatcgcttcgagacgctcagcaaccacttcatcgagctcctggtgcccttcttcctcttcctcggccggcgggcgtgcatcatccacggggtgctgcagatcctgttccaggccgtcctcatcgtcagcgggaacctcagcttcctgaactggctgactatggtgcccagcctggcctgctttgatgacgccaccctgggattcttgttcccctctgggccaggcagcctgaaggaccgagttctgcagatgcagagggacatccgaggggcccggcccgagcccagattcggctccgtggtgcggcgtgcagccaacgtctcgctgggcgtcctgctggcctggctcagcgtgcccgtggtcctcaacttgctgagctccaggcaggtcatgaacacccacttcaactctcttcacatcgtcaacacttacggggccttcggaagcatcaccaaggagcgggcggaggtgatcctgcagggcacagccagctccaacgccagcgcccccgatgccatgtgggaggactacgagttcaagtgcaagccaggtgaccccagcagacggccctgcctcatctccccgtaccactaccgcctggactggctgatgtggttcgcggccttccagacctacgagcacaacgactggatcatccacctggctggcaagctcctggccagcgacgccgaggccttgtccctgctggcacacaaccccttcgcgggcaggcccccgcccaggtgggtccgaggagagcactacaggtacaagttcagccgtcctgggggcaggcacgccgccgagggcaagtggtgggtgcggaagaggatcggagcctacttccctccgctcagcctggaggagctgaggccctacttcagggaccgtgggtggcctctgcccgggcccctctagacgtgcaccagaaataaaggcgaagacccagcccctcggcggctcagcaacgtttgcccttccctgcgcccagcccaagctgggcatcgccaagagagacgtggagaggagagcggtgggacccagcccccagcacgggggtccagggtggggtctgttgtcacatactgtggcggctcccaggccctgcccacctggggccccacatccaggccaacccttgtcccaggcgccaggggctctgatctcccatccatcccaccctcctcccagaggcccagcctggggctgtgccgcccacaggagttgagacaatggcaatcctgacaccttcctccactacagccctgaccatagacccagccaggtagctcttggggtctctagcgtcccagggcctggtttctgttccctcttcaatggtgtgttcccagccaggtcctgaccctcagagccaagtccctgtcacgtctggggcagccaaaccctcgccccacagggacctggacacgcccggccaggatgtggggttggatgggccattttctgtcctatccctcatctccacccccgccacagcctacacgcatcccacacatgcaggcacacacagcctgtgcacacatgtgttcttggcccggtttcatccccccatgactggtgtctgtgaggtgcagatggacacagcgcacacccagaccctccaccaggctgtgacctcgctgcctctgaggccttgacaaggcccctcaatcggaggacagccggccgtgcacactttcatcatcgtcggacaaacagcgtctactgcacatttttcttattcctattcttgagccatagctatggcatattcttctactattcctattataccacttaccagcttactcg

SEQ ID NO: 30626 - DNA, 2187 bp, Homo Sapiens
cagagcagcggagctgccccgaacaaagatggcgcgggaagcgtctgtgagggcagactgatccgagcacccaaaccctcggcggacagcggagccagtggtagccgcacggccctaaaaccatggaggagggcggcagcactggcagtgctggcagtgacagcagcaccagcgggagtggcggggcgcagcaaagggagctggagcgcatggctgaggtcttggtcaccggggaacagctacggctcaggctgcacgaagaaaaggttattaaagatagacgtcatcatctcaagacctacccaaactgttttgtcgcaaaagaactgattgactggctgattgaacacaaagaggcttctgacagagagacggcaattaaactcatgcagaaattagcagaccggggcattattcaccatgtgtgtgatgagcataaggaattcaaggatgtcaaactcttctaccgctttagaaaggatgacggcaccttcccattggataatgaagtgaaggcctttatgagaggacagaggctatatgaaaagctgatgagccctgaaaacacactcctgcagcccagggaggaggaaggggtcaagtatgagcgcaccttcatggcatctgaattcctggactggctggttcaggaaggtgaggccaccacgaggaaagaggcagagcagctttgccaccggcttatggagcatggcatcatccagcatgtgtccagcaagcacccatttgtggacagcaatcttctctaccagttcagaatgaacttccggcggaggcgaagactgatggagctgctcaatgaaaagtccccctcctcccaggaaactcatgacagtcccttctgcctggggaagcagagccatgacaatcggaaatctaccagctttatgtcagtgagccccagcaaggagatcaagatcgtgtctgcagtgaggagaagcagcatgagcagctgtggcagcagcggctacttcagcagcagccccaccctcagcagcagcccccctgtgctctgcaaccccaagtccgtgctgaagagacctgtcacctctgaggaactccttactcccggggctccgtatgcaaggaagacattcacgattgttggtgacgcggttggctggggttttgtggtgcgaggaagtaagccatgccacatccaggctgtagaccccagtggccctgcagccgcagcaggaatgaaggtctgtcagtttgtcgtctctgtcaacgggctcaatgtcctgcatgtagactaccggaccgtgagcaatctgattctgacgggcccacggacgattgtcatggaagtcatggaggagttagagtgctgagctcctgggcctcccagccctccagtggcctgtgggtgagggaagccagaatgacacaaagcaatgcaaagacaagattgccatgcaaatggatggttttggacatacgagtcttctccgcacatacatgtctaaagttgagttttatacactgaatgtggaagaaccgggtatcatatcttttttaaaaaatgtcagtgtagaaaacatttgggaaaccattttcctacatgatagaactgccttactagatttctatttgtagctctcattcattgttttttatcttagtttgcagaaaggtgttgaaatgcttctctagcccaaacagcgacatgctaaagtccccttcttcagagtcaatagagtagttgttaaaggttttaaattgtactttctccaaaattagcatgcagctatttaatagggaatctagatttcaccaagattcaaatcaaagcaacatttaaaggaataagacctgttcactagcattttcaagggggttctaaagcattcaagtgcttaaaagccataaaaaatgacttcttaattcctgcctttagtgtcaacttttaagttaatacaggtttcaattgtggcattaggaaaaaaaaaaaaaccttgtgatgctatggttgggggtagttagggagagactacatgaaattgtgtgcccctattttctttctgatcctaaatcattttgttttataaatcagctatagcatctttctagaattaatcctgaatatgttgaatgttaaaatagagaagtttgtatatacacataattaaaaatcaacccttctggcaaaaaaaaaaaaaaaaaaaa

SEQ ID NO: 30627 - DNA, 3623 bp, Homo Sapiens
aaaaaaaaaccgcgcctccgcggaggtagccgttccctgacctagccatggcacagaacactgaaaaccacgaccctgtcggatccatcttaatccagatccatgaagacctttatcagttaaaggagaaattaacaaaattctcacctgaggaaaaaggagagactctagacattcagagtcttgaaacagcaatcaaaaggactgaagtggggttaagaggattttaagtatgatagaacgagggctgattccaccaacagcaaggattacctttcagaatccacccattacacccagagcagctcctctgcatagttttgatgaagcacgtaagattccaactgtagccactttcactatacctcgggaaccacctccatctccagcagaagtgaagttctttcccaagaaacaaagatcaaaggggaaaagcagaaggtcaagaggacatcatgataggaagatttgtgatcctaatccacctgggacagccccagatatgttcctaagaagaaaccagacttaagaataaaagaacacgtgtcaagagaaacctaagaatgacaaaggccatgaaagtcaaaacacctttgagagccctgaaatcactgtgggattatgactttttaatttatgatggtgtcatagacaatacagccccagacttcttagcattcaaggaacattttagcttagcttggggaggtattttttctctcttggaacacgtcgagaagtttctcaggaactatgctataccagaagtcaaaataaaagggaataatttggtggccctccttccagagtttgagctgacgaataaacttaccagatatgaccttctctcagtgttagaggacccagctcatgtccaaatgctgataaatcttccagggcaaaggtacaagggccaagatggaaattcggaggccgccatgaagatccaagccacatggaaatgctacaaagcaagaaaattcttcctcttttatcgccagcagaagtgggcatcaggtgtgattgccattgcttggctgttatattgccataagactcgactaaagaagatactaaaggaatcacgtcagagacacctggagaattttcgcattcgagccaagcatctggcagccaactggaatcgcatcaggacctccaggaggactattatccatatcccatcattagggtattcccagcctgtgagagaacatattgccgatttcaacacacagcagaacatgcagctggggaggctgtgtgacatcttagatgccaatgtgaatgtcatctacatctgctcccatcatatgaatgacgagttagtgctgtattacaaaaaaatcctaagtctacatgcagccgtcaaatctgggaaccttgaggacagaagtgacctgcaggacaggttcaaaattatcacacctgaagctgtaaacatcttccctatgatagagcagctgagtcagctgataactgatcacctgcaaatacagcgctggctctttaaaatggactctgagttccgaggaaatgggactgcattttgtgatattccttcctacctaaagtgctacaaatgggtgctaaaggagagtagcagatatggccttgaagactggagaaagaaatgggcacaagagccagctttggtgaagatctctgaggagctggcgggcattttagcacagcacgcacagccagtcaatgagaaacggttcccgacgtggaggaaattcctccaaacatttctcagtcaagggggtgtgatcgaagcattcccacctgcagacaatgtcaccaacctcacagtggacatgctgatagagcccaacgggaaaatcagcgtgctgtcgacaggggaccagcttcatgctgaaagccccttcatctcctctggtaccaccgtgcctcagacctcagtggatccccaagttctcacttatttgtgcctccaaattggaaaagcctgcagaatgagagatgtggttggttacttttcgatagatctggtgacttttatagatccaagcaccttggaacaacaggtgtgggcaaccggccttaacctcgcatatagtgaccagctggccctgactcaactcaccttatacctgacaaacggccatctggattgcagtttgagcaccctggaagtgccccgctttgttccaaaggaaaggaagaaaaccaaatgcatgagtgcgctgtcaatgccgatgctggcaaccagtcgctatgcagtgatgaccacccagctaagacacagcaatctctcactggttttccactatgtttttctccagatctgtagggcccatggcattggctatgatcttgagaacaatcggcgaggatctccagggggtcctcatgacctttgctcgccatctcttcatcatccatcaagaaatatcagcacctaatatgcaaggcgagaccaattttaagaccaccattgctgatattgaaactattctaagagtaacaaaggaaaacaaaatgagatttgaagaggagcaacagtccaaagatgataaaaacctctctaaacccaagaaatgatcctggaatacagtacataacaatttggatcccagtctggaataaaaagggcaatttttttttctgttagaaataaaagccaggggaaattggtttgctttgtgtgctaggaggtgaatcagaacagattataatgaaatgctctttttaaaacattgtttattaagtgatcttattttatttattaaaccaaaacttatttgtgttttcatttgagagtgttgaacaatcccttcttcttctcaaactcagaaaaaagtaatctgataaaagaagaaagttaaaagtcttactgatatcacctccgcatttacttcctcataggcctcaggattatgtagcttttattttttatgttttataaagttttctcctatttctaatagtccatcgatcttctgcatttataggtttgaataaaggcttaagaattgctatttgtcaaaacacaaatgcctttttttcaaagcttcaaattatattgaaattatatttatatgaatttttaagtgactatcattcatcgtgtttttgttataccaagccactattgtctgctattgttgccatttttcaaaaagtaggataagccagcatctagttaaccaaagcatcagaatgtatctaggtggcagtatctgctcttagtttaagatggagtgtagctcgagctctgtagcttgaataaacatttgtattctctagttctccatttaatacagcagtaggattttttcaagtttagttcaacattatactacctttaaaaaggcagactgttaagattgtagtagtgctgactctaactttcagcattcacttcataattgtccaaaaatatttccacatcagtgagctttactgaagggtgaaataaaagcaaattacaacaccaaaaccattattgttttaaagaatgacctttatgtctataaaaatattttagtgtattggggaaaggaataggatttttacctgtggaatttcaataatttgttaactgtgattcagccacaggctaagagtttctgtaataaaattaacatttgtgtgtg

SEQ ID NO: 30628 - DNA, 1825 bp, Homo Sapiens
agagtgcgaccgagatgttccactcgctggcgtccgggccgctggtgatctccggtagcactcgggccggcggacagtgagggcgcgacaacaagggaggtgtcacagttttccatttagatcaacaacttcaagttcttaccatggaaaattccgagaagactgaagtggttctccttgcttgtggttcattcaatcccatcaccaacatgcacctcaggttgtttgagctggccaaggactacatgaatggaacaggaaggtacacagttgtcaaaggcatcatctctcctgttggtgatgcctacaagaagaaaggactcattcctgcctatcaccgggtcatcatggcagaacttgctaccaagaattctaaatgggtggaagttgatacatgggaaagtcttcagaaggagtggaaagagactctgaaggtgctaagacaccatcaagagaaattggaggctagtgactgtgatcaccagcagaactcacctactctagaaaggcctggaaggaagaggaagtggactgaaacacaagattctagtcaaaagaaatccctagagccaaaaacaaaagctgtgccaaaggtcaagctgctgtgtggggcagatttattggagtcctttgctgttcccaatttgtggaagagtgaagacatcacccaaatcgtggccaactatgggctcatatgtgttactcgggctggaaatgatgctcagaagtttatctatgaatcggatgtgctgtggaaacaccggagcaacattcacgtggtgaatgaatggatcgctaatgacatctcatccacaaaaatccggagagccctcagaaggggccagagcattcgctacttggtaccagatcttgtccaagaatacattgaaaagcataatttgtacagctctgagagtgaagacaggaatgctggggtcatcctggcccctttgcagagaaacactgcagaagctaagacataggaattctacagcatgatatttcagacttcccatttggggatctgaaacaatctgggagttaataactggggaaagaagttgtgatctgttgcctaaactaaagcttaaaagtttagtaaaaatcgtctgggcacagtggctcacgcctgtagtcccagctacttgggaggctgaggcaggagaatcacttgaccccaggtggtggaggttgcagtgagccaagattgcaccattgcactccagcctggcgacagagcaagactctgtctcaaaaaaaaaaaaaaaatttagtaaaaatcaatggtaagctaaaataagtttttgtttgtttatttgtttttgagatggagtctctactaaaaatacaaaaaattagccaggcatggtgccgcataactataatcccagctacttgggaggctgaggcaggagaatcgcttgaacccgggaggcacaggttccagtgggccaaggttgtgccactgcactccagcctgggcaaaaaagcaaaactccatctcaaagagaaaaaaaaaaaagaccgggtgtggtggctcacacctgtaatcccagcactttgggaggcctaagtgggtggatcacgtgaggtcaagagttcaagaccagcctggccaatatggtgaaaccccatctctactaagaatacaaaaaattagctgagcatggtggtgggctcctgtagtcccagctacttgggaggctgaggcaggagaatcgcttgaacctgggaggcagaggttgcagtaagccaagatcgtgccattgcactccagcctgggtgacagagcgagactccatctcaaaaaaaaaaaaaaaaaaaa

SEQ ID NO: 30629 - DNA, 1592 bp, Homo Sapiens
gcttaacggtcctctggtctctctctcccctcagctgagtcccttccctgtctttcactcttctggcatcggtggttttacttcttcgattgaaccctgcttcctcgacccccctgggaggccgccttcttcaggcgcctcccttctctccacgagctcgctctgacagctgaggaactggcaagatcctgctacccagagggtgaatgggtatctttcccggaataatcctaatttttctaagggtgaagtttgcaacggcggccgtgattcaccagaaaagtaccactgtaagtcatgagatgtctggtctgaattggaaaccctttgtatatggcggccttgcctctatcgtggctgagtttgggactttccctgtggaccttaccaaaacacgacttcaggttcaaggccaaagcattgatgcccgtttcaaagagataaaatatagagggatgttccatgcgctgtttcgcatctgtaaagaggaaggtgtattggctctctattcaggaattgctcctgcgttgctaagacaagcatcatatggcaccattaaaattgggatttaccaaagcttgaagcgcttattcgtagaacgtttagaagatgaaactcttttaattaatatgatctgtggggtagtgtcaggagtgatatcttccactatagccaatcccaccgatgttctaaagattcgaatgcaggctcaaggaagcttgttccaagggagcatgattggaagctttatcgatatataccaacaagaaggcaccaggggtctgtggaggggtgtggttccaactgctcagcgtgctgccatcgttgtaggagtagagctaccagtctatgatattactaagaagcatttaatattgtcaggaatgatgggcgatacaattttaactcacttcgtttccagctttacatgtggtttggctggggctctggcctccaacccggttgatgtggttcgaactcgcatgatgaaccagagggcaatcgtgggacatgtggatctctataagggcactgttgatggtattttaaagatgtggaaacatgagggcttttttgcactctataaaggattttggccaaactggcttcggcttggaccctggaacatcattttttttattacatacgagcagctaaagaggcttcaaatctaagaactgaattatatgtgagcccagccctgccagcctttctactcctttgcccttttcccgtgttctaatgtattttgacaatgttgtaagtgtttaccaagccgttggtctcctaagggcctcctgatggaagaacagtggggtggttcaaagttatttctatgtttgtgttaccatgttaacttttccccgagagaaagtgttaacattgagactctggccccagattggtatcttctatgaagatggatactgatgggtgacattgaaaacggcctgctttccaaatgtggttaaatgtaattggttagccccagacttgggctagagcagaaggcataggccagggtggttattgctatatgtgttacagacctcggttctcattaaagtatttattggcagaatcacaaaaaa

SEQ ID NO: 30630 - DNA, 6219 bp, Homo Sapiens; identical to SEQ ID NO: 22273

SEQ ID NO: 30631 - DNA, 3673 bp, Homo Sapiens
ctcctcctctcagcacctggcgcggcgctacgcggccctggccgccgaggactgcgccgctgctgcccgccgcttcctgctatcctcggccgccgccgccgccgccgctgccgcctcggcttcgtcgcccgcctcctgctgcaaagagttggggctggctgcggccgccgcctgggagcagcagggccgaagtctcttcctggccagcttggggccggtgcgcttcctggggccgcccgccgccgtgcagctcttccgggggccgacaccgtcaccggccgagctccctacgccccccgaaatggtgtgcaagcggaagggggccggggtccccgcctgcaccccctgcaagcagccccgcagccgctctgccctccgccctcttctcccacctccgaaggtgcccccaccgaagctggcggggacgctgtccgagccgggggcaccgcccccttgtccgcccagcagcagcatgaatgtggcgacgcggactgtcgggagtcccccgaaaacccctgcgactgtcacagggagccgccccccgaaaccccagacatcaaccagctgccgccgtccatcctgctcaagatattttccaatttgtcactggatgagcgttgcctttccgcatcattggtttgcaagtactggcgtgacctttgtttagacttccagttttggaagcagctggatcttagtagtcgtcagcaggtcactgatgaattgttggaaaaaattgcatcaagaagtcagaatataattgaaatcaacatttctgattgtcgcagtatgtctgataatggcgtatgtgttttagcatttaaatgtcctggacttcttaggtatacagcctacaggtgtaaacagctttctgacacctctattattgcggttgcctctcactgtcctttacttcagaaagtgcatgtaggcaaccaggacaaactcactgatgaaggactcaagcagctgggctcaaaatgcagagaactcaaagatattcatttcggccagtgttacaagatctcagatgaaggcatgatcgtcatagctaagggctgtctgaaattacaaaggatatacatgcaggaaaacaaattagtgacagatcagtcagtgaaagcatttgctgaacactgtcctgagcttcaatatgtaggcttcatgggttgttcagtcacttctaaaggagtcattcacctaaccaagctaagaaacctttccagcttggacctacgtcatatcactgaactggataatgaaaccgtgatggaaattgtcaagaggtgcaaaaatcttagctctctcaatctctgtctgaactggatcataaatgacaggtgtgtggaggtcattgcaaaggaaggacaaaacctgaaagagctatatttggtgtcctgtaaaatcacagattatgcactgatagccattgggcgatacagcatgacaatagagactgtggatgtcggatggtgtaaagaaatcacagaccaaggagccaccctgattgcacagagcagcaagtctctgagatatttggggctgatgagatgtgataaagtcaacgaagtgacggtggaacagctggtgcagcagtacccccacatcaccttcagcaccgtcctgcaggactgcaagaggaccttggagagagcctatcagatgggctggacccccaacatgtctgccgcctcctcctagcgctcctgcctcgcctagtccactgggatcattcagcagagcagaggagaattgtacatttggggagctgatctctcggaagggttttaactgtcacctgtctgtgtgtgttcaagtatgtgtatttgtgtcttgtttgcatactgcataccaaaagtgcagttgtcatttgttcccaagtgagctggctttttttcttagaaattaaagattatgaaagccacaaactttttagtttttaacttcaaaggcttctttctctttaaaaaaaaattatttttaatatagagtcaaaaaattggatgtattattttgagcttctaattgctgccacttggagatgtccaagtaagaaggccttctttttacatgggatgaattgtgcacttctactgatgatgactacagcagaagtgatgttatacgtacaggcacttacactctctcacatattcacacgtgtgcacatctacaccagggctctgatctactctagatcgtttcctgacagagaagccttcttccaggccactaaggtagcatgttatccactgtggcactgcctaactccgtgtatcctcgggtggccaacttgctatctggtgggtgacttggggactagaaagaataaagccttttctaaatttgttatatagaggcaacagtctgaactctcctggccagctcacgaaagttaattatacattattctacaaatgcattctgttgagcactaaatattttagttggttttatgttaacattgtgttagcttttatttcctggatagtaactggtcaggatatattttaatgatatttgaaactaatcttagcattgaagccaccaatgtaattaatggtgtgcagttattttaaaaactacagatcatttcattattttcttaattttggtaattattaaagtctatttctgagatacgagagggtagtcacattaatagaagattcatgagtgagatataagtagacaatctttctactgttgttgctctttttgctttgctttgggttcttgaacaggttttttggatatatgcatgttgtcattttggactagttctcatgctactgcaaagatctattgctagctaatatatgagttaagaaagaaaattagaaaatctgttcattgaaattctgtttacacttgtcagaaataagcatttctttgtttaattaaggattgccagcttcagttaagacaagacctatcagtaaatgaatatatgttttgatttaacacatctttacaattaattcataatagggactcaggctcaaataactgttcctgtgtctagatttataatgaggacatcagggagcctttttaagctaaagagtgattatctttcacagtagaactagaaacaaaaccctaacttgtgaagttgctatttatttttccctgagtgaatataactgttatttggtctttaacagatatactgaggtttgagtttcactttctttaagtctcacattgctaacatgacattagctgtaagaaacaagatagctttacatttgaatgccatttactgatttctaatgattctctttttttgtaaacaactgtttcctttgattatgtcaacatgtttctgatgtggcatttttgttttaatcccaatcggttaggaaaatctagtcagtaagcgccatgagtattcttcccataactaaatgggtttctaatttaatttgaagggaataaaatttgtgtaagaaaaaagctgtttaacattaataaactatatttcttcttacacattgaactgtatcattttcatatccacttccccaccactgaaatatcttatttcacaatattttaactgatttttaatccaaaactaatttataagacagtatgtatagtaatagtagcttgagtgaatatgcaaaagtttaatttttatatatgtcatactatattttaaatagtt

SEQ ID NO: 30632 - DNA, 2728 bp, Homo Sapiens
ggtggctggttctgcgccggatccgggagaggggcgggcgccattgtgcttcgctgccgactgcatttcctcagtcacgggcctagaactccaaggagaaaggcggcgaaaaatctttaagaatggagtctaaaccttcaaggattccaagaagaatttctgttcaaccttccagctccttaagtgctaggatgatgtctggaagcagaggaagtagtttaaatgatacctatcactcaagagactcttcatttagattggattctgaatatcagtctacatcagcatcagcatctgcgtcaccatttcaatctgcatggtatagtgaatctgagataactcagggagcacgctcaagatcgcagaaccagcaacgggatcatgattcaaaaagacctaaactttcctgtacaaactgtactacctcagctgggagaaatgttggaaatggtttaaacacattatcagattcatcttggaggcatagtcaagttcctagatcttcatcaatggtacttggatcatttggaacagacttaatgagagagaggagagatttggagagaagaacagattcctctattagtaatcttatggattatagtcaccgaagtggtgatttcacaacttcatcatatgttcaagacagagttccttcatattcacaaggagcaagaccaaaagaaaactcaatgagcactttacagttgaatacatcatccacaaaccaccaattgccttctgaacatcagaccatactaagttctagggattccagaaattctttaagatcaaatttttcttcaagagaatcagaatcttcccgaagcaatacgcagcctggattttcttacagttcaagtagagatgaagccccaatcataagcaattcagaaagggttgtttcatctcaaagaccatttcaagaatcttctgacaatgaaggtaggcggacaacgaggagattgctgtcacgcatagcttctagcatgtcatctacttttttttcacgaagatctagtcaggattccttgaatacaagatcattgaattctgaaaattcttacgtttctccaagaatcttgacagcttcacagtcccgtagtaatgtaccatcagcttctgaagttcccgataatagggcgtctgaagcttctcagggatttcgatttcttaggcgaagatggggtttgtcatctcttagccacaatcatagctctgagtcagattcagaaaattttaaccaagaatctgaaggtagaaatacaggaccatggttatcttcctcacttagaaatagatgcacacctttgttctctagaaggaggcgagagggaagagatgaatcttcaaggatacctacctctgatacatcatctagatctcatatttttagaagagaatcaaatgaagtggttcaccttgaagcacagaatgatcctcttggagctgctgccaacagaccacaagcatctgcagcatcaagcagtgccacaacaggtggctctacatcagattcggctcaaggtggaagaaatacaggaatatcagggattcttcctggttccttattccggtttgcagtccccccagcacttgggagtaatttgaccgacaatgtcatgatcacagtagatattattccttcaggttggaattcagctgatggtaaaagtgataaaactaaaagtgcgccttcaagagatccagaaagattgcagaaaataaaagagagcctccttttagaggactcagaagaagaagaaggtgacttatgtagaatttgtcaaatggcagctgcatcatcatctaatttgctgatagagccatgcaagtgcacaggaagtttgcagtatgtccaccaagactgtatgaaaaagtggttacaggccaaaattaactctggttcttcattagaagctgtaaccacctgtgaactatgtaaagagaagttggagcttaacctggaggattttgatattcatgaactacatagagctcatgcaaatgaacaagctgagtatgagtttatcagctctggtctctacctagtggtgttattgcacttgtgcgaacaaagcttttctgatatgatgggaaatacaaatgaaccaagcacacgtgtccgatttattaaccttgcaagaactcttcaggcacatatggaagatctcgaaacttcagaggatgattccgaagaagacggagaccataacaggacatttgatattgcctaacttcatataagacagatggatgatctgtgaacataagtgtttattaaaaatggcaattaaatataaattacttttgtgggggaatgcctaataaatacattgactatatataaaatgaatatatacatacacatgtatgcctgtatatatatattcattctccagtgttgctgaattaaaattctgctggactttttaacatagcaaatccgatgtttataaactggtaatcaaaaaggttttttcttttaggtgagtgggaaagtattacccttgttttaaatatctaagcaatgcctatcaacccttttttgtgttatgattactgtagtcatatttatgaaaaaaggtttgtgttttactcttgctagtgagaaaagtgggacaaaatatacttttgaaataaaatgctatatggcacctaattattttttcttttaaaatgccttaagttgcagtctcattttgataatcatttgcttccagtgttt

SEQ ID NO: 30633 - DNA, 2485 bp, Homo Sapiens
ggcaaatgggcttgggcggctcctcggcgggtggcggtggtggccgtagcggttcctcctggccctgttaatgtcggggccaggccgggggaggatggcgccctagaacccggccttgctggggtaggggcgggaggggacggggtggggaccggccatgtcggaggtgacccggagtctgctgcagcgctggggcgccagttttaggagaggcgccgacttcgactcttggggccagctggtggaggcgatagacgagtatcagatattagcaagacatctacaaaaggaggcccaagctcaacacaataattctgaattcacagaagaacaaaagaaaaccataggcaaaattgcaacatgcttggaattgcgaagtgcagctttacagtccacacagtctcaagaagaatttaaactggaggacctgaagaagctagaaccaatcctaaagaatattcttacatataataaagaattcccatttgatgttcagcctgtcccattaagaagaattttggcacctggtgaagaagagaatttgggatttgaagaagatgaagaagagggtggtgctggagcagggtctcctgattcttttcctgctagagttcccggtactttattaccaaggttgccatcggaaccaggaatgacattactcactatcagaattgagaaaattggtttgaaagatgctgggcagtgcatcgatccctatattacagttagtgtaaaggatctgaatggcatagacttaactcctgtgcaagatactcctgtggcttcaagaaaagaagatacatatgttcattttaatgtggacattgagctccagaagcatgttgaaaaattaaccaaaggtgcagctatcttctttgaattcaaacactacaagcctaaaaaaaggtttaccagcaccaagtgttttgctttcatggagatggatgaaattaaacctgggccaattgtaatagaactatacaagaaacccactgactttaaaagaaagaaattgcaattattgaccaagaaaccactttatcttcatctacatcaaactttgcacaaggaatgatcctgacatgatgaacctggaacttctgtgaattttaccactcagtagaaaccatcatagctctgtgtagcatattcacccttcaacaggcaggaagcaagccgtacccagaccagtaggccggacggagtccaatgcaaagctgtaccacagaattcagagtccagcacatcacactgacgtataggactccttgggatacaggtttattgtagattttgaaacatgtttttacttttctattaattgtgcaattaatagtctattttctaatttaccactactcctaccctgcttcctggaacaatactgttgtgggtaggatgtgctcatcttcagacttaatacagcaataagaatgtgctagagtttacacatctgttcacttttgctccaatatgctcttttgacttaacgtcaagctttgggttgatgtgggtagggtagtgtcaaactgctttgagaggaatgggaccagttctgctgcctaagaaggtctgtctggatgtttataggcagcacctctgaagtggcctaaattcaccctgatctgatagttttcctgcttagaaagtgtgccttggccagatcagtatcccacatgggagtgttccctaggttgtagctgtgattgtttccagatgaccagattgtttttctgaaaatgagcatatttttagtcatgtcgattagctgttcttctacatcacattgttactctttctgatgatgattctagggttaacattggaaccatctcaaaataattacaaagttttagatgggtttacaatgtcttctaaacaatgtaatctaaaaataattgagtcagatgctaacgagatactgcaggcataactgctgtttttctgacaactgattgtgaaaccttaaaacctgcatacctcttcttacagtgaggagtatgcaaaatctggaaagatattctattttttttatataggtagataggatcgccatttatttcctatttagatatactgacattcatccatatgaaaatatgcaggtcattagcttactataatttacttttgacttaatggggcataaataaaactttcatagtacacatgaggtggatatttgatacacagaacatttgcggtgggctttctgtgggttagatgtaaagcccacatattttaatattcactattttaaatgagcaatgcatgaggggaatgcagtgtcagtacctggcctatttttaaactagtgtaatcaccctagtcataccattcagtatgtttgctttttaaaataagtaaccacaattaagttgttgtagcccttgcacttcaagagatctagtctttactttcagttgtctgttaggtccattctgtttactagacggatgttaataaaaactatgcgagcctg

SEQ ID NO: 30634 - DNA, 3846 bp, Homo Sapiens
ccacgcgtccgactgaaagccggaccccaggccgccgcgctgccgcccggcctccccgccagcgcgccaccatgggcagtcccggtttccccttgtaaagatggcggtgagggatcgctgcaacctttagactaatgactgtccgaaacatcgcctccatctgtaatatgggcaccaatgcctctgctctggaaaaagacattggtccagagcagtttccaatcaatgaacactatttcggattggtcaattttggaaacacatgctactgtaactccgtgcttcaggcattgtacttctgccgtccattccgggagaatgtgttggcatacaaggcccagcaaaagaagaaggaaaacttgctgacgtgcctggcggaccttttccacagcattgccacacagaagaagaaggttggcgtcatcccaccaaagaagttcatttcaaggctgagaaaagagaatgatctctttgataactacatgcagcaggatgctcatgaatttttaaattatttgctaaacactattgcggacatccttcaggaggagaagaaacaggaaaaacaaaatggaaaattaaaaaatggcaacatgaacgaacctgcggaaaataataaaccagaactcacctgggtccatgagatttttcagggaacgcttaccaatgaaactcgatgcttgaactgtgaaactgttagtagcaaagatgaagattttcttgacctttctgttgatgtggagcagaatacatccattacccactgtctaagagacttcagcaacacagaaacactgtgtagtgaacaaaaatattattgtgaaacatgctgcagcaaacaagaagcccagaaaaggatgagggtaaaaaagctgcccatgatcttggccctgcacctaaagcggttcaagtacatggagcagctgcacagatacaccaagctgtcttaccgtgtggtcttccctctggaactccggctcttcaacacctccagtgatgcagtgaacctggaccgcatgtatgacttggttgcggtggtcgttcactgtggcagtggtcctaatcgtgggcattatatcactattgtgaaaagtcacggcttctggcttttgtttgatgatgacattgtagagaaaatagatgctcaagctattgaagaattctatggcctgacgtcagatatatcaaaaaattcagaatctggatatattttattctatcagtcaagagagtaactgaaagacctgcgggactgattcacgtggggagaatgttcacagcactgtcacccggcttctccgcaggctttcctcttccccagtggcccactaatggtatcactccgagtctcaatggtctggctgtgttagactctctccttttgtgtttttacatgcagcactactcttggttttatttcagtctgacatagagttaactgcaatcagattgtagtctgatttatatgaataacggttgctaattttaggactgggtgaaagctatgccattcattatgtctggctgtattagaatgacatttcctatgaatgtctacggtctgttttaggtgtttgctaaacttctatggcttccagggtcttcttacaatgcattcctttaacttgtccctggaagcattgctacccattttcagcttctctgcctctcttctgatacaaggacagaagaattgggtagatattcaccttttaggggtgcaagtatagctttaagtttgtgcaagtgaaaatgttgaaaagtgagtaacctcgatattaaaatcatccttgacatgaaacagggtgaagagaagctgtccgtggcggctggtgttggctggcattggcactgggctgtgctgacctagccattacaattccaggggctaagaaggctcagggcagacaaagtcaagaggaggaagtttttgtggacaatgaaaagttattttcgtacctttctaccaaaaccaagtttcaggaaaataactctatgttgtttattttcagtgacacttatgtaaggccctgtgagttgtatttatcctgtatccggcactgctaagcttttcaaggtatctttccaatcctgctgatgtggcagtcaatggctgcagggctggcaaacctccccttagccagtcagcacggcattgttccttatcaggaataacaaaggtactacatctttccagccatcagcacgttgtacaacttaactttttaacatagtccgtctgtttactgaggcactggcgagtcccagggctgatacagaaccttccctagagggaataccagagttagctgggtatagaggtggctcaaaggaagtgtccgtgggcagggggaggaatgaacaaaatggcgctgtttctttggctcagactcctagaatgcttgacaagacagaatttttttggaagaacctcatctcactatagttacttttttcacttttgttatatatgtatttattagagcatttgaatattggtacctttaaaagggtcatttggtgttttgctgttgagctggtttttgagtcatagatcttggcttcctttagaagccacttaacttccatacactataataaactgtgaacatatttttgttacctaatgcatccactgatgaacatgcaaactttgggcataatgtgaactaaaattgaaatggaaaatgttagtggccattttgcaacaatgaagaggatagcactttatctagatgaaaactggatttcttatctttgaaatatcttgaactgtttattgctcagaacttaagtaagcatgccaacatttcgtttgtttatgcttgaagtgaaatgttttacttttcactggagaagacaaaacagggtgatcttcatgttattgttttatacaagtgatggaaatgtaccttgccttgtttagaggcaatttcacatttataaatatttttttttcctccatgaaacttacgcagtaatcactacctggaaggtgagttttgatctctttttaaggagaggcactttccaactgaaggtgattgatgtagggaaatgtttgtactatatagaatccatatatttgactgcaagttacaaagttttaagaacatgatggttggtctctaatatatttggaactgattcataagaaaagttattaaaattatctttgaaacacctcttgaagctaatttattagaaaaaatatttcagttggaaggctgtagaagtaatgtttaaatgctaagtcataagttcaggatatttcttttctatttggttgtgcaaaatgtttttcccagttatttaatcgaagtaattccttttaatagaaagagtcagttaaaattcagcattcatggatagatttttggaacgaaaaagggtaagtataagaaaatattgcaaacacattaaaacagttgtatggtgcaggaaaagaagattggaaaaagaccaaaacacacttctccagcaacactccatcagctttttaaaatttagagctatctgctaattttttccctcttccttctcaataaatgaaacaaacactgggcagctgcaggtttctcccaatcatgtctctttatgtaaagacagtaacatgcaaacacttttagtttacatccctcattcacagtgtaaagcaggaaatggtgtgggagatgtgagaccattctgaggtcagcgatagcccaaaggctctgcagtattccctccaatggccaaggattccgtgtgtcatctgcaggagtgagtaggcctgctgtatttcttgtaactgctgggtgttacaaaataagttacaatgttttacactttaaaaaaaaaaaaaaa

SEQ ID NO: 30635 - DNA, 4703 bp, Homo Sapiens
gaattaggggaactcagaaatccatcccccaccccacggccctacctagaagacttaggaatgtgggtccccagcgccgccatctgagactccagagtcgaggctcctagcatcccctacgtagaacactgagaaattccgactgcgggaccccagtctccgagagaccccagattctattcctggagcctgagagcccgaagttcacgcccctgagtctgggctccgcacctccctggggaccgcgtcggggtcgcgcaggagccgggctgcctcgagccggggctggaggctccccgggaggactctgctgggccgctcagccatgcctgagggagcccaaggactgagcctctccaaacctagcccaagcctcgggtgtggccgaagaggtgaagtgtgtgactgtggcaccgtgtgtgagactcggacagctcctgcagcccccaccatggcctccccccgaggttctgggagctccacatccctgagcacagtgggctctgagggggatccagcccctgggcccactccagcctgctcagcctccaggccagagccccttccagggcctcccatccgcctacatctctctccggtggggatcccaggttcagccagaccctcaaggctggagcgtgtggcccgggagatcgtggagacagaacgggcctatgtcagggacctccgcagcatcgtggaggactacctgggccctctgctggacggcggggtcctggggctgagcgtggagcaggtgggcacgctgtttgccaacattgaggacatctacgagttcagcagcgagctcctggaggacttggagaacagcagcagcgccgggggtattgccgagtgcttcgtgcagaggagcgaggattttgacatctacacattgtactgcatgaactacccgagctccctggccctgctccgggagctgtcgttgtctccgccagcagccctgtggctgcaggagcgccaggcccagcttcgccactcgctgcccctgcagagcttcctgctgaaacctgtccagcgcattctcaagtaccatctgctgctgcaggaactagggaagcactgggcggagggcccaggcactgggggtcgcgagatggtggaggaagctattgtgtccatgacagcggttgcctggtacatcaacgacatgaagcgcaagcaggagcatgcagcgcgcctccaggaagtgcagcggcggctgggtggctggaccggaccagagctcagtgcttttggggaactggtgttggagggcgcgttccgaggaggcggagggggtggcccccggctacgagggggtgagcggctgctcttcctgttctctcggatgctgctggtggccaagcgcagggggctggagtacacctacaaaggccacatcttctgctgcaacctgagcgtgagcgagagtccccgagaccctctagggttcaaggtgtctgatctgaccattcccaagcacagacacctgctccaggccaagaaccaagaagagaagaggctgtggattcactgtctccagcgcctcttctttgagaaccaccctgcctccatccctgccaaggcaaagcaagttctccttgaaaacagcctgcattgtgcccccaaaagtaagcctgtcctagagcccctgacacccccacttgggtctcctcgacctcgagatgctagaagttttacccctgggcgaaggaacacagctccatctcctgggccctctgtgattcgccgaggccgcaggcagtctgagccggtgaaggacccttatgtcatgttcccacagaacgctaagcctggattcaagcacgctggcagcgaaggggaactctaccctccagaatctcagccaccagtttcaggctctgcaccccctgaggacctggaggatgctggacccccaacactggacccctctgggacctcaatcactgaagaaatcctggaactgctgaatcagcgaggccttcgagatccagggccgtccacccatgacattcccaagttccccggagactcccaggtgcctggcgacagcgaaaccctcacattccaagccctgcccagccgggactcttcagaagaggaggaggaggaagaggaagggctggagatggatgaacgggggccttccccactccacgtcctggaagggctcgaaagttccattgcagctgaaatgcccagcattccctgccttaccaaaattcctgacgtgcccaaccttcctgaaattcccagccgctgtgaaattcccgaaggttctcgccttcctagtctctctgacatttccgatgtttttgagatgccctgccttccagccatacctagtgtccccaacacccccagtctgtctagcactcccaccctctcctgtgactcctggctccaagggcctctgcaggaaccagctgaggctccagccaccaggagagaactgttttctgggagcaatcctgggaaactgggagagccgccttcaggaggcaaggcagggccagaggaggatgaagaaggggtatcattcacagacttccagccccaggatgtcacccaacatcagggattcccagatgagctggcattccgctcttgctcagaaatccggagcgcctggcaggcattggaacagggacagctggcccggccaggcttcccagagccactgctgatcctggaggattcggatctgggtggagacagcgggagcgggaaggcaggagccccgagttcagaaaggacggcgtcccgagtgcgagagctggcccggctttacagcgagcggatccagcagatgcagcgggcggagactcgggcatcagccaatgccccgcgccgccggcctcgggttctggcccaaccccagccatccccctgtctgccccaggagcaggcagagccagggctcctgcctgcctttggacacgtgctggtatgtgagctggccttcccactgacatgtgcccaggagtctgtccccctgggtcctgctgtctgggttcaagctgccatacctttgtcaaagcagggaggcagcccggatggccagggtctacatgtttccaatttgcctaagcaagaccttccgggcatccacgtttcagctgctacccttttgcctgagcaaggaggttcccggcatgtccaggctccagccgccacacctttgcccaagcaagaaggccccctgcacctccaggtgccggctcttacaactttctctgatcaaggccacccagaaatccaagttccagccaccactcctttgcctgagcataaaagtcacatggttataccagctccatccaccgccttttgtcctgagcagggacactgtgcggacatccacgttcccaccactccagctttgcccaaggagatttgttctgatttcacagtttcagtcaccacccctgtgcccaagcaagaaggtcacctagacagcgagagcccaaccaatatcccactgacaaagcaaggaggttccagggatgttcagggcccagaccctgtctgcagtcaacccatccagcctttgtcttggcatggaagcagcctggatccccagggcccaggcgacaccctaccacccttgccatgtcacctcccagaccttcagattccaggtacctcacctttgcctgcacatggaagccacctggaccatcggatcccagccaacgccccactgtctttgtcccaggagctcccagacactcaggttccagctaccacacctttgcccctgccacaagtcctcacagacatctgggtccaagccctcccaacttcacccaagcagggaagcctcccagacatccagggtccagcggctgcacctccacttccggagccaagccttacagatacacaggtccaaaaactcacaccttcgttggagcagaagagcctcatagatgcccatgttccagctgccacacctttacctgagagaggaggctctctagacattcagggcctctcacccaccccagttcagaccaccatggttttgtccaaaccaggaggctccttagcctctcacgttgccaggttggagtcttcagacttgacgccacctcatagtcccccaccttccagccgtcagctcctgggccccaatgcagctgccctctccagatacctggcagcctcatatatcagccaaagcctggctcggcggcaggggcctgggggaggggcccccgcagcctcccggggctcctggtcctctgctcccacgtcacgggcatcttcgccgcccccccagccccagccaccacctcccgcagccaggcggctcagctatgccacgacggttaacatccacgtgggcgggggtgggcggctgcggccagccaaggcccaggtccggttgaaccaccctgctctcttggcctccacacaggaatctatgggccttcacagggcccagggggctcctgatgcccccttccacatgtgagccaggacatgaggcttccctgaagcaaggatttcagccagatgccatagaccctcagaacttgacctggaagtccagacactgaacgcaggcctcaaaactgctgcggccttccaactcctggtatctgcatcggcgaatggcccttcttgccttgatccacagggatggggaagggaatgtcattaatgttttgttaatactgattctttcatgc

SEQ ID NO: 30636 - DNA, 4706 bp, Homo Sapiens
gaattaggggaactcagaaatccatcccccaccccacggccctacctagaagacttaggaatgtgggtccccagcgccgccatctgagactccagagtcgaggctcctagcatcccctacgtagaacactgagaaattccgactgcgggaccccagtctccgagagaccccagattctattcctggagcctgagagcccgaagttcacgcccctgagtctgggctccgcacctccctggggaccgcgtcggggtcgcgcaggagccgggctgcctcgagccggggctggaggctccccgggaggactctgctgggccgctcagccatgcctgagggagcccaaggactgagcctctccaaacctagcccaagcctcgggtgtggccgaagaggtgaagtgtgtgactgtggcaccgtgtgtgagactcggacagctcctgcagcccccaccatggcctccccccgaggttctgggagctccacatccctgagcacagtgggctctgagggggatccagcccctgggcccactccagcctgctcagcctccaggccagagccccttccagggcctcccatccgcctacatctctctccggtggggatcccaggttcagccagaccctcaaggctggagcgtgtggcccgggagatcgtggagacagaacgggcctatgtcagggacctccgcagcatcgtggaggactacctgggccctctgctggacggcggggtcctggggctgagcgtggagcaggtgggcacgctgtttgccaacattgaggacatctacgagttcagcagcgagctcctggaggacttggagaacagcagcagcgccgggggtattgccgagtgcttcgtgcagaggagcgaggattttgacatctacacattgtactgcatgaactacccgagctccctggccctgctccgggagctgtcgttgtctccgccagcagccctgtggctgcaggagcgccaggcccagcttcgccactcgctgcccctgcagagcttcctgctgaaacctgtccagcgcattctcaagtaccatctgctgctgcaggaactagggaagcactgggcggagggcccaggcactgggggtcgcgagatggtggaggaagctattgtgtccatgacagcggttgcctggtacatcaacgacatgaagcgcaagcaggagcatgcagcgcgcctccaggaagtgcagcggcggctgggtggctggaccggaccagagctcagtgcttttggggaactggtgttggagggcgcgttccgaggaggcggagggggtggcccccggctacgagggggtgagcggctgctcttcctgttctctcggatgctgctggtggccaagcgcagggggctggagtacacctacaaaggccacatcttctgctgcaacctgagcgtgagcgagagtccccgagaccctctagggttcaaggtgtctgatctgaccattcccaagcacagacacctgctccaggccaagaaccaagaagagaagaggctgtggattcactgtctccagcgcctcttctttgagaaccaccctgcctccatccctgccaaggcaaagcaagttctccttgaaaacagcctgcattgtgcccccaaaagtaagcctgtcctagagcccctgacacccccacttgggtctcctcgacctcgagatgctagaagttttacccctgggcgaaggaacacagctccatctcctgggccctctgtgattcgccgaggccgcaggcagtctgagccggtgaaggacccttatgtcatgttcccacagaacgctaagcctggattcaagcacgctggcagcgaaggggaactctaccctccagaatctcagccaccagtttcaggctctgcaccccctgaggacctggaggatgctggacccccaacactggacccctctgggacctcaatcactgaagaaatcctggaactgctgaatcagcgaggccttcgagatccagggccgtccacccatgacattcccaagttccccggagactcccaggtgcctggcgacagcgaaaccctcacattccaagccctgcccagccgggactcttcagaagaggaggaggaggaagaggaagggctggagatggatgaacgggggccttccccactccacgtcctggaagggctcgaaagttccattgcagctgaaatgcccagcattccctgccttaccaaaattcctgacgtgcccaaccttcctgaaattcccagccgctgtgaaattcccgaaggttctcgccttcctagtctctctgacatttccgatgtttttgagatgccctgccttccagccatacctagtgtccccaacacccccagtctgtctagcactcccaccctctcctgtgactcctggctccaagggcctctgcaggaaccagctgaggctccagccaccaggagagaactgttttctgggagcaatcctgggaaactgggagagccgccttcaggaggcaaggcagggccagaggaggatgaagaaggggtatcattcacagacttccagccccaggatgtcacccaacatcagggattcccagatgagctggcattccgctcttgctcagaaatccggagcgcctggcaggcattggaacagggacagctggcccggccaggcttcccagagccactgctgatcctggaggattcggatctgggtggagacagcgggagcgggaaggcaggagccccgagttcagaaaggacggcgtcccgagtgcgagagctggcccggctttacagcgagcggatccagcagatgcagcgggcggagactcgggcatcagccaatgccccgcgccgccggcctcgggttctggcccaaccccagccatccccctgtctgccccaggagcaggcagagccagggctcctgcctgcctttggacacgtgctggtatgtgagctggccttcccactgacatgtgcccaggagtctgtccccctgggtcctgctgtctgggttcaagctgccatacctttgtcaaagcagggaggcagcccggatggccagggtctacatgtttccaatttgcctaagcaagaccttccgggcatccacgtttcagctgctacccttttgcctgagcaaggaggttcccggcatgtccaggctccagccgccacacctttgcccaagcaagaaggccccctgcacctccaggtgccggctcttacaactttctctgatcaaggccacccagaaatccaagttccagccaccactcctttgcctgagcatagaagtcacatggttataccagctccatccaccgccttttgtcctgagcagggacactgtgcggacatccacgttcccaccactccagctttgcccaaggagatttgttctgatttcacagtttcagtcaccacccctgtgcccaagcaagaaggtcacctagacagcgagagcccaaccaatatcccactgacaaagcaaggaggttccagggatgttcagggcccagaccctgtctgcagtcaacccatccagcctttgtcttggcatggaagcagcctggatccccagggcccaggcgacaccctaccacccttgccatgtcacctcccagaccttcagattccaggtacctcacctttgcctgcacatggaagccacctggaccatcggatcccagccaacgccccactgtctttgtcccaggagctcccagacactcaggttccagctaccacacctttgcccctgccacaagtcctcacagacatctgggtccaagccctcccaacttcacccaagcagggaagcctcccagacatccagggtccagcggctgcacctccacttccggagccaagccttacagatacacaggtccaaaaactcacaccttcgttggagcagaagagcctcatagatgcccatgttccagctgccacacctttacctgagagaggaggctctctagacattcagggcctctcacccaccccagttcagaccaccatggttttgtccaaaccaggaggctccttagcctctcacgttgccaggttggagtcttcagacttgacgccacctcatagtcccccaccttccagccgtcagctcctgggccccaatgcagctgccctctccagatacctggcagcctcatatatcagccagagcctggctcggcggcaggggcctgggggaggggcccccgcagcctcccggggctcctggtcctctgctcccacgtcacgggcatcttcgccgcccccccagccccagccaccacctcccccagccaggcggctcagctatgccacgacggttaacatccacgtgggcgggggtgggcggctgcggccagccaaggcccaggtccggttgaaccaccctgctctcttggcctccacacaggaatctatgggccttcacagggcccagggggctcctgatgcccccttccacatgtgagccaggacatgaggcttccctgaagcaaggatttcagccagatgccatagaccctcagaacttgacctggaagtccagacactgaacgcaggcctcaaaactgctgcggccttccaactcctggtatctgcatcggcgaatggcccttcttgccttgatccacagggatggggaagggaggaatgtcattaatgttttgttaatactgattctttcatgc

SEQ ID NO: 30637 - DNA, 1820 bp, Homo Sapiens
gttggagcagcggaggcggcgcagaggcgcgtcttgggtccccgcggcggcgccggtgccaagcgctggtttgcggatacccaggcagatctgcagtgcctaatgccatgagtgtggtggttcagcatgtggaggaaaaagctgtgcactcctggtcgcgcatctccacggcagggaagaaggccctggaagaggcactgcttgtctttaacccaatgagccaggatctcagtgccacagaggcccagcttgtggccttcctgcagggcctgcgagatgatggcttccaacctaccatcctgcgcagtggtgatgtctatggctatagttcatgcacagctaatcccccaagccagacgaaactgcaagctcgtgcccctaacccaactgccacatcacctccagccagtgctccccgaactgccatgcggttgcctgcaggtcgggccacactgcttcccatgccgctatctggcagactggccaaagcatccacaccagcccttgccaagcatgctaccaccaacctgctgctgagctctctgaagcaatcaagtgccagccatgcccggggtgcagcagtgggcttccccacccacctttatccaggtgtctaccctgccatgcggctctctgttgtccttgaggccctggttccacttaagactcccatgccctgcttgggtgccaagcacaaggcacagtcactgcagctctcacttgcagactctcctctgaaactgcggaaaagttcagggaagggtccggggaaccctcggcccaaagctcccagaaaaaccacaagcaagggccccaagtgtctgactcgcaaaggccctggggctggaccccgacgaggctctgggcaccagagcaaaaccaacagagccactgggtcccccagtgtccggcgaatgaaagggggctctgccctgggcaccaaaacagcccaggccaaggtagctcgaacactggccaaagctgctcgtgcccaagccaaggtggctcgaacacaggccaaggctgctaaggcccgggccaaggccaaggcagcactggtcaaggctaaggccaaagctaaggcagcacaggtcaaggccaaggccaaagtcatggcagcacgggccaaggccaaggctaaagccaaggcagtacgggccaaggccaaggtggctcggacccagcccaggggcagaggcaggccaaagggatctgctaaggccagaactacaaggaagggccagaaaaaccgccctgagactgttgggcagaagaggaaaagggctgaggaggcaaaagatcttcctcccaagaagagaacacggcttgggccccgatctcctaaggcatggctagggcctggaacagcaaagctgctgaagttccgtgccataaaggtagataggcggtcctcggatgatgaggtgcggcagcgggctcagcggatcctccgcgtgaacctgtcacctgtaatacggctccagccattgctgccatattcagcagtctgattccttcacacggcaatgtttggggaaactaagcccagctgtctgtgtggctagtggcacagtgtgctatgtccgtggactccacaatcttgaggactcccggtgcctctctagggccctggtgaccaccagcctcctttcagaaaccagagtgggtggggtacggtggggtgggtgggcgggaggggtgttttcatggcgcgatgcactgtgacttgttattcaagttgtatgtctactgttccatctatcacgttttatacctttccaaaaaaaaaaaaaaaaaaaaaaaaaaaaaaaaaaaaaaaa

SEQ ID NO: 30638 - DNA, 3599 bp, Homo Sapiens
tggttatcaatctgtacaaagaatcaccaaactgataaagcaggaaccagagggcaaatcacgctgccaagacaactgtgtaattcgctcgaaaaagaaacgatggagtctcgctctgtcacccaggctggagtatagtggtgtgatcttggctcactgcaacctctgcctcccaggttcaagcgattctcctgcctcagcctctcgagtagctggaattacaggtctggcagaaggaacagtatcaactgactgagtaggtctcattggcagttgtgattcagagacctagaaagctgaacccacggctggcaagaagaggatggtttgtgggacctgggctgatgtctgatgaaattttaagccccagctatagctactacaaagaaaagtggctgatgataagcatgtaactcaaaaagacaatgtatataaaaatatgcaagaatcacaggaaacccacatatccaaccacctagatgaagttgttgctgctgttagcatcactcatagaaagaagttccaaaacaagctgcttcagacagcactattccagcctcctcgagagaaactccacctctgtgaagagaaagcaaagtcctattccaacagtcatgagtacaaacaggccgtccatgagcttgtgcgttgcgtagcactgacaagaatttgctatggagactcacattggaaactagcagaggcacatgttaatctggctcaaggctacctccagctgaaaggactgtcactgcaagcaaaacaacatgcagaaaaagccagacaaatcctcgccaactccattgtgcctccctatagtgagaatacagatgttttcaagttttccattgagcttttccataccatgggcagagctttactctcccttcaaaaatttaaggaagctgcagagaatttgacaaaagcagagagactttcaaaggagctgctacaatgtggaagaattataaaggaagaatggatagaaattgaagcacggatcagattatcatttgcacaggtgtatcaaggtcagaagaagtcaaaagaagctttgtcccactatcaagcagctttggaatatgttgagatcagtaaaggtgaaacaagtcgtgagtgtgtacccatattgagagaattagcaggtgtagagcaagccctgggactccacgatgtatccatcaaccacttcctccaggcacatctcatcatcctgagtagaagcccctctcaagtggaggcagcagactcggcacacatcgtcgcccatgctgctgtcgcttcagggagacacgagcaccatgatgtagctgagcagtattttcaagagagcatggctcatcttaaggattctgaagggatgggaagaaccaaatttctttcaattcaagatgaattttgccattttctacaaatgactggacaaaaagagagagcaacctcgatcctgagagagtccctggaagccaaagtggaagcatttggcgatttcagtcccgaggtggcagagacataccggctcctgggaggagcagacctggcgcaggggaaccacagtggggcccgcaagaaactgaagaagggagaccttagtttcctgctctcagcgacacttccatagcctcatgatagctgcttggtgttctacagtgtctccagatccagaccctcttatatggaccgcaggacaaaaggactctggccacccagcaggccatgggcatgctgtccacggcccccaaggttgcttcgaagccaaggcaggcatcaaaagccaaagtggccttctgcaccagcatccctcaggacaccctgctggggaaggcccggcccggcacaacagcagactgaggcccccaccctgaaaaagcctaggacattcctgggcactgtcatttagggtgctgtacaaatcacctccgcctagaaaatggaattcaacagtcaggatacagatttccaaggccaactgttggccccaacatgcaacagtgagaccataagcctcccgtgggccacattttgacagtggatgcccttcagggtgatatatgctataaagcagttttctatcacctaagtggtttttcttgccaacaagaatttttacccatcagcactactgtggctgaaaaacttctcttcaacagttcagtgcgccctgtgcaggagtcagcccggcatctgcttgtacacacagctccttgcataggtgtggagttagatctggacagtgaacttcaggaagtcctttcttataggaggctaatagggattgagaataacatgagaagaaaacgctaataaagggaaacctgaacacgctgctgtcagcatgtgttttcaaagtgcagcctgcctcagagttcttcggagcctgaaaaggggtttgagaaagagcccagtaggaggggcaggaggccgacacacctgacttggcctggggcccaggaggcaggtgtaagggagtgaaaagaaaggctagccggaggctgcggggggaagaccgcagactccctgctgcttcgcatccctcctgtggcctccactgcaggcaggacaaacctggatgccacctggagctgcttcctgagttggcacactatcgtgtacacagcagtcttcagccccctggaaggaggccatagtcgtgtgaggatggcaaagtcgaacaggaagctttgagtgccttcctccacgatgtcaacgaggagatccagtgccagatcgaggtggatggaacacccaggggtaggggtgcaggtgtgggcagtgatgtcccttcccctccctcccctggtcccacagactgtggccatgaggctgcaggctggtgctatgacagcagattgcagcacagggccctcccctccagcccccagtgggacatcaaaaccaccctggggccatttgtgcagggcaccacctccagtattgatggggaaaataaactcagtagagccacgacagggtggagagaagcagggaccattgtcttcctcaggagcgtgacagctgaccccacagaccatgcttgctggtacacactggtcccagacccaggcctgtcggacatcagcagtgtgctaaaaacgtgtaagatgtggtcactactcaccgtgtgtcctatctagttgacatgggtggagtcagctaaggggtgaatgttcatatgctcccaattcacgttgaagccctaatccccaaagggatggtattgggggtggggtcttggagaggtgattaggttatgagggtggagccctgatgaatgggattagtgctttataaggagagacaccagagagatgatctctctctccaccatgtgaggacacagtgagaagacagccgtctgcaggcccggaagagagccctcaccaggaaatgaaactgttggcaccttgagacttcccagcttccagaactgtaagaaataaatgtttgttgtttaagcctttcaggctacggctttctgttacagcagcctgaactgagagtccatgccgagtttttgaaataaatgtgaattctgatgttaaaaaaaaaaaaaaaaaaaaaaaaaaaaaaaaaaaaaaaaaaaaaaaaaaaaaaaaaaa

SEQ ID NO: 30639 - DNA, 1405 bp, Homo Sapiens
tttcccggcgtccatttagtggcgggaaaagcgaccttttctgagcgcgtttgcctgttgagtggtagcctttcccctcaaccagcaatggaggagcagccccagatgcaagacgccgacgagcccgcggactccggaggggaaggccgggcaggcgggccaccgcaggtcgccggcgcccaggcggcgtgcagcgaggaccgcatgaccctgctcctcaggctgagagcacagacaaaacaacaactcttagaatataaatcaatggttgatgcaagtgaagaaaaaactccagaacaaattatgcaagaaaagcaaatcgaagctaaaattgaagacctggaaaatgaaattgaagaggtaaaagttgcttttgagataaaaaagcttgcattagacaggatgagactttcaactgcacttaaaaaaaacctggagaaaattagcagacagtctagtgtgctcatggataacatgaaacacctattagagctaaataaattaataatgaaatcacagcaggaatcttgggatttagaggaaaaactgcttgatattagaaagaagagattgcaattaaaacaagcttcagaaagtaagcttttagaaatacagactgaaaagaacaaacagaagattgatttggacagtatggaaaactcagagaggataaagatcatacgacaaaacctacagatggagataaaaattactactgttattcaacatgtgttccagaaccttattttggggagtaaagtcaattgggcagaggatcctgcccttaaggaaattgttctgcagcttgagaagaatgttgacatgatgtaataagaattcatttctgacatattttacatttctggcaatctcaactcttatttggaatacttctgtgcatttgtctgtccaccgtaattttagaaaagcatatccataacgtttacagttgtagtacagttgtggttagttatttgtagtgggattgaaagtaatttttttctttttatatttctatatttagtttgtttttttgttgttgttgttttttgagatggagtctcgctttgttgcccagactggagggcagtggcgcgatctcggctcactgcaacctctgcctcccgggttcaagcagttctgcctcagcctcccaagtagctgtgactaaaggtgcacgccgccatgcccagctaattttttgtattttagtagagacggggtttcaccgtgttgcccaggctgctctcagaactcctgagctcaggcagtccaccgcctcggcctaccgaagtgctaggattacagacgtaagccaccgagcctggtctagtttgcattttttttctatcagttttataagttaagaaataaaaggaattaatgttaaaaaaaaaaaaaaaaa

SEQ ID NO: 30640 - DNA, 3856 bp, Homo Sapiens
aacgccgggcagggcggcgggcgcgctcagtctggcggcggctgccgtgagctgactgacgttccgggaacgccgcagcagcccgcgccgcccgcagcctagccgagccgcgccgcccgggcctcgcccgcccgcctgcccgccatggtgtcatggatcatctccaggctggtggtgcttatatttggcaccctttaccctgcgtattattcctacaaggctgtgaaatcaaaggacattaaggaatatgtcaaatggatgatgtactggattatatttgcacttttcaccacagcagagacattcacagacatcttcctttgttggtttccattctattatgaactaaaaatagcatttgtagcctggctgctgtctccctacacaaaaggctccagcctcctgtacaggaagtttgtacatcccacactatcttcaaaagaaaaggaaatcgatgattgtctggtccaagcaaaagaccgaagttacgatgcccttgtgcacttcgggaagcggggcttgaacgtggccgccacagcggctgtgatggctgcttccaagggacagggtgccttatcggagagactgcggagcttcagcatgcaggacctcaccaccatcaggggagacggcgcccctgctccctcgggccccccaccaccggggtctgggcgggccagcggcaaacacggccagcctaagatgtccaggagtgcttctgagagcgctagcagctcaggcaccgcctagaatccttcgatctcgcttcaggaagaaaagtacctcatcctcggccaccgaaaccacgtgagtgagatgagccaacagcaccggatccacagaatgtttcttctctgccttaaagagctattcactaataacatagaaatccgcaagctgggtgtgctttgagtgtgcagcctcacaaacatggccttttctctctccccttccacttttaaggatttatttttttcccccttttctttattttgctggggagaggctaaagggaaaggtagtaggggcgggggtggtgacctttaagtcttctgaggttggtaattttccacaattggattgtcattatagacagcagtgtgttttttagaaagataagagaatcacccctatgctgctgagatgtacatttgtaatttatctgttgcatacttagtttttagtcctgtaaatgcaaacacagcattttttacaactttctttgttcttggtacttatactttgaactatgatgtacatatttatggcttttggcttttaatataatggacttgcaagggctgccagaggttctgatatgtaagaaaactgcaaaaacaaatatagacaaatattttgattctagagaacgtctcagatgtgcttataaagcttccaaatacaactccagtaagacatccctttccctgcaggagtgtggtctatattctttagatagttgtttagtcaaaagaccagacaagttacaaactaagagaaacaatatttcacaacacagtaaagtgtgatgagaggtcaggggaacatcccagtaaaagagaagagtcacaggaagctcatctcctccctggattctggattaggagcttctgaatcttttccagggataggcaggtagctcactcttggtgcaatttcttgaggatgggaacatgtagagctgctggaaggagtaattctgtgcttgacaaaggacgatttctcctttatcgtgaccagtgctgccgatttcctgacagaggagcttacactctgagcaccttgttttagcgaactctagcaaaacttgtttagcttagcaaaaacaaacacacaaaaaactgagaactctgctgtttcagatatgccataacatacatctgaaacacatgtgtaacaatcaaaatggtgggctctagaatggttttggagctcgagatcttcatgggttagacttgctggtcagacccaggagcacctgtggctcacaccttctgttcccctcctggcctgtgcagaatgtaaacagcagactcatactcaatgggcactacaggccttatcagacgttttatacaagcctggattgcttagtaggggaataaggcattctctgagggggctttccacttagattgagaattttatttgaaaagaatctggtttaaatggcattgtggtccgaggtagctgctctccccactgagagctgagccgaaatataagaataatatatttgtgcttcgagttggtgtttctttcagtgtaatgcatgcagtggtcacaacccagttactcataatatttggattgtatttgttcgtagatatgcccagaagactagagaattagtgttatataccatatagaacttactgtcagtcaactataaacaggcccaattaaaaactgttccattactacgcaaacacatattagaggcctttgctgatgacacattagctggatcttagccaccccagaaagggtttgatttgaagctgattgttgccagatatgcatattggaatcccatctacccatagttcctctgaaggtgattttgtaatttgcaaaagggtataggaaaatatacctaaaagcgaatttgtggctgagaggataaacagaagctgtttgctcatgttctgtgccccacacccaccaatacctaaatctgttaaggaagacagaaaatgttttctttgtgctcattgagtagttccagacagaagaagaatatactctttaaaatgtatttacctgttagttggaagtacccagaattatcagaaacgaatgcaaaaaaaaaaaaaaaaaaaaaaagcttacacagcttcttagcaattttttttttttttgccgaaacaataaattgcctttagcagcagtttaaaatcctatcgtgaacaacctatattttcgccattttacaatggagagttgtgacaagtacaggttatcaagtttgcacttaactatgccaaaaaaagtttgaagcgctctattctcagacatgctgtattattacttctcattcaagattgaaaaatataaaggtatccaaactctgtcttaatgtaaatgtaactatttttccttcaagtgttgactagggagtcggtttctctcttaaagacactcactgtacaactgaaagcagctgtcatatttctggcaaaatgtgtttacgtatctgacaagttgtacatttgtgtatgaactgacataaaatgtgaaagcctgtaagtgtacatgtagtggtgtggtgttctgtctagaggatacaactgaatgtttttaatttgctgacttacagacacaggctgtttacaaaatgctagctggaaagtctgtaatgttcatgtcataacttttagttaattgccattgagcacctgttctgaggaggtgagatgtggacttgtgcttataaactggagagtttagtcataatccctcctggctttgtgtgaatagcttgctcactttgctggcctttgaaatgtgttctccgtgataagctatccatgtgtttgtgataagagtgcttgtcaaccatgaccatctttgagccttcctagtcctccacctggcacagtatttgaaatggcaaaggatgtgcttcatcctctaacaaacagtgtacactcccagagctgatattctggattgtgactgtgcacatttcctctagttcatgtctgtagtccctatagaatgatctgtaataaaatagtatactggactgtgcatcaaagggatgtaaaattacagtattccaaaggttgaagttctgctgttttgttataatgcctgatacacatcttgaataaagtcttaacatttttctttt

SEQ ID NO: 30641 - DNA, 3216 bp, Homo Sapiens
gagcgggcgagggagcgcgcgcggccgccacaaagctcgggcgccgcggggctgcatgcggcgtacctggcccggcgcggcgactgctctccgggctggcgggggccggccgcgagccccgggggccccgaggccgcagcttgcctgcgcgctctgagccttcgcaactcgcgagcaaagtttggtggaggcaacgccaagcctgagtcctttcttcctctcgttccccaaatccgagggcagcccgcgggcgtcatgcccgcgctcctccgcagcctggggtacgcgctgaagcccgggaggcttggcgccggcgaagacccaaggaccactcttctgcgtttggagttgctccccacaaccccgggctcgtcgctttctccatcccgacccagccggggcgcggggacaacacaggtcgcggaggagcgttgccattcaagtgactgcagcagcagcggcagcgcctcggttcctgagcccaccgcaggctgaaggcattgcgcgtagtccatgcccgtagaggaagtgtgcagatgggattaacgtccacatggagatatggaagaggaccggggattggtaccgtaaccatggtcagctggggtcgtttcatctgcctggtcgtggtcaccatggcaaccttgtccctggcccggccctccttcagtttagttgaggataccacattagagccagaagagccaccaaccaaataccaaatctctcaaccagaagtgtacgtggctgcgccaggggagtcgctagaggtgcgctgcctgttgaaagatgccgccgtgatcagttggactaaggatggggtgcacttggggcccaacaataggacagtgcttattggggagtacttgcagataaagggcgccacgcctagagactccggcctctatgcttgtactgccagtaggactgtagacagtgaaacttggtacttcatggtgaatgtcacagatgccatctcatccggagatgatgaggatgacaccgatggtgcggaagattttgtcagtgagaacagtaacaacaagagagcaccatactggaccaacacagaaaagatggaaaagcggctccatgctgtgcctgcggccaacactgtcaagtttcgctgcccagccggggggaacccaatgccaaccatgcggtggctgaaaaacgggaaggagtttaagcaggagcatcgcattggaggctacaaggtacgaaaccagcactggagcctcattatggaaagtgtggtcccatctgacaagggaaattatacctgtgtggtggagaatgaatacgggtccatcaatcacacgtaccacctggatgttgtggagcgatcgcctcaccggcccatcctccaagccggactgccggcaaatgcctccacagtggtcggaggagacgtagagtttgtctgcaaggtttacagtgatgcccagccccacatccagtggatcaagcacgtggaaaagaacggcagtaaatacgggcccgacgggctgccctacctcaaggttctcaaggccgccggtgttaacaccacggacaaagagattgaggttctctatattcggaatgtaacttttgaggacgctggggaatatacgtgcttggcgggtaattctattgggatatcctttcactctgcatggttgacagttctgccagcgcctggaagagaaaaggagattacagcttccccagactacctggagatagccatttactgcataggggtcttcttaatcgcctgtatggtggtaacagtcatcctgtgccgaatgaagaacacgaccaagaagccagacttcagcagccagccggctgtgcacaagctgaccaaacgtatccccctgcggagacaggtaacagtttcggctgagtccagctcctccatgaactccaacaccccgctggtgaggataacaacacgcctctcttcaacggcagacacccccatgctggcaggggtctccgagtatgaacttccagaggacccaaaatgggagtttccaagagataagctgacactgggcaagcccctgggagaaggttgctttgggcaagtggtcatggcggaagcagtgggaattgacaaagacaagcccaaggaggcggtcaccgtggccgtgaagatgttgaaagatgatgccacagagaaagacctttctgatctggtgtcagagatggagatgatgaagatgattgggaaacacaagaatatcataaatcttcttggagcctgcacacaggatgggcctctctatgtcatagttgagtatgcctctaaaggcaacctccgagaatacctccgagcccggaggccacccgggatggagtactcctatgacattaaccgtgttcctgaggagcagatgaccttcaaggacttggtgtcatgcacctaccagctggccagaggcatggagtacttggcttcccaaaaatgtattcatcgagatttagcagccagaaatgttttggtaacagaaaacaatgtgatgaaaatagcagactttggactcgccagagatatcaacaatatagactattacaaaaagaccaccaatgggcggcttccagtcaagtggatggctccagaagccctgtttgatagagtatacactcatcagagtgatgtctggtccttcggggtgttaatgtgggagatcttcactttagggggctcgccctacccagggattcccgtggaggaactttttaagctgctgaaggaaggacacagaatggataagccagccaactgcaccaacgaactgtacatgatgatgagggactgttggcatgcagtgccctcccagagaccaacgttcaagcagttggtagaagacttggatcgaattctcactctcacaaccaatgagatctgaaagtttatggcttcattgagaaactgggaaaagttggtcaggcgcagtggctcatgcctgtaatcccagcactttgggaggccgaggcaggcggatcatgaggtcaggagttccagaccagcctggccaacatggtgaaaccctgtctctactaaagatacaaaaaattagccgggcgtgttggtgtgcgcctgtaatcccagctactccgggaggctgaggcaggagagtcacttgaaccggggaggcggaggttacagtgagccgagatcatgccattgcattccagccttggcgacagagcgagactccatct

SEQ ID NO: 30642 - DNA, 4538 bp, Homo Sapiens
tggtgtggggagacgctggtcctccccgtcctcccatagcgcttattgcctcaccctcaccccctaggggccggatccaaaggcgctgcactccccaagccttggggcatcagccaggaaggtttcctacctcctaattcaggggcaggactcctcttttccccccacggggaaaagaggcagaaacttaggggtttccctcctttcttagggtcagacgctcttagggtccacttcttcaggggcggaagcctctcctacccttcccataggggcacaggcctttaccccactgtacttcggagccaacgcctttccctcagcactgccaccccagagtcaggacccagaggactgtgccttcgcccccaacgcaggcgcggccttttggagaggagggaggagtggagaggacaggggcccttgctctcccctccccaacttgttcctcttgccccccagtccctggcaatccagagatcccgatatctaggactgtccatccatccactccctgaccttttcccggctcctggctgcagccatggagttgcagaagggaaaaggggcggcagcagcagcagctgcttcgggagcagcgggaggtggaggaggaggagcgggagcaggagccccaggaggggggaggctgctactttcaaccagtttggatgccaaggatgagttagaggagagattggaaaggtgtatgagcattgtgacatcgatgactgctggtgtctcggagagagaagccaatgatgccctcaatgcgtatgtgtgcaaaggcctcccccagcatgaagaaatctgcctgggcctgtttactctcatcctcactgaacctgcccaagcccagaagtgttaccgggacttagctctggtgagtcgtgatggcatgaatattgtcctgaataaaatcaaccagatacttatggagaagtacctgaagctgcaggatacctgccgtactcagttggtgtggttggtacgggaactggtgaagagtggggttctgggagccgatggtgtttgtatgacgtttatgaagcagattgcaggtggagatgttacagccaaaaatatctggttggcagaaagtgttctggatatcctgacagagcaaagggagtgggtcctgaagagcagcatcctcattgccatggctgtttacacgtacctccgcctcatcgtggaccaccatgggactgcccagctccaggccctgcgacagaaggaagtagacttctgcatctcactgcttcgggaacggttcatggaatgtctgatgattggtcgggatctcgtaagactacttcagaatgttgctaggataccagaatttgaactgctttggaaagatattatccataatcctcaggccttgagtcctcagttcacaggtatcctacagcttcttcagtcaagaacatcccgaaaattcctagcatgtcgtctaaccccggacatggagactaaactcctcttcatgacatcccgggtgcgatttggtcaacaaaagcgataccaagattggttccagcgccagtacctgtcaactccagatagtcagtctctgcgctgtgacctcattcgctacatctgtggggtagtccacccttctaatgaagtactgagttcagatatcttgccccggtgggccatcattggttggctcctgacaacgtgcacgtcaaatgtcgctgcctccaatgccaagctggctttgttttatgactggctgttctttagtccagacaaggatagcattatgaacatagaaccagccatcctggtcatgcaccactccatgaagccccacccagccatcactgccacactcctggacttcatgtgccgcatcattcccaacttctatccaccattggagggccacgtgcggcagggtgtcttttcctccctcaaccacattgtggagaaacgggtcttggcacacctagctcccctgtttgacaaccctaagttggataaggagctgcgggcaatgctgagagagaagtttcctgagttctgcagctcaccctccccacctgtggaagtcaaaattgaggagccagtttccatggagatggacaaccatatgtcggataaggatgagagttgctatgacaatgcagaggcagccttcagtgacgatgaagaggatctcaacagcaaaggaaagaagagggagtttcgcttccaccctatcaaggagacagttgtggaggagccagttgatatcaccccttaccttgaccagttggatgagtccctgagggacaaagtactccagctacagaaggggagtgatacggaggcccagtgtgaggtcatgcaggaaattgtggaccaggtcctggaggaagactttgactcggagcagctgtctgtccttgcttcctgcctacaggagctcttcaaggcccactttcgaggggaggtcctgcctgaggagattactgaggagtccctggaggagtctgtaggaaagcctctgtacctaatatttaggaacctatgtcagatgcaggaagacaacagcagcttctctctacttctagaccttctctccgagctatatcagaagcagcccaagattggctaccacctgctctactacctgagggccagcaaagccgccgcagggaagatgaacctgtacgagtcatttgcccaggctacccagctgggcgatctgcacacctgcctgatgatggacatgaaggcctgccaggaggacgatgtgcggctcctgtgccacctcacgccctccatctacacagagtttccagatgaaaccttgaggagcggagagctgctgaacatgatcgtggctgttattgactctgcacagctccaggagctggtctgccacgtgatgatgggtaacctggttatgtttcgaaaagactcagttctcaacatactcattcagagcctagactgggagacctttgagcagtattgtgcctggcagctctttctggcccacaatattcccctggagaccataatccccatcctgcagcacctcaaatacaaggagcacccagaggccctgtcctgcctactgcttcaactccgaagagaaaagcccagcgaggagatggtgaagatggtgctgagccggccctgccatcctgacgaccagttcaccaccagcatcctgcggcactggtgcatgaaacatgacgagctgctggccgagcacatcaagtccctgctcatcaagaacaacagcctgcctcgcaagagacagagcctgaggagctctagcagcaagctggcccagctgactctggagcagatcctggagcacttggacaatctgcggctcaacctgaccaacaccaagcagaacttttttagccagacgccaattctccaggcgctgcagcatgtccaagcgagctgtgacgaagcccacaagatgaaattcagtgatctcttctccctggcggaggaatatgaggactcttccaccaagccacccaagagccggcgaaaagcagctctgtccagccctcgaagtcgaaagaatgccacacagccccccaatgccgaagaagagtcgggctccagcagtgcttcagaagaggaagacacgaaaccgaagcctaccaagcggaaacgaaaagggtcctctgcagtgggctctgacagtgactgaggccctgcattccccatcccacccccggctggactgccctctccttcttggtgattcaaaggttaatagaggctgaggagattgcaggggaaacacccttgctgcatccccaagctcccccggtggaaggaggagctttctcctctggctgagtttgagaagctgccatgcagcccctagccccttccctcctcctggggcctccagcccctcacactgctgttcccagtgatatttgggatctgactgaagccagaggctctgtaaaatcagaccatagtggaagtcctcagccccctggccccttccgcaatctcctcccccagtctcccaaagagccatttcaacagagaagggaaatgacaaaggggcagctggccagataagctaggatgagagcagagactcagtgtgtgggtgtcccttcctgcttccccttcaggtcttggtttgttctgaagggacgttttatagtcactatccacatgccagtgtgaaatgggcatctatgacgtggtcagggtgtccattcctaatcatggggcagatgccacaagcattcagaaaggagtctgaaagggtggccacagccccacgtggtgtgccctggaggcttaggttggtctgaggttggcacctcaatctacaccagagcccagggagtcccagaggcaagtttcacagaattgtcaaatgatcccatttccttgagtctgtttttttttttgtttttttttgttttttttttggcagagataatcgtgtcttaaaagttgtttttaaatgacaataaaacaagccagaatgtcaaaaaaaaaaaaaaaaaaaaaaaaaaaaaaaaaaaaaaaaaaaaaaaaaaaaaaaa

SEQ ID NO: 30643 - DNA, 10709 bp, Homo Sapiens
agggggcggcgctcccggcccatcccttagccccgcggcggccgtgtgggccggaggctgcctgcaccgcgtcagggaggccggcctagaaaccctccctcccagaagaaagccgatcccagttcaggtggggtcttcctcggttgcgtacctggctggagccgagctggtgggcggccggcagccggcgtttctggtgatgacagccccgaaatgaaagcagcgcggccgccgcctccgagggctgcagggagatcagcgtccagcaaataagaagcaagtcctggacccggaggaggaggagcggccgagcatctctctctgctccgccgtgtcctttagatgagcactcccggccggagccggaggtggatccgcagagctgcctctgggcgcctgaccccgcgctgacatcacaacctgtgacaggcgcatcacgcccggtacctgctcccggccgctgcccgtcctcccagcctctttgtatgccgcagacatggccagccagcaggattcgggcttctttgagatcagtatcaaatatttactgaaatcctggagtaatacttctcccgttggcaacggttacatcaagcctccggttccacctgcttctggcacgcacagggagaaagggccgccaaccatgctacccatcaatgtggacccagacagtaaaccaggagaatatgtcctcaaaagtttatttgtcaacttcaccactcaggctgaacgcaagattcgtatcattatggcagagcccctggaaaagccattgacgaaatctctgcaacgtggagaagacccccaatttgatcaggtcatcagctcaatgagctccctttctgagtactgcctgccttccattctacgtacattatttgactggtataaaaggcaaaatggcattgaggatgaatcacatgaatacagaccaagaacaagcaataaatcaaaaagcgatgaacaacagcgagattatttaatggaaagacgggacctcgccattgattttattttttctttagtattaatagaagttttgaaacagattccacttcatcctgtaatagacagtttaatacatgatgttattaacttggctttcaagcactttaaatacaaagaagggtaccttggtcccaacactggcaatatgcatattgtggcagacctgtatgcagaagtcattggagtgttggcacaagccaaattccctgctgtaaagaagaaatttatggcggagctaaaagaattacggcacaaagagcagaacccatatgtggttcaaagcattatcagcttaataatgggcatgaaattctttcgaattaagatgtatccagtggaggattttgaggcctctcttcagtttatgcaggaatgtgcacattacttcctcgaggtcaaagacaaagatatcaagcatgccttggctgggctttttgttgaaatacttgttccagttgctgctgctgttaaaaatgaagtaaatgttccctgccttagaaattttgtggaaagcctgtatgacaccacgctggaactttcttctcgaaagaagcattccttggccttgtaccccctggtgacctgtttgctctgtgtcagtcagaagcagctgttcctgaacaggtggcacattttcctcaacaactgcttgtccaaccttaaaaacaaagatcccaagatggctcgagttgcactggaatctctctacagattactttgggtttacatgattcgaattaaatgtgaaagcaacacagctactcagagccgacttataaccatcatcacaacacttttccccaaagggtcccgcggtgtggtaccaagggacatgcctctgaacatctttgtgaaaatcatccagttcattgcccaggaacgtttagattttgcaatgaaagaaatcattttcgattttctttgtgtgggaaaaccagcaaaagcattcagtctcaacccagagagaatgaacattggtttacgggcattcttggtcatagctgatagcttgcagcagaaagatggggaacctcccatgccggttacaggagccgttcttccttcaggaaacacgttaagagtaaagaaaacatatttgagtaaaacactaactgaagaggaagccaaaatgataggcatgtccttatattactctcaagtacgaaaagctgtagacaacattttaaggcaccttgataaagaagtaggaaggtgtatgatgctgactaatgtacagatgttaaacaaagaaccggaagacatgatcacgggtgagagaaagccaaaaatagatcttttcaggacctgtgttgctgctattcctcgactgcttcctgatgggatgtcaaaacttgaacttattgacttactggctaggctctctattcatatggatgatgaattgcgacatattgcacaaaattctcttcagggtttacttgttgacttctcagattggagggaagatgtactatttggctttaccaacttcctgctccgggaagtaaatgatatgcatcacacactccttgattcgtccctgaagttgctgctgcagctgctcacccagtggaaactagtcatccagacacaaggaaaagtctatgaacaagccaacaaaatcagaaattcagagctcatcgcaaatggctccagtcacagaattcagtcggaacgaggtccccactgcagtgtactccacgctgtagaaggttttgctctggttttactctgcagtttccaggtggccacacgcaaactgtccgttttaatactcaaggaaattcgagcgttgtttattgccctggggcagcctgaggatgacgacaggccgatgattgatgtcatggatcagctaagttcttccattctagaaagttttattcatgtagcagtttcggattcagcaacattaccactcacccacaatgtggatctgcagtggttggtggaatggaacgcagtcctggtcaatagccattatgatgtgaaaagcccttcccatgtctggatatttgcacagtctgtcaaagacccctgggtcctctgcctcttcagcttcctccggcaggagaacttacccaagcactgccccacagccctcagctatgcctggccttatgccttcactcggctccagtcggtgatgcctctggtggacccaaatagcccaattaatgccaagaaaaccagcactgccggcagcggagacaactatgttactttgtggagaaattacctaattctttgttttggagttgcaaaacccagtattatgagcccaggacacttaagagcttccactccagaaataatggcgaccacacctgatggtacagtgagctacgataacaaggccataggcaccccatcggtgggagttctgttaaagcagttggtgcctttgatgagactagagagcattgagatcacagagtccttagttttaggatttggaagaacaaattcccttgttttcagagaattggtagaagaacttcatccattaatgaaagaagctctggaaagaagaccagagaacaagaaacgccgagaacggcgagacttgttaaggctacaactacttcgaatttttgaacttttggctgatgctggtgtaataagtgacagcacaaatggagccctagagcgggatactttagccctgggagctttgttcttagaatatgtggacttgacccgcatgctcctagaagctgaaaatgacaaagaagttgaaattcttaaagatatccgggcacattttagtgcaatggtggccaacttgattcagtgtgttccagttcaccaccgaagatttctcttcccccagcaaagtctgaggcaccaccttttcatcttattcagccagtgggcaggacccttcagcattatgttcactcctctggatcgttacagtgacagaaatcatcagattacaagatatcagtattgtgcattaaaagcaatgtcagcagtactgtgctgtggccctgtctttgacaatgtgggcctttccccagatggctacctatataaatggcttgacaacattctggcttgtcaagatttacgagttcatcaacttggctgcgaagttgttgtcttgctactggaacttaatcctgaccaaataaatctttttaactgggcaattgaccgatgctacacaggttcctaccaacttgcatctggctgcttcaaagccatagcaactgtgtgtggaagcaggaactatcccttcgacatagtgacattgttaaaccttgttctattcaaggcctctgacaccaacagagagatttatgaaatctccatgcagctcatgcagatccttgaagcaaagctttttgtatactcaaagaaagtcgctgagcaaagaccgggaagtattctctatggaacacacggcccgctgccacccctctacagcgtgtcactcgccctcttgtcatgtgagctggccaggatgtaccctgagctcacactccccctcttctcaggtaagccagcgattccccacaacacaccccaacgggcgccagatcatgcttacctacctgctgccctggctgcacaacatcgagctggtggacagcaggctcctcctcccgggtcgagccccagcagcccagaggacgaagtcaaggaccgggaaggtgacgtgactgcttctcacgggctgagaggaaatggctggggctctccagaagccacgtcactggtcctgaacaacctcatgtacatgacggccaagtatggagatgaagttcctgggccagaaatggaaaatgcttggaatgctttagccaacaatgagaaatggagcaacaacctgaggatcaccttgcagttcctgattagcctctgtggggtcagcagcgacacagttctcctaccctatattaaaaaagtggcaatatacttgtgccgtaacaacaccattcaaaccatggaagagcttctctttgagctgcagcagacagaacccgtgaaccccatcgtccagcattgtgacaacccgcccttctaccgcttcacggccagtagcaaggcttccgcagcagcctcaggaaccacctctagcagcaatacagtggttgctggccaggaaaatttcccagatgctgaggagaacaagatattgaaagaatctgatgaaaggtttagtaatgtcatcagagcccacactcgcctcgagtcaagatacagcaatagctctggaggatcctacgatgaagataaaaatgatccaatttctccctacacgggctggttgctgactattacagagaccaagcagccgcagcccttaccgatgccttgtactggaggatgctgggcccccctggttgactatctcccggagaccatcactccccgggggccactccacaggtgcaatattgctgtaatttttatgactgaaatggtggtggatcacagtgtacgagaagactgggcgcttcatctaccattattacttcatgctgtcttcttaggtttagaccactaccggcctgaagtctttgaacacagcaaaaaactgcttcttcacctcttgattgccctctcttgcaacagcaatttccattccattgcttccgtgctcctgcagacccgagagatgggtgaagctaagactctaaccgtgcagccagcctaccaacctgaatatctctatacaggtggctttgacttcctgagagaggaccagtcatccccggtgcctgactcagggcttagttcaagctccacctcctctagcatcagtctgggaggcagcagtggaaacctcccacagatgacccaggaggtagaagatgtggacacagctgctgaaacagatgagaaggcaaacaagctcattgagtttctcacgaccagggcatttggtccactttggtgccatgaagacatcacacctaaaaatcaaaattcaaagagtgctgaacagctcactaattttctacgtcacgttgtatctgtatttaaagattccaaatcaggcttccatctggagcaccagttgagtgaagttgcattgcagacagccctcgcaagctcttcaaggcactatgctggtcggtccttccagatattccgggccctcaagcaacctctgtcagcacatgccttatctgaccttctctcaagattggtggaggtgataggagaacatggagatgagattcagggttatgtaatggaagcgctcctaaccttggaggcggctgtggataacttgtctgactgcttgaagaacagtgacctcctaactgtattgtcccgctcttcctcaccagatttaagctccagcagtaaactaacagcaagcagaaagagcacaggacaactaaacatgaacccgggaaccaccagcggcaacaccgcaactgccgaacggagccggcatcaacgaagcttctctgtgcccaagaagtttggtgtcatcgaccgatcctctgacccacctcgaagtgccacactggacagaattcaggcttgtacccaacaaggcctctcctcaaaaaccagaagctcatcctccttgaaggacagtctcacggacccatcccacataaaccatcccaccaacctgctggccaccatattctgggtcacagtggccttgatggagtctgattttgagtttgaatacttaatggccttaaggctgttgagcagactactggcacatatgccactcgataaggctgagaaccgagaaaagcttgagaaactccaggcacagctgaagtgggccgacttctccgggctgcagcagctgctgctgaaaggattcacatccctcaccaccacagacctgaccctgcagctcttcagtctgctgacaccagtgtccaaaatatccatggtggatgcatcccacgctattgggtttccactgaatgtcttgtgtctcctgcctcagctgattcagcattttgaaaatcccaatcagttctgtaaggatatagccgaaaggattgctcaggtttgtttagaagagaagaaccccaaactttcaaatcttgcacatgtcatgactctttataaaacgcacagctacacgagggactgtgccacgtgggtcaatgtggtctgtcgataccttcatgaagcatatgctgacattaccttgaatatggttacctacctggcagagctgctggagaagggcctccctagtgtgcagcagcccctgctccaggtgatctacagtcttctcagctacatggacctttctgtcgttcctgtcaaacagttcaatgtggaagttctgaagacaattgaaaaatatgtgcaaagtgttcactggagagaagctctgaatatcttgaagctggtagtttctcggtcagccagccttgttttaccttcataccagcacagtgacctctcaaaaatagaaatacatcgagtgtggactagtgcttccaaggaattacctgggaaaaccctggacttccacttcgatatttcggagactccaatcatcgggaggcggtatgatgagctgcagaattcttctgggcgtgatgggaagcccagggccatggccgtcacccggagcacatcttccacttcctcaggctccaactccaacgtccttgttccagtgagctggaaaaggccccagtattctcagaagagaacaaaagagaagttggtacatgtcctttctctgtgtggccaagaagtaggattgagcaaaaatccatcagtgattttttcatcgtgtggggatctggatctgcttgagcaccagacaagcttggtatcttctgaggacggtgcccgagagcaggagaacatggatgacacaaacagcgagcagcagtttagagtcttcagagacttcgacttcctagatgtggagctggaggatggagagggtgagagtatggacaatttcaactggggagtgcgcagacgttctctggacagcctggataagtgtgatatgcagattctggaggagcgccaactgtcaggaagcactcctagcctgaataaaatgcaccatgaggactccgatgaatcatccgaggaggaggacctcacagccagccagatcctggagcactcagacctaatcatgactctctccccctctgaagagacgaatcccatggagctgctcaccacagcctgtgactcgacccctgcagaacctcattcctttaacaccagaatgtccagctttgatgcttccttgcctgatatgaataatctgcagatttctgagggttcaaaggctgaagctgttcgtgaggaggaggacaccaccgtgcatgaggatgatctttctagttccatcaatgaactcccagcagcttttgaatgcagcgacagctttagcctggacatgactgagggggaagaaaaaggcaatcgggcactggaccagtttaccctggcgagctttggagaaggtgacaggggagtctctccccctccctcgcccttcttctcagccatccttgccgcctttcagcccgcagcctgtgacgatgccgaggaggcctggcgcagccacatcaaccagcttatgtgtgactcagatggctcctgtgctgtgtatacatttcatgtgttctcctccttgtttaagaatattcagaaaaggttctgcttcctaacctgtgatgcagccagttaccttggagataacctccggggaatcggatccaaatttgtcagctcttcccagatgctcacctcctgctctgaatgtcctacactttttgtggatgccgagactctcctttcatgtggacttctggacaagctcaagttcagtgtgttagaactgcaagaatatttggatacctacaacaacaggaaagaggccacactctcttggcttgcaaattgtaaggcaacatttgcagggggatcaagagatggagtaattacctgtcaaccaggggactccgaagaaaagcaattggaactgtgtcagagattatataagctacacttccagctgctattgctttttcagtcctactgtaagctcatcggccaggtgcacgaagttagctccatgccagagctgctgaatatgtccagggaactgagtgacctaaagaaacacctgaaggaagccagtgcagtcattgcagctgaccctctctattcagacggcgcgtggtccgagcccaccttcacgtccactgaagcagccatccagtccatgctggagtgcctgaagaacaacgaactcggcaaagctttgcggcagatcagggagtgcagaagtctgtggcccaatgacatctttggaagcagttctgatgatgaggtccagacactactgaatatttatttccgtcaccaaactctgggacagacgggtacttatgccctggtggggtctaaccagagcctgaccgagatctgcaccaagctgatggagctgaacatggagatccgggacatgatccgcagggcccagagttaccgagtcctcactacttttcttccagactccagtgtttctggcactagtctctgacaggagcctcctgtccccactgggttccaaactgcagtgctgccatgctggggcaacgtcattcagtgtcttctcggccttcaaaaggcttggacagactgttctccctcttgttacctgtagggctttttctaaagaggatggcagaacttccaacgtgtagcaatactataagaaccaaggtagcttagaacgtcctggacagactccactcatcatgctgtgtggcacaaatgtgttacatttgaccgagcatatgcaactcgctactgaagaagtgacttccgttgcataccaaagccgactacactgaacagtaccttcctttctagaaacaattttagattggcaaaagtgcaatgttttcttcactcaaaaaattttatattctcaaacatgtatattctttccctgtcttgttccattttcttttcttttttcttttttctttttcctttctttcgtgggctgagaaaggggcaggcaaaatgaagctggccactgaaaactgtaagatggtcaaaagctgacagcctgtgtatgtgaaaagggaattgtaaatggactgcaatgtaatgtacactgtaatttgaatacaattactgtatctaaaaggagctgctatgaagtacctttcttatgttgctaggctactgtttctgaaagccctggatctctttgcaccaaaaatggtccagatagactctttttaaggatcttggctgctttttactagaaggttgcttttatgagcatatttatactgctgaaggatgagtgttaattttaattaactttgccgttttgtagagaaaactattcacaagataaattccaagtcttttcacctgtcaggcatgcatattttaatatctgtttggatagtcagaagtagaatcataaaggtaaaatatgagttgttactttgtttcttcgatgtcatattttatgtgtaatatatatgtaaagggccattcttaagttctctccttaaacttaatgctgtcaagtgttagatgtgtgcatgtgaacttgttgcactgcagaaacatattcagagtttatctatgtaacttattcactctgtaaatacatttaaagtttttgtgatgtaagcttaattgatattctgttcagaactttctttagactaaaaaaaaaaaaaaaagacaaa

SEQ ID NO: 30644 - DNA, 3890 bp, Homo Sapiens
ctttggtttgcggagcggtcgggtgtattctccgccgcccccacgccctcgaggtccccgccaccgaaccagcggcggagcccgcccgcgcctcccgcggcattcccgcaccggatcgctcctcgctggggcgggacctggcctggcggctctggtcactatgagtgaaacatctttcaacctaatatcagaaaaatgtgacattctatccattcttcgggaccatcctgaaaacaggatttaccggaggaaaatcgaggaactcagcaaaaggttcaccgccatccgcaagaccaaaggggatgggaactgcttctacagggccttgggctattcctacctggagtccctgctggggaagagcagggagatcttcaagttcaaagaacgcgtactgcagaccccaaatgaccttctggctgctggctttgaggagcacaagttcagaaacttcttcaatgctttttacagtgtggtggaactggtagagaaggatggctcagtgtccagcctgctgaaggtgttcaacgaccagagtgcctcggaccacatcgtgcagttcctgcgcctgctcacgtcggccttcatcaggaaccgagcagacttcttccggcacttcattgatgaggagatggacatcaaagacttctgcactcacgaagtagagcccatggccacggagtgtgaccacatccagatcacggcgttgtcgcaggccctgagcattgccctgcaagtggagtacgtggacgagatggataccgccctgaaccaccacgtgttccctgaggccgccaccccttccgtttacctgctctataaaacatcccactacaacatcctttatgcagccgataaacattgattaattttaggccatgcagtggaacctgtcacctaatgggactgcattctgaatggaacattccggctcttcaattttttaagcaatttagactgtagcaagaaaatgtgcagccttttgggcaaagcccctgggaacgaggcctatccactatggactatggtaacttggtaggatttttagtatttattttaatggagggacaaatgctttctaactgggcccccgactccgcaccccagttcgcagtgaggccctgggtgggtcacctgccctctctggacttgtttcttcaactggaggaggtccctgcctatgctgacattccattgtagaaaaatggggcctctggtgtctctttaccaggggcagtgcctctctgcgggggaggaaaagctcaaggttagctgtcttaacccaagtgacttaccaggcctacaaaagagtccagtccagtcacttgttggactgggctctgacagatggcctattgaggtcaacttgaatgtgagggctacggtgtggtttcaaacattcatgatggatgtattttcctacccctaacttaaggagaaaaaaaaaaagacttcctttttttgccaaagtccagaaaggggcctttagcctttagtaggagctcaaattgttggggcccctctacctctctcagggctagaactgcctgactcttggtggacgagcccttcagggttctgctttcagccccacctggacagaggcttacaagactagggtctggaccagaatctgtgtatttctgtctgggaccaggaagccgcagctgtcccatcatccccagcaaatcctagaagtggagtctggatacttcaaggatagaagtgttggcacgcacagccatggacccagctgagcagagcagacgctttgcaggctgcccctggcttcttcctccctttcccgcttctgctctctttatggactggtcagagggtaggtgggaaagaacagacaagccatgggaagttggcagtggggagatttccactgtggaaaccgcctgggaattccggccagcagcttcctccttcagccacctggccataccccttaaataagcccctcaccttgctgcctcaggaccttcaagattccatctgtgggctggccggcaagatggcaccagtggggacccacaccctggctgggcagaggtgctgctagcaacctctcttcctctataagaggaaatggaaaatgcagggtgtggaattgccctttggggtccttccttaattgaaggccaccttctcacaggtttcattctgcagggatttactggaatctattggtgctgctgcatgagtctgctgacaacctgactgcacaaggactgggtagcagactcctcagagtcctcttgacacaaatgtcagatttgtgtcactcttctgccttcgtgaaaagccaatagcactctcagatatcaggggattttagttccaagcagggaccctggtttccatactgccctcagctggagtttggatccaaaggctctggctaagtcattatgtcactttttcacaggaatgtaaatttgactgtcacctctgaatttgttcagtgtcccaccatggtctatgagaagtacactggaagcgtggggggaacacatgacatgatttgtgaatatcatcatctttgccagacaagtctccaggggatccctgtttcccaactgaaaggtgtgaacggacacacacacagcctggatgacgccttggctgttctaaggggctgtaaggtgggctctgggccttccagctaggctctcaagcacagcagaagcctcactgggctgctatgtctctgtatttgtggcttgtgtggtagcctcagaagcagagctgtttggcagactggctggagaaattccctctaggagacttgcctgtgctgtgcttccaggtcacagagccccccggaaactcacaggggccctcttcccagaaaagaatctattctatcacttcagaatcaggacactcaagctctggcagaggaaggccaagttactttcatggtcttaccctctgcttttcccctttttgcaaaaaaccactggccaaatccgaaccattgcccttgtttcccccacgttctctctcagatctttgtctcgaagggaaaacatagtggatgaaaaggtgtggcaggctttggcaccttgttaaaatttctagtcatctgtggatgttaccttgcttgtccacagcagccagtcaccctggccagtcccacttcctggataattctctaccctcaccccacagagccatctctctccagaccaaaagctggaaggagagttgctttgagagcttgtttttacaactgcatgtttattatgatactttctctccaaaggaaacttttaaatcaatgggaacaattagcaacagaaagagcacagtccctgcttttgactgggttcctattttaagcacaaatgagagctctggagccagaatgccagggttctaacttcagcattcacttactagctgtatgatcttggccaagtcacttcacctccctgagccccaattcccaagtttgtgaaatggcaacaatacctatgtgtcactggattattggttaaaacagaatgagattccttgtgtgaaaatagctattatacctgacacactcatcgtatgggctctgcaaagggatattccccaacctgtccttcctgacaggaagcatagggcactgcagatggggaagcatgtcaccttggcagtgactcggtggcttcccaagcaggagtgtcaggggaaccatgagagagagtctaggagcaaacacatcaccaccctgagcagatacaggagtggggagggggctgtaactcagtgagtggcttccaggggccccaggccctgctggatgtgggccaagccctacagcttccctaggcagtaagtaaaaacattctcctagcattaaaatggtttccataaaaaaaaaaaaaaaaaaa

SEQ ID NO: 30645 - DNA, 4045 bp, Homo Sapiens
gtgtgaagacagttttgtaagaactgcaagtgctcaggctgtatgggaaacagaaacttcagcagatgaactgaccttatgccatttcctgatgtttggcagtgacactgaaagaggaccgcatgtcccctctttatgtggatttatcttttatgaaaagtttgcttttgtccgggacagtttgttgtcgtgagatacatcagacaatataatcatgggacaagctgatgtctccagaccggtaaatccagatgcagttgaggaagcagaccagcccactacagagccaggcatggtcctggacagtgtggaagcaggagacacaacacctcctaccaaaaggaagagcaagttctcaggctttggcaagatcttcaagccctggaaatggaggaaaaaaaaaagtagtgataaatttaaagagacttcagaagttttagaacggaaaatatctatgcgaaagccaagagaagagctggttaaaagaggggttctgttggaagaccctgagcaaggtggtgaggatccaggaaagccaagcgatgccatgttaaagaatggccataccacccccatagggaatgccagatcatctagtccagtccaagtagaggaagagccagtaagattagcaagtcttaggaaagctattccagaagaggacctaaagaaacgactaggctcaactggaagccagcctaattctgaagcagagtctgttcctgagaatgtacccaaaccacctttacttcctcccaaaagacccttgtcctcttctcatgaagcaagtgaagggcaagcaaaggatgccacttcctctggcggcacggcaaggttcatcatctccacctccatcaccacagcacccgctgccaccactgctgccacaagccttgcaaagactgttaatctctctgtcaccccttccccagcacccaggactctgcctgctgctcctgccagcactaacactactgctaccccaagcctcactcatatggtccctgccaagcagccccctatccctccccctaaaccagctcacagaaatagcaaccctgtcattgctgaactgtcccaagcaataaacagtggtacattgttatcaaaaccgtccccacccttaccacctaagagaggcattccatcaacctcagtacccaccttggagtctgctgctgccatcaccacaaaaacaccaagtgatgaaagagagaagagcacgtgttctatgggctcggaactactaccaatgatctcacctcgctctccgtcccccccactgcctactcatatacctccagagcctccacgcacccctccattccctgctaagacttttcaagttgtgccagaaattgagtttccaccatccttagatctacaccaggagattccccagcaggaagatcagaaaaaggaagtccccaagaggatactggaccagaactttggggagccccatataccctctaggctgcctccactcccactgcatattcgaatccagcaggccctcaccagcccacttcccatgactcctattctggagggttctcacagagctcattcgttgctttttgaaaacagtgacagcttttctgaggacagcagtacgctgggtcggaccaggtctcttcccatcactattgaaatgctaaaagttccagacgatgaagaagaagaggagcaaacctgtccatccacattcagtgaagaaatgacacctacctcagtcattcctaaattaccacagtgtctacgggaggaagaagagaaggagagcgactctgattcagaaggtcccattcagtaccgagatgaagaagatgaagatgaaagctatcagagtgctctcgccaacaaagtgaagaggaaagacacactggcaatgaagttgaaccacagacccagtgaaccagagttgaacctgaattcttggccttgtaaaagcaaggaggagtggaatgaaatacggcaccagattggaaacacactgatccggcgactgagtcaaagaccaacaccagaagaactagaacaacgcaatatattgcaacctaaaaatgaagctgatcgtcaggcagaaaaacgagaaattaaacgtcggctcactagaaagctcagtcaaaggccaactgtcgctgaactccttgccaggaagattctgaggtttaatgaatatgtagaggtaacagatgctcaagattatgaccggcgagccgacaaaccttggaccaaactgacccctgctgacaaggctgccataagaaaagaattaaatgaatttaaaagctccgagatggaggttcatgaagagagcaaacattttacacgctaccatcgtccatgatgccaaaggttgagagaggaatcaacatggctgctttgctgcttccttctccaaagtgacatatggagggaactttagcacttcccagcacagccagaattgcatcctctgggatcttctgaggtggacagcactttgaatgtagcatttcactggaacagagtcttatgtgctgcaccgggggcaaaacaacactttgtcagtgcttttgaacctttcaatattgtagcatgcttgaggagtttttcccttactggccaccaaagttctgaaccacttgcaggttccaggttttactggctgcaccacaccccttcccctagatgactgcctgtgcagagacacagtttgcaccattagccttacctgccctgccctgattgtgagacccaaatgtgtaggctctaaattccagccatcaaatccaattcctggtggggaaaaccttctggagacccccaaccttctgataaaagagtctctacctccagggaaagccttcttaccacactggcatatcagatgaaagcattgcactgtacctctcgtaacacagcaatacagtcctcttgaggcactcaagcctgagaggaagctcaggatctgacatgttcttccttttcctcacaagtcatcatgattttttattttaaaataatctggaagtaatgggaacttagtttttcctgaactccaaccagaatccaaattggttagatgaggccaggcgcggtggctcacgcctgtaatcccaaagtggtgggattacaggcatgagccaccgtgcgagccttccttgaagttttttgtttggttttgatttgttttgttttgttttgttttgttttgtttttggagatagggtctcgctctgttacccatgctggagtgcagtggcacaatcttggctcagagcaacctctgcctcccaggctcaagcaatcctcccacttcagtctaagtagctgggactacaggcacgtgccaccaggcccagctaatttttgtgttttgttagagatgaggttttgccatgttgcccaggctcgtcttgaacaccggggctcaaggaatctgcccatcttcgcctcccaaagttctgagatagcaggtgtgagtcatcatgcccagcctccttgaagtttactaacaattgggataactgagggaagagaagtgacaattccactcagtctattagaggtctggatataaggtagccacacaataactctaacttgacttctaaccattctatcttattgatttggaggctgtcttctgccagattttttgtggcttgagatgatattttcgaacccttctttcactacctttcttacccttaatgtgccaagcttgaaacaggatttgatttcctgagctacttgttcgccttctgtgcgtcaccaagtaatctggttcatctttcgtctcattcatgttattttcaagtgaaacaagacattttgggggtcaagtctctttgggtgttttgtttttatgtatataaaaatggattttgtgttccctttccatgtaagtaccaacttatatggaaactcacaatcataatgtaaagaagaaatgaaagcctggtgtattgtacttcaagatgcctccctgatgtatagaatctccttgtaaaataaataattgcattgtaaaaaaaaaaaaaaaaaaaaaaaaaaa

SEQ ID NO: 30646 - DNA, 4889 bp, Homo Sapiens
aggtatttactttttgttgaattttaagggacctcaagtgaaataataatcggtgaattcaggatcaacctttatgtccagagcgtttgttccgtcgtccatttcttgtctagagtagtggtatgagctgaaaacattgctaagtgatcaccacatattgttgatgtaagggctactggttattacaagagatttttatgactcctgctgtgggggtgccctttctacccggctgagcttggtgggagccaaggctgagtcggatgtatctttatattcccagttctcggtggaacttaaaatgctgtgagacaccagacagacagatactgtgaacttggagctctctaatgaagggataccaaagtcttgtattcaatttttttttccttaaattgtcagccgaaaatgagagcacacctattcagcaactcctggatcacttcctccgccagcttcagagaaaagatccccatggattttttgcttttcctgtcacggatgcaattgctcctggatattcaatgataataaaacatcccatggattttggcaccatgaaagacaaaattgtagctaatgaatacaagtcagttacggaatttaaggcagatttcaagctgatgtgtgataatgcaatgacatacaataggccagataccgtgtactacaagttggcgaagaagatccttcacgcaggctttaagatgatgagcaaacaggcagctcttttgggcaatgaagatacagctgttgaggaacctgtccctgaagttgtaccagtacaagtagaaactgccaagaaatccaaaaagccgagtagagaagttatcagctgcatgtttgagcctgaagggaatgcctgcagcttgacggacagtaccgcagaggagcacgtgctggcgctggtggagcacgcagctgacgaagctcgggacaggatcaaccggttcctcccaggcggcaaggtagtgctctgtggccaccgagagagggtgccacgtggccccagactctctgtgtgcctctccttctgggttggtgctgtgtgatctagcacagccaccgggatccagaggtcagcgtggggccctgacgggaggtccggatcagacacacataaggctggtctcttcagtcggggtccaggtgcctctggcagggctgccgctggtgtttcatgcatcgtggaggccacgtggtcactgacctcatttccttgatggaggccctgctgcaggctaatcctttctcttggagtgaatgctgacttctgtgtctctgtcactgggtgttgacgtgaggcaccgcccttgttattccagtgggggtgctggtgttggatccgacagatggtccataataggccaccgactgtgttcacgtggctcctgccacagatggtctttgtggtggtggggcccactcagctgaccacgctctcctttctggcaggagacgttctagacccagtgtcttcagtggaaacagagcacaggctgtctgcagtctcaggcttcctagcagccctgataagagaagtagagcaatgcaggtgacattaatccttgcaggtttcatttcacctctatatccaacattttatctcaacatgtagtctgtagaaaacgttaatttgagctttatgggtttttttcatattaagtcttcaaaatgcacatgggatgggatgtaaagaacgctgaagtgggggcatttcagaggtgtctgctgctttttgcctgtgcctgctgggaagttgcagtgctctgtgtggcttgcgtgttgcgaggttgcggtctgcgtggctcacgtgttgggaggtcgtggtctgcgtggctcacgtgttgggaagttgcagtggtctgtatggcttgcgtgttgggaggttgcagtctgtgtggcccgtgtgttgggaggttgtggtctgcgtggcttgtgtgttgggaggttgtggtttttgtggcttgcgtgttggggggttgtggtctgtgtggctcacgtgttgggaggttgtggtctgcgtggctcacgtgttgggcagttgtctgcttggctcacgtgttgggaagttgtggtctgcgtggctcatgtgttgggaagttgtttatgtggcttgtgtgctggaggttgtggcctgcgtggctcacgtgttgggcggttgtctgcttggctcatgtgttgggaagttgtggtctgcgtggcttgtgtgttgggaagttgtttatgtggcttgtgtgctggaggttgtggtctacgtggcttgcactgtagttcttttggacagccttgctctgcagtctgtgtttcagccctggaattgccacattctccaagaagccctggtttcttgactagagagccttgtgtagaagccaggacctgggttctgggtgaagccctctgcagatagagctgggagatgcctgttgtgtgtgtctgcaccacatacatggacactgtgcagagggattctgttggcacctgtgtttacatgggttgaaaactgtttttacacggaaacttccagttccctcgtgccccgtgggttccgcccacttcttccctttcagttttgtatctgcgccgtgaggacttgtctcctaatcttcgtatcaactccgtgtcccattgagctgaccttccgcctctcccccagggccctggccatcctgtgggctctgagactttgcatggatccgcggtggggagctgcccccacacaaacgtccggctcttctcaggccaggtggctgccctgacatggcatgatgtccagcgcatggacgtcacccttgcactggagcccagccaaccgctgcatgacagccctcttcccccttgaaccccaagtctgcacacaccagtgcctcctcttcctggatcctcctgatggcctgtacacagaactggggtgtgggtggtgggtttttaaatgaaaaccagtccacacatgcttgagggctggagccgcctgccgtcagggcagtgccatgctgacctgctgaccgttccattttgtcaaggctcatgagcaattttaaatgtttactcgtgggtgaaggtttttgtttcagctgtaccccctatagcagggccatggggagcctaagaggttctccttggcacctgtgcgcgctctgctgttgccggtgagtctgaaattccagggaatgccgtgaggggccctctggcgtttgttcttggacaaatgtgctttcacccccattaagccctgcttgttggtcttcatttcatttgtgctgcgctgcccctcctgagggacagacgctcaggcagtgcttccttccagatgggctatctgaagaggaacggggacgggagcctgctctacagcgtggtcaacacggccgagccggacgctgatgaggaggagacccacccggtggacttgagctcgctctccagtaagctactcccaggcttcaccacgctgggcttcaaagacgagagaagaaacaaagtcacctttctctccagtgccactactgcgctttcgatgcagaataattcagtatttggcgacttgaagtcggacgagatggagctgctctactcagcctacggagatgagacaggcgtgcagtgtgcgctgagcctgcaggagtttgtgaaggatgctgggagctacagcaagaaagtggtggacgacctcctggaccagatcacaggcggagaccactctaggacgctcttccagctgaagcagagaagaaatgttcccatgaagcctccagatgaagccaaggttggggacaccctaggagacagcagcagctctgttctggagttcatgtcgatgaagtcctatcccgacgtttctgtggatatctccatgctcagctctctggggaaggtgaagaaggagctggaccctgacgacagccatttgaacttggatgagacgacgaagctcctgcaggacctgcacgaagcacaggcggagcgcggcggctctcggccgtcgtccaacctcagctccctgtccaacgcctccgagagggaccagcaccacctgggaagcccttctcgcctgagtgtcggggagcagccagacgtcacccacgacccctatgagtttcttcagtctccagagcctgcggcctctgccaagacctaactctagaccaccttcagctcttttattttatttttttagttttattttgcacgtgtagagtttttgtcatcagacaaggactttgatcctgtcccctttggcatgcgggaagcagccgcggggaggtaatgaattgtctgtggtatcatgtcagcagagtctccaagccccacgaaccctgaggagtggagtcatacgcgaaggccatatggccatcgtgtcagcagagagagtctctgtacacagccccgtgaaccctgaggagtggagtcatacacgaagggcgtgtggccatcgtgtcagcagagagagtctctgtacacagccccgtgaaccctgaggagtggagtcatacgcgaagggtgtgtggccaggctgcagagctgcgtgccgtttgtgtccgagcatcacgtgtggctccagcccttatttctgccagtgtagacacctctgtctgccccactgtcctggggtcgctcttgggaggcacaggcatgggtgtgtctggcctcattctgtatcagtccagtgtgttcctgtcatagtttgtgtctcccaggcaggccatggtaggggcctcgcaggggccattggggagcacagggccaggctggggtgaggagagctcccctgttttctgtttaattgatgagcctgggaaaggagtgtgttctgcctgcccgttacagtggagcgttccgtgtccataaaacgttttctaactgggaaaaaaaaaaaaaaaaaaaac

SEQ ID NO: 30647 - DNA, 2912 bp, Homo Sapiens
aatcgcgcccgctccgacgtgtccaggtccgcggccccgggagcttggcgcggcccggcctggatgcgctgggcggagggtgcaggggagggcacggcgccgcttgcttggcctgcgcacccggacctagaagccgggacgagccggggcagagccaggcgcgcggaagtctgaaggtgccctccagacacggccccgatgactgaactacagcaagatgtggaagacacaaagcctgcgaaagtgctcgggaagagggagagcaaacttggctcagcccactcagaggctgagaatggtgtggaggagaaaaagaaagcctgcaggtcgccaacagcccaatcccctaccccatctgtggaggcggactccccagaccagaagaaaatcattagcctatggtcaaaatccagttttgatggtgcctctttagcaagtgataagaacgactgtaaaacagaaagcaaaaatgaccctaagactgaaagaaaaaagtcttcatcttccagccagtacaaggccaatatgcactttcacaagttgtttcttagtgtcccaacggaggaaccactgaagcaaagctttacctgtgctctacagaaagaaatactataccaaggaaagctctttgtatcagaaaactggatttgttttcattccaaagtctttggaaaagacacaaagatctctattccagctttctcggtaaccctaataaagaaaaccaaaactgctcttctagtgccaaacgccctgatcatagcaacagtcacagacaggtacatatttgtctccttactctccagagattcaacttacaaactactaaaatctgtgtgtggacacttagaaaatacaagtgttggtaacagtcccaatccatcttctgctgaaaacagtttccgagcagaccgcccttcatctctgcctctggatttcaatgatgaattctcagatctggatggagtggttcaacgaagaaggcaagacatggaaggatatagtagttctggttctcaaactcctgaatctgagaactctcgagatttccatgcgacagaatcccaaacagttctgaatgtctccaagggagaagcaaagccaactcgggcagatgcccatgtgaacagagtacctgaaggaaaagccaagagtctccctgtacagggtctgtcagaaactgttggaatcttacataaagtcaagtctcagaaatgtccgatgcttcaccatattcttatattctatgcaattgttgtctgtgcactaatcatctcgaccttctacatgagatacagaattaatactctggaggagcagctggggttactaacctccattgtggacacccataatactgaacaggcagcaccatctggcctgaggtcacaagtacaattcaatgtggaggttctctgtcaagagcttacagctaacatagtgaaattagaaaagatacaaaataacttacagaagttgcttgagaatggtgactgatcgaccagattgcttgggccatcggaatacctcatgtttccctttgaagaaggtgcttcccgaggcgttttgtttgagtgcaccctgctggtcagaggtgcaagcagatgagaatccagacattgcatgtggaggtctccagctcaggaaagtggggagggaaataattttggttcttgtgcaataaaagttgaccttgactctctgaggaagattttgctgcttttgcctgaagaaaacagacccatctctggaggtctcaggaagggcccagcgaacacactctcttggataattaccacgatggcgtcagcaaacactccaccctgtgcctttttagtccttcccgccctcctgcctctcccttacacccctcttaacgactttcaaactaaaggatacatcatatactgacaaactcaatgtggtcctttcaagaattagccatgagtctcaaaaaggcaataaatggctctaagtggacaggtttgcttcaaacaagtaacatctacattttgtcttttttttttcagttctcctgttatgttctggttgaaatcacctgtgtgtcttaatttctcaattcctttttggcaagaatatcaagcaaggtgaatttaacattatgtttatgttttgttttgttgctgtaactaatagttaattggactgattcttacccagccctggtcaagaatctgtgaggcatgtgactgaagtactaaattaaacttattttgaaaccaaacctaatttttaagccaaaaggtgtaatagtgatttaatacaggatgaaaaacactgaatttttaagactgtaggtggactatgttagtagttttcaagcaggatgtctgtattcagcattcaataatgctaaaatccctttcagcatgaaatttgtatgtttttatcctttgctgactaaaataaaataactggtggtttgctaactatttaccatatgggttggctggtttttattaataattgtttagggtatcataagatctgtaagtacaaaggatattctgtttctatctgcaatgcatttgataatcatttctatgaaatgtattttatttaatcagataagctaataagcgaattggttacatcgtttgtatctgttggcctagtggacagctgtgcctggtgcacctctggcttttaataaatactcattggttgaaacaccctgctaacactgtgttttgtcagttcgtaaattcctttaaccaagacttaactatgctttttaactctttttccacctgccatctactactaccaactcacttatacttccttcctcccaagtaatcatttcaaaactaaaaaaggatttaagttcttgggttacaacggtttaaaggaaagaaaatgaactttgaagtcaaaaaaaaaaaaaaaaa

SEQ ID NO: 30648 - DNA, 1654 bp, Homo Sapiens
ggctgcgcagtggagcggccagtgggcaggatgacgagccagacccctctgccccagtccccccggcccaggcggccgacgatgtctactgttgtggagctgaacgtcgggggtgagttccacaccaccaccctgggtaccctgaggaagtttccgggctcaaagctggcagagatgttctctagcttagccaaggcctccacggacgcggagggccgcttcttcatcgaccgccccagcacctatttcagacccatcctggactacctgcgcactgggcaagtgcccacacagcacatccctgaagtgtaccgtgaggctcagttctacgaaatcaagcctttggtcaagctgctggaggacatgccacagatctttggtgagcaggtgtctcggaagcagtttttgctgcaagtgccgggctacagcgagaacctggagctcatggtgcgcctggcacgtgcagaagccataacagcacggaagtccagcgtgcttgtgtgcctggtggaaactgaggagcaggatgcatattattcagaggtcctgtgttttctgcaggataagaagatgttcaagtctgttgtcaagtttgggccctggaaggcggtcctagacaacagcgacctcatgcactgcctggagatggacattaaggcccaggggtacaaggtattctccaagttctacctgacgtaccccaccaaaagaaacgaattccattttaacatttattcattcaccttcacctggtggtgatcctcaggagcagagactgttatgaattctggcgtggcttatgaaattaaaagttgccatcaaagccattttcttttaatttcacaaacatcaggcaatttccagggttggtctagagtcttgccactaaatattgatcactcgtttaaggactttccactccattgcaactgatgccactatatttgcctagcaacttgcagctacttccttttcaaagcctcatgtatctcccagacccttctcttgaagtccaataacaagaccaagtaagaatgtttcaacaatgcgttggcaagagatgtgagatgacaacaggaacatacaagatactgtgaatctagatgttctgacccaaagatgtagtctacatagccccagcttggggtccaatccatctgtccctggcatgtgccttcatgtagtaggtgctttcctgatcccctttgcgagatgctgtgggtgctaacacctcagagctgtcctcttctctagagtgaaggttttcagagtgcatcatcagcattacctgtgaacttgctggaaatacaaatcctcaggccccacctcagacctactgaatcagaatctctgggggttggcacagcattctgatttaccaaaccctccaagtgattttgatgtattctaattttgagaccatctctagaaaagaattgctacctcttgtatggaggtacaaaagactgacctcttacatcaaggaacttcctttcccagagctcctcatggaatcaagctgaagtcagtcttcttctgagagcacattcttactcagtttttttcctctgtcctacgctgcttccctcactccccttctcctaagagcactccatcaataaaccacttgcacgagaaaaaaaaaaaaaaaaaa

SEQ ID NO: 30649 - DNA, 1979 bp, Homo Sapiens; identical to SEQ ID NO: 25222

SEQ ID NO: 30650 - DNA, 2736 bp, Homo Sapiens
gcgttttccggccgtgcgtttgtggccgtccggcctccctgacatgcagccctctggaccccgaggttggaccctactgtgacacacctaccatgcggacactcttcaacctcctctggcttgccctggcctgcagccctgttcacactaccctgtcaaagtcagatgccaaaaaagccgcctcaaagacgctgctggagaagagtcagttttcagataagccggtgcaagaccggggtttggtggtgacggacctcaaagctgagagtgtggttcttgagcatcgcagctactgctcggcaaaggcccgggacagacactttgctggggatgtactgggctatgtcactccatggaacagccatggctacgatgtcaccaaggtctttgggagcaagttcacacagatctcacccgtctggctgcagctgaagagacgtggccgtgagatgtttgaggtcacgggcctccacgacgtggaccaagggtggatgcgagctgtcaggaagcatgccaagggcctgcacatagtgcctcggctcctgtttgaggactggacttacgatgatttccggaacgtcttagacagtgaggatgagatagaggagctgagcaagaccgtggtccaggtggcaaagaaccagcatttcgatggcttcgtggtggaggtctggaaccagctgctaagccagaagcgcgtgggcctcatccacatgctcacccacttggccgaggctctgcaccaggcccggctgctggccctcctggtcatcccgcctgccatcacccccgggaccgaccagctgggcatgttcacgcacaaggagtttgagcagctggcccccgtgctggatggtttcagcctcatgacctacgactactctacagcgcatcagcctggccctaatgcacccctgtcctgggttcgagcctgcgtccaggtcctggacccgaagtccaagtggcgaagcaaaatcctcctggggctcaacttctatggtatggactacgcgacctccaaggatgcccgtgagcctgttgtcggggccaggtacatccagacactgaaggaccacaggccccggatggtgtggggcagccaggcctcagagcacttcttcgagtacaagaagagccgcagtgggaggcacgtcgtcttctacccaaccctgaagtccctgcaggtgcggctggagctggcccgggagctgggcgttggggtctctatctgggagctgggccagggcctggactacttctacgacctgctctaggtgggcattgcggcctccgcggtggacgtgttcttttctaagccatggagtgagtgagcaggtgtgaaatacaggcctccactccgtttgctgtgacgggtctgctgcagtcctcagtcgggggtcctgggcaccatgtgactccccatcctcccatgaggggtccctgccctggatgagtcctagctgggggacaccctgagagctcgagcccctcccacccgggcatccgctggctgcctcctgtcagctgggcaggcggggcccacagtacctgccccaccaggacagcctggctcaggcctttctgggctgcttctcacatcctgggctggatgtgggtttggaagctctggaaccatcccggactcgcccactcctggattcgagggccctcgcagggacagctctgcccagcatcaccccagggcctggcagtgatagagctgagagctccacccccacatacctgccacccacctggccagccacagcacgtgtgtcacctgcagagagccacccagacgtccccaccgagcccagcacggcaagggtgcaggggctgccctagaaatggactcagaggagcctggcccaccctcttgaaactggtcctggaccttggctcagctctgccgcctcaggtagcacgacccccaggccagcctggacacatcagggagcatggtgaggggcaacggcaggacccgtgggccatatcgggacaggcatttccagcgaggggtggggcagaggacatgtggctggcaggctacacccaccctgccatgcagcggtgtccaggctctggggaggccctggggaatttggaggcatcatgagccaaggcctggtggccctcgttcccctgcccctcgtcaccatcctgtccttggctggccgtgaggactcccctcctcaccactgggtcccacagggctgaggtgggcagtagagggcataggtgggtacatgtcccgggcaaggtctctcggggggacagaagtgagtccagggagtgggtgggcctgggcgtccctcactcagaatgccgtggggtgaggacggtgaggacagggtgggcactgggttctggtttagagtcagtaatgttagggcgcagtgggcagggggtcaggacatctccagccggtggtgaggaagcatggtggggtctcctccacaggacgggagctggggagggggtcctgggtcggacccaaggcacccacacttgagaaagcctccgcctggacgtcagggaggcctgcgagctgccacagtgcaggtgcagccgttcccaccgccctgctgctgcttgacacgggcataggagatacaagtggtgtgtgcggcggttcatgcctgtaatcccagtactttggaaagccgtggcgggaggaacgctgggcaacatggtgaaaccccgtctctaccccctaaaaatagaaagattagcaag

SEQ ID NO: 30651 - DNA, 2762 bp, Homo Sapiens
gccaagcatacatctctaattttattattttggtcttttcgttggattttccctttcttctttttttcgggttatcgctcagttttgagcagaggtttacattttttaaaaatttgctttccagcccgccttgatcttctaagtgcgagttcatcgtctgagaaaaaaaaaaatctctggttggcgtttttgtttcttttcttttctttcttttctttcctttttttttttttttaatttttttcaagggggaggagattttccacaagaaaaggttgttttcatgtttgggattcaggaaagcatccaacggagtggaagcagcatgaaggaagagccgctgggcagcggcatgaacgcggtgcggacgtggatgcagggcgccggggtgctggacgccaacacggcggcgcagagcggggtgggtctggcccgggctcactttgagaagcagccgccttccaatctgcggaaatccaacttcttccacttcgtcctggccctctacgacagacagggccagcccgtggagatcgagaggacagcgtttgtggggttcgtggagaaggaaaaagaagccaacagcgaaaagaccaataacggaattcactaccggcttcagcttctctacagcaatgggataaggacggagcaggatttctacgtgcgcctcattgactccatgacaaaacaagccatagtgtatgaaggccaagacaagaacccagaaatgtgccgagtcttgctcacacatgagatcatgtgcagccgctgttgtgacaagaaaagctgtggcaaccgaaatgagactccctcagatccagtgataattgacaggttcttcttgaaatttttcctcaaatgtaaccaaaattgcctaaagaatgcgggaaacccacgtgacatgcggagattccaggtcgtggtgtctacgacagtcaatgtggatggccatgtcctggcagtctctgataacatgtttgtccataataattccaagcatgggcggagggctcggaggcttgacccctcggaaggtacgccctcttatctggaacatgctactccctgtatcaaagccatcagcccgagtgaaggatggacgacgggaggtgcgactgtgatcatcataggggacaatttctttgatgggttacaggtcatattcggtaccatgctggtctggagtgagttgatcactcctcatgccatccgtgtgcagacccctcctcggcacatccctggtgttgtggaagtcacactgtcctacaaatctaagcagttctgcaaaggaacaccaggcagattcatttatacagcgctcaacgaacccaccatcgattatggtttccagaggttacagaaggtcattcctcggcaccctggtgaccctgagcgtttgccaaaggaagtaatactcaaaagggctgcggatctggtagaagcactgtatgggatgccacacaacaaccaggaaatcattctgaagagagcggccgacattgccgaggccctgtacagtgttccccgcaaccacaaccaactcccggcccttgctaacacctcggtccacgcagggatgatgggcgtgaattcgttcagtggacaactggccgtgaatgtctccgaggcatcacaagccaccaatcagggtttcacccgcaactcaagcagcgtatcaccacacgggtacgtgccgagcaccactccccagcagaccaactataactccgtcaccacgagcatgaacggatacggctctgccgcaatgtccaatttgggcggctcccccaccttcctcaacggctcagctgccaactccccctatgccatagtgccatccagccccaccatggcctcctccacaagcctcccctccaactgcagcagctcctcgggcatcttctccttctcaccagccaacatggtctcagccgtgaaacagaagagtgctttcgcaccagtcgtcagaccccagacctccccacctcccacctgcaccagcaccaacgggaacagcctgcaagcgatatctggcatgattgttcctcctatgtgaaagaattgccttgaagaattgtattaatgaagaggttggattctgctacagagagtaatctgatacaagtcccagagtggaacttttaactcaggcctttttaagaggaatcacaataactgcagatttttaaacaaacaaaatcaccgaccttgcaaatactgaaattggaagagggatctgcaagtgcagggtgttggttaaagttgtacctcccaagtatttgggggatatatttattctgtattgacaaaagcaaatccactttttctttttcttttttttttttaagcttaattctgcaatcatttgtcttttataaaccgtaaagctctatacaagggacactataaataagactccatgttttaatttatgatgtttttaaagctgtgtaaaggaagaatgaagtggtgatatttacaaaaaagtaaaaaaaaaaaaaaagaaaaaaaggaaaaaaaaaaaaaaaaaaaaaaaaaaataggaatgccagttagattttttagaaaaactaagggtcggcttttgcgccttaaagcatatcaaatggtagttagctcagacagtgcattttcaatatctaacttaacatgccaccccttagcagtgcaagcttatttatctcttttgtattgttgtcttaagcaactgtgtaaataaatgcagcctggaaagttaaaacgcgaaaaaaaaaaaaaaa

SEQ ID NO: 30652 - DNA, 2583 bp, Homo Sapiens
ccggtccgggtgccacctctccctgcttgggcgccgccgcgcgagcgcttcccttccccctgcaagcgcccggataatgtctgagaatgtccatttctgggacgcttagcagctattatgtcgactcgatcataagtcacgagagtgaggacgcgcctccagccaagtttccttctggccagtacgcgagctcgcggcagccgggccacgcggagcacctggagttcccctcgtgcagcttccagcccaaagcgccggtgttcggcgcctcctgggcgccgctgagcccgcacgcgtccgggagcctgccgtccgtctaccacccttacatccagccccagggcgtcccgccggccgagagcaggtacctccgcacctggctggagccggcgccgcgcggcgaagcggccccggggcagggccaggcggcggtgaaggcggagccgctgctgggcgcgcctggggagctgctcaaacagggcacgcccgagtacagtttggaaacttcggcgggcagggaggccgtgctgtctaatcaaagacccggctacggggacaataaaatttgcgaaggaagcgaggacaaagagaggccggatcaaaccaacccctccgccaactggctgcacgctcgctcttcccggaaaaagcgctgtccctacaccaaataccagacgctggagctagagaaggagtttctgttcaatatgtacctcaccagggaccgtaggcacgaagtggccagactcctcaatctgagtgagagacaagtcaaaatctggtttcagaaccggcggatgaaaatgaagaaaatgaataaggagcagggcaaagagtaaagattaaagattacccccagtcctccctagctcttccccatctcactcttagttatgtgacgactgcaaagccagtgctgtctgggatgtattcaagtgaatggggaagggagtctctcttccaagtcctttatctgcacctagaacctccctcctttcctttgcccttacctgtctctctcttctctctaggtgtcaggagaaagttttgttgatttagaagatagaaatagttggttcctaagaatgtgatgggccacaaggaaagagagaccccagtcaagctcctagtatgccctgtaatttttctgggaagtcctagcccctcacttccagcttgcctgtttcttctctacacccacccaaaagtcacccagggacactccaactctacacagctcagcagacatccacacacagtaatggggtgagctcacaaccaccattcagtcaagtgaggtgacactccagttgcagaccatcgcacaccaaatttggcaaaacagccctcagactgtcaggcaagcccgggttctacccctaatgcaaatacccaccagggagatgtctagaggcagactcctgagtgaggagttgcagcccaaaggctgcagcattgccataccattcccatggagttgccaactattctcaggccaagggccatggggaagatggagcaaacctagcccccaagccggtgggctagaaagtacaagaaaaggcagcacgtggttttatgaaggtatcttaggtggagctactccccacctcccaccaacatatacattttgttgcaggaaatgtttaattccgcatgatgtttccctctccttccaacaaaagaaggtcaaactgtgggtcgtagagccttgacaatgttgtcctcctgttcatctgtgcaccacttgacagactgtagcttctcttgctctcgaccggccctgcattcttccgcaccctccctagctctgaaatcaactctcttcggtcgtatccaccttgcacccgcaagtcaagccgccccttgtagaaaaatccctccaccttccgttccccgctaggtcaaccccactgtagacaggaaagccaggccaggagagtccgaatgagaatttattgtgaatcgattcccaagctcccttccgggacaagtggtctgggacagggaggagcaacggccccagcgcgcaacgctctgcgcgttcctccgaatcccgtcggcttctcgacccacgcagagaagccccgggcttggcggctctagccccagcgccaaaggagacccgccccagggccgggcttggcctcctgcttcatgggcctggatgcagatctgcgtggctggtgcgtgcgcgcgcttctgggaaacagtcccgcgtgcaaaggaaaggggcaaaatggcacctaagcatcagatggaagcttactctctgcttccgttcctccccctgctcccctacttctcagtccccttcaatttgtagactcttgctcctgcttctcctgatcctgcaaggggacattccagtagaagttttttgctttgtcggtggctgtcgtgaaattgtgcttgtgtttcgtgatttctttgggggtgattgtctcgcttgttttcagttgtcgattatatgggagggttctgggtgggagtggggagggcgaggggcctagagctctaattgtttgttttggaagaaaaaaagaaaaagaacaaaaaatatatatcactctagaaaataaa

SEQ ID NO: 30653 - DNA, 2727 bp, Homo Sapiens; identical to SEQ ID NO: 24731

SEQ ID NO: 30654 - DNA, 1792 bp, Homo Sapiens; identical to SEQ ID NO: 26361

SEQ ID NO: 30655 - DNA, 4232 bp, Homo Sapiens
gccgctcgcgcaccgcgccacgtgttttctcctcccgccaatgggcggaagcgccgcctgagcctgctcccgccccccaggctcgcctgagccaatcggaaggggcggggtgtgtgtgtgtctgtgtgtgtttgtgtgttgtgtgtctgtgagtgtctgtgtgtgtgtatgtgtgcgcgagggcaagtcgggagggggacccagctcaggactgggaggccctgctcgcaggtccctgggtcccggtggcggccggagcgcttgctccgcaggcagcgggcgggtggtcgcccctcccgcccccaccccgcgcgtgcgcgccccggcctctccctccccgccaccctcctcggctcccgcgcggcggcggcggttcctctcccactccccccagccctggctccgggggaccccgcgatgccggtccgcaccgagtgtcccccgccggccggtgcctccgctgcctccgcggcctcactcatcccgccgccgcccatcaacacccagcagcccggcgtggccaccagcctgctctacagcggctccaagttccgcggccaccagaagagcaaggggaactcgtacgacgtagaggtggtgctgcagcacgtggacacggggaactcttacctttgtgggtacttgaagattaaaggccttactgaggagtatccaacccttacaaccttcttcgaaggagaaataatcagcaaaaaacaccctttcttaactcgcaagtgggatgcagatgaagatgttgatcggaaacactggggcaagtttctggctttttatcagtatgcaaaatcatttaactcagatgactttgattatgaagagctgaagaatggagactacgtcttcatgaggtggaaggaacagtttctggtcccagatcacacgatcaaagacatcagtggtgcttcttttgccgggttctactacatctgctttcagaagtcagcagcctccatagagggctactactaccataggagttcagaatggtatcagtccctcaatctaacccatgttcctgaacacagtgcacccatctatgaattccggtgacaacggttcagaacagcaaccaaataaaactgaacttggcaaaaaagaactttgccgagaaaattgtgtacctgccagaaccaggagaagtgtgttcctgtttcttcacgagcagactcgcatcacaaagcatgaatgttaacccacagaatccaaggagcatggctggcccgtggggcaggtggagggagcagtcttcgttcttcctcccctcagtggcagtttggtcttcacctgtttttaagctaccttaaacgcacttttccttcctgcacagctaacttctacatcactgaaatgcccattccttcctccgtcccacctccagccgaatagaaggtctgctcccggatcaccctcagccttggtgctcagtggtcccgaggccctagacccccaccccccgccagttgctttgtctggtagctcaagagaaggcagagccccagcacctctgtgccccccagagctctgtgcagggagttggccagctgccgcatcatcggccaccaagggcacaagaggcggaggctccagtccctgctgggctgcctcagtcttcagtgctgattgtgtcacgggtcagcgtgcgctgctgagccctgtactgttaacagtgcaaagctagtgagtagctgtcaggttccctgggcctgccatcagggatcactaaatttaaggcttccagatccctggcaggaacagattccagtcctgcttactcagtacatttgctccaaacttttcaacttgagggcaatactaaacttaaaaataagagtttttttattacaaaattatttttatggtccctttaacgaggaccctatggcaaatgcacaattattcagaattacattttatcgttttcacattgaaaacagcaaatgttgacttagtaatttttatatcgatatctatatgtatatgtatatttaatcaaccagcagttttgaaactagtcatcctggtacaaaagttttgcagcattgcctaaattatagtgctcaacacaagaactgtttttggggccagtttagcatttgtgccgcctccttttgctactcaaaacagcaatgcttggcggcagccttccatgaggcagaaggggtcgtcgttctctgaaaacagtgactctgaaatgttgggacaggggaaggggtgggaaacatgaacatgctcaaataactcgaggctcacgtgccaaagtgtgtgtgtgtgtgtgtgtgtgtgtgtgtgtgtatgatgttttgtttttttaaatgttttaaaagcttaataggttggcatcagttgtagcccacaaacatggctagggctttggggatttggcatttttctggtggtttacaagacttactccgaatacaagaggaaaagctttaaaaacaagattgcatcataacccccaggagcaaagcaacctggaggctgcatatccatgggcgggcagcataagagaatgtgaagcccttcagtgagacgagacgagcaatgggaaaccttttctgttcttaagaagtgactttaattttattgacatatgtactgtatgttactgagattgaatgttaggggaagccttaaggtagaggtatttgggaaagtagccagtgggcacttgtgatatctaaaatctgttatcccaggactgtgtacagaggggcaacctacccattcaggaaggtcagggctttggaaccctaaaaagttggcccgatgacttaaagggaaaaataattcattcccagagatgagtcagaacagtctcctcaatcctgaaattcaacaaggcatcagaagggctggctgtggtcaagcccagctgctgtcatgtgaggagatgctcactgtggtcttgttgagctgatggccttggttgagctgatggacaagtgaaggaggccatggggctgtgctgtccttcctgccgtacgtgccattccactctcttcagctctcccctcaacagcatgcgagcccataccttctgcatttttccaggcctgtgagggatataggcctccccttggagcactgagtccggaggtcatccctgagctcatccacggctcatgctgtggctccgagtagtggtttgagtgggcaggaagggccatttgcaaacactgctgtgttctagacaaacaacccaagtcctatggcaggatttcttccttccttccttttttacccaggtgatgaagtgcacccattgtactgggaagaatgaagaggtgatacctttactagatccttcagacacatctatgagaagatttgttcatttaaaagtctgcccactgaggatagggaaaggattaaggatttttccacctcctcttagtaactcctgaattaccaacatcaacttctttctctccgttcctgaaggaactttggggaatcatcttcatccgtagttacgctttcctgaaccttctcagtggtttacatgcctctgaaactatgtgcaatatttttggttgacacttgtatccatccttaagaaattagtgcagattgcagatgttctgtcttccatcccaaacaagcctgccatgaggtaggatcctaggggtttggctgttcttactccactgctcagaaagcttccattctgctgtcctcagcctcgaccctcttctgtgctggacttccacccacccacccttttcaagtttagatagtgtttcagctgctgtcccaaagtaacaaaacaatacctactgttaagtaggaagtcaatctgtgtgctggttttgttggttatgtggaaatcacaaactccagaggagcaaaggggtttttcaatgtcttttgctttcagaaacagagaatataatattctcactaaggccttgaattgatttttttctcataaaatagtctgataagctaatttttaaaaagaaatgccattaactgtgttgtatcgtggtttaaaattactaacaagttgtgggaaagaaaaataatatttgattttgaatcttaaatgtttttaaaaattagacttgaatgggcacaaagtataaatattttgtttctttatggaggacatgtggaaggagtttgagggtttgggatgggagaagtattttgcagagctatcaatgtccaaataatttaaaaaaaaaaataaaggtatttaagcagtg

SEQ ID NO: 30656 - DNA, 2522 bp, Homo Sapiens
gtttcctaatctggtttcgtctgcttggttcatctgtgtgcgatggctccggactcggatcccttccctgaagggccgctcttaaagctgctacccttagacgctagagaccggggcacccagcgctgccgcctgggcccggccgccctccacgccctgggcgcgcgcttgggctcggcagtgaagatctcgctacccgacggcggctcctgcctctgcactgcctggcctcggcgggacggagcggacggctttgtgcagctggacccgctgtgcgcgagccccggggcggcggtcggggcgtcgagatcccggaggagtctcagcctgaatcgcctcctcctagtgccctgtccgcccctgcggcgcgtcgccgtgtggccggtgttgcgagagcgggcaggcgcgcccggtgcccggaatacagccgcggtgctggaggcggcacaggagctgctgagaaaccgaccgatctccctgggccacgtggtggtcgctccgccaggcgctcctggcctggtggctgccttgcacatcgtcggcgggacgcccagtcccgatcccgctgggctggtcacccctcgtacccgcgtcagccttggcggggagcctccgtcggaagcccagccgcagcccgaggtgcccctgggaggtctttcggaggcggccgactcgctgcgggagctcctccgcctcccgctccgctacccgcgcgccctgaccgcgctgggcttagcggtgcctcgcggggtgctcctggcggggccccccggagtgggcaagacccagctggtgcaggccgtggcgcgcgaggcgggcgcggagctgctggcagtcagcgccccggcgctgcagggttcccggcctggggagaccgaggagaacgtgcggcgggtcttccagcgcgcccgggaactggccagccgcggacccagcctcctcttcctggacgagatggacgccttgtgtccccagcggggcagtcgagcacccgagagccgcgtagtggcccaggtgttgacgctgctggacggcgccagtggggaccgcgaggtcgtggttgtgggagccactaaccggccggacgctctagacccagcgctgcgtagacccgggagatttgaccgagaggtggtcattgggactcccacacttaaacaaagaaaggaaattctgcaagtgattacctcgaagatgcccatctccagtcatgttgatttgggccttcttgcagaaatgacagttggctatgttggtgccgacctgacagcactctgtagggaggctgccatgcatgccctccttcatagtgagaagaaccaggacaatcctgtgattgatgaaatagacttccttgaagcttttaaaaatattcagccctcatcgtttcgaagcgtcattggattaatggatatcaagcctgttgactgggaggagattggtggccttgaagatgtaaaactgaagttaaaacagagcattgagtggcctctgaaattcccttgggaatttgttagaatgggcctgacacaaccaaagggagttctcctctatgggccccctggatgtgctaaaaccactctggtgagggccctggccacaagctgtcactgctctttcgtttcagtgagtggagctgatctgttttcaccgtttgttggagattcagaaaaagtgttgtctcagatatttcgacaagcaagagcaagcactccagcaattttgtttttggatgaaattgattcaatcttgggagctcgctcagccagcaagacaggatgtgatgttcaagaacgagttctttctgttctcctgaatgaattagatggtgttggacttaagacaatagagagaagaggaagtaaatcaagtcaacaggagtttcaagaagtttttaaccgaagtgtcatgattattgcagcaacaaatagacctgatgtgttagatactgctttgttacgacctggaagattagataagatcatctatatcccacctccagatcacaagggcaggctttctattttaaaagtctgtacaaaaaccatgccaatagggcctgatgtctccttagaaaacctcgcagcagaaacctgttttttttctggagctgatcttagaaacctctgcacagaagctgctttgctggctctgcaagaaaatggactagacgcaactacagtgaaacaagagcactttctaaaatcacttaagactgtaaaaccgtcgttaagttgcaaggacttggctttatatgaaaacttatttaagaaagaaggattttctaacgtggaaggtatttaaaaatcaccttaaactcttgttcagttcacattaattgaaatgtgaacttgcctgtcgtttgcaacttcacacttttagaatttgtgtttatatttcctgtaagtgaataaataaaacaaaacaaaacaaaaaaaacttgtgcctgataagctaaggctcatttatttttaaaaggcatattaaataaaatactgtaatttaggaaaaaaaaaaaaaaa

SEQ ID NO: 30657 - DNA, 4401 bp, Homo Sapiens
ccttctgcgttcccagcgcgcggcccgaatggcggccgacaagggcccggcggctggacctcggtcgcgagctgccatggcccagtggaggaagaagaaagggctccggaagcgccgaggcgcggcctcccaggcccgcggcagcgactcggaggacggcgagtttgagatccaggcggaagatgacgcccgggcccggaagctgggacctggaagacccctgcccaccttccccacctcggaatgcacctcggatgtggagccggacacccgggagatggtgcgtgcccagaacaagaagaagaagaagtctggaggcttccagtccatgggcctgagctacccggtgttcaaaggcatcatgaagaaggggtacaaggtgccaacacccatccagaggaagaccatcccggtgatcttggatggcaaggacgtggtggccatggcccggacgggcagtggcaagacagcctgcttcctcctcccaatgttcgagcggctcaagacccacagtgcccagaccggggcccgcgccctcatcctctcgccgacccgagagctggccctgcagaccctgaagttcactaaggagctaggcaagttcactggcctcaagactgccctgatcctgggtggagacaggatggaagaccagtttgcagccctgcacgaaaatcccgacataattattgccacgcccggacggttggtgcatgtggctgtggaaatgagcctgaagctgcagagtgtggaatacgtggtgttcgatgaagctgaccggctttttgaaatgggtttcgcagagcagctgcaggagatcatcgcccgcctccccgggggccaccagacggtgctgttctccgccacgctgcccaaactgctggtggaatttgcccgggctggcctcacggagcccgtgctcatccggcttgacgtggataccaagctcaacgagcagctgaagacctccttcttcctcgtgcgggaggacaccaaggctgccgtgctgctccacctgctgcacaacgtggtgcggccccaggaccagaccgtggtgtttgtggccacgaagcaccacgccgagtacctcactgagctgctgacgacccagcgggtgagctgcgcccacatctacagtgccctagacccgacagcccgcaagatcaatctcgccaaattcacgcttggcaagtgctccactctcattgtgactgacctggccgcccgaggcctggacatcccgctgctggacaatgtcatcaactacagcttccccgccaagggcaaactcttcctgcaccgcgtgggccgtgtggctcgggctggccgaagtggcacagcctactccttggtggcccctgatgaaatcccctacctgctggatctgcacctgttcctgggccgctccctcaccctcgcccgacccctcaaggagccctcaggtgtggccggtgtggatggcatgctgggtcgggtgccacagagtgtggtggacgaggaggacagtggtctgcagagcaccctggaggcatcgctggagctacggggcctggcccgcgttgctgataacgcccagcagcagtatgtgcgctcacgcccggcgccctcgcctgagtccatcaagagggccaaggagatggaccttgtggggctgggcctgcaccccctcttcagctcgcgttttgaggaggaggagctgcagcggctgaggctggtggacagcataaagaactaccgctcccgggcgactatctttgagatcaacgcctccagccgagacctgtgcagccaggtgatgcgcgccaagcggcagaaggaccgcaaggccatcgcccgcttccagcagggacagcaggggcggcaggagcagcaggagggcccagtgggcccagccccgagccgcccagcactgcaggagaagcagcctgagaaggaggaggaggaggaggcgggagagagtgtggaggacattttctcagaggtcgtgggccggaagcggcagcggtcaggacccaacaggggagccaagaggcggagggaggaggcccggcagcgggaccaggaattctacatcccctaccggcccaaggactttgacagcgagcggggcctgagcatcagcggggaagggggagcctttgagcagcaggcagctggcgctgtcctggacttgatgggggatgaagcccagaacctgacgaggggccggcagcagctcaagtgggaccgtaagaagaagcggtttgtgggacagtcaggacaggaagacaagaagaagattaagacagagagcggccgctacatcagcagctcctacaagcgagacctctatcagaagtggaaacagaaacagaaaattgatgatcgtgactcggacgaagaaggggcatctgaccggcgaggcccagagcgaagaggtgggaagcgagaccgtggccaaggtgcatcccggccccacgccccaggcacccctgcaggccgagtccgcccggaactcaagaccaagcagcagatcctgaagcagcggcgccgggcccagaagctgcacttcctgcagcgtggtggcctcaagcagctctctgcccgcaaccgccgccgcgtccaggagctgcagcagggcgccttcggccggggtgcccgctccaagaagggcaagatgcggaagaggatgtgaggaccaggacccagccccgtggctccttgattggccttagggtgggcatcagcagacgttcccgtgcaccactgtgtgcctggccctgtgctgggcactgggggcactccctgcaggagccatcatctgtgaaaaggagcactgtatggccacagaagggcagcagctgcgtcagcctaagacagagacatttgaacagggccttgaagggtgtgcaggagttcgccagcaaagccaggcaggccaagacttgagttggcaactcagctgctgctgcttccatgtgttctgggttcagaggtcatggctgcaccggtcagagccctgagtgcctcagggtttggcaatggaatttttaatgtaataaatctttattgagcactgctggtggccaggagtgcggtctacttggggaactggaatggagagacccaggtactaaaatcccagctaacgtggcagaggagttgcgggtctcctgagggtgagttctgctgccttgtccatttagcgatgaggaaagtgaagctcagagcacaaaccaggtgccagaggcgggagttggtcccccttcctcccactggacatggttgcagctgggagtgggctgggggaggggaacaggatgcccagcccagggggcaaggacacagctgctcccctctggctatgaagaggttaacgcggcccctccacacctggaggtcagaacctggcctgtcctctgtcttcttgccacccaccccctgtttgaggttctgagaaggtcaagggcagccccagcagctggattctcaggctgggcccctcacctggcagagtccatagtggagggggccttggtgatctctcatctagcatggaccctgttctgagacctgacaaagagttttttttcatgccccaaccaccctggcagggagggcctggtctgatctcattttagaggcagttgccccacacatagccccttgaccttcccatcacctcctcatcagggcctgcatttatggagtgcttgctatgtgcccctcatggcaggcccacagcactctgaacaggcacagccctcccatcttcccaatgaggaaacggattcaggaagagccactcagtccacaccccattggaaatgtgggccctcctatctcagggtctctcaggggttccctctcccgctgctcacctgtgtcagggctaggaggcaggggctgcaggctcagcctgacccaggccggccagcatggcagagaggtcctgcatgaacagcttcacctgggggggcccagcacgaagtcacatcccagccccagagtcactgtccagcccccacccctcaacacgcgggggaggccgaaaggtagggcggggactggagatcccctcattaaaagaacagtgatgatggtggttcccagaggtggtgactgagatcctaaaccgttctgggttttgaaagcctcaggccaaccttcccaactgctgcgtgagcagacaccttcacagcttcctcgctgctgtcacctgcactatccaattagtattttcatttacatcaatcagctttattttcttgtaactggatcagtcatattcattggtttgtgacctactcttatctccgtgggtggctctccttttgttttaattaacttctttatgaatatgaacttaataaataccatggatccattgtaaaaactaaaaaaaaaaaaaaaaaaaaaaaa

SEQ ID NO: 30658 - DNA, 2015 bp, Homo Sapiens; identical to SEQ ID NO: 27948

SEQ ID NO: 30659 - DNA, 3045 bp, Homo Sapiens
actaagaccgcaaggcattcatttcctcctacggtggatgcggacgccgggaggaggagagccccagagagaggagctgggagcggaggcgcaggcaatgctcagccctggatgtagctgagaggctgggagaagagacgaccgctggagaccgagcggcgtggggaagacctaggggggtgggtgggggaagcagacaggagaacactcgaaatcaagcgctttacagattattttattttgtatagagaacacgtagcgactccgaagatcagccccaatgaacatgtcagtgttgactttacaagaatatgaattcgaaaagcagttcaacgagaatgaagccatccaatggatgcaggaaaactggaagaaatctttcctgttttctgctctgtatgctgcctttatattcggtggtcggcacctaatgaataaacgagcaaagtttgaactgaggaagccattagtgctctggtctctgacccttgcagtcttcagtatattcggtgctcttcgaactggtgcttatatggtgtacattttgatgaccaaaggcctgaagcagtcagtttgtgaccagggtttttacaatggacctgtcagcaaattctgggcttatgcatttgtgctaagcaaagcacccgaactaggagatacaatattcattattctgaggaagcagaagctgatcttcctgcactggtatcaccacatcactgtgctcctgtactcttggtactcctacaaagacatggttgccgggggaggttggttcatgactatgaactatggcgtgcacgccgtgatgtactcttactatgccttgcgggcggcaggtttccgagtctcccggaagtttgccatgttcatcaccttgtcccagatcactcagatgctgatgggctgtgtggttaactacctggtcttctgctggatgcagcatgaccagtgtcactctcactttcagaacatcttctggtcctcactcatgtacctcagctaccttgtgctcttctgccatttcttctttgaggcctacatcggcaaaatgaggaaaacaacgaaagctgaatagtgttggaactgaggaggaagccatagctcagggtcatcaagaaaaataatagacaaaagaaaatggcacaaggaatcacacgtggtgcagctaaaacaaaacaaaacatgagcaaacacaaaacccaaggcagcttagggataattaggttgatttaacccagtaagtttatgatccttttagggtgaggactcactgagtgcacctccatctccaagcactgctgctggaagaccccattccctctttatctatcaactctaggacaagggagaacaaaagcaagccagaagcagaggagactaatcaaaggcaaacaaaggctattaacacataggaaaatatgtatttactaagtgtcacatttctctaagatgaaagatttttactctagaaactgtgcgagcacaacacacacaatcctttctaactttatggacactaaactggagccaatagaaaagacaaaaatgaaagagacacagggtgtatatctagaacgataatgcttttgcagaaactaaagcctttttaagaaatgccagctgctgtagaccccatgagaaaagatgtcttaatcatccttatgaaaacagatgtaaacaactatatttcaactaacttcatcttcactgcatagcctcaggctagtgagtttgccaaaaccaaagggggtgaatacttccccaagattcttcctgggaggatggaaacagtgcagcccaggtcccatgggggcagctccatcccagagcatttctgatagttgaactgtaatttctactcttaagtgagatatgaagtattatccttttgttcagttgccccgggcttttgaacagaagagtaaatacagaattgaaaaagataaacactcaaccaaacaatgtgaaaacgggttctgtagtatttgtaaaaaggcccggcccaggaccactgtgagctggaaaagggagaaaggcagtgggaaaagaggtgagccgaagatcaattcgacagacagacggtgtgtatgcccctccctgtttgacttcacacacactcataactttccaaatgaaaccccacagtatagcgcatattttcgatatttttgtgaattccaaaaggaaatcacagggctgttcgaaatattgggggaacactgtgtttctgcatcatctgcatttgctccccaagcaatgtagaggtgtttaaagggccctctgctggctgagtggcaatactacaacaaacttcaaggcaagtttggctgaaaacagttgacaacaaagggcccccatacacttatccctcaaattttaagtgatatgaaatacttgtcatgtctttggccaaatcagaagatattcatcctgcttcaagtcagcttcagaaatgttttaaaagggactttagctctggaactcaaaatcaatttattaagagccatattctttaaaaaaaaaagctggataatattatctgtaatatttcagtcctttacaagccaaatacatgtgtcaatgtttctagtatttcaaagaagcaattatgtaaagttgttcaatgtgacataatagtattataattggttaagtagcttaatgattaggcaaactagatgaaaagattaggggcttccacactgcatagatcacacgcacatagccacgcatacacacacagacacacagatgtggggtacactgaatttcaaagcccaaatgaatagaaacacattttctggctagcagaaaaaaacaaaacaaaactgttgtttctctttcttgctttgagagtgtacagtaaaagggattttttcgaattatttttatattattttagctttaattgtgctgtcgttcatgaaacagagctgctctgcttttctgtcagagatggcaagggctttttcagcatctcgtttatgtgtggaatttaaaaagaataaagttttattccattctgaaaaaaaaaaaaaaaaa

SEQ ID NO: 30660 - DNA, 4430 bp, Homo Sapiens
cggcggagtggcgagaggcgagaggcggcggaggcggcggagctggggggggtgggaggggggggagagtgagtgagtggcagagtgagtttacccctatgagactgtgagaggcccggggcctacctcaaaggagcggggtcgcgaagctagctagcagcggcccccctccaggtccccgggcccggcggcgcggcggcggcttggttgtgaagaggcggggaagcgggtgtccggtccccgccatggagggcatggacgtagacctggacccggagctgatgcagaagttcagctgcctgggcaccaccgacaaggacgtgctcatctccgagttccagaggctgctcggcttccagctcaatcctgccggttgcgccttcttcctggacatgaccaactggaacctacaagcagcaattggcgcctattatgactttgagagcccaaacatcagtgtgccctctatgtcctttgttgaagatgtcaccataggagaaggggagtcaatacctccggatactcagtttgtaaaaacatggcggatccagaattctggggcagaggcctggcctccaggggtttgtcttaaatatgtcgggggagaccaatttggacatgtgaacatggtgatggtgagatcgctagagccccaagagattgcagatgtcagcgtccagatgtgcagccccagcagagcaggaatgtatcagggacagtggcggatgtgcactgctacaggactctactatggagatgtcatctgggtgattctcagtgtggaggtgggtggacttttaggagtaacgcagcagctgtcatcttttgaaacggagttcaacacacagccgcatcgtaaggtagaaggaaacttcaacccttttgcctctccccaaaagaaccgacaatcagatgaaaacaacttaaaagaccctgggggctccgagttcgactcgatcagcaaaaacacatgggctcctgctcctgacacatgggctcctgctcctgaccaaactgagcaagaccagaatagactgtcacagaactctgtaaatctgtctcccagcagtcacgcaaacaacttatcagtagtgacttacagtaaggggctccatgggccttaccccttcggccagtcttaaacgggtgtcagcaagaagaaaaattaacaaaagacagaaggcctgactttggggggttagggcaaggggttcctctggattgcagaccacatcgcacagacccctggctctgaccccctctcatcccggaagaagaggaagaagcagaacagactagttttgagtaaactcagtatgcatgtgtgaatgctgaatcacaggaatggtgttgaggctaccaagaagaaatccatgcagccactttgggttttgttataggcatcagtctaacaagtcattaggtcactcgggaagggggaaaaagtttaaaatgggggaaaaaaagccatctttttaaacaaaaattattttgcctacagaaaggttgtagttttgagcacatgttaatttttttccctctttccccacttttatttttttaaataagggataacatattctttatagaatagtgcttgttctggaagagattcaggtgaaaagttggcgtggcatgtttgaggactctgcggatcagtgctacaggagtacatctgccctgccacatgactccagaagtctctgaccccatttgtttttaatggcatcagccaatgagttatcacccttttcctcctcttttctctttaatcttctgttgatttacacctttgacatttgtattcgtcaaccctgtggcttgttagcatcagaacctctctgaagaccaaacttccctgtgtggccagcagaggaagccttgaggatagatctcgggtgacgtgggattttctaagcctgagaggtgtccttctgcacacccttgtaacaattaaaattgcttttcttccatgtttctcttggcagagagaaatgccatcatgcttactgctcttttggattcttcatgcagtggcttcccatttgctctgggaacagtgcctctgtgctggttatatgtatgcaccacatgtgcacacacgggtgtcggtgcaactcaccagcaggtgtgcagtaggcaagcttgaaggtggcccatgcttctctgttgtcacacaacacctttccctgtttctcttcagttgtcctctgatattttcacagcctgttagtggcggctgatctgtagaggtatgaaaatacagccccaaagggggaatttgtcatggggaagggccagccactgactacttgatcttggagaccacatttagatggaaatgagaggacctccacagccccgcctccctgccaggatgctagattattggctgggaggtgggcaagtggcagcccagctgaagcaagaggctgattgactggctgctcactcaggcaggtggcctgccctggcatcctgtagattctgagcaggttgagatgtggatatctccatgggaagcttgaaccaggctagaacagctgtctgccaaagatacaagaatatgcaaagtccctcttacccccctccttccctcaagtcttagttggtttgagagccagggatatggatccagggtgctgttgcagggtcacctgcctgttaccacacccccatccagctgggtggtgggtgagggtgtgagacaggcagggagaccaggtaatgagtggctgcaaggagtcatatagcctgggtgtgggtgagggtctgcctgcctgtttctgtctgggtgtctgagttccaaaaaatgtgtgttgtttgttcctcctcatcctcttctgagactgttgtttttttagagcttgattgtgggagaaaagcttgtgtgaaattccctcttcacctccccaccccccaaaaaataaaagggggcataaactttattccactggagaagccctgggggtggctggagccagcctgctgagaagcgtggtgcagctgggtctgggacttcactagagcttactctggagcacctattttctgtgcacatgggagtgctccactccctagcagagcagagggaagtctctgccaggtacccacgccacaggcctcaggatggctttttgtctgagggcctcattaggcccagactgctgctgctggtaccagtctcctgagacactgcctccctggagcccatgcatgcccagctgttcttactgcttagtagccttgaagcagcacatctccactgtccctggcaggattgtgggaggcttcacaacccctgctttcctgacttcctcttctgcccaacactgggtgccccttcccagtttcccagcaggggcttcatgggccaccgtcagtgggtctgggcctgccagagtcgtcttgctcttcctcttgcttctaggcaaccacacttggcaagttaaatgtcccaagcaccttgtctcccttcccaagaacaaaccatttctgtgcacatccttggaggcgagatgagctccttgcagagggccagagtaagtgcaagtcatggagtgcaggcagaggggtccatggcttccccagcccagggagggtatcagtatcattcattctctctcccctcactggtatgggttcagagcaatgcctagggcccctctctgctcccctgcctagtggggtggtagtggctacctctcagccccaatagtccctgctcctcttagaatcttcaccaagtggcaggccacctctgggcaggaccacctgcgtctggcacccaggaggtgaggcagacaccatggttaggtgatagggtctgaacccagttggggagacagaggggttcagacttgggaagaatctgtcagtgtgcatggagtgaggtgtgtgtgtgtggatggatgtgcacgtgtgcatgctttttttctttttgccgtgaggacagttgaatttggggcatttttctacaagaagcagtcagccttctctcccccataaggactggctgtaaccttaagcccatcaaagttacttccagcctggagagaacctcaccaaacagctggtgtggcctgagggtggccatggtgggaaatgggcatgagaataaatacctccccaaattcaatctgagcccagcaggagaggatggtagggttgccagggctcagaagtgcaagctgattactcaccccaccctgcctcgccgcacctttcctttgtttccttgggtgaatgcaggagcagcagtggctgcccttcccacctggacagtggtgtgtgtagaaagccagctggatgtttgtggtggggcctcatggtgcctaggaggagataaagatgaggaggtttttccttattgtataaatgaatatttgtatgattaaattaacacacacaccaaaaaaaaaaaaaaaaaa

SEQ ID NO: 30661 - DNA, 794 bp, Homo Sapiens; identical to SEQ ID NO: 25295

SEQ ID NO: 30662 - DNA, 3337 bp, Homo Sapiens
attgctccaagatggcggcggcggcggcagcgggagcgcagctcagctgggctggaactgccctcctggaactcccccagcctacaacctaggaggtgcagggactgaggctcaggccaaatcgcaactcagacccagtgaacccaaggcctgaagagaatttggattcatttaccttgttttgtggggactggagagacaagtaaactctcagagtaactgtcccctctgactaccatttctaaggatgccccggaggcccagctagccccagacttcggccccatgcggctcacccgctgccaggctgccctggcggccgccatcaccctcaaccttctggtcctcttctatgtctcgtggctgcagcaccagcctaggaattcccgggcccgggggccccgtcgtgcctctgctgccggcccccgtgtcaccgtcctggtgcgggagttcgaggcatttgacaacgcggtgcccgagctggtagactccttcctgcagcaagacccagcccagcccgtggtggtggcagccgacacgctcccctacccgcccctggccctgccccgcatccccaacgtgcgtctggcgctgctccagcccgccctggaccggccagccgcagcctcgcgcccggagacctacgtggccaccgagtttgtggccctagtacctgatggggcgcgggctgaggcacctggcctgctggagcgcatggtggaggcgctccgcgcaggaagcgcacgtctggtggccgccccggttgccacggccaaccctgccaggtgcctggccctgaacgtcagcctgcgagagtggaccgcccgctatggcgcagcccccgccgcgccccgctgcgacgccctggacggagatgctgtggtgctcctgcgcgcccgcgacctcttcaacctctcggcgcccctggcccggccggtgggcaccagcctctttctgcagaccgcccttcgcggctgggcggtgcagctgctggacttgaccttcgccgcggcgcgccagcccccgctggccacggcccacgcgcgctggaaggctgagcgcgagggacgcgctcggcgggcggcgctgctccgcgcgctgggcatccgcctagtgagctgggaaggcgggcggctggagtggttcggctgcaacaaggagaccacgcgctgcttcggaaccgtggtgggcgacacgcccgcctacctctacgaggagcgctggacgcccccctgctgcctgcgcgcgctgcgcgagaccgcccgctatgtggtgggcgtgctggaggctgcgggcgtgcgctactggctcgagggcggctcactgctgggggccgcccgccacggggacatcatcccatgggactacgacgtggacctgggcatctacttggaggacgtgggcaactgcgagcagctgcggggggcagaggccggctcggtggtggatgagcgcggcttcgtatgggagaaggcggtcgagggcgactttttccgcgtgcagtacagcgaaagcaaccacttgcacgtggacctgtggcccttctacccccgcaatggcgtcatgaccaaggacacgtggctggaccaccggcaggatgtggagtttcccgagcacttcctgcagccgctggtgcccctgccctttgccggcttcgtggcgcaggcgcctaacaactaccgccgcttcctggagctcaagttcgggcccggggtcatcgagaacccccagtaccccaacccggcactgctgagtctgacgggaagcggctgaagccctgataacctcgcctttgtttttcgggggtctgtctggatgtggagaagctctgtgtgagcggtgaggggtggagggatgtcgcggagaggggaagggggaaactgaccaagaaagaaattctaaggagagcatgagagaaggctggcattggcaggaggagagcaccaggacgaggatgggaagcgacctccagatttatcaaatggtcatgcccactgggagccgtggatatgcgtggggacatcctgggtcatctcagtcatggagggagacggggatgtcacgccgtcccgcagggcccagcacagccccagacccgaaaaaagtgttctgcccaagattccgagagccctgcgctctagggcaggggcagagttttggaaacagtgcaggctctggagccagactggcgagattcaaatcctggctctatcgcttcggagccaggtgggcctgggggggcgtcgcagtctctctgtgcctcagttgcttccaggatgcgggacccttggctgcaggggttgcttccgccactagagggcgcgccggtcccgctcctggtggcccactgtggctgcccgggcgacagtacgcccagggcctgtgttccatagccatctactctcttgagcctttggacttctctccaagcccctgtgggaggcggacagcagtgaccacctccccttcttttggactgcgacctccttccctcctgggagagccctgtgacctgcatgctactcttaactgttctattcaagactgaatagaagtatttcagtcttgcagaggaggaaatgctcagagctccgaggtgcggctgtggtcgagaaccgggtgctgggccgggcgcgggggctcacgcctgtaatcccagcactttgggaggccgaggtgggaggatcgcttgagcccaggagtctgagaccagcctcggcaacatgccaagaccccgtctctatttttaaaaaagaaaaagaaccgacttctgaatcgcagctccactcatgactaatacctcattatttcagctgtctgcacctaattccccacttgcacggcagtgtagacaataaccatagctcacactcactgagcacctactgggtaccaggcaccattctcagtgtttcacctggatcaactaatgcgtccctcacctcagccctctgaagtgacagctgctattattttcattacacagatgaaaaagctgaggccagaatcgtgaagtcacttgctcaaggtcaggcagcttaggaaggggcagatcgggggcttgaacccaggtggtcaggctctggagcccacaattgtcttacccactatgcccctctctagtcatggtccccaagaggggcttggagacccacttagcaggtgaaagcaatggcagccttccttatttgattatgcacctaagaataaatggtatttgggcatgtattcccaatatgtgtatatttatttataaatatatacagatactattatctgtatgttagtaataaagcttaaattattccattttaaaattaaaaaaaaaaaaaaaaaa

SEQ ID NO: 30663 - DNA, 1336 bp, Homo Sapiens
agcacagtcccgcggacggctgagcgtgtggctgcaggagcttctgtgggagtacggtcatgagccttttgctgtactatgccctccctgccctgggcagctatgccatgctctccatcttcttcctgcgccggcctcatctgctgcacacgcccagggctcccaccttccgcatccgcctgggggcccaccgaggaggatctggagagctgctggagaacaccatggaggccatggagaagtgagtgtatctgcccctgcccaggctgccatgtgagggtgtgcaggtcgtggactgcatcacagcaagggacgccattcacttcctagctgggtgactggcgccccctggaggtggcctgcacatcccgccacgaactccgctctcacattcccggccacctcccagccaccatgcccctcatcccagtcccctgcccctgccccccgctgaccttcacccccacagctccatggcccagcgctcggacctcctggagctcgactgtcagctgacacgggacagagtggtggtggtgtcacatgatgagaacctgtgccgccagtcgggcctaaacagggatgtgggcagcctggacttcgaggacctgcccctctacaaggagaagctggaggtttacttctctccaggccactttgctcacgggtcagaccggcgcatggttcgtctggaggacctgttccagaggtttccaaggacacccatgagcgtagagatcaaagggaagaacgaagagctcatccgtgagatagcaggcttggtgagacgctatgaccgtaatgaaatcaccatctgggcctcggagaagagctcggtcatgaagaaatgcaaggctgccaaccccgagatgcccctgtccttcacaataagccgaggattctgggtgctgctttcctactacctggggctgctgcccttcatcccaatccctgagaagttcttcttctgcttcctgcccaacatcatcaacaggacctatttcccattttcctgctcttgcctgaaccagttattggctgtggtttcgaaatggctgatcatgaggaagagtctgatccgacacttggaggagcgaggggtgcaggtggtcttttggtgccttaatgaagagtcggattttgaagcagccttcagcgtgggagccactggcgtcataacggattatcccacagccctgcggcactacctggacaaccatggaccagctgcccggacctcctaagtccagaagcctcgaggtcttctgtttctcttcctgaaaaataaatatttgcctttcgatcaaaaaaaaaaaaaaaaaaaaaaaaaaaaaaa

SEQ ID NO: 30664 - DNA, 1665 bp, Homo Sapiens
cacgaggaagacgtggatggcgggaattctcgcttctggcctgggtgagctagaagggagaagcaaggacattggagtccctatcaccggttgcctagacaacttcatgggaaggcccttgggaatctgagatggagcaggcgaaccctttacgtccagatggcgagtccaaaggaggtgttttagctcacttggaaaggctagagacccaagtgagcagatcccgtaaacagtctgaagagctgcagagcgtgcaggcccaggaaggtgctcttggaaccaagattcataaactaaggcgtctgcgagatgagctgagggctgtggtgcggcaccggcgagccagcgtgaaagcatgtattgccaatgtagaacccaaccaaacagtggagatcaatgagcaagaagcattggaagagaaattggaaaatgtgaaagccattctgcaggcatatcattttacaggcctcagtggtaaactgaccagccgaggagtttgtgtctgcatcagtactgcttttgaggggaacctattggattcctattttgtggaccttgtcatacagaaaccactccggatacatcaccattcagtcccagtcttcattcccctggaagagatagctgcaaaatatttacagaccaacatccagcacttcctgttcagtctctgcgagtacctgaatgcttactctgggaggaagtaccaggcagaccggcttcagagtgactttgcagccctcctgactgggcccttgcagagaaacccactgtgtaacttgctgtcatttacttacaaactggatccagggggtcagtccttcccgttctgtgctagattgctgtataaggacctcacagcaactcttcccactgacgtcaccgtgacatgtcaaggagtggaagtattatccacttcatgggaggagcaacgagcatctcatgaaactctgttctgtacgaagcccttgcatcaagtgtttgcctcatttacaagaaaaggagaaaagttggatatgagtctggtctcctaatagattgttttcactgcactgggagcacatcagagaaataaatcccccctcccctgccaggtgaaaggaaatattgcactttctgttctcatgactaaggggacaggagttccagaagaacctttcaagatgatcaggaacaccaggacgagggccgtctcacctcactcggaccacatggagacctcccttcaaaatgggagccatgtcctgccccaccaagccctgtctgaagtggagcttccccgcctgtgctccctccacagtcccggaaagcccagcggcaaaggcagctttgtcccagctctgccaccctcctgctcacagtggtcagggcccctcaggggcaaggacggcagggattggaacgagggctctggaaggactgttcagccctatgcctaagacccctatgctggggacactacaggcacacagaggaatagcagggccaccctcagagctcacacatccacgaacaaatgaaggctgaggaggtttctaaacctaaagtccatgagtgtgcacttcaatccaggaaggtcgggacttccttcagtttcaaaaaataaattctcccttccggtttggactgttaaaaaaaaaaaaaaaaaaaaaaaaaaaaaaaaaa

SEQ ID NO: 30665 - DNA, 2420 bp, Homo Sapiens
acctcgcggggcgcgggaaagaggcagagcgcgcgcagatttctcaaggggaagataaaatgactaagaggaagaagctgcggacctcaggagagggactctgtcctccaaaacccctaaagaacccaaggctaggagacttctatggggacccccagagttccatgttgggctgtttacatcaccctgaggagccagagggcaaattgggacctgttccctctacacagcagcacggggaggaaccaggaaaggccgtctccagctcccctgatgaggaaacaggatctccctgccggctcctccgtcaaccagaaaaggagccagctccccttcctccttcccagaactcattcgggaggtttgttccccagtttgcaaaatccaggaagacagtgacaagaaaagaagagatgaaggatgaggaccgtgggagtggggcctttagcctggaaacaatcgcagagtccagcgcccagagtccaggatgccagctgctagtggagaccctgggggtccccctccaggaggccacggagctgggggacccaacgcaggcagacagtgcccgccctgagcagagcagccagagccctgtgcaggcggtgcccggcagtggggattctcagcctgatgaccctccagacagggggacggggttgtccgcctcacagagggccagccaagaccacctgtcagaacaaggggccgatgacagcaagcctgagacagacagggttccaggtgacggtggccaaaaggaacacctaccaagcattgattctgaaggggagaagccagacagaggagccccccaggagggaggggcccaaaggacagcaggggctggcctgcctggagggccccaggaggagggagacggtgtcccctgtaccccagcatcagctcctacctcaggccctgctccaggactgggccctgcctcttggtgcctggaacccgggtctgtggcccagggctcccctgacccccagcagacccccagcaggatgggtagggaaggggaagggactcatagcagcctgggatgctcctccctcgggatggttgtcatcgcagacctgagcacagaccccactgagctggaagagagggctctggaggtggctgggcccgatgggcaggccagtgccatatcacctgcctctcccaggaggaaggccgctgatggaggccacaggagggccttgccaggctgcacctcgctcactggggaaaccacaggagaaagtggggaggcagggcaggatggcaagccccccggcgatgtcctagtgggccctacagcctccctggctctggcacctgggagcggagagtccatgatgggtgctggagattccggtcatgcatccccggacacaggtccatgtgtcaatcagaagcaggagccaggtcctgctcaagaggaagccgagttaggtggccagaacctcgaacgagacctcgaggggttccgtgtgtccccgcaagcctctgttgtgctggaacacagagaaatagcagacgaccctctccaggagcccggggctcagcagggcattccagacaccacctcagagctggcagggcagcgagaccacctgcctcattctgcagaccagggcacctgggcagactctttagctgtggaactcgacttcctgctggacagccagatacaggatgccctggacgcctctgacttcgaagccccacctgagcagctctttccttcggggaacaagccgggcccttgctggccgggccccagctcacatgccaatggagaccctgttgcagtggccaaggcccagccgagccggctgatcatgggcacccaccgggacctggaagctttcaagcgccttaactaccggaagacaaagctgggaggcaaagcccccctgccttacccttccaaggggcctgggaatatccctcgaggggacccaccctggagggagttgtaggccactttgaggtctgtgtttcctttgccacccagcccccatgtccgcagacctcctccaagatgctccagggggtcctagtggaccctacaaacctcccttcagttgcccggaagttggtcttccatggacaacacaaaggaggccgtgaggtcctggcctcacctggccagggtcaaggtcatttgccacccttggcttcagggagggaaactgtgtctcccacagccccagtgacttcaagcgggcctgggctccaggaagctggccacctctgagcagggcccatcctgtccggatttgcaaattttagggtcctgagccaagtatggatggttcagaatttgtttctttcctggaggagaagagagctccctttgttttctttctccccatttccattttatttcttctgggaagacccataataaatgattctgtagaggc

SEQ ID NO: 30666 - DNA, 3632 bp, Homo Sapiens
gtagtcttttttttgcagaatgggccaaggggacagagacttcactcgggagccagaacctgttttcaacatgggtattttaagaagagacggagaggctgtcactgcagtggtcactgtcctggaaaagtaaccgttgcacggcccagaagtggctctgtggcggccaatgggagccgaagcctgcgaggatgttgggaattgtagttctggcgtcggtcggtggccgagatcccgggcacgctggctctggtccaccttctccaatccctgcctgctgggagaggacgatctcttgagaaaggaaagacttctgtgctcccgagaacttcctatcaggtcctggctgcagggaaacaagctgggctttttataattaaggttggaagaagtcaccacaggcagcagaactccatcttgagatgaaataacatctacctggacctctggcagaatttcaaggcacacactgggctgactctggcgccatgatgttgccttatccttcagcactgggagatcaatactgggaagagattttgcttccaaagaatggggaaaatgtagagactatgaagaaattgacccaaaatcataaagcgaaaggcttgccttctaatgatactgactgcccccagaaaaaggagggaaaggcccaaatagtggtaccagttacattcagggatgtgactgtgatcttcacagaagcagaatggaagagactgagtccagagcagaggaatctatacaaagaagtgatgctggagaattacaggaatcttctctcattggcagaaccaaagccagaaatctacacttgttcctcctgccttctggccttctcctgtcagcagttcctcagtcaacatgtacttcagatcttcctgggcttatgtgcagaaaatcacttccatccagggaattctagcccagggcattggaaacagcaggggcagcagtattcccatgtaagctgttggtttgaaaatgcagaaggtcaggagagaggaggtggctccaaaccctggtctgcaaggacagaggagagagaaacctcaagggcattccccagcccactccaaagacagtcagcaagtcctagaaaaggcaacatggtggtagaaacagagcccagctcagcccaaagaccaaaccctgtgcagctagacaaaggcttgaaggaattagaaaccttgagatttggagcaatcaactgtagagagtatgaaccggaccataacctggaatcaaactttattacaaacccgaggaccctcttagggaagaagccctacatttgcagtgattgtgggcgaagctttaaagatagatcaaccctcatcagacaccatcgtatacactcgatggagaagccttatgtgtgcagtgagtgcgggcgaggttttagccagaagtccaacctcagcagacaccagagaacacattcagaagagaagccttatttgtgcagggagtgtgggcaaagctttagaagtaagtccatcctcaatagacatcagtggactcactcagaggagaagccctatgtttgcagcgagtgtgggcgaggctttagcgagaagtcatccttcatcagacaccagaggacacactccggtgagaaaccctatgtgtgcctggagtgtggacgaagcttttgtgataagtcaaccctcagaaaacaccagaggatacactcaggggagaagccttatgtttgcagggagtgtgggcgaggctttagccagaactcagatctcatcaaacaccagaggacacacttggatgagaagccttatgtttgcagggagtgtgggcgaggcttttgtgacaagtcaaccctcatcatacacgagcggacgcactctggagagaagccttatgtgtgtggtgagtgtggccgaggctttagtcggaaatcactcctccttgtccaccagaggacacactcaggggagaagcattatgtctgcagggagtgtaggcgaggttttagccagaagtcaaatctcatcagacaccagaggacgcactcaaatgagaagccttatatttgcagggaatgtgggcgaggcttttgtgacaagtcaaccctcattgtacatgagaggacacactcaggagagaagccttacgtgtgcagtgagtgtggccgaggctttagccggaaatcactcctccttgtccaccagaggacacactcaggggagaagcattatgtttgtagggagtgtgggcgaggctttagtcataagtcaaatctcatcagacaccagaggacacactgacgggagaaacctgtgtatgcaggggtcatgaacaagacctgagtgaccagtcaagcctcatgttaccccagagagacacatggggagtagaccctgtgtacacagattgtgagtgaagttccagagatgtgtcagcccttatcaggcatgggagggacacgttcaggagaggagccttatgagtatagagtacgggcaactgtagccatcagtcagccttgagcatgcacaaaaggacacacttaggagagaagtttatgtgtagggactgtgggaaggctttagcaataatcaacatttaccagacatccaatgacagcctcaggggaaagcacccttgtctggggagtgttggggagcatcagtaaaagaatggacactcaggcacagagtggccctcaggaaggaggtctttgtttgtaggatgtatgggcaaagcttttgtgatcacacaccacagggagaatctgcatgtggggacactgtggagctctgcccagatgaccttttcaggggtaacaccccagctgcttgagagaacagtgttgctgctggcagagatgcattccagagatgcactccgctctggaactcactctcagccacagggagctgcatgcaccacaggggcaatgcacctttgcaggggtaccttctggccccaacccttgactcaacggggacaactccagaaggtcattccagatccagagatccccatcgaactgaaggatcactgggttgcagacacattgcaggtcagcttcttcctctgcccagtcctgccctcactccccagtgaatcctcaattttctgtctcgttgtctgtccagataattgattctaagacatgttaggtatataaggagtgtagataaggcttcagccatgagtcaccccccagtaagccccagagtatattgaatagaaattctgcatgtgtggggagaatggacaaggacttaggaaaaagtcctcatcaaagaacagcttttttgggacaagctttacatgggtggggagggaaaatgtgaaacacattagcaataagttaaacctcatcttgtactaaaggaggacacactcagggagaagacctctgtgggcagggcttgtgggtggagcttcatcccgatgtcactcctcaactgacttaggaggacagtcttgctaccccaagtcactacctcactcacctctgagggattttcaggaaatgtcttgactcccccatgtactctgtatgtgagcgaagatggcagtaactgttaaataagcattcttttctacttcttggaatcagatgaaataaaaaagcaggctttatttaagtaatcaaaaaa

SEQ ID NO: 30667 - DNA, 856 bp, Homo Sapiens
ggcacgaggcctcgtgccgattcggcacgaggcccgggcacgctggctctggtccaccttctccaatccctgcctgctgggagaggacgatctcttgagaaaggaaagacttctgtgctcccgagaacttcctatcaggtcctggctgcagggaaacaagctgggctttttataattaaggttggaagaagtcaccacaggcagcagaactccatcttgagatgaaataacatctacctggacctctggcagaatttcaaggcacacactgggctgactctggcgccatgatgttgccttatccttcagcactgggagatcaatactgggaagagattttgcttccaaagaatggggaaaatgtagagactatgaagaaattgacccaaaatcataaagcgaaaggcttgccttctaatgatactgactgcccccagaaaaaggagggaaaggcccaaatagtggtaccagttacattcagggatgtgactgtgatcttcacagaagcagaatggaagagactgagtccagagcagaggaatctatacaaagaagtgatgctggagaattacaggaatcttctctcattgggtcaggagatcgagaccatcctggccaacatagtgaaatcccatctctactaaaaatacaaaaattagctgagcatggtggcatgtgcctgtaatctcagctacttgggagcctgaggcaggagaatcacttgaaccagggagtcagaggttgcagtgagccgagattgtgccgttgcactccagcctggtgacagagtgaaactcagtctgaaaaaataaaaaaaaataaaaaaatatttaaaaaaaaaaaaaaaaaaaaaaaa

SEQ ID NO: 30668 - DNA, 2846 bp, Homo Sapiens; identical to SEQ ID NO: 25330

SEQ ID NO: 30669 - DNA, 1760 bp, Homo Sapiens
acccagcgtgcgcggggcccgcgggccgggccggggtgacctgggctgcagccatggaagaacagagggaggccctgaggaagatcatcaaaacactggctgtgaagaatgaagaaattcagagctttatctactccctgaaacagatgctgctgaacgtggaggcgaactcggcgaaggtgcaggaggacctcgaagcagagttccagtccctcttctccctcctggaggagctgaaagaaggcatgcttatgaagataaaacaggaccgtgccagccgcacctacgagctgcagaaccagctggctgcctgcacgcgggccctggagagctccgaggagcttctggagacagccaaccagactctgcaggccatggacagcgaggactttcctcaggctgccaagcaaatcaaagatggagtgaccatggcccctgccttccggctatcattgaaagcgaaggtcagtgacaacatgagtcacctcatggtggacttcgcgcaagagcggcagatgctacaggcactcaagttcctgcctgtgcccagcgcacccgtgatcgacctggctgagtccctggtggcagataactgtgtgaccctggtgtggcgcatgccggatgaggacagcaagattgaccactacgtgctggagtaccggcggaccaacttcgagggcccgccccgcctcaaggaggaccagccctggatggtcatcgagggcatccggcagacagagtacaccctgacaggtctcaagtttgacatgaaatacatgaacttccgtgtgaaggcctgtaacaaggcagttgcaggagagttctctgagccggtgactctggagacaccagcgttcatgttccgcctggatgcgtccacatcccaccagaacctgcgggtggatgatctctccgtggagtgggacgctatgggcgggaaggtgcaggatatcaaggctcgcgagaaagatggcaaggggcggacggcgtctcccatcaactccccagccagaggtactccatctcccaagaggatgccctcaggtcgtgggggacgggaccgcttcaccgctgagtcctacacagttctgggggacacgctgatcgacggcggggagcattactgggaggtgcgctacgagccggacagcaaggcgttcggcgtgggcgtggcctaccgcagcctgggccgcttcgagcaactgggcaagacggccgcctcctggtgcctgcacgtcaacaattggctgcaggtcagcttcacggccaagcacgccaacaaggtcaaggtgctggacgcccccgtgcccgactgcctgggtgtgcactgtgacttccaccaaggcctcctgtccttctacaatgcccgcaccaaacaagtgctgcacactttcaagaccaggttcacacagccgctgctgcctgctttcacggtatggtgtggcagcttccaggtgacgacaggcctgcaggtccccagtgctgtgcgctgcctgcaaaagcgaggcagtgctaccagcagctccaacaccagcctcacctaggcccccaggcacccacccagctggggtgtttttgggggagtcgccgccaagcccaggctgctggagccaggcaccctcctctgtcacttgctgcttggagccttaactccagatgggggggtcaccaagagggagtgggcaccctggcgggccctctccccacctcacctcttaataaaggtcagacactggccaggcaaaaaaaaaaaaaaaaaa

SEQ ID NO: 30670 - DNA, 2308 bp, Homo Sapiens
gcgaggagggggagtgaaaactagaggagggcgaaggaagcgaggcgcgacactgctggggagaggagggcagtgaggagcgaggagcgggcagaggcagctccggcggccgagaggagggagcgcggcgcagagaggaggggcttgcgccccgtagaaatgtcaatcagagcccggagccccgggaatctccgccaatctgttcggacctgacctggctcctcgccgccgccctcgccgccgccgtcgccgccgcggagcagatcaataggcgaacgcggagcacagcgcagcgcgggcggcagcgcggccccaagcccggcccagcccccgatgcgcgccggagcccgcgggcggcgctgagctgggcggcccgggggtcggcccccctctccgtccgtgccccgcgggccaccatgtccttcccccagctgggataccaatacatccgcccgctttacccgtccgagcgcccgggggccgctggcggcagcggcggcagcgcgggggcccggggcggcctgggtgccggagcctcggagctgaacgcctcggggtccctgtccaacgtgctctcgtccgtgtacggggcgccctacgccgcggccgctgcggccgccgccgcccaaggctacggcgccttcctgccctacgccgcggagctgcccatcttcccgcagctgggcgcgcagtatgagctgaaggacagccccggggtgcagcatccggccgcggctgccgcgtttccgcacccgcaccccgccttctacccgtatggccagtaccagttcggggacccgtcccgtcccaagaacgccaccagggagagcaccagcacgctgaaggcctggctcaacgagcaccgcaagaacccctaccccaccaagggcgagaagatcatgctggccatcatcaccaagatgaccctcacccaggtgtccacctggttcgccaacgcgcgccggcgcctcaagaaggagaataagatgacttgggcgcctcgcagccgcactgacgaggagggaaacgcttatgggagcgagcgcgaggaggaagacgaagaggaggacgaggaggactgcaaacgcgagctagagctggaggaggaggagctcgggggggaggaggaggacacggggggcgagggcctggctgacgacgacgaggacgaggagatcgatttggagaacttagacggcgcggccaccgagcctgagctgtccctggctggggcggcgcgcagggatggcgacctaggcctgggacccatttcggactccaaaaatagcgactcggaagatagctctgagggcttagaggaccggccactaccggtcctgagtctggctccagcgccaccaccagtggccgtggcctcgccgtctctgccgtcgccccccgtgagcctggacccctgcgctcccgcaccagcccccgcctccgccctgcagaagcccaagatctggtccctcgcggagactgccacaagcccggacaacccgcgccgctcgcctcccggcgcgggggggtctccaccgggggcagcggtcgcgccttccgccctgcagctctctccggccgccgccgccgccgccgctcacagactggtctcagcgccgctgggcaagttcccggcttggaccaaccggccgtttccaggcccaccgcccggcccccgcctgcacccgctctccctgctgggctctgcccctccgcacctgctgggacttcccggagccgcgggccacccggctgccgccgccgccttcgctcggccagcggagcccgaaggcggaacagatcgctgtagtgccttggaagtggagaaaaagttactcaagacagctttccagcccgtgcccaggcggccccagaaccatctggacgccgccctggtcttatcggctctctcctcatcctagttctttaaaaaaaacaaaaaaacaaaaaaaactttttttaatcgttgtaataattgtataaaaaaaatcgctctgtatagttacaacttgtaagcatgtccgtgtataaatacctaaaagcaaaactaaacaaagaaagtaagaaaaagaaataaaaccagtcctcctcagccctccccaagtcgcttctgtggcaccccgcattcgctgtgaggtttgtttgtccggttgattttggggggtggagtttcagtgagaataaacgtgtctgcctttgtgtgtgtgtatatatacagagaaatgtacatatgtgtgaaccaaattgtacgagaaagtatctatttttggctaaataaatgagctgctgccactttgactataacccg

SEQ ID NO: 30671 - DNA, 7696 bp, Homo Sapiens
atgatgatggcaagaaagcaagatgtccgaattcccacctacaacatcagtgtggtgggattatctgggaccgagaaggaaaagggccagtgtgggattggaaagtcttgtttgtgcaaccgcttcgtgcgcccgagtgctgacgagtttcacttggaccatacctccgtcctcagcaccagtgactttggagggcgagtggtcaataatgaccactttctctactggggagaagttagccgctccctggaggattgtgtggaatgtaagatgcacattgtggagcagactgaatttattgatgatcagacttttcaacctcatcgaagcacggccctgcagccctatatcaagagagctgctgcgaccaagcttgcatcagctgaaaaactcatgtacttttgcactgaccagctggggctggagcaggactttgagcagaaacaaatgccagacggaaagctgctggttgatggttttcttcttggtattgatgttagcaggggcatgaataggaactttgatgaccagctcaagtttgtctccaatctctacaatcagcttgcaaaaacaaaaaagcccatagtggtggtcctgactaagtgtgacgaaggtgttgagcggtacattagagatgcacatacttttgccttaagcaaaaagaacctccaggttgtggagacctcagcgagatccaatgtaaacgtggacttggctttcagcaccttagtgcaactcattgataaaagtcggggaaagacaaaaatcattccttattttgaagctctcaagcagcagagtcagcagatagctacagcaaaagacaagtatgagtggctggtgagtcgcattgtgaaaaaccacaatgagaactggctgagtgtcagccgaaagatgcaggcctctccagaataccaggactatgtctacctggaagggactcagaaagccaagaagctgtttctacagcacatccaccgcctcaagcatgagcatatcgagcgtaggagaaagctgtacctggcagccctgccattagcttttgaagctcttatacctaatctagatgaaatagaccacctaagctgcataaaagccaaaaagctcttagaaaccaagccagaattcttgaagtggtttgttgtgcttgaagagaccccatgggatgccaccagtcacattgacaacatggaaaacgaacggattccctttgatttaatggataccgtccctgcagagcagctatacgaggcccacttagagaagctgaggaacgaaaggaaaagagttgagatgcgaagggcgtttaaagaaaacctggagacttctcctttcataactcccggaaagccttgggaagaggcccgtagttttattatgaatgaggatttctaccagtggctggaggaatctgtatacatggatatttatggcaaacaccaaaagcaaattatagataaagcaaaggaagaatttcaggagttgcttttggaatattcagaattgttttatgaactggagctggatgctaagcccagcaaggagaagatgggtgttattcaggatgttctgggagaggaacagcgatttaaagcattacaaaagctccaagcagagcgtgatgcccttattctgaaacacattcattttgtgtaccacccaacaaaggagacatgccccagctgcccagcttgtgtggacgctaagattgagcacttgattagttctcggtttatccggccgtctgaccggaatcagaaaaattcactctctgaccctaacattgatagaatcaacttggttatattgggcaaagacggccttgcccgagagttggccaatgagattcgagctctttgtacaaatgatgacaagtatgtgatagatggtaaaatgtatgagctttccctgaggccaatagaggggaatgtcaggcttcctgtgaactctttccagacgccaacatttcagccccacggctgtctctgcctttacaattcaaaggaatcgctatcctatgtagtggaaagtatagagaagagtagagagtccacgctgggccggcgggataatcatttagtccatctcccccttacattaattttggttaacaagagaggagacaccagtggagagactctgcatagcttaatacagcaaggtcaacaaattgctagcaaacttcagtgtgtctttctcgaccctgcttctgctggcattggttacggacgcaacattaatgaaaagcaaatcagtcaagttttgaagggactcctggactctaagcgtaacttaaacctggtcagttctactgctagcatcaaagatttggctgatgttgatctgcgaattgttatgtgtctgatgtgtggagatccttttagtgcagatgacatactttttcctgtccttcagtcccaaacctgtaaatcttcccattgtggaagcaacaactctgttttacttgaactaccaatcggactgcacaagaagcggattgaactgtctgttctttcataccattcctcctttagcatcagaaagagccggttggttcatgggtacattgttttttattcagccaaacgtaaggcctctttggctatgttacgtgcctttctttgtgaagtgcaggatattatccctattcagcttgtagcactcactgatggcgctgtagatgtcctggacaatgacttaagtagggaacagctaactgagggggaggagattgctcaagaaattgacggaaggttcacaagcatcccctgtagccaaccccagcataaacttgagatctttcacccattttttaaagatgtggtggaaaaaaagaacataatcgaggctactcatatgtacgataatgctgccgaggcctgtagcaccaccgaagaggtgtttaactccccccgggcaggatcaccgctctgcaactcaaacctgcaggattcagaagaagatatcgagccatcttacagcctgtttcgagaagacacatcactgccttctctgtccaaagaccattctaagctctctatggaactggagggaaatgatgggctgtctttcattatgagcaattttgagagtaaactgaacaacaaagtacctccgccagtcaaaccaaagcctcctgtccattttgaaattacaaagggggatctatcttatttagaccaaggccatagggatggacagaggaagtctgtgtcttctagcccctggctgcctcaggatgggtttgatccttctgactatgctgaacccatggatgctgtggtgaagccaaggaatgaagaagaaaacatatactccgtgccccatgacagcacccaaggcaaaatcatcaccattcggaatatcaacaaagcccagtccaacggcagcgggaatggttctgacagtgaaatggacaccagctctctagagcgagggcgcaaggtttccatcgtgagcaagccagtgctgtacaggacgagatgcacccggctggggcggtttgctagttaccggaccagcttcagcgtggggagtgatgatgagctggggcccatccggaagaaagaggaggatcaggcatcccagggttataaaggggacaatgctgtcattccatacgaaacagacgaagacccgcggaggaggaatattcttcgcagcctaaggaggaacactaagaaaccaaagcccaaaccccggccatccatcacaaaggcaacctgggagagtaactattttggggtgcccttaacaactgtcgtgactccagagaagccgatccccatttttattgaaagatgtattgagtacattgaagccacaggactgagcacggaaggcatctaccgggtcagcgggaacaagtctgagatggagagtctgcagagacagtttgatcaagaccacaacctggacctggcagagaaagactttacggtgaataccgtggctggtgccatgaagagctttttctcagaactgcctgaccccctggtcccgtataacatgcagatcgacttggtggaagcacacaaaatcaacgaccgggagcagaagttgcatgcccttaaggaggtattaaagaaatttccaaaggaaaaccacgaagtcttcaagtatgtcatctctcacctaaacaaggtcagccacaacaacaaggtgaatctcatgaccagcgagaacctctccatctgcttctggcccaccttgatgagacctgatttcagcactatggacgccctcacagccacgcgcacctaccagacaatcattgaactctttatccagcagtgccccttcttcttctacaatcggcccatcaccgagccccccggcgccaggcccagctccccctctgccgtggcttccaccgtccccttcctcacttccacgcctgtcacaagtcagccgtcgcccccacagtcgcctccacccaccccccagtccccaatgcagccactgcttccctcccagcttcaagccgaacacacgctgtgagccaccaagacctggggcgacaggagaaccggtcctctctctgacggggtggcatttggccttgaacaaaaccaagtccactggggacagaggcaggggcaagtggctctccccattaccttctcaagacctcagtgggagcaccagccaatggtaccatcggctgggctgccaggtaccctgggcctggcgctgcagacctgagctggcttggacccatttgaggactgaactaggcaggcaatggctccagtgccctccctctgttccctggaccaccaccccacgtagctgctcacaccagcctccgggtgcctccctctgcttgtacagagcccatggtcgggacagtgccctggcctttgccggggaggaggatgctctgagattcagggtggggctggcaacccctgaagagaacacttcctgttggtctgtctcttcccaccttccatctgcacacacccccaaggtaagggtacagcccggctggcggcctccttgggaacgtgtaggccacggctctgccaccactaggtacctgctgagggcgctggctctgcagatcagaacaacggaggatagctttgtgcctggacccagagagtgtgggactccccgcttcatccccaccgtcccactccacagccttcccgaaacattccctggcaaacaaaggaacactaggagaaaaaatggaaaaacccttccagtaattaaaaaggaagaaaccacagaaagaaaactacagacctcaagattccactctgtgcccgcctctgccgggagggagggaggcacacaggtggagctgaccctcgtctttgtggcagcaaaaccaggatgcctggagctgtggcctgagggcctgctggggtcccactcacccacttaggtctagtcgctagatcccccgttttcccaagaagagggttcgagcccttggtggggacagctggggagatggcagtgcaggctggaacctgggctgccccagaacacagtccattacgatagaaacactaggcaccccccaggcgagagctagtggggtgcagagggccccatgccagacagcccttggggctcgttgcactttaagaaataggatctgtggtgtattccagggggcctgatggacacctttcccgggcgtctgcagctgccctgcccgtgcccgcctgcagtggttggagacgggagtggcccttcggctcccgagctccctctggggacggctggctcactgtctccagttctcaatggccaacgaaggtgcttggaaacacctaaccttgcaagttttaccgccttttgaggaacacaaatcggagaacaaacccagggttcaggcgtgttttctgtgaatgttggatgatgaatttttgtctcttctggtggagctgtgcctggccctgtaggcccagggttggctggaaggtgacatctgtgtttcgttttagctgaggttggcagaaacgttcccaaactcccccagccctggaccccagcagatgaggaaacggccccatttactgaccccgcccccttttcgaggttatgctcacctggtcagctcctcacgtaattgggggtggagggaaagcatggtggtgccctgggccgtccctgtgtgaacgcaggcaaaagcagcccagtccccctcactgcttgagctaacactgccacctcttttgtgtgagcacaaaagccacgtcccaagccacctggcccgattccacagatgtatgtgcggccagtgacttccccaggagtgtggagggggtggtgaggaggagcacctgggctctctacccctctcctcacagaagtacctgaaactaggtctggggcactcccaatgcagcgccttgtcagccaaggtgggcaggcagggactgtggcagcttatgtccaaagggagcccccatgcacaggaagccacagggttcctcttgtttcccccgctaacttcagcctctcatctgctgctccgggctgagggactagaggacatctcggtcgtttgaggggcatggccagtcgtggcaggccggccttcagcgtccggtcagggaagcgtgcagcccaaatgggcacttgcatgggagccacagaggagcgtccctggggattgttgggaccatgctgcccccactcccgcttttgttggggctctaagttctggaaggtgtgtgcacagagggtgctcatgggactcgcatgcagctctcagcactgggtgggagggcgttggcttgtccagaatggggacgtggggcagccacccctgcccagcgagagcgcagacaccgtgtgaggggacagcagcccttggtgcaaagccagagactgatcctggctctgacggctgaagagggaagacccaaggctgggtggcgtggctcgtgaatccacttagaattcttggcttgtgtcgcatactgggtgtcacggcacacatttactctgcattgtccccgtctttcccatcgcctagcgtttggggaggaacagggagagagcttcggggcgtctgtctccgtgctctcctgcctccaccgccttggttttgcttcctgctggaggcagggcacctgctgcgacccagattcttctgcaggatgtgtctgtctttgtcacggtggacagagggtgacatcataggagcagctcgctggccagaaggggatgggggcatccctgtgcctcactcagctcctgctgctcttagggaaaggaggcctgggtcaagccagcatccccttggtaaagacccccgcaggccaccaggcattctggacacgcacacacacacacacacacacacacacacacaaaacttcacagcaggccagctgcagtgacttgtcatcaagagtcacctcagctgcgcccccctcccatcctttcctatgagaagccactgctttgggggcgccggctagaaaaagtagggtgcggtggccaggagggcccctgccgcgcggggggctgggtctggttgagtcgctgctttcccgagggcagcgcagggatccggggaagctgcggcagggagcgggcgccggcttcgtggctctgaggtgtaacgggggtgggctccctccctcggaggacatcgtctgtgtccaggtcagaaagtggcccaggaagggggcagtttctgtcgcgggtccggtgggggcgcggccgc

SEQ ID NO: 30672 - DNA, 2930 bp, Homo Sapiens
ggcagtcaggcctccccgctctgtgctacctgcggcccggctctcctccgcgcccccactcgcgctgcgatgacgcgctcactgttcaagggaaacttttggagtgcagacatcctcagcaccatcggctatgacaacattatccaacatctgaacaatggccgcaagaactgcaaagagtttgaagactttctaaaagaaagggcagcaattgaagagaggtatggcaaagatctgctcaacctctctaggaagaagccgtgtggacagtctgaaatcaacaccctgaagcgggcccttgaagtcttcaagcagcaagtagacaatgtggcacaatgtcacattcagcttgcacagagtttaagagaagaggccaggaagatggaagaattcagggaaaagcaaaaactacaacgaaaaaagacagagctcataatggatgctatccataaacaaaagagcttacaattcaagaaaaccatggatgcaaagaagaactatgagcagaaatgccgggacaaagatgaggcagaacaggccgtcagccggagtgccaacctggtgaacccgaagcaacaagaaaagctttttgtgaaactggcaacttcaaagaccgcagtagaggactcagacaaagcatacatgctgcacatcggcaccctggataaggtccgagaagagtggcagagtgagcacatcaaggcctgcgaggcatttgaggctcaagaatgtgaacgaataaacttcttccggaatgcattgtggttacatgtgaatcagctgtcacaacaatgtgtcaccagtgatgaacacccatcatgtatgagaatttctactcctcccagaagaatgcagtcccagcaggaaaggctacagggcctaacttggcaaggagaggacccctcccaattcctaaaagctcaccagatgatcccaattactctttggttgatgactacagtttgctctatcagtaaaatcaatgaaaccagagctttttccggctagtgcttctgtgatatggaaagggcacccagagcagcaggacctatagccacgttatgtcagcaatgaagactttgaagtgaacccttgctataattttttagagatttaaaatttatggtagacatttaggacaacataagcaagtagagttctgcagttttttgaagtttacaaattgccccattctgaagaattattctttcccagttactcaggttatgaatgaattaggttttcaacatgggaagcatgaaatccacttctggatttggagcatccacttgaggagcagaggtggcagcagaggattctgagccaccaactgcagtagtggctcctttggctttgggcagcctggctgtggagtttccacggcgacacacagcctcagtggtgcaagatttaaaattaccttcctttttggctggaagacttagaagccgcctgatcatactttctcattttacagatgaggaaataaagcctacaagtgtgaaattaatttccttacagttttcctagctgatgagggacagaaccagaactagagcctgagcccaacccacatcactattcttctaacccttcctgaagttgtgatgctcatgctgaaatttaagatgccaaatatttttgccagcactttttcagttgggagaatcaccagggtttaaatgtcagatttatttttatgtggatccctgtgtatgctgaactacagagcatgatgtttaatctaatttaaggagccactgattgtaaaacatgccattattttatgttgcactaagaaggtggggtcgaggagttgccaataaacttgggacagactattgatggccaagcccatctgaatttaagatgctaaagtatgaaaaaaatacatcttagaatcaatgaaataccatattttgattccattcctcaagataattttagagttataaaaccagtcctcaattttgggtcttcacagagaatctttcccttgctagaccccagaattttaaatgcatccgtcttacactttcacaaatatttgggttttcctttttcactcacaaacagcagggaggtcatgtactttttgtacaacacctgtgcactatgagaaaatggtaccttttagttattgacaagttaaaatagcactctcagtttttcagtattacagagagcaaatagtttcctctcctgctctgtgcagtagcttttccagaactatggacaaattgatcagaagaagattgattatttcctcatctttttttcttttttttgagacagagtctctctctgtcccccaggctgaagtgcagcggcatgatctcagctcactgcaacctctgcctcccgggttcaagtgattctcctgcctcagcctcctgagtagctgggattacaggcacccaccaccacacctggctaattttttgtatttttagtagagacagggttttaccatgttggtcaggctggtctcaaactcctgacctcaggtgatccacctgcctcggcctcccaaagtgctgggattacaggcgtgagccactgcgcccggcctatttccccacctttcgtgtaaggtgctactgaacatgacagcttcttgtcatgacaggaaacttgcatcagttggatatccttttgagaaactgaattttgcaaagggccaaatttccccaaactgaacgggctcaggaaatgttcctttacactcagaacattctattttaagtatattatttattgttggcagttcctcagggatttcccttttctctgtattggtcagtgtagttgatgtaaaaccgttttgtggatggaaaatatttttattttattgctcttttagtttggtaggttaaataaaggttcttggtaatttgggaaaaaaaaaaaaaaaaaaaaaaaaaaaaaaa

SEQ ID NO: 30673 - DNA, 2242 bp, Homo Sapiens
cggcgtcggccttccactgtggggttaaatctcatcccgcggctctcctcctgtcggtcctgcagttcttttgtccccgggtagagggatcttctgcagaaatagcgctggaagctagagtgaggcctgagtactgccttggcctaggatggctagagaattaagtgaaagcacagccctggatgcccagtctacagaagaccagatggagcttctggtcataaaggtggaggaagaagaagccggttttcccagtagcccagatctgggttctgagggctcccgcgagcgcttccgaggcttccgctacccggaggctgcaggcccccgcgaggcgctgagtcggctccgagagctctgccgacagtggctgcagcctgagatgcacagcaaggagcagatcctggagctgctggtgctggagcagttcctgaccatcctgccggggaatctgcagagctgggtgcgggagcagcatccagagagcggggaggaggtggtggtgctattggagtatttggagaggcagctggatgagccggcgccgcaggtttcaggtgttgaccaggggcaagaactgctctgttgcaagatggcactattgacaccagccccagggtcacaaagtagccaatttcagctaatgaaggctctgctcaagcatgaatctgtgggatcccagcctttacaagatagagttctccaggtccccatgcttgcccatggaggatgctgcagagaagatgcagtggtagcttctaggcttactccagagtcccaggggttgttgaaagtggaagatgtggccctgaccctcacccctgaatggacacagcaggattcatctcaggggaatctctgtagagatgaaaagcaggagaaccatggcagcctggtctccctgggtgatgaaaaacagactaagagcagggacttgcctccagctgaggagcttccagaaaaggagcatgggaagatatcgtgccacctgagagaagacattgcccagattcctacatgtgcagaagctggtgaacaggagggcaggctacaaagaaagcagaaaaatgccacaggagggaggcggcacatctgccatgaatgtggaaagagttttgctcaaagctcaggcctgagtaaacacaggagaatccacactggtgagaaaccctacgaatgtgaagagtgtggcaaagccttcattgggagctctgcccttgtcattcatcagagagtccacactggtgagaagccatatgagtgtgaagaatgtggtaaggccttcagtcatagctcagaccttatcaagcatcagagaacccacactggggagaagccctatgagtgtgatgactgtgggaagaccttcagccagagctgcagcctccttgaacatcacagaatccacactggggagaagccgtatcagtgcagtatgtgtggcaaagcctttaggcgaagttcacatctcctgagacatcagaggatccatactggggataaaaatgttcaggaacctgagcagggagaggcctggaaaagtaggatggaaagccagttggaaaatgttgaaactcccatgtcttataaatgtaatgagtgtgaaagaagtttcactcagaatacaggcctcattgaacatcaaaaaatccacactggtgagaaaccctatcagtgtaatgcgtgtggaaaaggcttcacccgaatttcataccttgttcaacatcagagaagccatgtagggaaaaacatcctatcacagtgacccatgccatacatgccagttggtgctcatttgtcactgatctgaagccactccccctggagtctcaactatagaaattgtgggctgggctttatttaccactacacattatcaggtgttagaaaatgtagactgggttagacaaattatcttctaagttctagaaggggtttgtaatcaaaacatatttgataggaggctacgggagagttgtctagaagaggtaagacctgaaactgtttgttctctcccactagaattaaatggatgtttagactggctacttgccctaaaccagcacttggtgatgtctactgggtggatggttgtgatttgggggctgcttctctgaccattctttttgactgtaatgaatcctccacagttggtcagattcataaagtcttatatccccctctgtgccttttctgcaggtgctaataaatgtttattgaatgtaaaaaaaaaaaaaaaaaa

SEQ ID NO: 30674 - DNA, 1970 bp, Homo Sapiens
cgggagtcttcggggagctatgctgagaccgggtggtgcggaggaagctgcgcagctcccgcttcggcgcgccagcgccccggtccctgtgccgtcgcccgcggcccccgacggctcccgggcttcggcccgcctaggtcttgcctgccttctgctcctgctgctgctgacgctgccggcccgcgtagacacgtcctggtggtacattggggcactgggggcacgagtgatctgtgacaatatccctggtttggtgagccggcagcggcagctgtgccagcgttacccagacatcatgcgttcagtgggcgagggtgcccgagaatggatccgagagtgtcagcaccaattccgccaccaccgctggaactgtaccaccctggaccgggaccacaccgtctttggccgtgtcatgctcagaagtagccgagaggcagcttttgtatatgccatctcatcagcaggggtagtccacgctattactcgcgcctgtagccagggtgaactgagtgtgtgcagctgtgacccctacacccgtggccgacaccatgaccagcgtggggactttgactggggtggctgcagtgacaacatccactacggtgtccgttttgccaaggccttcgtggatgccaaggagaagaggcttaaggatgcccgggccctcatgaacttacataataaccgctgtggtcgcacggctgtgcggcggtttctgaagctggagtgtaagtgccatggcgtgagtggttcctgtactctgcgcacctgctggcgtgcactctcagatttccgccgcacaggtgattacctgcggcgacgctatgatggggctgtgcaggtgatggccacccaagatggtgccaacttcaccgcagcccgccaaggctatcgccgtgccacccggactgatcttgtctactttgacaactctccagattactgtgtcttggacaaggctgcaggttccctaggcactgcaggccgtgtctgcagcaagacatcaaaaggaacagacggttgtgaaatcatgtgctgtggccgagggtacgacacaactcgagtcacccgtgttacccagtgtgagtgcaaattccactggtgctgtgctgtacggtgcaaggaatgcagaaatactgtggacgtccatacttgcaaagcccccaagaaggcagagtggctggaccagacctgaacacacagatacctcactcatccctccaattcaagcctctcaactcaaaagcacaagatccttgcatgcacaccttcctccaccctccaccctgggctgctaccgcttctatttaaggatgtagagagtaatccatagggaccatggtgtcctggctggttccttagccctgggaaggagttgtcaggggatataagaaactgtgcaagctccctgatttcccgctctggagatttgaagggagagtagaagagatagggggtctttagagtgaaatgagttgcactaaagtacgtagttgaggctccttttttctttcctttgcaccagcttcccgacacttcttggtgtgcaagaggaagggtacctgtagagagcttctttttgtttctacctggccaaagttagatgggacaaagatgaatggcatgtcccttctctgaagtccgtttgagcagaactacctggtaccccgaaagaaaaatcttaggctaccacattctattattgagagcctgagatgttagccatagtggacaaggttccattcacatgctcatatgtttataaactgtgttttgtagaagaaaaagaatcataacaatacaaacacacattcattctctctttttctctctaccattctcaacctgtattggacagcactgcctcttttgcttacttgctgcctgttcaaactgaggtggaatgcagtggttcccatgcttaacagatcattaaaacaccctagaacactcctaggatagattaatgt

SEQ ID NO: 30675 - DNA, 2505 bp, Homo Sapiens
ggggacgcggagctgagaggctccgggctagctaggtgtaggggtggacgggtcccaggaccctggtgagggttctctacttggccttcggtgggggtcaagacgcaggcacctacgccaaaggggagcaaagccgggctcggcccgaggcccccaggacctccatctcccaatgttggaggaatccgacacgtgacggtctgtccgccgtctcagactagaggagcgctgtaaacgccatggctcccaagaagctgtcctgccttcgttccctgctgctgccgctcagcctgacgctactgctgccccaggcagacactcggtcgttcgtagtggataggggtcatgaccggtttctcctagacggggccccgttccgctatgtgtctggcagcctgcactactttcgggtaccgcgggtgctttgggccgaccggcttttgaagatgcgatggagcggcctcaacgccatacagttttatgtgccctggaactaccacgagccacagcctggggtctataactttaatggcagccgggacctcattgcctttctgaatgaggcagctctagcgaacctgttggtcatactgagaccaggaccttacatctgtgcagagtgggagatggggggtctcccatcctggttgcttcgaaaacctgaaattcatctaagaacctcagatccagacttccttgccgcagtggactcctggttcaaggtcttgctgcccaagatatatccatggctttatcacaatgggggcaacatcattagcattcaggtggagaatgaatatggtagctacagagcctgtgacttcagctacatgaggcacttggctgggctcttccgtgcactgctaggagaaaagatcttgctcttcaccacagatgggcctgaaggactcaagtgtggctccctccggggactctataccactgtagattttggcccagctgacaacatgaccaaaatctttaccctgcttcggaagtatgaaccccatgggccattggtaaactctgagtactacacaggctggctggattactggggccagaatcactccacacggtctgtgtcagctgtaaccaaaggactagagaacatgctcaagttgggagccagtgtgaacatgtacatgttccatggaggtaccaactttggatattggaatggtgccgataagaagggacgcttccttccgattactaccagctatgactatgatgcacctatatctgaagcaggggaccccacacctaagctttttgctcttcgagatgtcatcagcaagttccaggaagttcctttgggacctttacctcccccgagccccaagatgatgcttggacctgtgactctgcacctggttgggcatttactggctttcctagacttgctttgcccccgtgggcccattcattcaatcttgccaatgacctttgaggctgtcaagcaggaccatggcttcatgttgtaccgaacctatatgacccataccatttttgagccaacaccattctgggtgccaaataatggagtccatgaccgtgcctatgtgatggtggatggggtgttccagggtgttgtggagcgaaatatgagagacaaactatttttgacggggaaactggggtccaaactggatatcttggtggagaacatggggaggctcagctttgggtctaacagcagtgacttcaagggcctgttgaagccaccaattctggggcaaacaatccttacccagtggatgatgttccctctgaaaattgataaccttgtgaagtggtggtttcccctccagttgccaaaatggccatatcctcaagctccttctggccccacattctactccaaaacatttccaattttaggctcagttggggacacatttctatatctacctggatggaccaagggccaagtctggatcaatgggtttaacttgggccggtactggacaaagcaggggccacaacagaccctctacgtgccaagattcctgctgtttcctaggggagccctcaacaaaattacattgctggaactagaagatgtacctctccagccccaagtccaatttttggataagcctatcctcaatagcactagtactttgcacaggacacatatcaattccctttcagctgatacactgagtgcctctgaaccaatggagttaagtgggcactgaaaggtaggccgggcatggtggctcatgcctgtaatcccagcactttgggaggctgagacgggtggattacctgaggtcaggacttcaagaccagcctggccaacatggtgaaaccccgtctccactaaaaatacaaaaattagccgggcgtgatggtgggcacctctaatcccagctacttgggaggctgagggcaggagaattgcttgaatccaggaggcagaggttgcagtgagtggaggttgtaccactgcactccagcctggctgacagtgagacactccatctcaaaaaaaaaaaa

SEQ ID NO: 30676 - DNA, 2448 bp, Homo Sapiens; identical to SEQ ID NO: 25360

SEQ ID NO: 30677 - DNA, 1164 bp, Homo Sapiens
ctgccctagtggcctatgtcccttgctcggggccatggagacactgcggccagtacggcggcgcctctgtctgaagaaggggaagtgacctccggcctccaggctctggccgtggaggataccggaggcccctctgcctcggccggtaaggccgaggacgagggggaaggaggccgagaggagaccgagcgtgaggggtccgggggcgaggaggcgcagggagaagtccccagcgctgggggagaagagcctgccgaggaggactccgaggactggtgcgtgccctgcagcgacgaggaggtggagctgcctgcggatgggcagccctggatgcccccgccctccgaaatccagcggctctatgaactgctggctgcccacggtactctggagctgcaagccgagatcctgccccgccggcctcccacgccggaggcccagagcgaagaggagagatccgatgaggagccggaggccaaagaagaggaagaggaaaaaccacacatgcccacggaatttgattttgatgatgagccagtgacaccaaaggactccctgattgaccggagacgcaccccaggaagctcagcccggagccagaaacgggaggcccgcctggacaaggtgctgtcggacatgaagagacacaagaagctggaggagcagatccttcgtaccgggagggacctcttcagcctggactcggaggaccccagccccgccagccccccactccgatcctccgggagtagtctcttccctcggcagcggaaatactgattcccactgctcctgcctctagggtgcagtgtccgtacctgctggagcctgggccctccttccccagcccagacattgagaaacttgggaagaagagagaaacctcaagctcccaaacagcacgttgcgggaaagaggaagagagagtgtgagtgtgtgtgtgtgttttttctattgaacacctgtagagtgtgtgtgtgtgttttctattgaacacctatagagagagtgtgtgtgttttctattgaacatctatatagagagagtgtgtgagtgtgtgttttctattgaacacctattcagagacctggactgaattttctgagtctgaaataaaagatgcagagctatcatctcttaaaaaaaaaaaaaaaaaaaaaaaaa

SEQ ID NO: 30678 - DNA, 4088 bp, Homo Sapiens
cgaccaggccgggcacctccgagcgcaaggacagcgcgaggtccgcgcagcccagcgcagccatggagccccgcgcggactcactctatgatgtccctgtcggtgcggccgcagcgccgtctgctcagcgcccgggtcaataggagccagtccttcgcaggcgtcctcggcagccacgagcgggggcccaggagtttcccggtcttcagcccgccggggcccccacggaagccccccgcgctctcccgagtgtccaggatgttttccgtggctcacccagccgccaaggtgccgcagcccgagcggctggacctggtgtacacggcgctgaagcggggcctgacggcctacttggaagtgcaccagcaggagcaagagaaactccaggggcagataagggagtccaagaggaattcccgcttgggcttcctgtatgatctggacaagcaagtcaagtccattgaacgcttcctgcgacgactggagttccatgccagcaagatcgatgagctgtatgaggcatactgtgtccagcggcgtctccgggatggtgcctacaacatggtccgtgcctacaccactgggtccccgggaagccgagaggcccgggacagcctggcagaggccactcgggggcatcgcgagtacacggagagcatgtgtctgctggagagcgagctggaggcacagctgggcgagtttcatctccgaatgaaagggctggctggcttcgccaggctgtgtgtaggcgatcagtatgagatctgcatgaaatatgggcgtcagcgctggaaactacggggccgaattgagggtagtggaaagcaggtgtgggacagtgaagaaaccatctttctccctctactcacggaatttctgtctattaaggtgacagaactgaagggcctggccaaccatgtggttgtgggcagtgtctcctgtgagaccaaggacctgtttgccgccctgccccaggttgtggctgtggatatcaatgaccttggtaccatcaagctcagcctggaagtcacatggagccccttcgacaaggatgaccagccctcagctgcttcttctgtcaacaaggcctccacagtcaccaagcgcttctccacctatagccagagcccaccggacacaccctcacttcgggaacaggctttctataacatgctgcgacggcaggaggagctggagaatgggacagcatggtccctgtcatctgaatcttcagacgactcatccagcccacagctctcaggcactgcccgccactcaccagcccctaggcccctggtgcagcagcccgagccccttcccatccaagttgccttccgcaggcctgagacccccagctctgggcccttggatgaggagggggccgtggccccagtcctggcaaatgggcatgcaccctacagtcggactctgagccacatcagtgaggctagtgtagatgctgccttggctgaggcttcagtggaggccgttggcccagaaagcctagcctggggacctagcccacctacacacccagctcccacccatggagagcaccccagtcctgttcctcctgccctggaccctggccactctgccacaagctctaccctcggtacaacaggctctgtccccacatctacagaccctgccccatctgcacacctagactcagttcataagtccacagactctggcccttcagaactgccaggccccactcacaccactacaggctctacctatagtgccattaccactacccacagtgctccaagccccctcactcacactactacaggctccacccacaagcccataatctctacccttactactacaggccctaccctcaatatcataggcccagtccagactaccacaagccccacccacactatgccaagccctacccataccacagcaagccccactcatacttccacaagccccacccatacccccacaagtcccacccacaaaaccagtatgtcacctcccaccactacaagtcctacccccagtggtatgggcctagtccagactgccacaagtcccacccatcctaccacaagccccacccatcccaccacaagccccatccttataaatgtaagcccttccacttctctagaacttgctaccctctccagcccctccaaacactcagaccccaccctcccaggcactgactcccttccctgtagtcccccagtctccaattcctacactcaggcagaccctatggcccccagaactccccacccaagtcctgcccattccagtaggaaacccctcacaagccctgccccagatccctcagagtctacggttcagagtctaagccccactccctcacccccaacccctgcaccccagcattcagacctttgcctggccatggctgtccagaccccagtcccaacggcagccggagggtctggggacaggagcctggaggaggcactgggggccctaatggctgccctggatgactaccgtggccagtttcctgagctgcagggcctggagcaggaggtgacccgcctagaaagtctgctcatgcagagacaaggtctgactcgcagccgggcctccagtctcagcatcactgtggagcatgccttggagagcttcagcttcctcaatgaagacgaagatgaagacaatgatgttcctggggacaggcctccaagcagcccggaggctggggctgaggacagcatagactcacccagtgcccgccccctcagcacggggtgtccagctctggatgctgccttggtccggcacctgtaccactgcagtcgcctcctgctgaaactgggcacatttgggcccctgcgctgccaggaggcatgggccctggagcggctgctgcgggaagcccgagtactggaggcagtatgcgagttcagcaggcggtgggagatcccggccagctctgcccaggaagtggtgcagttctcggcctctcggcctggcttcctgaccttctgggaccagtgcacagagagactcagctgcttcctctgcccggtggagcgggtgcttctcaccttctgcaaccagtatggtgcccgcctctccctgcgccagccaggcttggctgaggctgtgtgtgtgaagttcctggaggatgccctggggcagaagctgcccagaaggccccagccagggcctggagagcagctcacagtcttccagttctggagttttgtggaaaccttggacagccccaccatggaggcctacgtgactgagaccgctgaggaggtgctactggtgcggaatctgaactcggatgatcaggctgttgtgctgaaggccctgagattggcgcccgaggggcgtctgcgaagggacgggctgcgggccctcagctccctgctcgtccatggcaacaacaaggtcatggctgctgtcagcacccagctccggagcctgtcactgggccctaccttccgggagagggccctcctgtgcttcctggaccagctggaggatgaggacgtgcagactcgagtggctggctgcctggccctaggctgcatcaaggctcccgagggcattgagcccctggtgtacctctgccaaactgacacagaagctgtgagggaagctgcccggcaaagcctacagcagtgtggagaagagggacagtctgcccatcgacggctggaggagtccctggacgccctgccccgcatctttgggcctggcagcatggccagcacagcattctaaactattcacccatgggttcctggtgcccctttccccccactttcagggctcaccaggcactggcagggagggtaagggctggctccagatacccctcccccacagattcctagcaatgaaaatctaatatattcttctgttgcccctggggttggagagtcagtgcctgcagtcaagtgcctcccagcctcggctcagcacatcccttgccacaaatcagtgtctggggcttggccaccctgccgctgcccagccacatcccttggttttgtattttatttacagagttttacagaaaataaaaaagcaaaatgtctttcctaaaaaaaaaaaaaaaaaaa

SEQ ID NO: 30679 - DNA, 5226 bp, Homo Sapiens
aaaatacttgccctttggaaaaaaatcattctggcgtccacattcagactggtttagaggagagtaatactgaagacatgcccccccgaatcaaggtagcaattgcggagatgaaaagaaatgagtccaaaagatgcttaaatgtgaccattgaacaggatttgactcattggatatgaggccatggagcagtgtctggctaggtggatggatgttggtgctgtttagttaaataggaaactggaagagaagcaggcttgcaagaatggtaatattttggacgtgtaacttgtctggcaagatgttgaagaggtaaaggaggcagcacagcatcatgggccttggaggcagaagccgctttgatttactcagaacaccaaatcagtctccattttcttgactcagactacacccaagagattgcttccttccctgtgcttcctggccacttgctactctagctaggaagatctgcctcccttagctgaagtctaagatgtgtagcttattgatgcctctcctcttcttgttctgctgttgctgaatataatggggatgccagggcagacataccattcaacttgaatcttccttacccactttgtatagtcttacatgtcattgataccttgttttctggtacgcctaaaaggagtagaacttcaagtggtatttaaaagctttaagaaaagtcaaatttttacttttttcttcccatctgaggcatggatttattttctttttaaagaaatccaaatttttaaaagaagggatcttatttttaaaacgaagatcgataatatctactatgtactaaatgtcattctttaaaagttgttccctcataatttagtaaattacttccttttttaaaaaaaggaaagaaagagtgtttgtcttacaggctaacatcacaaacaataagtttcttctcatccatctccatttataaactagtgtgactgtcttctgagcacagtattaaacctggacagggagagggagggtgttagagaatgagagggaaagagagagaatacctacatataaggtgaccctaaagaaaagcctttcacccttcggaagatcttttcattttcatttttcttttttcaaacaccaacttgtaccagagggaagatctttttttaaaagcgtttcactaaaatttgtaaggaaataatgagctagataaaatattacagtgtttatttaatgaatttactcatatttaaaataatatctaaaaagagtaatttaggaatattgaggcaatgagacttgaaggttataaatagtggcagtgagaaaaggaatattatagataagctgttgaaaagaaaagatgctaagttttctagtgcttccttctgtttccaagggattatagaaatcggagtttgtttgacctgtttcacaggcatctcctttgtggactcattgtgtctcttccttaggctaatagtcaccatttatcatggacggttgtcatgagtgttgaagcacacttaacctgcttcgtcagagggtacttggcatcaccggtgcacagctggtgtcctagcaggagactaactagctgacacaccgtgctttgttagcctaataatcttatttgttaaaacttgccatttgttggatttttctattttaccccattataaacttcttattgagatcagatgacttctgaatagcatttgctgtatttttccaaggtaaagaatatctttttcagatttttctttctttctttaatgtcagaaatagaagaaatcttttctaccgaccttgtgccaggagatgtcatggtcattccattaaatgggacaataatgccttgtgatgctgtgcttattaatggtacctgcattgtaaacgaaagcatgttaacaggagaaagtgttccagtgacaaagactaatttgccaaatccttcagtggatgtgaaaggaataggagatcaattatataatccggaaacacataaacgacatactttgttttgtgggacaactgttattcagactcgtttctacactggagaactcgtcaaagccatagttgttagaacaggatttagtacttccaaaggacagcttgttcgttccatattgtatcccaaaccaactgattttaaactctacagagatgcctacttgtttctactatgtcttgtggcagttgctggcattgggtttatctacactattattaatagcattttaaatgaggtacaagttggggtcataattatcgagtctcttgatattatcacaattactgtgccccctgcacttcctgctgcaatgactgctggtattgtgtatgctcagagaagactgaaaaaaatcggtattttctgtatcagtcctcaaagaataaatatttgtggacagctcaatcttgtttgctttgacaagactggaactctaactgaagatggtttagatctttgggggattcaacgagtggaaaatgcacgatttctttcaccagaagaaaatgtgtgcaatgagatgttggtaaaatcccagtttgttgcttgtatggctacttgtcattcacttacaaaaattgaaggagtgctctctggtgatccacttgatctgaaaatgtttgaggctattggatggattctggaagaagcaactgaagaagaaacagcacttcataatcgaattatgcccacagtggttcgtcctcccaaacaactgcttcctgaatctacccctgcaggaaaccaagaaatggagctgtttgaacttccagctacttatgagataggaattgttcgccagttcccattttcttctgctttgcaacgtatgagtgtggttgccagggtgctgggggataggaaaatggacgcctacatgaaaggagcgcccgaggccattgccggtctctgtaaacctgaaacagttcctgtcgattttcaaaacgttttggaagacttcactaaacagggcttccgtgtgattgctcttgcacacagaaaattggagtcaaaactgacatggcataaagtacagaatattagcagagatgcaattgagaacaacatggattttatgggattaattataatgcagaacaaattaaagcaagaaccccctgcagtacttgaagatttgcataaagccaacattcgcaccgtcatggtcacaggtgacagtatgttgactgctgtctctgtggccagagattgtggaatgattctacctcaggataaagtgattattgctgaagcattacctccaaaggatgggaaagttgccaaaataaattggcattatgcagactccctcacgcagtgcagtcatccatcagcaattgacccagaggctattccggttaaattggtccatgatagcttagaggatcttcaaatgactcgttatcattttgcaatgaatggaaaatcattctcagtgatactggagcattttcaagaccttgttcctaagttgatgttgcatggcaccgtgtttgcccgtatggcacctgatcagaagacacagttgatagaagcattgcaaaatgttgattattttgttgggatgtgtggtgatggcgcaaatgattgtggtgctttgaagagggcacacggaggcatttccttatcggagctcgaagcttcagtggcatctccctttacctctaagactcctagtatttcctgtgtgccaaaccttatcagggaaggccgtgctgctttaataacttcctcctgtgaattagcactattttctatagttacttattctctggatcattttataatttccatattaatttcaagtatgctcgtgttattcttcagtgatttccacaattgtgcattttattctttggtttaagtactgaagcatataatgaaagtaattgctaagtagcagcttaaaaattcaattatccgattgtatttaacatctttaagagcatgatcataaagagctatttttgacaccccccccccacttttttaacatttagagttagtaagggttttatatctcttctgtccatattgttttcaaaggaatgaggtgtttaggtggctggaaaagcatttgtaggaagttagatttgaatatagacaaggtgggttattcacgttgagaatgttatttgaagaatgcctgtgaagccaggtgtgggttctactcagtgccatagatagactgagtcttctctcgtaggttaccattacatagtaattttgattctgaatttcacattaaattatttgagtttatacagacctaaattttaaaatctgtacatatattattttgatgtattaagatgaatattgctgatttaaattttatttatgcacatacttaaaggacagaaatgtctgggaaagtaattgttaaataatgatatgtaactttttaactttttaaataaataacaagatttttaatgtgtgtctccctcagggttgtttaaagttttttttctccctcaagtataaatagtggtaactatatgttttgtatcttctagcaccaactgctgtaaagcaatgctgcaaataatgcttgaatacaagtggctaagccaacaacagaataaatacttttatagtagttttataatcctgaaattcgaaagctttcccaattgcacttgcatctaaacaaaactgttgcagtttttactctatttattttgttccccatgtttatgaaagtcctgcacagtttcaaaggcatggtaaataatatatcaatgtttatgtagtctgttacagaaacagctatagataacattatccagtgaagagcaaaattcaagctttagaaaatattcatgcatgcaattttgacatatctaaaaataggtttttgtatatttatggtgggaggtggttgggaacttttaacaaaatggggtgttaatttttgtacagtctgtgggcatttacacatttttaatgtattaaaatttggtaattatgtgtacattaaattaataaaagttacttctagttatgatttgtgaattccctaagaccttggatttttttaagtaactttatatcagaaatgatactgcatctttatatttttaaaattgtattgctgctcaagaatggtaccctcttgtcaaaaaggcatacattcataattgtacattcagcattgtaaataatcttatgaaaccttttttgattgaagctattcaaaataaaaattttaatgaatgaaataa

SEQ ID NO: 30680 - DNA, 3253 bp, Homo Sapiens
gagggaagatggcacctgccggctgctgctgctgctgctgcttctggggcggcgctgtggccgccgcgggcgccgcccggcgtgtcctgctgctgctgctgctgggggtcctgtccgctgggctgcggccaggcgccctggccaccgagcactactcgccgctctccctgctcaagcaggagctgcagcaccggcagcagcaggaggccccggcgggcggcggcggctgcagcccgcagtccggggactggggggaccagtactctgccgagtgcggcgagtcatcctttttgaacttccatgactcagactgcgaacccaagggatcatcaccctgtgactccttgctttccctcaacactgagaagattctgagccaggccaagtctattgcagaacagaagagattcccgtttgccactgataatgacagcacaaatgaagagttagctattgcttatgtcttgattggcagtggtctgtatgatgaagcaatacggcatttttcaacaatgcttcaggaggagcctgatctggttagtgcaatttatggccgagggatagcctatggaaagaagggactacatgacattaagaatgctgagcttgctctgttcgaactgagccgagtaattaccttggaaccagatcgtccagaggtatttgagcagcgagcagaaattctgtcccctctgggacgaattaatgaagcagtgaatgacctcactaaagctatccaactgcagccctcagcacggctgtacagacatcggggaaccctgtacttcatatcagaggactatgcaacagcccatgaagactttcagcagtccttagaactgaacaaaaaccagcctatagctatgctatacaaaggtttaactttctttcacagaggacttctgaaggaagctattgaatccttcaaagaagctttgaagcagaaagttgactttattgatgcatataaaagtctagggcaggcatatagagaactgggcaattttgaagcagccactgagagctttcaaaaggcactgttgctcaaccaaaatcatgtgcaaaccctccagctccggggaatgatgctctaccaccacggcagcttacaggaagcccttaagaactttaagcggtgtctgcagctagagccatataatgaagtgtgccagtatatgaaagggctcagccatgttgccatgggacagttttatgaagggataaaagcacaaacaaaagttatgctgaatgatcctctcccaggccagaaggctagccctgagtatcttaaagtaaagtatctccgagagtactctcgacatcttcatgcacaccttgataccccccttacggaatataacattgatgtggatctgcctggaagctttaaggaccactgggctaaaaatttgcctttcctcatagaagactacgaagagcagccagggttgcaaccccacataaaagatgtgttacatcagaattttgagagttataagcctgaagtacaggagctgatttgtgtggctgatcgtttgggatccctgatgcaatatgaaacacctggtttcctgccaaacaagagaatacacagagctatgggtttggccgcattggaggtcatgcaagccgtgcagcgtacatggaccaactcgaaagttcgaatgaatgggaagacacggttgatgcagtggagagacatgtttgacattgcagttaaatggagaaggattgctgacccagaccagcccgtgctgtggttagatcaaatgccagcacgaagtcttagcagaggttttaacaaccacattaatttaatcaggggtcaggtgatcaacatgagatacctagaatattttgagaaaatacttcattttattaaagacagaattcttgtttatcatggagctaataatcctaaaggattgctggaagttcgggaagccctggaaaaggtacacaaagtagaagaccttcttccgattatgaagcagtttaatactaaaacgaaggatgggttcaccgtgaacacaaaagttcccagccttaaagaccaagggaaggaatatgatggattcacaatcacgattacaggagacaaagttggcaatatattattttctgtggaaactcaaaccacggaagaaaggacacaattatatcatgctgaaatagatgcactttataaagatttgacagcaaaaggaaaagtattgattctttcatcagaatttggggaggctgatgctgtctgcaacttaatcttatccttagtttattacttttataatttaatgccactctctcgaggatccagtgtaattgcttactcggtcatcgtgggagcactgatggcaagtggaaaagaagtagcaggaaaaattcccaaagggaagttagtcgactttgaagctatgacagcccctggttcagaggcctttagcaaagtcgccaaaagctggatgaacttgaaaagtatttcaccttcttataagactcttccatcagtttcagaaacgtttccaacgttaagatcgatgattgaggtgctaaacacagactcttctccacgttgtcttaagaaactctagttctgctgctgtatttatacaagtaaagggccggacctcttgcttcttaagttattttttaaaacatggaattataaagaaattaggtcctctattacttttgataccaatttttataggaattgaatacttgaaatcattttctttacttttctgaaccataatgaaaatcatgaaagaggctttcggggggaaaaagctacttgacttggagggaaagcgtatgtattagccggcagcctgttggttcccacttataaagtcatataactccttccttacagtaaaaaaaattttcctcaacaactaaaatataatactgaagatgaacaaaaacaaaaccaaataggagtgtttgtattcctttagagatctggatatttttcaaagacttgctttttacgcacattgtgatagagcatcttttgttgactcacgtaacctccatgtgtgggtcctttgttttattagaaccatggaagaaggttcctgggccatcagtatgtgttgcagagctcacagccaggaacacttattttgaacaatgcagacagtacttgccagagtcccaaatgctgaattattgaaccatgttttttttttcctttgttgaaaaaaataaaccagggtgatttctataaatcaccagtttttggcattgg

SEQ ID NO: 30681 - DNA, 2041 bp, Homo Sapiens
aaagggccggctgtttcggcggccgcgggatgcccctgcgctgaccgccaggggcaggtgcccgcccgcgtagacgcacccggcctgaccccgcgccaccatgtaaacggcgccagcaggcggacgctggcttctccgcctgggacccctccgccccgacccgggccccgcggccctcgatgaggacacaccatgctgaccggggtgaccgacggtatcttctgttgcctgctgggcacgccccccaacgccgtggggccactggagagcgtcgagtccagcgatggctacacctttgtagaggtcaagcccggccgcgtgctgcgggtgaagcatgcaggacccgccccagccgctgccccacctccaccatcatccgcatcctcggatgcagcccagggggacctctccggcttggtccgctgtcagcgccggatcaccgtgtaccgcaatgggcggttgctggtggaaaacctgggccgagcccctcgagccgacctcctacacgggcagaatggctctggggagccgccggccgccctggaggtggagctggcagatccggcgggcagcgatggccgcttggcccccggcagcgcaggcagcggcagcggcagtggcagtggtgggcggcggcggcgagccaggcgccccaagaggaccatccatattgactgtgagaagcgcatcactagctgcaaaggcgcccaggccgacgtggtgctctttttcatccatggtgtcggcggttccctggccatctggaaggagcagctggacttctttgtgcgcctaggctatgaggtggtggctcctgacctggccggccacggggccagctctgcgccccaggtggccgcagcctacaccttctatgcgctggctgaggacatgcgagcaatcttcaagcgctatgccaagaagcgaaatgtgctcattggccattcctacggtgtctctttctgcacattcctggcacatgagtacccagacctagtgcacaaggtgatcatgatcaatggcgggggccctacggcgctggagcccagcttctgctcaatcttcaacatgcccacctgcgtcctgcactgcttgtcgccctgcctggcctggagcttcctcaaggccggcttcgcccgccaaggagccaaggagaagcagctgttaaaggagggcaacgctttcaacgtgtcatccttcgtactccgggccatgatgagcggccagtactggcccgagggcgacgaggtctaccacgccgagctcaccgtgcccgtcctgcttgtccacggcatgcacgataagtttgtgccggtggaggaagaccagcgcatggccgagatcctgctcctggcattcctgaagctcatcgacgagggcagccacatggtgatgctggaatgccctgagacggtcaacacgctgctccacgaattcctgctctgggagcccgagccctcgcccaaggctctaccggagccactgccggcgcctccagaagacaagaagtagccgctgggccggcggggcatcgcttggtgagcacagccgcagcaggaggaggcccgagcctgcgccaggtctgcagcgcagaccacctgggcgggccgttcgctccggtgggcggggccaggtcagggagacgcccccaggctgcctgggcggggcgtggcatccgagggagcccagcggacattccgctctccgcttccgtcccgcggggcccatcggcgttttggggccgcagccgggaccctcacggaagatgaccttgtacagaagctctccctcaccttccccccaacgccacggccaaggcaggccccccaccccgctgtcttccgtgtcagccgtgcttgatcctgggacccacgagccccacagggaccctcgaggccccatcccgttatccgagacccttcctaccccccattcctcggcgctgggagctatttttgcccaagggggggggatgggggggctggcgccaccgaacctgcacatctcaacttgtaactcaataaacagaagtgacaatcgg

SEQ ID NO: 30682 - DNA, 2980 bp, Homo Sapiens
gctactgcccctgctgctgtcgtaggcgaggacggctgttagtgctgctgctgttggttcgtcgcggcggcgaaggaggaggaggaagagggcgaggcgacaagagaagaaggaggcaggcgcggcggcagcggcggcgccccgagccggcggaggcgaggggggggaagatggcggacgtgcttagcgtcctgcgacagtacaacatccagaagaaggagattgtggtgaagggagacgaagtgatcttcggggagttctcctggcccaagaatgtgaagaccaactatgttgtttgggggactggaaaggaaggccaacccagagagtactacacattggattccattttatttctacttaataacgtgcacctttctcatcctgtttatgtccgacgtgcagctactgaaaatattcctgtggttagaagacctgatcgaaaagatctacttggatatctcaatggtgaagcgtcaacatcggcaagtatagacagaagcgctcccttagaaataggtcttcagcgatctactcaagtcaaacgagctgcagatgaagttttagcagaagcaaagaaaccacgaattgaggatgaagagtgtgtgcgccttgataaagagagattggctgcccgtttggagggtcacaaagaagggattgtacagactgaacagattaggtctttgtctgaagctatgtcagtggaaaaaattgctgcaatcaaagccaaaattatggctaagaaaagatctactatcaagactgatctagatgatgacataactgcccttaaacagaggagttttgtggatgctgaggtagatgtgacccgagatattgtcagcagagagagagtatggaggacacgaacaactatcttacaaagcacaggaaagaatttttccaagaacatttttgcaattcttcaatctgtaaaagccagagaagaagggcgtgcacctgaacagcgacctgccccaaatgcagcacctgtggatcccactttgcgcaccaaacagcctatcccagctgcctataacagatacgatcaggaaagattcaaaggaaaagaagaaacggaaggcttcaaaattgacactatgggaacctaccatggtatgacactgaaatctgtaacggagggtgcatctgcccggaagactcagactcctgcagcccagccagtaccaagaccagtttctcaagcaagacctcccccaaatcagaagaaaggatctcgaacacccattatcataattcctgcagctaccacctctttaataaccatgcttaatgcaaaagaccttctacaggacctgaaatttgtcccatcagatgaaaagaagaaacaaggttgtcaacgagaaaatgaaactctaatacaaagaagaaaagaccagatgcaaccagggggcactgcaattagtgttacagtaccttatagagtagtagaccagccccttaaacttatgcctcaagactgggaccgcgttgtagccgtttttgtgcagggtcctgcatggcagttcaaaggttggccatggcttttgcctgatggatcaccagttgatatatttgctaaaattaaagccttccatctgaagtatgatgaagttcgtctggatccaaatgttcagaaatgggatgtaacagtattagaactcagctatcacaaacgtcatttggatagaccagtgttcttacggttttgggaaacattggacaggtacatggtaaagcataaatcgcacttgagattctgaattatttggctcctccatttctggaaattgagactcaagctttatgaatttatcaagaacttaaaaatgaagaaggtcacagattgatcttttataagaccttatttgatgctttgtgcttcaaggagatgatacctgtcatccatataagcaaactttttggcttacaactatttttttaatattagccttctagtctgtaatggaaattgtatattttgatagaagttttttctccattggttaaattagcattacttaaaatttgtttctttagaaaataaatgcaggttataaatgtgtgtatatttagagattataaggctctctgagccatcttctgatttttcattgctctataattctttttactgaaaatactatgttatgaatggtattaaattttagtctctggaacatccaaaaccaagcaaagggatgtgactattttgaatgaatcagaatgtcaacttgtatgtacactatatctacacttactcattatttaaaaagaataatgaaaaatctagatcaattcttcaatttgattgaactgttcagccttttcaagatttctttatttacaaatgattacatttaaatgaatgtacattcttctcactgactttggtgattttgaaacctagaatgatgtgtttctatctgtaatatctttccatttgaaaaaaatctcaaaacacagattaaaaccacaataggctgtagtattttttattttgggagccagagtatgatttgggggaagaatatgtatcagccctattgcagtataactttaagctccttttctctttagtccacttttgattgtaatttttatggtataggattttgaatcttctattttaggcttgtcagtcttggagttcttatcttccattatccctaaatattgataaactcccaggcaccaaagaaaacatttgcttaattgtctgaaaagaaacaagagaaaaacactggtatttttatgtctgtattcaatatggtataaaatataaaaactatattttaacttagtgaaatattttactatttctctacttcagacaaaatgttgcatccaaggtacatcaagtgaccatttgccttgaaccttgatttcactttgttttttttttttccttaaaggcaactaggaagctttactttcctaaagtgtttttgccattggaatttttgctgatcacagt

SEQ ID NO: 30683 - DNA, 1952 bp, Homo Sapiens
cttccggtcgtgggccatgccgggggcgggcccggaaccgccacgggtgagtcgggtcgtggctgctgccgggtcctgcgcgctccggactgaggtggcgtccctgggccggacggcggtgtcccggcgtggcgggaagccggcactggagcgggagcgcactgggcgcgggaccgggaggcgcagggaccggacggctcccgagtcgcccacctgacgctagaagaagtcttcacttcccaggagagccaaagcgtgtctggccctaggtgggaaaagaactggctgtgacctttgccctgacctggaagggcccagccttgggctgaatggcagcacccacgcccgcccgtccggtgctgacccacctgctggtggctctcttcggcatgggctcctgggctgcggtcaatgggatctgggtggagctacctgtggtggtcaaagagcttccagagggttggagcctcccctcttacgtctctgtgcttgtggctctggggaacctgggtctgctggtggtgaccctctggaggaggctggccccaggaaaggacgagcaggtccccatccgggtggtgcaggtgctgggcatggtgggcacagccctgctggcctctctgtggcaccatgtggccccagtggcaggacagttgcattctgtggccttcttagcactggcctttgtgctggcactggcatgctgtgcctcgaatgtcactttcctgcccttcttgagccacctgccacctcgcttcttacggtcattcttcctgggtcaaggcctgagtgccctgctgccctgcgtgctggccctagtgcagggtgtgggccgcctcgagtgcccgccagcccccatcaacggcacccctggccccccgctcgacttccttgagcgttttcccgccagcaccttcttctgggcactgactgcccttctggtcgcttcagctgctgccttccagggtcttctgctgctgttgccgccaccaccatctgtacccacaggggagttaggatcaggcctccaggtgggagccccaggagcagaggaagaggtggaagagtcctcaccactgcaagagccaccaagccaggcagcaggcaccacccctggtccagaccctaaggcctatcagcttctatcagcccgcagtgcctgcctgctgggcctgttggccgccaccaacgcgctgaccaatggcgtgctgcctgccgtgcagagcttttcctgcttaccctacgggcgtctggcctaccacctggctgtggtgctgggcagtgctgccaatcccctggcctgcttcctggccatgggtgtgctgtgcaggtccttggcagggctgggcggcctctctctgctgggcgtgttctgtgggggctacctgatggcgctggcagtcctgagcccctgcccgcccctggtgggcacctcggcgggggtggtcctcgtggtgctgtcgtgggtgctgtgtcttggcgtgttctcctacgtgaaggtggcagccagctccctgctgcatggcgggggccggccggcattgctggcagccggcgtggccatccaggtgggctctctgctcggcgctgttgctatgttccccccgaccagcatctatcacgtgttccacagcagaaaggactgtgcagacccctgtgactcctgagcctgggcaggtggggaccccgctccccaacacctgtctttccctcaatgctgccaccatgcctgagtgcctgcagcccaggaggcccgcacaccggtacactcgtggacacctacacactccataggagatcctggctttccagggtgggcaagggcaaggagcaggcttggagccagggaccagtgggggctgtagggtaagcccctgagcctgggacctacatgtggtttgcgtaataaaacatttgtatttaatgagttggcattaaggaagccaatacct

SEQ ID NO: 30684 - DNA, 2730 bp, Homo Sapiens
agaatgcctatgagacacaggaagaaggcagcagacaagaatcttccctgccgtcctttagtatgtgcagtactggacctgatggtagagtttattgtaacacacatgatgaaggagtttcctatggatctctatatacgctgcatccaggtagtacacaaactgctctgctaccagaagaagtgtcgggtacgcctgcattacacctggcgggagctctggtcagccttgataaatttgctgaagttccttatgtcaaatgagactgtacttttggccaaacacaacatttttacattagcccttatgattgtgaacctatttaatatgtttatcacatatggcgacacatttctgccaacccccagcagctatgatgaactttactatgagattatccgcatgcaccagagctttgacaacctctactccatggtcctgaggctttctaccaatgcaggccagtggaaggaagcagctagcaaggtgacccatgcattggttaatatcagagccatcatcaaccactttaaccccaaaattgagtcctacgctgctgtgaatcacatatcccaactgtcagaggagcaggtgctggaggtggtgagagccaactatgacacgctcacgctgaagctgcaggatggcctggaccagtatgagcgctactcagagcagcacaaggaagctgccttcttcaaagagctggttcgatccattagcaccaacgtccggagaaacctggtcttccacacactcagccaagaagtcctgctcaaggagttctccactatctcctgaggccacgcctacctgagcagcctctgactgcccttacccatgaggatcatgggctggagggggagcgaggggagagggggctgcccccgaggttggagagaaacacagataccaagttctcttggtgaagaccgcacttcaatggagcttgggcagcaggggcaggagggtcaagccagggataatcttatttggggaggaatgggtgggcacagtggggagaggcctccaggaatgtggggacttccagagtgggctccctaaacagcccctcacatttccaatcttgaggttacaagctgtagctactgactaattttcgggagctggtgaggcaagcctcagggtaatgccagcaccctgaaagtcagtggctctgctcggcttctgaaaacagatcaactctcagatatagctggagctacatcctgcttcctttgggcctggggctgtgcttggcttgaaatctgtgtcccctgcctgcactggcactttgtccagtcatcgggacctttggctcagatttagggtaagataggaatagggtacctttttccttttttttctgagacggagtctcactctgtcgcccaggctggaatgcagtggcgtgatctcggctttactgcagcctccgcttcctgggttcaagcgattctcctgcctcagcctcccgagtagctgggactacaggagcgtgtgccacgcccggctaattttttgtatttttagtagagatggagtttcaccatgttacccaggatggtctcaatatcctgagttcatgatccacccaccttggcctcccaaagtgctgggattacaggcgtgagccaccacacccagccagttttcctattttctgaattcagaattgacttctctgggaaaactggagatgagaatctgcccagtgctctgctgtccagtcaccgccttttgaattttagttttggcaccaggagtaccgttagctttccccttcttctggcccatttgactcatcagcacaatagggtcaccaccttaacttttaatttctaatctgctttactgtctttagggtgtgtatgaaataaacattgacaggctttctggagccctcaaggtgcctactttgctggttccctttccagcagctcccccacctcccttagccccccctcctctggcagcctctcctgcctctgctgagctcccctccacgtgttccacccccttaccctgctgttgtttacatccaacctgcctgagaatttcctctggggaggaatctattcctgtcatggtctagtgcctgggagggagagaacttcctgggggtagggtgccctccatctgaaacaggccaggtgagcatcatgcataaggcctccattctgtccgctcagattctgggtggggccacaggcaaatctcctgacttatggggagttggcttgtggttcctcccttggatagcctccatggaaccactataggctttcccaacagctgcctctgaaatagctgctgcttcgagatcctccctttttaaagcactttctaaagccctcaggatggcgggagcaaacagcactggtatattctaggagtaagtgcaggaattcagcagtgagagcatgtctgggaccacctggactgccatccatttaacctcaaatctctttgggatactcgccctccctgggaaccagagttctggctctaacattgagcagctatgcactagttccagagaagccactaacaggctgccatgtgtagatgtaggttcttaagagatcacaggctgggtcatctgatcactggatggatagctcagcctggggcatttagtgttttccctggtgataaatccccaaggcagctggatttggagctggtggcaagttgaaattattaaaaattgatttgtgtgggactgtc

SEQ ID NO: 30685 - DNA, 4082 bp, Homo Sapiens
gaggactgcgagcacagcggcggccgggtggcgggggtgagtggggccagcggggctggacagcagcgggccccgggcgccgccgccgcgatccctccccgcgcccgccgagcacatcgccgccgccgagatgggccctccgcggcacccccaggccggcgagatagaagcgggcggtgcgggcggcgggcggcggctacaggtggaaatgagttctcaacagtttcctcggttaggagccccttctaccgggctgagccaggccccttctcagattgcaaacagtggttctgctggattgataaacccagctgctacagtcaatgatgaatctggtcgagattctgaagtcagtgccagggagcacatgagttccagcagctccctccagtcccgggaggagaagcaagagcctgttgtggtaaggccctatccacaggtgcagatgttgtcgacacaccatgctgtcgcatcagccacacctgttgcagtgacagccccgccagcacacctgacgccagcagtgccactttcattttcggagggacttatgaagccgcccccgaagcccaccatgcctagccgtcccattgctcctgctccaccttctaccctgtcacttccccccaaggttccagggcaggttaccgttaccatggagagtagcatccctcaagcttcagccattcctgtggcaacaatcagtggacaacagggccatcccagtaacctgcatcacatcatgactacaaatgtgcaaatgtctatcatccgcagcaatgctcctgggccccctcttcacattggagcttctcatttacctcgaggtgcagctgctgctgctgtgatgtccagttctaaagtaaccacagtcctgaggccgacctcacagctgccaaatgctgctactgctcagccagcagtacagcacatcattcaccaaccaatccagtctcggccacctgtgaccacctccaatgccatccctcctgctgtggtagcaactgtctcagccaccagagctcagtctccagtcatcactacgacagcggcgcatgctactgattcagcacttagtaggccaaccttgtctatccagcatcctccatctgcagcaatcagtattcagcgtcctgcccagtcacgagatgtcacaacaagaatcacactaccatctcaccctgcattagggacgccaaaacagcagcttcatacaatggctcagaaaacaatcttcagtactggcacgccagtggctgcagccacagtagcacctattttggcaaccaacaccattccttcagcgaccacagctggatctgtgtcacacacgcaagctcccacaagtaccattgttaccatgacagtaccctcccattcctcccatgctactgctgtgaccacctcaaacatcccagtcgccaaggtggtgccccagcagatcacgcacacttctcctcggatccagccagactaccctgccgagaggagtagcctgattcccatctccggacatcgggcctctcccaatcctgtggccatggaaacccgaagtgacaacagaccgtctgttcccgttcagttccaatattttttgccaacttaccccccttctgcatacccactggcggcacatacctacaccccaatcaccagttccgtgtccactatccgacagtatccagtttcagctcaggctccaaactctgccatcacagctcagactggtgttggggtagcgtctaccgtccacctaaaccccatgcagttgatgacagtggatgcatcgcatgctcgacatattcaagggatccagccagcacccatcagtacccagggtatccagccggcccccattgggaccccagggatacagcctgcaccacttggcacacagggaattcactcagcaaccccaatcaacacacaagggcttcagcctgcacctatgggtactcagcagcctcagcctgaaggaaagacttcagcagtggtgttggcagatggagccacaattgtggccaaccctattagcaatccattcagtgctgctccagcagcaacaaccgtggtgcagacccacagccagagtgctagcaccaacgctcccgcccagggctcatcgccacggccaagcatactccggaagaaacctgccacagatggtgccaaacccaagtctgaaatccacgtgtctatggccactccggtcactgtgtccatggagactgtatccaatcaaaataatgatcagcctaccattgccgtccctccaactgcccagcagcccccaccgaccattccaactatgattgcagcagccagtcccccgtcacaaccagccgttgccctttcaaccattcctggagcggtccccatcactccacccatcaccaccattgcagctgcaccacctccatcagtcactgtgggtggcagtctttcctccgtcttgggccctcccgttcctgaaattaaagtgaaagaagaagtagaaccaatggatatcatgaggccagtttctgcagttcctccactggctaccaacactgtgtctccatctcttgcattgctggcaaacaacttgtccatgcctacaagtgacctaccacctggtgcctccccaaggaaaaagcctcgaaagcaacagcatgtgatctcaacagaagaaggtgacatgatggagacaaacagcactgatgatgagaagtccactgccaagagtcttctggtgaaggctgagaagcgcaagtctcctcccaaggagtatattgatgaggaaggtgtgagatatgtcccagtgcgtccaagaccccccattactttgcttcgtcactatcggaacccctggaaagctgcttaccaccactttcagaggtacagtgacgtccgggtcaaagaggagaagaaagctatgctgcaggaaatagctaatcagaaaggagtatcctgtcgtgctcaaggctggaaagtccacctctgtgctgcccagttactacagctgacgaatctagaacatgatgtctatgaaagacttactaacctgcaggaagggattatcccaaagaaaaaagcagcaacagatgatgatctccaccgaataaacgaactgatacagggaaatatgcagaggtgtaaacttgtgatggatcaaatcagtgaagccagagactccatgcttaaggttttagatcataaagaccgtgtcctgaagctgcttaacaagaacgggactgtcaaaaaagtgtccaaattgaagcgaaaggaaaaagtctagacccagaacaatcaggagattggaagcaaatttatgaagaatgatggtgggggtggggggagggttttggttttttccaaagtggaacattgaaataaaggaagtgttccttagttcccgtgtgaaagcagaggaacccatgacatccaagggcgtgaaaggatcagagctgactggacatagtgagctgccttcttgcgttcgggtgcacccctgttaaacctgatctgtgtcataagtgactccggatgcatcagtgtccaccagttggaagcaatgacaaggatggctggctggtgtttttcagccttccggtttatagactgtatttatctagtggattcctgcaggccccatactgagcctggactgaaagtatccactcggaccatctgttatctctctacactgaaaataaaacctcttccacccaccccattcggttcttctgcctgaccttcaaatgcccatgttggccttttacagcagtgccacggcaccaagcgagctgccacatctcacactctaaagggtttgaactattagttcttgtcattttttaaaaaaaaccattcccaagtgaaattgttatatcgtctgtcttgcgtgtgtcagaactgggtttttgtggaggttcagagcaggcaacaccataagttgctctcagatccttgttctgaagtacattcttggttatctgtacttctgtagctggtgtgatgctgttaattgtatgtaccacacatctccagacgttaataaaggactcaaagaggtttttgtaaaaaaaaaaaaaaaaaaaaaa

SEQ ID NO: 30686 - DNA, 4439 bp, Homo Sapiens
gcctggtattattagcaagcagcaaatatggcggtggcgcgcgtggacgcggctttgcctcccggagaaggatcagtggtcaattggtcaggacagggactacagaaattaggtccaaatttaccctgtgaagctgatattcacactttgattctggataaaaatcagattattaaattggaaaatctggagaaatgcaaacgattaatacagttatcagtagctaataatcggctggttcggatgatgggtgtggccaagctgacgttgcttcgtgtattaaatttgcctcataatagcattggctgtgtggaagggctaaaggaactagtacatctggaatggctgaatttggcaggaaataatcttaaggccatggaacagatcaatagctgcacagctctacagcatctcgatttatcagacaataatatatcccagataggtgatctatctaaattggtatccctgaaaaccctgcttttacatggaaacatcatcacctctcttagaatggcacctgcttacctacccagaagtcttgctatactttctttggcagaaaatgaaatccgagacttaaatgagatctcttttttggcatccttaactgaattggaacagttgtcgattatgaacaatccttgtgtgatggcaacaccatccatcccaggatttgactatcggccgtacatcgtcagctggtgcctaaacctcagagtcctagatggatatgtgatttctcagaaggaaagtttgaaagctgaatggctctatagtcaaggcaaggggagagcatatcggcctggccagcacatccagcttgtccaatatctggctacagtctgccccctcacttctacactaggtcttcaaactgcagaggatgccaaactagagaagattttgagcaaacagaggtttcaccagaggcagttgatgaaccaaagccaaaatgaagagttgtctcctcttgttcctgttgaaacaagggcatcccttattcctgagcattcaagccctgttcaagattgccagatatcccaggaaagtgaacccgtcattcaagtgaattcttgggttgggataaacagtaatgatgatcagttatttgcggttaagaataattttccagcctctgtacacactacgagatattctcgaaatgatctgcacctggaagacatacagacggatgaggacaagttaaactgtagtcttctctcttcagagtctacttttatgccagttgcatcaggactgtctccactatcacctacagttgagctgaggctgcagggcattaacttgggcctagaagatgatggtgttgcagatgaatctgtgaaagggctggaaagccaggtgttggataaggaagaggaacagcctttatgggctgcaaatgagaattctgttcaaatgatgagaagtgaaatcaatacagaggtaaatgagaaagctggactattaccttgtcctgagccaacaataatcagtgctatcttgaaggatgataaccacagtcttacattttttcctgagtcaactgagcagaaacaatcagacataaagaaaccagaaaatacacaaccagaaaataaagaaaccatatctcaagcaacttcagagaaacttcccatgattttaacccagagatctgttgctttgggacaagacaaagttgcccttcagaaattaaatgatgcagccaccaagcttcaggcctgttggcggggattttatgccaggaactacaaccctcaagccaaagatgtgcgttacgaaatccggctacgcagaatgcaagagcacattgtctgcttaactgatgaaataaggagattacgaaaagaaagagatgaagaacgtattaaaaaatttgtacaagaagaagctttcagattcctttggaaccaggtaaggtctctacaggtttggcaacagacagtggaccagcgtctaagttcctggcatactgatgttcctcctatatcaagtactcttgtgccatcgaaacatccattatttacccaaagccaggagtcctcttgtgatcaaaatgctgattggtttattgcttctgatgtagctcctcaagagaaatcattaccagaatttccagactctggttttcattcctctctaacagaacaagttcattcattgcagcattctttggattttgagaaaagttccacagaaggcagtgaaagctccataatggggaattccattgacacagtcagatatggcaaagaatcagatttaggggatgttagtgaagaacatggtgaatggaataaggaaagctcaaataacgagcaggacaatagtctgcttgaacagtatttaacttcagttcaacagctggaagatgctgatgagaggaccaattttgatacagagacaagagatagcaaacttcacattgcttgtttcccagtacagttagatacattgtctgacggtgcttctgtagatgagagtcatggcatatctcctcctttgcaaggtgaaattagccagacacaagagaattctaaattaaatgcagaagttcaagggcagcagccagaatgtgattctacatttcagctattgcatgttggtgttactgtgtagcatgtcttttgggaggcagatatccacttaacttttcttaaaaatactttcagttgcctttgcttttttttggagggaaatactccctacccctaattttgttactacttatatagaatttgtattcatgtcttatatttttcagattctagatattgagctgagttttcattttgattttgttagctttttacttagctgtaaggtaccaaactatttatattgaaagctatatgcactttatttcttaactgaattgcatcaacaatgttcctgtttctttcatgtactcatttactttcaaaaataagctagaatatattaaagaaaatagaaaaaattaccttaaatatataaataagagaattttggcccttctgtgtctgagaaaattaattatatagcaaggaatgaaatttgataaagcaaatataaatgagaaatatgaggattgtgaattattgaaatttgccagtctccctggtgtaaaatgtttttttaaagccttttttcctcctttcggagtcaaggaaagcctttctataagcaaattaaggaagaaaaggtaggattataagatttctcaatggggatgattaaattgtctcatggaaaacttcagttaatgtcatgcatcagttttaacatatgaagtaaagtgttctatccaggattaaagtcaagtttacttaggcaacacaagaatatttcacttagatatgaagaaaggaaacactagtctccattcacttgaaatactctcatggcaaatatttatcctctcattaagtgctttttcaccctataggtaagcatttttgtgccaacatgttgtcagaaattaatgtatgttcatctcctctgttcctgcttatttttacttatatatttcagcagaaggtccgtggccattcacttcaattttgacctctgtcccatagtgaagaacatttaaagtaatactactggtcgaatatgaatgactttttaggaactactttttgtctaacctgaaaaagttccacatttggaagacaatttaatgatggtgaagaaataataaacctcactttacttgttaaaagggatatatatatatatatatatgtctgcaacttcagggagaaataagattgtgtttgaatattgtaggtagatgcatttgtaattaaggataatatcgtttaacaacatgtatttggtttccctcaacttacagacatacagctatttaaaactatggcaatacttaagcatctctaaatttaggtgctaaatatctattattctgttgtagtcattaggtgcccttctctgaagttatgtaaaataaaagcatctgatccttcaaggataaagttgaggatcacatggtacgtggcatttgttgttattgttttttaaagagatggaggctggctctgttggtgcggtgccatgatcatagttcactataacctcgaactcctggctcaagtgatctcccacttcagcctcccgagtatctgggattataagcaagagccactgctcccagctcatggtatttgttgatagtcataacatttttcctgtatggtaagacgtatttttctcagtttataaatacgtagcactcaggttgagacgacttggattttattcttagaaatccagaatcccttgaaaaggaaatattttctgtttcttataaataaaagagtaatcttactttcagaaggattttccttagtgaaacatgtgtaacattgaatgcatgttaaataaaaatggaatttctaactttaaaaaaaaaaaaaaaaaaaaaaaaaaaa

SEQ ID NO: 30687 - DNA, 3982 bp, Homo Sapiens
cgcggcggcggcagcggcggcggctacaccgggcttggccccctccctcctccgttcccccctcctcccccctcccctcagcggtggctcccaagaagtccgagacacgcggatcaactcactatcctgaaggtccattctcccaagaagaggggacagaaagacagatctatttgtaagaaaggcttgggtatcccatgaacgagccaacagaaaaccgattggggtgcagcaggactccagagccagatataaggctcagaaaagggcaccaactggatggtacacgaagaggtgataatgacagccaccaaggagatttggagcccattttagaggcatctgttctatcttcccatcataaaaaaagctctgaggaacatgaatacagtgatgaagctcctcaggaagatgagggctttatgggcatgtcccctctcttacaagcccatcatgctatggaaaaaatggaagaatttgtttgtaaggtatgggaaggtcggtggcgagtgatccctcatgatgtactaccagactggctcaaggataatgacttcctcttgcatggacaccggcctcctatgccttctttccgggcctgttttaagagcattttcagaatacacacagaaacaggcaacatttggacacatctcttaggttgtgtattcttcctgtgcctggggatcttttatatgtttcgcccaaatatctcctttgtggcccctctgcaagagaaggtggtctttggattatttttcttaggagccattctctgcctttctttttcatggctcttccacacagtctactgccactcagagggggtctctcggctcttctctaaactggattactctggtattgctcttctgattatgggaagttttgttccttggctttattattctttctactgtaatccacaaccttgcttcatctacttgattgtcatctgtgtgctgggcattgcagccattatagtctcccagtgggacatgtttgccacccctcagtatcggggagtaagagcaggagtgtttttgggcctaggcctgagtggaatcattcctaccttgcactatgtcatctcggaggggttccttaaggccgccaccatagggcagataggctggttgatgctgatggccagcctctacatcacaggagctgccctgtatgctgcccggatccccgaacgctttttccctggcaaatgtgacatctggtttcactctcatcagctgtttcatatctttgtggttgctggagcttttgttcacttccatggtgtctcaaacctccaggagtttcgtttcatgatcggcgggggctgcagtgaagaggatgcactgtgatacctaccagtctccagggactatgaccctaaaccagggcctgcggcacttgcgggcctccctgctggctactgatgccagtaccagaggagccccaaaactttgacagcctcgtgggctttgtgacggcccaggggctctgcgtggtacatgactgagaagagaaaaacaaaaataaatcatacctcaaaggatggagtgcatcaattgggagaaaaggagacatagcccaaaccctggcttattcttgggatctactgattgcgggctctgcaagacccttggcaaactggcttctgatccatatcatatttatttgtagaagatggcgaaacagtttagctggtggttctttcttctccctttctctctctctatgacaataatacaaaccaatttaagtgaacatttatatccgataaggggtgggagtgtgattttaaatgctcttttgggagaacaaagaaattaatgtaaataagatttctaactgtttaaataagactttatataaatgtttaaaacataggggtaagggagggagggagaatttttgtatagaatgaaacatgcaagtaccacacactgtttgaattttgcacaaaaagtgactgtaggatcaggtgatagccccggaatgtacagtgtcttggtgcaccaagatgccttctaaaggctgacataccttggaccctaatggggcagagagtatagccctagcccagtggtgacatgaccactccctttgggaggcctgaggtagaggggagtggtatgtgttttctcagtggaagcagcacatgagtgggtgacaggatgttagataaaggctctagttagggtgtcattgtcatttgagagactgacacactcctagcagctggtaaaggggtgctggaggccatggaggagctctagaaacattagcatgggctgatctgattacttcctggcatcccgctcacttttatgggaagtcttattagagggatgggacagttttccatatccttgctgtggagctctggaacactctctaaatttccctctattaaaaatcactgccctaactacacttcctccttgagggaatagaaatggacctttctctgacatagttcttggcatgggagccagccacaaatgagattctgacgtgtccaggtttctcctgagctcatctacatagattggtagacccttcctttggattaggaaagatgagttttacctctggtacactgtcttggtaagcctggatgtgacagacacctcggctctccttgaataagaaagccagcagaactcttaaagccagttgtagtacggagttgtcagcactcactgaacctcactttacagggataagagtggtgtggcattttaaatacaatggtatgttattgccagggagtgaggtacaagacgatggctcatgtcacaggcctacctgatacggtgtcagagaaagtggtggggaaaggatctggttcatggaattctgatcttggcccataggtgaaccaccaaaatagtgctcgagtcttaggttactgtcatcaaagacttgggatgactccattatatcctggggttgtgggtattagaactaaatatggaggtcctgagcatggggactggcgtcctcagtaggtgtttgggaatatgggaagggtctcctatttattcaatagagttttctcagttattttcctcccttgcccttgcaatctccagcaaaaggtgggatctaggaagaaagaatccagtgtagaagttgagaagaacttgaacgttttggttctggataaggtcactgtcctaggtgctaggtggaccgagcaaaagactcagtggatgaactggtgcagtgcctgacagaataaagaacagtattaatccctttgagaaagcatagtccagcaggacagtggccatttggacagaagcccacttagtttcttgggagcaacagcacgtatcagaagccagacttgctcttcggtcatgcactttgggatacagcgtataggtgcagccctgtcacaacaccaacagaagtagcagcctctgggtgcagtcacccacaccccaaagctggaaggatctggttcaacatagcacaaacccttaggaaaaatgaaattaacatcactgatgtgtaatccagtaaaatctccctttttcgggtgtgtatgtgggcatgtgcccatttctatgtgtgtgtctacgtgcagctcactaccaacagcctcatgtgcacttgacctgacagtgctcgctgagaactctcaccaggttggcgcctgaatgccttactctcagcagtcagaggcttgcttgctctgtgcagatttttaattttcttttttggccctaggctggttgggacctctacagcttcattctttcaccattaaatagtggcctttttcagtattttccctcttcccctttataaattatgctaaagccacaaagcacatttttggggatcatagaaggttggggttccagaaaggcatctgtgtgatggttccattgatgtgggatttccctacttgctgtattctcagtttctaataaaaagaaccaaatgaaatatgaaaaaaaaaaaaaaaaaa

SEQ ID NO: 30688 - DNA, 1774 bp, Homo Sapiens
agcagagtccggctgcctggggcgggcggcgcgtgtctgcagctgctccgggtagcccgctaggcgcgccgtccccagccccgccgccggccctcggtgcgcccggccgcctgcacccccaggagcagctgctgtgaataaacacagaagtggagctgggggactgattagaagcctcattcagtgcacctgggccccagcaggcccagccaggcgtggaggaagaggcattgaggactttccttacctgtttttccagctcacccactgccagcagagaatgctgtccagtttcaacgagtggttttggcaggacaggttctggttaccacccaatgtcacgtggacagagctagaagaccgggatggccgtgtctacccccacccccaggacttgttggcagccctgcccctggcgctggtcctcctggccatgcgccttgcctttgagagattcattggcctgcccctgagccggtggctgggtgtgagggatcagaccaggaggcaagtgaagcccaacgccacgctggagaaacacttcctcacggaagggcacaggcccaaggagccccagctgtctctcctggccgcccagtgtggcctcacgctgcagcagacccagcgatggttccggagacgccggaaccaggatcgaccccagctgaccaagaagttctgtgaggccagctggaggtttctcttctacctgtcctccttcgtgggcggcctctcggtcctgtaccacgagtcatggctgtgggcaccagtaatgtgctgggacaggtacccaaaccagactctgaagccatccctgtactggtggtacctcttggagctgggtttctacctctcactgctaatcaggctgccctttgatgtcaagcgcaaggatttcaaggagcaggtgatacaccacttcgtggcggtcatcctgatgaccttctcctacagtgccaacctgctgcgcattggctctctggtgctgctgttacatgattcctctgactacctgctggaggcctgtaagatggtcaactacatgcagtatcagcaagtgtgcgacgctctcttcctcatcttctcctttgtcttcttctacacccgactggtcctctttcccacccagatcctctacaccacatactacgagtccatcagcaacaggggccccttcttcggctactacttcttcaacgggcttctgatgttgctgcagctgctgcacgtgttctggtcttgcctcattctgcgcatgctctatagcttcatgaagaagggccagatggagaaggacattcgtagtgatgtagaagaatcagactccagtgaggaggtggcggcggcccaggaacctctgcagctaaagaacggggcagctggagggcccaggccagcccccactgatggccctcagagccgggtggccgggcgtctgaccaacaggcacacaacagccacatagccgggtggggctggctgtaaggggttgcccccccgccagtgccttggatatttctggggtggctagactggcgcccctgggccacctttctggagacagggagggccccacccggggtgggtgggaaggctgatgatctgtctccagccccttccttctgcccacccgcccttcttccctctgggcaactggacagatctgggagccagcagctggatgctgtggctggccagagacacctccaggccgtagcctgggggctggggggagccccaggctgaaaagggtccaattaaaacaaatggagcc

SEQ ID NO: 30689 - DNA, 3453 bp, Homo Sapiens
atgcctgactacagaactcgagctctcttcgtgcaaagtactctcggggactctgcaggacctgagctgcagttgctcagcatagtgcccggccgggatctgcagccaagcgattcattcacagcctcctcctcaccaccaccatctgtgtggtcagaacttgagcacatccgtggaaaatcagaagcaaccacagagctaaaaagacccagccttccagggagtattcattcctgcctatgtggggtgtggtgtggcgtggggaagagaacccccagctccttggtgtccagcttgcaggaccttgagctccttggccagaggcagcgacagctgtggatggagtcgacgcctcggccgccctataatccattcctcgtgccctgcacacccgtggggaaactcagtgcagagcatggaggtcccacccgaaagatgccccccagcgccagtgccgtggacttcttccagctctttgtcccagacaacgtcctcaagaacatggtggtgcagacaaacatgtatgccaagaagttccaggagcggtttgggagcgacggagcctgggtggaggtgacgctgacggagatgaaggcgttcctgggctacatgatctccaccagcatctcccactgcgagtccgtcctcagcatctggagcggaggcttctacagcaaccgcagcctcgccctcgtcatgagccaggcccgcttcgagaagatcctcaagtacttccacgtcgtggccttccgctccagccagaccacgcacgggctctacaaggtccagcccttcctcgactccctgcagaacagcttcgactctgccttcaggccttcccaaacccaggtgctacatgaacccctgatcgatgaggatcctgtattcattgccacgtgcacagagcgggagctgcgaaagaggaaaaagcggaaattcagcctctgggtcagacaatgttcttccactggcttcatcatccagatttatgtccacctgaaggaaggtgggggcccagatggcctggatgcgctgaagaataagccccagctccacagcatggtggccaggagcctgtgccggaacgcggcaggcaagaactacatcattttcacggggcccagcatcaccagcctgacgctgtttgaagagtttgagaagcaagggatttactgctgcggcttgctccgcgcgcggaagagtgactgcaccggcctcccactgtccatgctgaccaacccagccacacccccggcccggggccagtaccaaatcaagatgaaggggaacatgtccttgatctgctggtacaacaaaggacacttccgcttcctgaccaacgcctactccccggtgcagcagggagtcatcatcaaaaggaagagtggggagatcccatgccccttggccgtggaggcgtttgccgctcacctgagctacatctgcagatacgatgacaaatacagcaagtatttcatttctcataaaccaaacaagacctggcagcaggtgttctggttcgccatcagcatcgccatcaacaatgcctacatcctgtacaaaatgtcagacgcctaccacgtgaagaggtacagccgggcgcagtttggagagagactcgtcagagagctgctgggcttggaggatgcctctccgacccactgatgctgggggcgcaggactcggtcaagggaggggcaagaggaggaggagagcctgccgttccaacttgcccatcagagacccggacacggcctggtgtgtggcttgctgcctgggagggatgcacagggcctctggagggacaggatggacctggtcagaggacggttgctgtcctcatttgcattccaagaagagcatgtcctccctcgagaaacagtgccgccggtgtgatgagcacttacacccacgttctcaagggcagattctctcatgacatccgtggagcttgcgaggcagcgtggactggtgactgtgaaggaaggcccccgtggtagaatgagctggagcacgctctaagagagatgcctgcttcctaaagatctacagcaatctgggacgtggttcaagttcaagacttgaaggaagcaaagacgccctgcatggttacaatggctcaggtgtcaggggaggccggagggttttccagcatttgcctcatgccagcacctttgaaccggtctcttagaagaagacacacatcctgggtgtacagtggtgaaatggggagtgggtgcccattctgaaaaacgaggcattcctgctcattccctctgcttagctggtgggcaggggagagagggaaatgccaaaaacttggagtgaaggatgatgctattttttatttttaaatatatcttcaggttattttcttactgttgcttcagatctaatgtaaaaggcagatgtcccctcctctccacccccgacgctgaccccggcctcagtcacggctctttgcatgatcacagttctgtgttctggcctgtggcagggccgggaagggccgctggcttccgaacagacgtggttgctctccacgaggcgcatggggagcccgcgggccctaagctttgtcgcagatgtcatcattggcagaattacttgtcttgaaaaataagtagcattgctgaaacacacaaccgaattctctacgatggccatttgctcattgtctttcctctgtgtgtagtgagtgaccctggcagtgtttgcctgctcagagtggcccctcagaacaacagggctggccttggaaaaaccccaaaacaggactgtggtgacaactctggtcaggtgtgatttgacatgagggccggaggcggttgctgacggcaggactggagaggctgcgtgcccggcactggcagcgaggctcgtgtgtcccccaggcagatctgggcactttcccaacccaggtttatgcgtctccagggaagcctcggtgccagagtggtgggcagatctgaccatccccacagaccagaaacaaggaatttctgggattacccagtcccccttcaacccagttgatgtaaccacctcattttttacaaatacagaatctattctactcaggctatgggcctcgtcctcactcagttattgcgagtgttgctgtccgcatgctccgggccccacgtggctcctgtgctctagatcatggtgactcccccgccctgtggttggaatcgatgccacggattgcaggccaaatttcagatcgtgtttccaaacacccttgctgtgccctttaatgggattgaaagcacttttaccacatggagaaatatatttttaatttgtgatgcttttctacaaggtccactatttctgagtttaatgtgtttccaacacttaaggagactctaatgaaagctgatgaattttcttttctgtccaaacaagtaaaataaaaataaaagtctatttagatgttgaaaaaaaaaa

SEQ ID NO: 30690 - DNA, 4266 bp, Homo Sapiens
cgccgccgccgccgctggccaaaaagcggagcccaggggaagcgtgttctgctcagaccgccttccttctccattgccacccgtgccgaacagccaggctgcccaattgcaactgtagaccaatgaactaatccatcgcccgcagcccgactctcagcagcggttcgtcccggtgcccacccccgcgaagcggagcgcccgggcacctagcctccctgccggccacctagcctccctgccggccacgatgccgaacgtgctgctgccgcccaaggagagcaacctcttcaaacgcatcttgaaatgttatgaacagaagcagtacaaaaatggcctcaagttttgcaagatgattctgtcgaacccaaaatttgctgaacatggagagactttggctatgaaaggattaacactgaactgtttaggaaaaaaagaagaagcttatgagtttgttcgtaaaggacttcgtaatgatgtcaagagtcatgtctgttggcatgtatatggactcttgcagcgttctgataaaaaatatgatgaagctataaaatgttaccgaaatgccctcaaattagataaagataacctgcaaattttgagggatctctcactgttgcagatccaaatgagagaccttgaaggttaccgagagacaagataccagcttcttcagttgcgccccacacagcgtgcctcctggattggatatgctattgcataccatttgctgaaagattatgatatggccctaaaactgttggaagaatttagacaaactcagcaagttcctccaaacaaaatagattatgaatatagtgaattgatattataccagaatcaagtgatgagagaggcagatctgttgcaggaatctttggaacatatagaaatgtatgagaaacaaatatgtgataaacttttggtggaagaaattaaaggggaaatactgttgaaattgggaagattaaaagaagccagtgaagtgttcaaaaacttgattgatcgaaatgcagaaaattggtgttattatgaaggcttggaaaaagctctacaaattagcactttagaagagaggcttcaaatttatgaagaaattagtaagcagcaccccaaagcaattacacccagaagattacctttgactcttgtcccaggtgaaagatttagagaactaatggataagttcctgagggttaacttcagtaaaggctgcccacccttgtttactactttgaaatctttatattacaatacagaaaaggtttctataatccaggaacttgttactaattatgaagcctctcttaaaacgtgtgacttttttagcccatatgagaatggggagaaggaacccccgacaacactactctgggttcagtatttcctggcacagcactttgataaacttggacagtattctttggctttggattatattaatgctgcaattgctagtactccaactctaatagaattattctatatgaaagcaaaaatttacaagcatataggtaatctcaaagaagctgcaaagtggatggatgaagcacagtctttggacacagctgatagattcatcaattccaaatgtgcaaaatacatgcttcgagcaaatatgataaaagaagcagaggaaatgtgctccaagttcacaagggaaggaacatctgccatggaaaatctaaatgaaatgcagtgtatgtggtttcagacagaatgcatttcagcttatcagcgtctggggagatacggggatgccttgaaaaaatgtcatgaagtagaaaggcatttttttgagataactgatgaccaattcgacttccatacatactgcatgagaaagatgacccttcgtgcctatgttgaccttttgagattagaagatatactcagaagacatgccttttatttcaaggctgctagatcagcgattgaaatatacttgaaattgtatgataatcccttaaccaatgaaagcaaacaacaagaaataaactcagaaaacttgtcagccaaagaattgaagaaaatgcttagcaagcagagaagagctcagaaaaaggctaaactagaagaagaaagaaagcatgcagaaagagaacgtcaacagaaaaatcaaaagaaaaaaagagatgaagaagaagaagaagccagtggccttaaggaagaacttatacctgaaaaattagaaagggtagaaaatccattagaggaagccgttaagttccttatacctcttaagaaccttgttgctgataacattgacactcatctgttagcatttgaaatatattttagaaaaggaaagtttctgttaatgctgcagtctgtcaaacgagcttttgccattaacagtaataacccatggttacatgaatgtttaattagattttctaaatctgtgtctaatcatagtaatcttccagacattgtgagcaaagttctatctcaagaaatgcagaaaatatttgtcaaaaaggatttggaaagttttaatgaggattttctgaaacgtaacgctacctctcttcagcatctactttcaggtgctaaaatgatgtattttctggacaagtcaaggcaggagaaagcaattgctatagccactagactagatgaaactataaaagataaagatgtaaagacattaataaaggtttctgaagcactgcttgatggcagctttgggaactgtagttcccaatatgaagaatataggatggcctgtcataacctgcttccttttacatctgccttcttgcctgctgtgaatgaagtcgacaatcctaatgtggcactgaaccatacagctaattatgatgtcttggcaaatgaaatttgaaatcttctagaaagtagactcctatagactcaaagctgaattgagatcagggtttcttttccagggtgcattttaatatacgtatgaaatgaaatatttggttaggatttttaaatggcatattctgtaagcttattttgttctttacccgacctgccaatttacataaccatctgttaaaattacctgtttattcttacacagttttgtggtagctccgatcgcttctgtataattataatttcttactaagctaagttgtatacaaccccactgtattattttctttagattctgatttcaggatctgtgctttgattccttgtctgttttatcgtatatttgcttgctttttaattaaagcacatcagttttaaagtgttaactatatgttaacaatatggaggctgggcgtggtggctcacacctgtaatcccagcactttgggaggcccagactggcggatcacctgaggtcaggagatcgagatcagcctggccaacatggtgaaaccccttctctactgaaaatacaaaaattagccagacgtgatggcacatacctgtaatccaagctgcccaggagctgaggccggagaatcgcttgaacctgggaggtggaggttgcagtgagccgagatcatgccactgcactccagcctgggcaacagagcaagactccatctcgaaaaaaaggaattcctcttggcagatattgaagtttatttgaaaatttaattcgtccttttttcattgtaatatttcatggtttactatttccttttagtattcatgaaaatggtattttctggttgaataagggtactctagttttatgtagatgatttcagaatgtgaaggctggtttgcctgtcagtcatggaaattcactggtaaaattgttgaatatttctctctcccagtcttaaaagcccacaggcaagaattaatgctttcttaactaagttactttgagtattaacaagtagcttatactgaggtgtgcttcaagggagcattatagggcagaaaacaaattaaaatgaaatgttgttgttatagccatgcattgaccattaaatgcattttaatatctcggcaaaatgagatttgaaactcattagtttaactcttaaaacatagtgttgttaaacagtattttttgggggcgggtggatagctttttgttctatcttgtacagaaaacagtaatggaatcactcatgttcagaaccttgtaaatatgtctgtaatattaatgcttccctttattaagacaaatatacattcaaaaagggagattttatttagacacacattttcttttcaccctaatctatttagattcatacttattgagacgggaaaaactcgctgtaaaataatgccaacctagataatgctataataaattattttgtacac

SEQ ID NO: 30691 - DNA, 2896 bp, Homo Sapiens
catgtcagtcatctactttttttctttgaaatctgcatatgggttacaaaaactctgttaggttttgaaaattccattaagttggaaaccttggttaaaaatgtaggtgcctggcccatggttaccctggattcaggtctctcatgattatatttggggatttacgttcctaactgctaagcaacatctttgacaactagtaattcatactctactagtagtcacatgtcatatagtaaaataaatagggctttagttcttaagtaattctataggattttaccctgaaatccagggtgttcagatttcaaaaaggataatttatcagtattttctcatccagtcaaacttcagctgacattgatacaggtcaaaatgcgtagatgctttttggtgttggaaataagtgtctgtcttatggtcatcattgtcttcttagatttttgggtaggggggccaggtagggggagactcagaaataaaagcgttccccagataacttcaatctggaaagaattttttgtatagagtccatctctccctcaagactgaccacaggtttcatgagaaggtccctgaaaacatcacatttctctgaagaaccatcaacttgtcttttcttgaaccacaggaatggttctacagaccctactataattcttcacatttcagaacccatgtttaatggagggaagagagaaatgcatgggaaaagaacacctccttttctcctttctcttaaattcaaagacgtttgctttggaatgccctcacttctccctattcacaggcttctaaaatcattaatttactcaaggcacatgtgccttctttgccccaaatgcatcactttccttttagttatggctgattttgggtgtgtgtgtgtaagacatgcagtcaacaatgagatgaaggccattgcatagatctcatgcagatagtgatggattcagaaagtaggttccagtggcgtcactaccttcttgtaagccagtatacactggctatttgtggaaatctctttgggagatcaaatagagtattatgccactgtgagtgtttataaactggaaggaacaagtacctgtgtttcttgggacacaaagcactcagatcctgagtggatgcagacatgagagtaaatgtcagcccaaattaggcccctcgacctacagacatttcatgggttttatttaatcacaccccatggtttggggctacatgaggaagttggtaatgagctgaatttcttattcagtggaaaaaactgaaactgtctaaaaacacgggatatattttagaggcaattgtggaagcggagagaatgagatgatggtgttcagagggaccagcttctttttcagttgtctttagaactcaagaataatcaataatttagtgccccttcaacagccatactcagcaagaagaatcagaagcttgatcctctaacagaaatagaagagggtagctttgcccattgccactgtctttactgccccttctgcccctccacccacatccacattcagcatcactccaaggatgtgtcagcatcttgcccatgcaggtagaaatttgtgagtaggcctccatacttcctcgggggaagaaagagaaactagtgctggttttaagaatgtagctggcttttcatcagaacccttatgctaacctgaccacacttgctctcggggaagttcaagcctgtgatgtgcataaactccaacaagcctggctttggtgttcagcatgcacattccataaatatctcttgcaggcataccccacagctagactgcaggattaaaataacttccaaaaggtgctggattggagtttgttcaaatttctcattaaccactaatgttaattcataccaaatgcaaagtattctaaaccagctgatgctgtcagtgttcaagttttaagtgacttcaaacacaatggaagtgtttcaatgggagccagatctcatgagtaaaaatccattttataatagctctgtgatatatcagtgggagatgattcataggggagagatttgaacaagcagaattaagtgttagcaaaaatgctgcattgctttgattcatgtttaaagacctaaatttctatgcacaaggaataaagggcctacttaccaagtgtaaatcacaacataggctaccaaaatatttcttatttgctaggagaacaaagctgtcacggtgcatgatagctggacagagatggctaaaaaagaggcaaattcagatttggaaacagggtggcctcttcattatttattgccaagatctgaaaatcttcaacatcttataagacaacaatgaagtagcccctgaacagcatggagttgctgtgagtttgttcgttgcagacctttgtgttgggtcctgggaatctaagctttgttccctgtgcatggtggataattgaaaccaagaggacatgggatagaccttgtgacagaccaattctgtgacccctgtcttctgggtcacattattcattgttgatttaaatacaggactaccaaacagtacaaatctatcatgagtctggtagaaaagtaaaagtaaaagctgcacacgttacatactgtttattgttctaatgtacaactaactatttgcatataatgtgatttaatttattgctgttttgtgtagaaaaggagaactaatgactgtggatataacccatgttttgtataatatattttatttcttgtgcgaactggtcatttaaaatatctacttcatttgatgtttggatataaatgtgtatgtgtccttgtaaatgtttctatcaagcaagaatgccacgtactcagagtataacaatgtgttctcattaaaaaatacatcccgaaaaaaaaaaaaaaaaaaaa

SEQ ID NO: 30692 - DNA, 2146 bp, Homo Sapiens
cggggacggtgcgccagtgccccctccgcgagccccaaccagtagacggttccctgtctcccgcgccccaatttcgattttcaaacgcaactcctacaggattctgagaccccgtcccatctcccatatcccatttccagctgcaaattactgcagaatctgaacccaggaaagaaacccatttgccgaccccctcttccctctccagacaggtggagagcgggtgagggtctcgctcggctttccccctgcacctttcccaccctcccgcccgtccctgggggtcctccgtcaccgcggccatggcccagaagccgaaggtggacccccacgtcgggcggctgggatacctgcaggcgctggtcacggaattccaggagacccaaagccaagacgccaaggagcaagtcctcgccaacctcgccaacttcgcttatgaccccagcaactacgagtatctgcggcagctgcaggtcctggatttatttctcgattcgctgtcggaggagaatgagaccctggtggagtttgctattggaggcctgtgcaacctgtgcccagacagggccaacaaggagcacatcctgcacgcaggaggtgtcccactcatcatcaactgcctatccagccccaatgaggagacggtgctgtctgccatcaccacgctcatgcacctgagcccgccgggccgcagctttctcccagagctgaccgccacgcccgtggtgcagtgcatgcttcgcttctccctctcggccagcgccaggctccggaacctggcacagatcttcctggaggacttctgctccccccgccaggtggccgaggcccgcagccggcaggcgcactctgccctgggtatcccactgccgaggagcgtggccccacggcagcgctgatccatggagactgcgagaccgtggcacccctactgctggggaccacagtcctgatgtggacgcagggaacggggagcacatactgccccattggtgccttttcagccatctgaaaggcgggttctttcagcaggacaggcatttacactgatgaaacgccactgggagtgaggaagccagactccagagacacggagaagatcaaactggagctgcgttcataggctggcactctcaatcctacatcaggtgccaccaccaccagactcaggccctggtgtaagaagcggccaagtgcctggacccagaggctttgcaggacagtgttctcaggagctgggcctgaggcttaggagagctgccttcgctgcaggaaatcagggattatcccttaacagaagtgtctggagtagttttcaggtataggaatgagatgcctcgtggtgaaaggatctcaccctgggaagatgtggtgccccctccagggctctggaggatggatgcctcccccaggggctctccaagctgggcatttgggcctggtggatgccaacctggataacctgtggcccagcattgactgtccacccagccttgctgttaggcaccatgactccaagatgaagatgtggtccctgcccttgagtgacagcccagggacttaatgtggccatcgggcatcaagcacaaggccatgcaggtgatgatacgtcggaatagaggcaccagccctggtaactgcatcttctccccttgccaccccatggccccggctgaaagcttcggccctcctctgctgtcactcaatgatggggagccctaccccagaagtgtatcccacgagggcatcagggacgcagtgagtgttgctcaagggagtcaggaagagacggcaacgtaaaggatgtggctccatgtccatggtgccccctggtcaacataaggagcgtgggatccgatggaaaggtggagctcagggaaaatgggggtccttgcctctcgtgtaccccctcaaggctgaccccttagatggcccaggaatggcaggtgctacaaaaatggtacccacgtgggcatggaaatggggcagattaggggaccactggactcagaggggagggaagggctcatcagcacccgctcagggagcctgtccctttatgttcccaaataaagggtcctagaagactagaaagccaaggtcttttattaaaggtcccgactggtaaaaaaaaaaaaaaaaaaaa

SEQ ID NO: 30693 - DNA, 4992 bp, Homo Sapiens; identical to SEQ ID NO: 27006

SEQ ID NO: 30694 - DNA, 2271 bp, Homo Sapiens
gaggctgagaccggtgcgccgcgcgctagtggccgctcttccgcgggctagcgggcggtgggggcgccagcagcgcggaaggcgggcacgcgggccatggctccctgggcggaggccgagcactcggcgctgaacccgctgcgcgcggtgtggctcacgctgaccgccgccttcctgctgaccctactgctgcagctcctgccgcccggcctgctcccgggctgcgcgatcttccaggacctgatccgctatgggaaaaccaagtgtggggagccgtcgcgccccgccgcctgccgagcctttgatgtccccaagagatatttttcccacttttatatcatctcagtgctgtggaatggcttcctgctttggtgccttactcaatctctgttcctgggagcaccttttccaagctggcttcatggtttgctcagaattctcggggcggcacagttccagggaggggagctggcactgtctgcattcttagtgctagtatttctgtggctgcacagcttacgaagactcttcgagtgcctctacgtcagtgtcttctccaatgtcatgattcacgtcgtgcagtactgttttggacttgtctattatgtccttgttggcctaactgtgctgagccaagtgccaatggatggcaggaatgcctacataacagggaaaaatctattgatgcaagcacggtggttccatattcttgggatgatgatgttcatctggtcatctgcccatcagtataagtgccatgttattctcggcaatctcaggaaaaataaagcaggagtggtcattcactgtaaccacaggatcccatttggagactggtttgaatatgtttcttcccctaactacttagcagagctgatgatctacgtttccatggccgtcacctttgggttccacaacttaacttggtggctagtggtgacaaatgtcttctttaatcaggccctgtctgcctttctcagccaccaattctacaaaagcaaatttgtctcttacccgaagcataggaaagctttcctaccatttttgttttaagttaacctcagtcatgaagaatgcaaaccaggtgatggtttcaatgcctaaggacagtgaagtctggagcccaaagtacagtttcagcaaagctgtttgaaactctccattccatttctataccccacaagttttcactgaatgagcatggcagtgccactcaagaaaatgaatctccaaagtatcttcaaagaataaatactaatggcagatctgcgatttctgggtccactttctgagatgctttctaaaaccaaccaactgataaaaagtagatgagacttctccaagctgcttcacaagcaaactaaccgaaaaactgaaaatatacaaacagcttcacacacacacacacacacacacacacacacacacacacaaaggaagatcatcaatggctgcggtagcctagtaggaatggactatataataatatagcaggtgctcaataactgtttgttgcatttcagtaaaagcagaataacctttcaaaataataacaggctgggtgcaatggctcacacctgttaatcccagcacttcgggaggccaaggtgggcagttcgcttgggcccaagagttcgagaccagcctgggcaacatggtgaaaccctatctccgtgaaaaaatatgaaaattagccaagagtggtggcacatgcctgtagtcccagatacttgggagtgggctgggatgggagaatcgcttgagcccaggaggtcaagggtacagtgagccgaggtcatgccactgcactccagcctggcctgggcaacagagcaagaccctgtctcaaaataataataatatataattttacaccaaaagtttcaggaaaaaacgagtttgttggagttagtttatactttcacatatcaccacaaagatctccagttaaataactatcaatatccatttccattcatctccccctcaaatcatagcctaacagaacactttgaaagctcttttatttaatatttttttacatcctttgaagggagtgcttcaaaaatgaaagcatcagaagataaaatatttttatatttatgcatagcaagccttcatgaacggaagtgacacactctggattgaataatactgtagcctcattcatatgtagttattcaaattggattaatgtctgtgtgagtttatttgaactagcagaaagtatctgaagatattcaggaatagagtttatacttaaaatagctt

SEQ ID NO: 30695 - DNA, 3359 bp, Homo Sapiens
ggcggcggctccggggaccggggccttttgtttggagcggctgcgggggggccccggagcggcgaggccggcggccttccccagcttgctcggtcccggccacccctcgcgggggtggggggccgccccctgggccgggcatctcctcaggcgccgccgccccgccctaggccggccccgcccggcctgaggggaggaaccggccgggcctcgccgcgcggcccagccacctccggagtcgccgcctctgctctcagtgccccggatcggaggccgtccatcgcccctcgggccgacgccatgaagatcaaagatgccaagaaaccctctttcccatggtttggcatggacattgggggaactctagtaaagctctcgtactttgaacctattgatatcacagcagaggaagagcaagaagaagttgagagtttaaaaagtattcggaaatatttgacttctaacgtggcatatggatccaccggcattcgggatgtacaccttgaactgaaagatttaacactttttggccgaagagggaacttgcactttatcaggtttccaacccaggacctgcctacttttatccaaatgggaagagataaaaacttctcaacattgcagacggtgctatgtgctacaggaggtggtgcttacaagtttgaaaaagattttcgcacaattggaaacctccacctgcacaaactggatgaacttgactgccttgtaaagggcttgctgtatatagactctgtcagtttcaatggacaagccgagtgctattattttgctaatgcctcagaacctgagcgatgccaaaagatgccttttaacctggatgatccctatccactgcttgtagtgaacattggctcaggagtcagtattttagcagtccattccaaagacaactataaacgagtgactgggacaagccttggagggggtacctttctgggtttatgcagtttattgactggctgtgaaagttttgaagaggctcttgaaatggcatccaaaggtgatagcacacaagctgacaagctggtccgtgatatttatggaggagattatgaaagatttggtttgccaggttgggctgtagcatctagttttgggaatatgatttataaggagaagcgagaatctgttagtaaagaagatctggcaagagctactttagttactatcaccaataacattggttctgtggcacgaatgtgtgctgttaatgagaaaataaacagagttgtctttgttggaaactttttacgtgtcaataccctctcaatgaaacttttggcatatgcactggattactggtcaaaaggtcaactaaaagcattgtttctagaacatgagggttactttggagcagttggtgcacttcttgggctgccaaatttcagctaaagcatcaggtctctctctctgctaataaatgtcatccaagaggaactaaaaccagaggcattattactgcattgtttgtcactgggaaccaaaggataaaagagtagcataagctgctgaatgttgccatattaaaggagagaacttggtaacgtgaagtatttctcattgaaatgctttcccttttgtatatagccagtgttaaatccttaaatgcaatacagcctctgattattgagcttcctcttaaaaagatttttttattttatgtagccaacattgcagtactgtatgctcaaacacaaatcttaaagtatcggaactgtttagcttatgaaaataatcgactctgaatatttgttacaagtctgttttatgtgttttgattactagtgagcagaaaataacataccctgtattcaaaattactgaaatggcaatcaaagatgatcatttttatgtgattttagaaatgttaaggcaatactactaattattgtaggtttttttaacgtatcacccaaagcatgtatgtgatctttccccattagtatctttttctcaaatgccataattaactgaaatactattattaaattttcatgagaattctaaaatgaatcctgggaaatgcacgtttggtgatgttgcactttctgtattttacaggaattagtcaatacatgttgaaatgtttaacattttaagattggaggcttaattactgggagtctgtctaatgaagtcctgggactattgtaatggaatatgatttgagttcactgtgctctttttgtttgtttgttttggtcatatatacattcagaacttttattttaaaacaaccacaataacattaataatagaaaattcatctgtaaatattcacagtctagtcactgaaaaatgggaaaacctctaccatgccttattattaccctttgctgtttgaggagccagaaatagaggtgcagttagaggacggtcactttttccaacaaaacccactccatagccatgtggatttttatccaaaggctcaacaaccagagggaatggtgagacctgataactaaaatactgttattggcaagggtttgaaatgtgtaagaacctaggagggaaaggaagattgagcaacataggaaaaggggaagagaggctgagtgtcaccaaggtccaaactccatttataaaaatactgcaaaaccaggagttgatggtagaaatgcatatgatccatggcaggagtaaatctctccacctcctctaactctctgaaaactctagagttggagcaagtcttccatttgcttcttatccccttaaaagaatgccttccacttcccaacagcccccatcaagggaccccaagaggccaccatgctcttatctcgcactttctttcctattccccttgcctgaatctggagtggggttgagccctctgccttcaaccttaagatttaggaagttctttccccaactgtctaacttggaaaggtagatgagtctgaattttgaagtaacgaatgcaaattccactcagcagaggcaatgttatttatgtacatagggatagtggaatgagttttaatagattctgtccaaaaggggtttgttcctcttatttcctctatgtaggaagttgtgtcttaggcaactttatcagtatcaatggaaaaatgataggcactacaatgaaatggcaggatgccaatatgagatatttcaggaataataagaaatacagtttgtttgtataaaataaactatctcaagaaagttttcaacgacagtgatagtgttcatttgtaagagagagttctagaacttcgatgtccagtgcagtagccactacccatatgtagctgttgagcatttgaaatatggttagtccaaattgagatgtgctctaaaggacaataaaaggttaaatatctcct

SEQ ID NO: 30696 - DNA, 2518 bp, Homo Sapiens
atgaatgaacacttatcaagcctaattaaaaaaaaacgtaaatgtatgcagcccaaagattttaattttaaaacaccagaaaatgataagagatttcagaagaaatttgagaaaatggctaaagagctacaaaggcaaaaaacaaatctagatgatgatgtacctattctcttatttgaatctaatggttcattaatatatactcccacaattgaaattaatagtagtcaccacagcgcaatggagaagagattacaagagatgaaggagaaaagggaaaatctttcccccacctcttcccaaatgattcagcagtctcatgataatccaagtaactctctgtgtgaagcacctttgaacatttcacgtgatactttgtgttcagatgaatactttgctggtggcttacactcatcttttgatgatctttgtggaaactcaggatgtggaaatcaggaaaggaagttggaaggatccattaatgacattaaaagtgatgtgtgtatttcttcacttgtattgaaagcaaataatattcattcatcaccatctttcactcacctcgataaatcaagtcctcagaaatttctgagtaatctttcaaaggaagaaataaacttgcaaagaaatattgcaggtaaagtagtcacccctcaccaaaagcaggctgcaggtatgtctcaggagacgtttgaagagaagtatcgtttgtctcctaccttatcttcaacaaaaggccaccttttgatacattcaagacccaggagttcctcagtaaagagaaaaagagtatcacatggctcccattcacctccgaaggaaaaatgcaagagaaagaggagcaccaggagatctatcatgccgaggctgcagctgtgcaggtcggaaggcaggctgcagcacgtggcgggacctgccctggaggctcttagctgtggggagtcttcatatgatgactatttttcacctgataatcttaaggaaaggtattcagagaatcttcctcctgaatctcagctgccatcaagccctgctcagttgagctgcagaagtctttctaagaaggagagaacaagcatatttgaaatgtctgatttttcctgcgttggcaaaaaaaccagaacagttgacattaccaatttcacagcaaaaaccatctccagtcctcggaaaactggaaatggtgaaggccgtgcaacttcgagttgcgtgacttctgcccctgaagaagccctaaggtgttgtagacaggctgggaaagaagacgcatgcccagagggaaatggcttttcttacaccattgaggaccctgctcttccaaaaggacatgatgatgatttaactcctttggaaggaagccttgaagaaatgaaagaagcggttggtctgaaaagcacacagaacaaaggtaccacttccaaaatatcaaactcctctgaaggcgaagcccagagtgaacatgagccatgttttatagttgactgtaacatggagacgtctacagaagagaaggaaaacttacccggaggatacagtggaagtgttaaaaatagaccaacaaggcatgatgttttagatgactcatgtgacggctttaaggacctcatcaaacctcatgaggaattgaagaaaagtgggagaggcaaaaagccaacaagaacattagtcatgacaagcatgccatctgaaaagcagaatgtcgtcatccaggttgtggataaattgaaaggcttttcaattgcaccagacgtctgtgagaccacgactcacgtgctttccgggaagccacttcgcaccctgaatgtgctgctgggaattgcgcgtggctgctgggttctctcttatgattgggtgctatggtctttagaattgggtcactggatttctgaggagccgttcgaactgtctcaccacttccctgcagctcccctgtgccgaagtgagtgccacttgtctgcagggccgtaccgcggaaccctctttgccgaccagccagtgatgtttgtctcgcctgccagcagccccccagtggccaagctctgtgaactagtccacctgtgcggaggccgggtcagccaagtcccccgccaggccagcatcgtcatcgggccctacagcggaaagaagaaagcaacagtcaagtatctgtctgagaaatgggtcttagattccatcacccagcacaaggtctgtgcccctgaaaactacctattgtcacaatgacagtgacctcactggcctgtggtgactgcacacagctcgcaaaactgtctttggatgttcaaatgagaaacaaaactgtgaagagaaggaactggcgtatacaagatgacttctgatatcatgtttgccatgtgttgtggttcttaagaactcataggtgactttctgatgactgaatgtctgtttcagagacgcttcgggcctttttatttttattttattttttattttttgagacggagtccagcctgggcaacagagtaactctccttctcaaataaataaataaataaat

SEQ ID NO: 30697 - DNA, 1870 bp, Homo Sapiens
aaaaaacaaccatttcctctctgctgagagccagggaaggcgagctctgcgcacacgggcgtccctgcagcagccactctgctttccaggaccggccaactgccctggaggcatccacacaggggcccaggcagcacagaggagctgtgaacccgctccacaccggccaccctgcccggagcctggcactcacagcaggccggtgctaaggagtgtggcgcgggctcgactcccactgctgccggcctcccgagtgactctgttttccactgctgcaggcgagaagaggcacgcgcggcacaggccggcctccgcttcccgggaagacggcgcactcctggccctgggttcttgctgctgcccaccctctgctccctgggatgggccccgaggcgagcagcttcagcacaggcctggccctgctccaggtgcaggaaggaggataaggccgggccgagaggcggcacacctggaccatcccatgggcctccgcccgcgccgccccgaggatgagtggtgatgtcctctagccacccctagcagcgtcggctctccctggacgtgcggccgcggactgggacttggctttctccggataagcggcggcaccggcgtcagcgatgaccgtgcagagactcgtggccgcggccgtgctggtggccctggtctcactcatcctcaacaacgtggcggccttcacctccaactgggtgtgccagacgctggaggatgggcgcaggcgcagcgtggggctgtggaggtcctgctggctggtggacaggacccggggagggccgagccctggggccagagccggccaggtggacgcacatgactgtgaggcgctgggctggggctccgaggcagccggcttccaggagtcccgaggcaccgtcaaactgcagttcgacatgatgcgcgcctgcaacctggtggccacggccgcgctcaccgcaggccagctcaccttcctcctggggctggtgggcctgcccctgctgtcacccgacgccccgtgctgggaggaggccatggccgctgcattccaactggcgagttttgtcctggtcatcgggctcgtgactttctacagaattggccatacaccaacctgtcctggtcctgctacctgaacattggcgcctgccttctggccacgctggcggcagccatgctcatctggaacattctccacaagagggaggactgcatggccccccgggtgattgtcatcagccgctccctgacagcgcgctttcgccgtgggctggacaatgactacgtggagtcaccatgctgagtcgcccttctcagcgttccatcgatgcacacctgctatcgtggaacagcctagaaaccaagggactccaccaccaagtcacttcccctgctcgtgcagaggcacgggatgagtctgggtgacctctgcgccatgcgtgcgagacacgtgtgcgtttactgttatgtcggtcatatgtctgtacgtgtcgtgggccaacctcgttctgcctccagctttcctggttagcgcaacgcggctccacgaccacacgcacttcagggtggaagctggaagctgagacacaggttaggtggcgcgaggctgccctgcgctccgctttgctttgggattaatttattctgcatctgctgagaggggcaccccagccatatcttacactttggtaaagcagaaaaccaggaaaattttcttaaaatatccacaatattccttgagtgagtcagaatctatagccggttagtgatggtttcaggcagaatcgtgttcgtgtctgttttgctcgattcctttcctaagttaaataaatgcaagcctctgaacttctgtctataaaaaaaaaaaaaaaaa

SEQ ID NO: 30698 - DNA, 3807 bp, Homo Sapiens
gacatctccgggaacccagcccaggccctgcctcccggacacaccgacgctcacgtagtcgcgcttgccacaaccctgcgggctctccgatgcggcgagcgagctggggagggggcttctccgcggcccaaaagcctgttcatctagccccatgatggctgtggacatcgagtacagatacaactgcatggctccttccttgcgccaagagaggtttgcctttaagatctcaccaaagcccagcaaaccactgaggccttgtattcagctgagcagcaagaatgaagccagtggaatggtggccccggctgtccaggagaagaaggtgaaaaagcgggtgtccttcgcagacaaccaggggctggccctgacaatggtcaaagtgttctcggaattcgatgacccgctagatatgccattcaacatcaccgagctcctagacaacattgtgagcttgacgacagcagagagcgagagctttgttctggatttttcccagccctctgcagattacttagactttagaaatcgacttcaggccgaccacgtctgccttgagaactgtgtgctcaaggacaaggccattgcaggcactgcgaaggttcagaacctcgcatttgagaagaccgtgaaaataaggatgacgttcgacacctggaagagctacacagactttccttgtcagtacgtgaaggacacttatgccggttcagacagggacacgttctccttcgacatcagtttgcccgagaagattcagtcttatgaaagaatggagtttgctgtgtactacgagtgcaatggacagacgtactgggacagcaacagaggcaagaactataggatcatccgggctgagttaaaatctacccagggaatgaccaagccccacagtggaccggatttgggaatatcctttgaccagttcggaagccctcggtgttcctatggtctgtttccagagtggccaagttacttaggatatgaaaagctagggccctactactagtgactgcaggtgacagggcgtggcggagctgccacagacaagcctagctctgctcactgtgcagtggagatggaaggccagggaggagcaacgtggaacttccatgaggccccgtttgggaaaataaaaggatcctcttcacttctttcttaaacagcaaatccagccaggttcagattacacaaccagtgtctcactcaaaggagcagtggtggctggcgcgctttcgcactgtggcagccacgagagtctgtgcacgtctgtgctggaaagggtatggatgggaatcaagcctatgccagtgctgatgaagctggaggagtctctcttctgctctccactcagatgtgggacatcagtcgccaaaagccactcagccccagccacctcgcgtgagaccctcactgttcattgtgttcatctttgggtgctctctgccagccaggcctttcctgcaagctgctgtgcttccccgtccacgtgtatctctgctgtgacacactgagctgacgcacatctccagtgcagctgcagaagagaaatgggattggctcttgttttctgcaagttcatgttttgcattttatgttcttccacaattgatctgatgttcaggaaaagataataaaggcaaattagttagtggttgagacaggcatttcctcctcccgcttcttgaccccacagatgtattccagcagagagcaacacaccagtcatcaaaacccactggctcctgtgcggtgtcacagattgcagggttctgacaaggcaggacagtcaagagtggggacactttcagcttctacttttgccttctagggggagctttctaagtccccacatttaccccgagtcaccggaaaaatctgatttttcccccgaaagctcaatgactttaacgtgcttggctggtttgtctcattctttatgaaagaattttggggccgggcgcggtggcttatgcctgtaatcccagcactttgggaggccgaggcaggtggatcacgaggtcaggagatcgagaccatcctggctaacacggtgaaaccctgtctctactaaaaatacaaaaaaattagccaggcgtggtggcgggcgcctgtagtcccagctacttgggaggctgaggcaggagaatggcgggaacctgggaggcggagcttacagtgaaccgagatcacaccactgcattcccgcctgggcagcagagcgagactccgtctcaaacagaaaaaaaaagagaattttgaatctcctttcccaaagagtcatcttttctgctgtgtttaggacatttgatttgcatatccaatatctcctcgaaaccttcagaaaatggttttatcgtgactgtgattcacactatctagaacactttaccagcacccagggacatggacttgggtgttcttatttatggtgtgtatgtaaagagataggggagaaaaacctcacccaagttcttatacgttattttaaacgtttgccaactctgaaatttcagagattcattgttcttaaccatattggactaaagtctgttggttagtgctgttgtaaaagagacctctggggccgagtgtggtggcttatgcctgtaatccctgcactttgggaagccaaggcgggcagctcacctgaggtcaggcgttcaagaccagcctggccaacatggtgaaacctcgtctgtactaaaaatacaaaatttagctgagtgtggtggcaggcgcctgtaatccagctactcgggaggctgaggcaggagaatcacttgaacccaggaggtggaggttgcagtgagccgagatcacgtcactgcatttcagcctgagcgacagagtgaaactgtctcaaaaaagagagacttccgggacagtcattatcagataggccccaaacctgtgatttttcttgggcaagattggtgtttacttaggggtgttttaaaaatatatttttacaagtatacttgtaggaagttggttttttattttctatttttgtttgtttttggagtttggttaaacgactcttttattttctgttttgccttatcttactaaagtgaagttttcctaaggcaagcaagaagaggagtggaagcacagttgcctggatttggaggcagagttgtcaggcttttcaagctaagagtcttgtgcttggattttccagattaatttgaaaagacctcccatttgtggctttgtacataaccaacaggcagatactgagtgccttggctcctagagttttgtggttgggttaggttgtttttgttgttgttttgttttggttttgttttcatttctgaagtttaagatgccttgactttttaaatgctcttaaggctattcgatgtaattcttactcctaaaactggctgttcttagcctgaaatctaatgctttgttttttgtacctctcccaggtgggtaacactctaggatgacatgatgttataattttaggggaaatcacatttttaccttatgctgttactgggcagaaccacgttttatgtaaacataccagacatcgggtaacagacagtactttaaatgttataaatttggtgatcagaactattaatagcataaatcgaactcaaatggaagcaaaactgatttcatgcaggtcctgaattttactttgccttaagaagtgccctccccacaatgcaggagaggcacagagtgcactgtcattgacatgttacccgactaaggatcactctgttcataagaaaaaggcctgaagtgactctgtttaataaagtcagtttaattttatct

SEQ ID NO: 30699 - DNA, 3722 bp, Homo Sapiens; identical to SEQ ID NO: 23820

SEQ ID NO: 30700 - DNA, 2368 bp, Homo Sapiens
agccgccacactttcccaagcccgcaggcgccccccccaacaccagcgctgcacccccgacccattccccgcggccccctccaggagaaaaaatgaaaccagactggccgaggaggggggcggcagggaccagggtgcggagcagaggtgagggagacgggacttactttgcgaggcgcggtgcagggcgccgccgacgagaaataaaggccccgatacgggctgcctggagccccccgagcgcagcaatgtcagggctccagtccgggcggcgttggcggccgcaggggacggggacgggcgcgcgtgcggcgggcgctctcgctgcgctccggctcgggccccggctccgcgcggctccgctcctggctcccctctggctcctggcaccaactccggacagtcacatgacgccggcgccgctcgctctgcgagcctcccggggctggcgggagaataacttgtctgactaccagtattcttggatgcagaagtgctgaagatgagcacacacacgtacggagaatttctggagaattcagctgctcagaacaagaactgagatccagagagatgatgactttgcccatagaccaaacaaagaaatacatgtttcagtcctgtgtcctcctgctatgtgtgtccggaattggtgggttcttggtctcactgactccaagaatgaagctgcggaccctcgcggaccgtgtgtgaatgcctgctctgtgagccctcagaatctactggctgaatgagtgcgtggaggaaatgtgctcagagctgctgtgtgtcatcctgtgtttgaagtgctcctgcagctatcattcatccagttaagaatttgaagaagtgtgtgcacaaagacggagtctcactctgttgcccaggctggagtgcagtggcacaatctcggctcactgcaacctctacctcctggattcaagcggttttcctgcctcagcctccagagtaacagggattacaggcatactccaccttgccctgctgattttgtatttttagtagagacaagagtttcaccatgttggccaggctggtcttgaactcctgacctcaagtgatccactgcctcagcctcccaaagtgctgggattataggcgtgagccactgcgcctggccaaatgctctactttttaatcaatgttttccaaaatagggatttttgctatgtgctttagaaattagagaacaaacggtgataatatatgctaaacttaaaattagtatgcctccttttatagacaacaagaactttgtcacttcccagtttgtcttgtcattcaggaggctcagagctacgatctgtgcccactcgtgctgcctcttcttaactttgatttcctgaagcagcgatttcatctccgtttcccctcatcacctgttcttttaactgtttaaaaacagcattacatgttgttgcaagtggcctcaaattctttttggtagaagggaaattgtaatccatgagaagaaaaaaattttcctaactattctcaggtgtgtttaagggctgcattccatgatgctatcagtgccttctttcagctcacaggatatcggccatgttaatgagtctgatgttgctagtatcacaggcaccggaaaatatgcacattatgctggagcattagaatgcaacagaaagagccctgggcttggagtatgcagaactggttcttgttacaactcctcttactagtgggctctggaagaaaacacattgaattcatgatcatggttaacctttggagagagagaggagaccaggatgaaggagccagtcgaagatcctgttcaagtgtacactgagccagcaggttcaccagaaagctattgagcgtttgctggaacacattatgcagggtgaatttcttctggaatgttgccaaggattttttatgcttctgtggcaggcatttcttgaacattgtcatttagccaagcaaagaagattttcttaaaggatagaaagtgtttaaaaatttttgtttgtttgaagataggttaaatggctatatgatctcaggataagacagagaaaatcacttatttctctaagtgatctgattaggttagtgatgttttgcctttaaacagattcatcattattcctaaagtattgctgtattaatactgtcttctagaaagtatccaccagtgcctacttttcttcgatatcattagctgtttttcgaaactgaatttgctcttcagagatttctcatatgtttgcgtataaggaactactggtaatagccaagaaaatttggaggtgcagagaacatgctgaaacagaatttttcactttcaattctagaactatgccataaaaaaaaaggaaaatgt

SEQ ID NO: 30701 - DNA, 3482 bp, Homo Sapiens
gggcgggccgggcgctgggagctggctgtcccaggagcagagcagtctccctgtccagatcaccaggatccctgcttgctggagaatgacccagatgtcccaggtgcaggagctcttccatgaggcagcccagcaggatgccctggcccagccccagccctggtggaagacccagctgttcatgtgggagcctgtgctgtttgggacctgggatggtgtgttcacatcctgcatgatcaacatctttggggttgtgctcttcctgaggactggctggctggtgggaaacacaggagtgctcctgggcatgttcctggtgtccttcgtcatcctggtggccctcgtcacggtgctgtctggcattggcgtcggggagcgcagcagcatcggcagcggtggcgtctactccatgatctcctcggtcctgggtgggcagacgggaggcaccatcgggctgctctatgtgtttggacagtgtgttgcaggtgccatgtatatcaccggctttgctgaatccatctcggatttgctgggcctcgggaatatctgggctgtgcgaggaatttcagttgcggtgcttctggccttgctgggcattaacctcgcaggtgtcaaatggataatccgcctccagctgctgttgctgttcctgctggccgtgtccacactggactttgtggtgggttctttcacccacctggacccagaacatggtttcattggatattcacccgaactgctacagaacaacacgctgcccgattacagcccgggggaatcttttttcactgtctttggggttttcttcccagcggctacaggagtcatggccggcttcaacatggggggcgacctcagggagcctgccgccagcattcccctgggctccctggcagctgttggcatctcgtggtttctgtacatcgtcttcgtcttcctcctgggcgccatctgcactcgagaggcccttcgctatgacttcctgatagcggaaaaggtatccctcatgggcttcctgttccttttgggcttatacatctcgtccctggcttcctgcatgggaggactttatggagctccccgcatcctgcagtgcattgcccaggagaaagtgatccctgcacttgcctgtctgggacaagggaaggggccaaacaaaacacccgtggctgccatctgcctgaccagcttggtgaccatggcctttgtttttgtgggtcaagtgaacgttctggcccccatcgtcaccatcaacttcatgctgacatacgttgcagtggactactcttacttctccctgtccatgtgttcctgcagcctgaccccggtgcctgagccggtgctcagggagggcgcagaaggcctccactgctctgagcacctgctcttagagaaagctcccagttacggctctgagggacctgcccaaagagtcttggagggcacgctactggaattcaccaaggacatggatcagctcctccagctaaccaggaagcttgagagtagccagcccaggcaaggagagggtaacaggaccccagaaagtcagaagaggaaaagcaagaaggccaccaagcagaccctacaagatagcttcctcttggacctcaaatcccctccttctttccctgtcgagatctctgacaggttgcccgctgcctcctgggaggggcaggagtcctgctggaacaagcagacttccaagagcgaagggactcagcctgagggaacatatggagagcaacttgttcctgagctgtgcaaccaatcagagtccagtggagaagatttcttcctgaagtccaggctccaagaacaagatgtctggagaagatccacttctttctatacccacatgtgcaacccctgggtctccctgttgggggctgttgggtcccttctcatcatgtttgtgatacagtgggtgtataccctggttaacatgggtgttgctgccatcgtgtatttctacattggccgggccagtccagggcttcaccttggatcagcctccaacttcagctttttccggtggatgaggtctctcttgctcccctcctgcaggagcttgcggtcccctcaggagcagatcatcttggcgccgtccctggctaaggttgacatggagatgactcagctcacccaggagaatgcagacttcgccactcgggatcgctaccaccactcctccctcgtgaaccgggagcagctgatgcctcactactagatgcagtgctgggaccttcctcttttggagctgtcccatgtacagtggacccaagctcaggaccttcgtggagctgcttctccaacctgagaaactcaagacccatcctcccgctgtcactttggacaatggaaatctacattttcttttccctttttttttttttttgagacagagtctcgccctgtcacccaggctggagtccagtggcacaatcttggctcactgcaacctctgcttcccgagttcaagcaattctcctgcctcagcctcctgagtagctgggattataggcatgcaccaccacacccagctattttttgtatttttactggagacagggtttcaccatgttggccaggctggtctcgaactcctgacctcgtgatccacccgtctcagcctcccaaagtactgggattacaggcgtgagccaccatgcctggccagaaatctatgttttcttagaacatgtggaagaaggaaaaagacaaaaaaggaaatctggattctgaggaccacgtctcacccagggtgacatcaggaatggtgctagcctctgcaacacgacacccagtctgaagagctctatacaggtactaagactagcaggggacaccaagactctgcacaaccagattgcttgtgcagagggccacaataagtgtatgttttatattttattgtattatttattcaaaaataaataatacactcacatgtttccacacccaaaagatatatagagtgaaaagtctccctccaatccttattctccacctgctcagttcctgtctaccctggcctagaggtaaccactattctcatccgtacatccagcatttctttatggatatacaagcaaatgggaatgtagagtctcacattctctctttatacacaaaagttagcacgttatacacatgttctgcaccttgcttttttcccttaacaatctatcttggagacatttcatatcaattcatatgccatttgttcatttttttcattgtataaatgtgttataatttatttcgccagttccacaatgatgagcatttggattctttccaatcttttgcaatgacaatcagctctgcagtgaataatcttgtacaaatgtgcaagcataaagtgtatctctaggataaattcccaaaagtggaattgcaggatcaaaaggtacatgcatttgtaaactattattgtttagtgagggtctttttaattaaagaattaacatgaattgcct

SEQ ID NO: 30702 - DNA, 2716 bp, Homo Sapiens
agtctgcggccgccaggaagcccagattcgagtgtccggagagtaaccggaagtgctgtccccaggcctaggggcggcgccggcggctgccagggagaggcaagaattgagtgttgtgaatagttctgaactagagaccttttgaaaccaaaaggaagatggtcttgagtctttcttgttacgaatgctatcttctttgagaagtcaaattgtcaggatcaggaatgtatgttttcttccatctggattctagggttggaaataccaagtaaggaattaacatatatgatgctggaaacttgtagaggctcatgattgaaaggcctgaaacagatgtatcttccaagttcttatcaagaaaatgactgtgagggcaacgatgggtcaagaagaccagcggaaaactccctaggagagagccatagaaaatgtacacttcagaagagaaatgtaatcagagaactcaaaaaaggaaaatatataatgtatgccctcggaagggtaaaaagatttttattcatatgcatgagattattcagatagatggtcatatataccagtgccttgaatgcaagcaaaacttctgtgaaaacttagctcttattatgtgtgagagaacccatactggggagaaaccttataaatgtgatatgtgtgagaaaacctttgtccaaagctcagatcttacttcacaccagaggatccacaattacgagaaaccttataaatgtagcaaatgtgagaagagcttttggcatcacttagcgctttcaggacatcagagaacacatgcaggtaaaaaattctatacatgtgacatttgtggcaagaattttggtcagagttctgatctgcttgtccaccagcgaagccatactggcgagaaaccatatctatgtagtgagtgtgacaaatgcttcagtagaagtacaaacctcataaggcatcgaagaactcacacaggtgagaaaccatttaagtgtctcgagtgtgaaaaagcttttagtgggaaatcagatcttattagccaccagagaactcacactggggaaaggccctacaaatgtaataagtgtgagaaaagttaccgacaccgttcagccttcattgtacataaaagagttcatactggggagaagccctataagtgtggtgcctgtgaaaaatgctttggccagaaatcagaccttatcgtgcaccagagagtccacacaggtgagaagccgtataaatgcctggaatgtatgagaagttttactcggagtgccaacctaattaggcaccaggcaactcacactcacacttttaaatgccttgaatatgaaaaaagctttaactgtagctcagatcttattgtacatcagagaattcacatggaagagaaaccacatcagtggtctgcgtgtgagagtggcttcctcctaggaatggactttgttgcccaacagaaaatgagaactcaaacagaggagctacactataaatacactgtatgtgataaaagcttccaccagagttcagcccttcttcaacatcagacagtacacattggtgaaaaaccgtttgtctgtaatgtgagtgaaaaaggtcttgagcttagccctccccatgcgtcagaagcctcacagatgtcttgaccaggcgagaagctgtaataccaatattaaaaattatttatgtatcagagaactcattaagatgaggacaaatctcagactttgctcagagctcagaattcagtggggaccagagagcctgcaattggaaatatgagaaattctttgcccagagagctgccctaacagaacacttcatcctcactccaacgagaaatctacagatgcccagaggttttgaaaacttaccgtctgagctcaaatttgatcactcacaagaggattcatacaagtgggaaaccttagaaatgcactgagtgtgagagagctttctactaatgctcagcccttctcgttgtaagagaattcacaccggagaacaactttttaaatgccttcagtgtcagttgtgctgcagacagtatgaacatctcattggacctcagaaaacccaccctggggagaagccccagcaagtgtgaaaaaagcttctaacaaaactctgacttacccatcagagaagccatactggtgaaaaattgtatatttgtcttaagtatggcaaaagcattcgttggagagccttacttgggtttgcacccaaaaaaaaaaacccaatctgaggaaagactgcaagtgtctgaatgaagagtgcttgtcaatgatcaactcttgtggtacatcagggaactcacataggtgaaaaaacccatacttaccttgagtctgagaaaacctttggtagaagctcctgtcttatcaggccccaaaaaacctgttctgcagtgagagatttaattgtgggtgagaatctatgtacatataatatgtatgagaagactgttctcatagttagttgactcatatggtagagaggactttacatgaaatcagtatgaaaatagttttttagatacccagaagcttgttctgggagaagctagggtgggtcagagtagacctgatgggtaactcaggtaaagatgcttttcttttatctgaactacttaatgattgctttacttttactttttaaaaaattcagaaatccaataaaggaaaggacggtaaccttaaaaaaaaaaaaaaaaaaaaaaaaa

SEQ ID NO: 30703 - DNA, 4593 bp, Homo Sapiens
ggggctgtctgggctcggggcgcggcggcagtcagctctatgttcgcggtcttaacctctcctctggccgagtccttgcaagaagtgaattacccgaccctgcaaaacacttactattttggagtttaaagtatgtcatcatggcaaagtttcggagaaggacttgcatcattttggcactttttattctatttattttctctctgatgatgggtttaaaaatgctgagaccaaatacagctacttttggagctccttttggacttgaccttcttccagaacttcatcaacgaactattcatttggggaaaaattttgatttccaaaagagtgacagaatcaacagtgaaacaaataccaagaatttaaaaagtgttgaaatcactatgaaaccttccaaagcctctgaacttaacttggatgaactaccacctctgaacaattatctacatgtattttattacagttggtatggaaatccacaatttgatggtaaatatatacattggaatcatccagtgttagagcattgggaccctagaatagccaagaattatccacaagggagacacaaccctccagatgacattggctccagcttttatcctgaattgggaagttacagttctcgggatccttctgtcatagaaactcacatgagacaaatgcgctcagcttcaattggtgtactagccctctcttggtacccacctgatgtaaatgatgaaaatggagaacctactgataacttggtacccactattttggataaagctcataaatataacctaaaggttacttttcacatagaaccatatagcaatcgagatgatcaaaacatgtacaaaaatgtcaagtatattatagacaaatatggaaatcatccggccttttacaggtacaagacgaagactggcaatgctcttcctatgttttatgtctatgattcctatattaccaagcctgaaaaatgggccaatctgttaaccacctcagggtctcggagtattcgcaattctccttatgatggactgtttattgcccttctggtagaagaaaaacataagtatgatattcttcaaagtggttttgatggaatttacacatattttgccacaaatggctttacttatggctcatcacatcagaattgggctagcctaaaattattttgtgataaatacaacttaatatttatcccaagtgtgggcccaggatacatagataccagcatccgtccatggaacacgcaaaacactcggaaccgaatcaatgggaagtattatgaaattggtctgagtgccgcacttcagacacgccccagcttaatttctatcacctcttttaatgagtggcatgaaggaactcagattgaaaaagctgttcccaaaagaaccagtaatacagtgtacctagattaccgtcctcataaaccaggtctttacctagaactgactcgcaagtggtctgaaaaatacagtaaggaaagagcaacttatgcattagatcgccagctgcctgtttcttaatgcattgattaaagtttaatagttatcaaaatcacctaatttttaaaaatagctttcgttttgagttctggaaagaaaactgtcaaaatcagtatatactattagttatatttaaaaatatttttttaaattctttacagataatattatacttgttacccttcacaataccacatgagaaaatatctgagacaaaatgtatacaaatatattccttatggcataatttattgcatttctgactgaaatcaaaattctgatttgatggcaattgaattttcattttacaatagataaatgcttgtgttacctaaagcacttagcacacagttaaattatatttacatcctagacccaaataaataggattgtgtgtatatttgggatatctattgaagaaaaaaagaaaaccccttaaagataatgtacatgcttcatgtcatgtctttaaaataatttaatcaactttattgtcttagtatttagactctggataactctacaataatgaggaaattcttaagaataacaaaatcactgtaccttcctctcaattttgctgtgaacctgaaatggctttaaattaatactcttattttttatttaatttaattacataaattaaaccttaccatgaccaaattgtgttaggaaggcctgctatctacagcacagtgtgtcatttgcagatttgtggttacctataccacgctaggtgttttgacatgtttagtgtttctgctttacagtgctgaattccatattttagaagctatgaaagtccttttatgaaaaagttactgattgcttctcagttattaggaaaacagttgtttcacaattattatgtagatatgatgcccaaatatcatttttagtatatcttgtcgatctttaagttgttactattgtgttattcatgtctttaaatcagataccaaatattttttaggaaagaaaaatgttattactgtcattaggttgtcttttaatactttaagttattttgacgaaaagtaatagagaaaatttacttagcattttagattctagagacatggaaatgaaaattattttatgtctagagtaggtcctgaagtttggctttacattaagtttagcactgtatcagaatgaagaaactaatattttacataaaaactaatactttcaattttttatatagtaatatccccattttgtaaatgttagacttttatcatacctgtaagttaaaatacttgttatcaataacttgtcatattgtgacaaattgatcacttgtgtacgaaaaataaatctccttaaaaactaaataaaatgcactgtattcttacagttaatgtttataactatagtaaaaaattaatatatatcctattacataaatgttatttcttaggtgttccattaagaagagcaatagaataatgctaaaaaataatgcctataaatcttcagagtataaagacatccattcagaaacaaaaattagcactaaattttttataaaatagaccagatgacaaaatttattttatttttaaacagtggttttgacacaaattatgttattgaaaagcattattaatgtttaatttatttaaaattttggaatttgccatttctcagacaatgatcaggccttaggaaattaatacagtagtagtaatcattttctaggggaaaataaaagaataaatcactatactgatattttgatataagcaagcacttacatggtaatcactatatagatccaacctgtggattttcttcttatgtccatttaactagaatatattattttaggtataatttacaaatgtcacacctaataatcttttataatataccatatttcattaaagttttgttagagaagtatctaccacagaggagtttttgtcattgtgtacgttgtgtatttgaacccaccatgacagaaagtaaattttaggaaatagttatgagattaagggaaaatctataaaaacaaggttagcatattctcaacacagataccaccactttctttttcccattatagacatggtgaatccacacagcatacttcatctctgagctttgttgtgattcctcaacacattaccctaaccagccagcagtaacagatttcagagtaagataaagcagattctgtcttcattgcaaaaagttattctcaatggaagaatggcatctgatctcataattactagtttatattaatatagtttttttctccctttttaataaaataattacagtcatccctcagtgtctgtgggggattggttccagttacccctatagataccaaaatctgcagatgctcaagtccctgatataaactggcatagtagttgcatataatctatgcacatcctcctgtatacattaagtcatctctagattatttataacacttaatacaatgtaaatgctatgtagttgttataccatactggttagtgaataattacatgaaaaaaaagagtctgtacatcttcagagtttcagtcggcaatttcttggccatggatgtagaacctacagataaggtgagccaactgcattaggaaataactctaataattctgttaattcttagagaggaaaactttcaaaatcttcctcaggtatttattacaactgcctttaccattttagttgtaacacagtttaaattgttatgataacaagtaaataagagcaaagaatttatttcttaattcaaaactatacgtttgaattcaatatggtataacttaaagtggtataatacatacaatgcatgaatcataatggattcttttataagttattaatttttatggtttaatcagtctaattgttttgactgttatagaaaccaaatattttactgtttcttttaaggactaatattgtcaaaaactgctgttattaacttcacttgagttgtttaacttccttctgttttaagattgtaattaaaaattactattttgttatatggaatggttaatttttacctaataaaaacatagatgaaatacattgaaaaaaaaaaaaaaaaaaa

SEQ ID NO: 30704 - DNA, 2469 bp, Homo Sapiens
cgctttagcttcggccccggccggccgggcggggaagactggtgtggtctggccatggatgggctccaggccagtgcagggccgttgaggcgcgggcggccgaggcgccggcgcaagccccagccacacagcgggtcggtcctggccctgcccttgaggtccaggaagatacgaaagcagctgcgaagtgttgtatcccgcatggcagcgctgaggacgcagacgctgcctagcgagaactcggaggaatcgagggtggagtcgacggccgacgacctgggggacgcgctacccggtggggcggcggtggcggccgtcccggacgcagcccggcgagagccatacggccacctggggcccgcagagctgctggaggcctcgcccgccgcgcgctccctgcagaccccgtcggcgcgcctggtgcccgcttccgcgccgcccgcgcgcctggtggaggtgcccgccgcgccggtccgggtggtggagacctcggccctgctgtgcaccgcgcaacacttagcggccgtccagtcgtccggggcccctgcgacggcgtcggggccgcaggtggataacacgggtggggagccggcctgggactccccgctgcggcgcgtcttggccgagctgaaccgcatccccagcagccggcggcgagcggcccgcctctttgagtggctcatcgcgcccatgccgccagatcacttctaccggcgcctatgggagcgcgaggcggtgctggtgcggcggcaggaccacacctactaccagggacttttctctaccgctgacctggattcgatgctgcgcaacgaggaggtgcagttcggccagcatttggacgccgctcgctacatcaacggacgacgcgagaccctgaacccacccggccgcgcgctgcccgccgccgcgtggtccctgtaccaggccggctgctccctgcgtctcctctgtccgcaggctttctctactactgtgtggcagtttttggctgtgcttcaagagcagtttggaagcatggcaggctccaacgtttacctcacgccccctaactcgcagggctttgccccccactacgacgacatcgaggccttcgtgctgcagctggaaggtaggaaactctggcgtgtataccgaccccgagccccaaccgaggaactggctctgacatccagccccaacttcagtcaggacgacctcggtgagccggtgctgcagaccgtgctggaacctggagatttgctgtattttcctcggggcttcattcaccaagctgaatgccaggatggagtccactctctgcacctcaccttgtccacgtaccagcgcaatacctggggtgacttcttagaggccatactgcctctggcagtgcaggctgcaatggaagaaaatgtggagtttcggaggggtctgccccgagacttcatggattacatgggggcccagcattcagattctaaggatccgcgaagaaccgctttcatggagaaggtgcgggtcttggttgcccgcctgggacactttgctcctgttgatgctgtggccgaccagcgagccaaagacttcattcacgattctctgccccctgttttgactgatagggagagggcactaagtgtttacgggcttccaattcgctgggaggctggagaacctgtaaacgtgggggcccagttgacaacagaaacagaagtccatatgcttcaggatgggatagctcggctggtgggtgaggggggccatttgtttctctattacacagtggaaaactcccgtgtgtatcatctggaagaacccaagtgcttggaaatatacccccagcaagctgatgccatggaactgttgcttggttcttatccagagtttgtgagagtgggggacctgccctgtgacagtgtggaggaccagctgtccttggcaaccacgttgtatgataaggggctgctgctcactaagatgcctctagccctaaattagtttcttgttgattgctggaaacaaggcagtagtgattctccgctgccactgctaccttttttttttttttttttccttaaactcacgttcttaccttgataagcatcagtgtgctcacatttacctttatcactgcttcagtgtcacaaacctcggaaggtcttctaggaagaaccatctcatctaggtacaaaaggaaaaggagaagttggaggtggaaaaaaaacccttgatccgtgatcatttcagagcaccaacttcatcaccttcaggcttcagtgtactgggtaacactgaccatgtcgttctgcttgagacagatattagattttttttggaatttggatctttcatctgagttctttttcatgggcgggtcggggtcagtatcctgtttgttattgttaaatttgtatgaaccttagaaaagttattaaagtgccaaagaatgaaaaaaaaaaaaaaaaaaaaaaaaaaaaaaaaaaaaaa

SEQ ID NO: 30705 - DNA, 5370 bp, Homo Sapiens
ccccgcgccagggcaagtccaccctcctggagatcttacagacggggagggccccccaggtggtgcatggagaggccaccatcaggaccaccaagtgggagctccagaggccggctggctcaagagccaaggttgagtccgtggagttcaacgtctgggacatcgggggaccggccagcatggccactgtcaaccagtgcttcttcacggacaaggccctgtacgtggtggtctggaacctggcgctgggggaggaggccgtggccaacctccagttctggctgctcaacatcgaggccaaggccccaaacgccgtggtgctggtggtcgggacgcacctggatttaattgaagccaagttccgtgtggaaaggattgcaacgctgcgtgcctatgtgctggcactctgccgctccccctccggctccagggccacaggcttcccagacatcaccttcaaacacttacatgagatttcctgcaagagcctggaaggtcaggaagggctgcgacagctgattttccacgtcacgtgcagcatgaaggacgtgggcagcaccatcggctgccagcgactggcagggcggctgatccccaggagctacctgagcctgcaggaggccgtgctggcagagcagcagcgccgcagccgggacgacgacgtgcagtacctgacggacaggcagctggagcagctggtggagcagacgcccgacaacgacatcaaggactacgaggacctgcagtcagccatcagcttcctcatagaaaccggcaccctgctccatttcccggacaccagccacggcctgaggaacctctacttcctcgaccctatttggctctccgaatgtctgcagaggatctttaatattaagggctctcggtcagtggccaagaatggggtgatcagagcagaagacctcaggatgctgctggtggggactggcttcacgcagcagacggaagagcagtacttccagttcctggccaagtttgagatcgccctgcccgtcgccaatgacagctacctcctgccccatctccttccatctaaacctggcctggacacccacggtatgcggcaccccacagccaacaccattcagagggtatttaagatgagcttcgttcccgttggcttctggcaaaggtttatagcacggatgctgatcagcctggcggagatggacctgcagctttttgaaaacaagaagaatactaaaagcaggaacaggaaagtcaccatttacagttttacaggaaaccagagaaatcgctgtagcacattcagagtgaaaagaaatcagaccatctattggcaggaagggctcctggtcacttttgatgggggctacctcagtgtggaatcttccgacgtgaactggaaaaagaagaaaagcggaggaatgaaaattgtttgccaatcagaagtgagggacttctcagccatggctttcatcacggaccacgtcaattccttgattgatcagtggtttcccgccctgacggccacagagagcgacgggacgccactcatggagcagtacgtgccctgcccggtctgcgagacagcctgggcccagcacacggaccccagtgagaaatcagaggatgtgcagtacttcgacatggaagactgtgtcctgacggccatcgagcgggacttcatctcctgccccagacacccggacctccccgtgccgctgcaggagctggtccctgaactgttcatgaccgacttcccggccaggctcttcctggagaacagcaagctggagcacagcgaggacgagggcagcgtcctgggccagggcggcagtggcaccgtcatctaccgggcccggtaccagggccagcctgtggccgtcaagcgcttccacatcaaaaaattcaagaactttgctaacgtaccggcagacaccatgctgaggcacctgcgggccaccgatgccatgaagaacttctccgagttccggcaggaggccagcatgctgcacgcgctgcagcacccctgcatcgtggcgctcatcggcatcagcatccacccgctctgcttcgccctggagctcgcgccgctcagcagcctcaacaccgtgctgtccgagaacgccagagattcttcctttatacccctgggacacatgctcacccaaaaaatagcctaccagatcgcctcgggcctggcctacctgcacaagaaaaacatcatcttctgtgacctgaagtcggacaacattctggtgtggtcccttgacgtcaaggagcacatcaacatcaagctatctgactacgggatttcgaggcagtcattccatgagggcgccctaggcgtggagggcactcctggctaccaggccccagagatcaggcctcgcattgtatatgatgagaaggtagatatgttctcctatggaatggtgctctacgagttgctgtcaggacagcgccctgcactgggccaccaccagctccagattgccaagaagctgtccaagggcatccgcccggttctggggcagccggaggaagtgcagttccggcgactgcaggcgctcatgatggagtgctgggacactaagccagagaagcgaccgctggccctgtcggtggtgagccagatgaaggacccgacttttgccaccttcatgtatgaactgtgctgtgggaagcagacagccttcttctcatcccagggccaggagtacaccgtggtgttttgggatggaaaagaggagtccaggaactacacggtggtgaacacagagaagggcctcatggaggtgcagaggatgtgctgccctgggatgaaggtgagctgccagctccaggtccagagatccctgtggacagccaccgaggaccagaaaatctacatctacaccctcaagggcatgtgccccttaaacacaccccaacaggccttggatactccagctgtcgtcacctgcttcttggccgtgcctgttattaaaaagaattcctacctggtcttagcgggcctcgccgatgggcttgtggctgtgtttcccgtggtgcggggcaccccaaaggacagctgctcctacctgtgctcacacacagccaacaggtccaagttcagcatcgcggatgaagacgcacggcagaacccctacccagtgaaggccatggaggtggtcaacagcggctctgaggtctggtacagcaatgggccgggcctccttgtcatcgactgtgcctccctggagatctgcaggcggctggagccctacatggccccctccatggttacgtcagtcgtgtgcagctctgagggcagaggggaggaggtcgtctggtgcctggatgacaaggccaactccttggtgatgtaccactccaccacctaccagctgtgtgcccggtacttctgcggggtccccagccccctcagggacatgtttcccgtgcggcccttggacacggaacccccggcagccagccacacggccaacccaaaggtgcctgagggggactccatcgcggacgtgagcatcatgtacagtgaggagctgggcacgcagatcctgatccaccaggaatcactcactgactactgctccatgtcctcctactcctcatccccaccccgccaggctgccaggtccccctcaagcctccccagctccccagcaagttcttccagtgtgcctttctccaccgactgcgaggactcagacatgctacatacgcccggtgctgcctccgacaggtctgagcatgacctgacccccatggacggggagaccttcagccagcacctgcaggccgtgaagatcctcgccgtcagagacctcatttgggtccccaggcgcggtggagatgttatcgtcattggcctggagaaggattctgaagcccagcggggccgagtcattgccgtcttaaaagcccgagagctgactccgcatggggtgctggtggatgctgccgtggtggcaaaggacactgttgtgtgcacctttgaaaatgaaaacacagagtggtgcctggccgtctggaggggctggggcgccagggagttcgacattttctaccagtcctacgaggagctgggccggctggaggcttgcactcgcaagagaaggtaattcctgtggaatgactgtcacacatcagagctggctggcccggggctgcagcctgacccctctgccatcggcctctagttctccaaggacctagaagacagatggagttctcccctgaactccttgctgctaagaagtgctgagaagttactcgcctggcggtggctccagggttctctggttctctggagcagagttctctgaataccccatcccccaactgctgattttacagccccagggaagacagtggtatcaggctgggagcggcctcctctggcctcccccatcagtttgcaggagcaggggtgcaggatcctgttctgagctgggtcaaacaaagcagggccgggccttcctgccatccccaggtctcagatggaattacactagaggccctccgctgggaagcacttgaggtagggcaggaggggggctgtgacccctgccctttccccgccagagacctcgggctctcagcacattccacaggctcctgagtccccgaggcctgggccagcttgggcaagccaagatcagatgtctctgtgttcgggaaggtctccgtgtgggaaagcccttgggggatcccgggtgaggagtgttgccccatccagagaatgaatgagttcctttaagtgccaccgccagcaagcccagaggcacacagtccgagtgcacccgcttagcctttacattcctctccaccgacaaaaggaaggggaaactcaatcagcaggacttcagaaagggccttgtgtttatagctttgtcaagtaaatttggacgcagctggagcacaggccctgtttgtttgcacataataatcttgtttatcactttaaaaaattcagtaatatctcagcagtcaggcttctggttgtgaaatcacattgtatgggatttataccaaattatgtatttgctaaacattcactgcacacgtgtacagcggagtacgaaaaggaacgttgtccacaggggatttatggatacaacagcaaacattttataaactatgcacatgcattacacacatgcacacacatatgcacacacatgtgcaaacatagccacttttttgtcaagagttaccctttggggctccttaaaccagaatgggagtttgaaagagagatcatactccagctgaagtttgttgacccttttctaaaattaaaaagatcaaatttagtatttgctggatatgcagggagatgagactcttttaatctcaaaataaacagattctttcaag

SEQ ID NO: 30706 - DNA, 2459 bp, Homo Sapiens
tcgacccacgcgtccggacaaggaggaggaggaggaggaggtctggctagctgtccctaacgtcatttcctggtctcaactctttaagaccctgacatactctgagattggagtgaagatttctgtgacatgctgggtatctctgcattagccagattggacatatgtaaagggacatcagtatatctggatcatcagattgtgcttcaagaagaccatagggaagaacgcattttcatcttgctgcaaaagttgcaatagaagatctgaaggtttgaatgggccaatgagtatcctcatcattgaagcattctatggaggctcccataaacagctggtggatcttcttcaagaagagttaggagactgtgtcgtttatacccttcctgcaaagaaatggcattggagagcccggacatctgctttatatttctctcagaccattcccatcagtgagcattacaggaccctctttgcaagttcagtgcttaacctgaccgaactggctgcccttcggcctgaccttgggaaactgaaaaagattctgtattttcacgagaaccagttgatatatcctgtcaagaaatgtcaggagagggatttccaatatggatacaaccaaattctttcatgcctggtggctgatgtggttgtattcaactcagtttttaatatggaatcatttctcacttccatgggaaaatttatgaagctgattcctgatcacagacccaaggatctggaaagcatcatcagacccaagtgccaagttatttactttcccatcaggtttcctgatgtgagcagattcatgcccaagcacaaaacaacccatttaaagaagatgctcggccttaaaggaaatggcggtgcggttctgtccatggcccttccttttcagccagagcagagagattcagaggatttattgaagaattttaattcagagtgtgatacacactgtggccttgatactgcacgacaagaatatttgggtaactcattaagacaggaatcagacttgaaaaaatccacctcgtcagataattcaagctctcatcatggtgaaaataaacaaaatctgactgttgatccctgtgacattttgggtggagttgataatcagcaaagactgctacacattgtctggcctcacaggtggttggaagctgtgtactgtgggtgttacccactttgtcctaaagatttggtttatcccgaaatatttccagctgaatatctgtattctacacctgaacagctttcaaaaaggctccagaatttctgcaagagaccagatattataagaaaacatctctataagggtgaaatcgctccgttttcttgggcagccctacatggtaaattcaggtctctgcttacaacagaacctagggaagatttgtgacagatggggctaagtcacaaacttgcagcctaaggcagaatctgaagaactttccagagtgtgcccatatttacctgatcagagagaaaagaaaatctgcagaggaagctgagcctggctgcttgtcatagctgacacagagccatctgccacaaacctgtggcggcttcagatctccaatccctgccaccaccccaactcaaattaaatacagattcctagagacgttatgatggttacacatgtcctcggcatcacatgtaggagactgttcaaaaaaaatatgtggcctgttgtataaccgcactcatgtatcccatatgtggtgccacattgaatttccggttgaatccgtttttatcctttgtactggatgacatggtgcctgaattctttcttttcgccgacacgatggcagccaaactgcagcttcaaacgctcacacttggctgggtttctacctaggttgccaggttatcatcggagccttcttgtgtcctcaaagggccacgaggcctgaaaggaggatcagaatgctttgggattaattgggcagccatcgcagaattgtttgtgggcaaagggctgctttagcacttttcttttagcaaattaatgactctcaggcacagggggttttaagtgaaggtattaataagaggtctggcaggtattcccatgattcacagagttacatttgcatttaattaatcttaaagttgcaagataaacagctgtaattcggacaaacatgacaaacacagtgaagccaactatcccataaaatgaacactgacatacttgttttaatttttttcccagcgtaaaaatagaaaaatcaaaatactcctaacaaaaccagtgattttgatagaaatatttctccaatatacttgcatccacctacaaatataaccttttcaagataaatcgcttatgatttcaatagtcaaactgctgtgtttgttgatgtaaagatgttttgaatggctagatggtaaaataaattcttaataaagtacccactgcaatttttaaaaaaaaaaaaaaa

SEQ ID NO: 30707 - DNA, 2183 bp, Homo Sapiens; identical to SEQ ID NO: 26306

SEQ ID NO: 30708 - DNA, 2774 bp, Homo Sapiens
ctcgcgagcgcagctatggctgctggcgtaccctgtgcgttagtcaccagctgctcctccgtcttctcaggagaccagctggtccaacatacccttggaacagaagatcttattgtggaagtgacttccaatgatgctgtgagattttatccctggaccattgataataaatactattcagcagacatcaatctatgtgtggtgccaaacaaatttcttgttactgcagagattgcagaatctgtccaagcatttgtggtttactttgacagcacacgaaaatcgggccttgatagtgtctcctcatggcttccactggcaaaagcatggttacctgaggtgatgatcttggtctgcgatagagtgtctgaagatggtataaaccgacaaaaagctcaagaatggagcctcaaacatggctttgaattggtagaacttagtccagaggagttgcctgaggaggatgatgacttcccagaatctacaggagtaaagcgaattgtccaagccctgaatgccaatgtgtggtccaatgtagtgatgaagaatgataggaaccaaggctttagccttctcaactcattgactggaacaaaccatagcattgggtcagcagatccctgtcacccagagcaaccccatttgccagcagcagatagtactgaatccctctctgatcatcggggtggtgcatctaacacaacagatgcccaggttgatagcattgtggatcccatgttagatctggatattcaagaattagccagtcttaccactggaggaggagatgtggagaattttgaaagacccttttcaaagttaaaggaaatgaaagacaaggctgcgacgcttcctcatgagcaaagaaaagtgcatgcagaaaaggtggccaaagcattctggatggcaatcgggggagacagagatgaaattgaaggcctttcatctgatggagagcactgaattattcatactagggtttgaccaacaaagatgctagctgtctctgagatacctctctactcagcccagtcatattttgccaaaattgcccttatcatgttggctgcctgacttgtttatagggtccccttaattttagtttttagtaggaggttaaggagaaatcttttttttcctcagtatattgtaagagagtgaggaatacagtgatagtaatgagtgaggatttcttaaatatactttttttttgttctaggaatgagggtaggataaatctcagaggtctgtgtgatttactcaagttgaagacaacctccaggccattcctggtcaaccttttaagtagcatttccagcattcacacttgatactgcacatcaggagttgtgtcacctttcctgggtgatttgggttttctccattcaaggagcttgtagctctgagctatgatgcttttattgggaggaaaggaggcagctgcagaattgatgtgagctatgtggggccgaagtctcagcccgcagctaagtctctacctaagaaaatgcctctgggcattcttttgaagtatagtgtctgagctcatgctagaaagaatcaaaaagccagtgtggatttttaggctgtaataaatgaggcaaaggatttctattccagtgggaaggaaacctctctactgagttgtgggggatatgttgtatgttagagagaaccttaaggagtccttgtatgggccatggagacagtatgtgataacataccgtgattttcatgaagaaattcttctgtcctagagttctcccctgctgcttgagatgccagagctgtgttgttgcacacctgcaaaacaaggcacatttccccctttctctttaaagccaaagagagatcactgccaaagtgggagcactaaggggtgggtggggaagtgaaatgttaggcgatgaattcctgagcaccttgtttttcttccaaggttcgtagctcctctctgcccttccaagcctgtaacctcggaggactatcttttgttctctatcctttgtcttgttagagtgggtcagccccagaggaactgataagcaaatggcaagtttttaaaggaagagtggaaagtactgcaaataaaaatccttatttgtttttgtagactttgtaatgcatatcattagccctcactgtgatcattactgctgtggctctgaactggcacatagtacagtggatggaaggtgcccgcacaccagctgagaactggttctggcctaggtgggctctagaaccatttacacagcatgaaagaaacaggttgggttaggagcagaaagaaataaggctcacacccctccagacactaccttataagcactgcagaacctgaaacagatggcagaaggaatggaatgctacaggggccagcaggagtgaccacagggaggggacagctcagtgactggagcattcaggaagaggctttccagggaacactggacattgcttagtgaccttttgttcctttttttttttttttcttttactgttctgaaagactttgagtctgtggttcaccaccagcccatcagtgtttctttgaggtgattgcattagggaagttggctctgggattgcaaaaaaaaaaaaaaggtggaacatgttttccttaaaagatggaaggttttagaaaatatactaggccatctggttagaaaaaacagaccagactagaaaaagctgtgaatttgattttgtagattaaacaaagccagatgattaaaatgtgatttatttataaaaaaaaaaaaaaaaaaaaa

SEQ ID NO: 30709 - DNA, 3093 bp, Homo Sapiens
cggggccgaggcgcgaggaggtgaggctggagcgcggccccctcgccttccctgttcccaggcaagctcccaaggcccgggcggcggggccgtcccgcgggccagccagatggcgacgtggcggttccccgcccgccgcgaccccaactccgggacgcacgctgcggacgcctatcctcccccaggccgctgacccgcctccctgcccggccggctcccgccgcggaggatatggaatattatcttgtaaaatggaaaggatggccagattctacaaatacttgggaacctttgcaaaatctgaagtgcccgttactgcttcagcaattctctaatgacaagcataattatttatctcaggtaaagaaaggcaaagcaataactccaaaagacaataacaaaactttgaaacctgccattgctgagtacattgtgaagaaggctaaacaaaggatagctctgcagagatggcaagatgaactcaacagaagaaagaatcataaaggaatgatatttgttgaaaatactgttgatttagagggcccaccttcagacttctattacattaacgaatacaaaccagctcctggaatcagcttagtcaatgaagctacctttggttgttcatgcacagattgcttctttcaaaaatgttgtcctgctgaagctggagttcttttggcttataataaaaaccaacaaattaaaatcccacctggtactcccatctatgaatgcaactcaaggtgtcagtgtggtcctgattgtcccaataggattgtacaaaaaggcacacagtattcgctttgcatctttcgaactagcaatggacgtggctggggtgtaaagacccttgtgaagattaaaagaatgagttttgtcatggaatatgttggagaggtaatcacaagtgaagaagctgaaagacgaggacagttctatgacaacaagggaatcacgtatctctttgatctggactatgagtctgatgaattcacagtggatgcggctcgatacggcaatgtgtctcattttgtgaatcacagctgtgacccaaatcttcaggtgttcaatgttttcattgataacctcgatactcgtcttccccgaatagcattgttttccacaagaaccataaatgctggagaagagctgacttttgattatcaaatgaaaggttctggagatatatcttcagattctattgaccacagcccagccaaaaagagggtcagaacagtatgtaaatgtggagctgtgacttgcagaggttacctcaactgaactttttcaggaaatagagctgatgattataatatttttttcctaatgttaacatttttaaaaatacatatttgggactcttattatcaaggttctacctatgttaatttacaattcatgtttcaagacatttgccaaatgtattaccgatgcctctgaaaagggggtcactgggtctcatagactgatatgaagtcgacatatttatagtgcttagagaccaaactaatggaaggcagactatttacagcttagtatatgtgtacttaagtctatgtgaacagagaaatgcctcccgtagtgtttgaaagcgttaagctgataatgtaattaacaactgctgagagatcaaagattcaacttgccatacacctcaaattcggagaaacagttaatttgggcaaatctacagttctgtttttgctactctattgtcattcctgtttaatactcactgtacttgtatttgagacaaataggtgatactgaattttatactgttttctacttttccattaaaacattggcacctcaatgataaagaaatttaaggtataaaattaaatgtaaaaattaatttcagcttcatttcgtatttcgaagcaatctagactgttgtgatgagtgtatgtctgaacctgtaattcttaaaagacttcttaatcttctagaagaaaaatctccgaagagctctctctagaagtccaaaatggctagccattatgcttctttgaaaggacatgataatgggaccaggatggttttttggagtaccaagcaaggggaatggagcactttaagggcgcctgttagtaacatgaattggaaatctgtgtcgagtacctctgatctaaacggtaaaacaagctgcctggagagcagctgtacctaacaatactgtaatgtacattaacattacagcctctcaatttcaggcaggtgtaacagttcctttccaccagatttaatatttttatacttcctgcaggttcttcttaaaaagtaatctatatttttgaactgatacttgttttatacataaattttttttagatgtgataaagctaaacttggccaaagtgtgtgcctgaattattagacctttttattagtcaacctacgaagactaaaatagaatatattagttttcaagggagtgggaggcttccaacatagtattgaatctcaggaaaaactattctttcatgtctgattctgagatttctaattgtgttgtgaaaatgataaatgcagcaaatctagctttcagtattcctaatttttacctaagctcattgctccaggctttgattacctaaaataagcttggataaaattgaaccaacttcaagaatgcagcacttcttaatctttagctctttcttgggagaagctagactttattcattatattgctatgacaacttcactctttcataatatataggataaattgtttacatgattggaccctcagattctgttaaccaaaattgcagaatggggggccaggcctgtgtggtggctcacacctgtgatcccagcactttgggaggctgaggtaggaggatcacgtgaggtcgggagttcaagaccagcctggccatcatggtgaaaccctgtctctactgaaaatacaaaaattagccgggcgtggtggcacacgcctgtagtcccagctactcaggaggctgaggcaggagaatcacttgaattcaggaggcggaggttgcagtgagccaagatcataccactgcactgcagcctgagtgacacagtaagactgtctccaaaaaaaaaaaaaaaaaa

SEQ ID NO: 30710 - DNA, 2324 bp, Homo Sapiens
cgcgctggagaggcgcggggtcaagacgtccggcctcgggggcccgggctgggccgccgagtcccctgggcggcgctgagcgggcgggaggcgggggcccgcggctcggggcaaccgaggccgggtcgcgggatcggccgccatcgccgccgccgctgcactgggagcccgcggggatggagcgggaggcgttgccgtggggcctcgagccccaggatgtgcagagttctgacgaaatgaggagccccgaagggtacctcagaggcaacatgagtgagaatgaggaagaggaaatttctcagcaagaaggcagtggggactatgaagtcgaagagataccatttgggcttgaaccccagagccctgggtttgagccacaaagcccagagtttgaaccccaaagccccagatttgagcctgaaagcccggggtttgagtcccgaagccctgggcttgtgcccccaagccctgagtttgcacccagaagccctgaatcagattctcagagccctgagtttgaatcccagagccctaggtatgaaccccaaagccctggctatgaacctcggagccccgggtatgaaccccggagccctggctatgaatctgagagctctagatatgaatcccagaacactgagctcaaaacccaaagcccagaatttgaagctcaaagttccaaattccaggaaggtgcggagatgcttctgaaccccgacgaaaagagtcctttgaatatctccgtaggagttcaccccctggactccttcactcaggggtttggggagcagcccacaggggacctgcccatagggccaccttttgagatgcccacaggggccctgctgtctacaccgcagtttgagatgcttcagaatcccctgggtctcacaggagcccttcgaggtccaggtcggcggggtggccgggccaggggtgggcagggccctcggcctaacatctgcggcatctgcgggaagagcttcgggcggggctccaccctgatccagcaccagcgcatccacaccggtgagaagccctacaaatgtgaggtctgcagcaaggccttctcccagagctctgacctcatcaaacaccagcgcacccacactggcgagcggccctacaaatgtccccgttgcggcaaggccttcgccgacagctcttacctgcttcgccaccagcgcactcactctggccagaagccctacaagtgcccacattgtggcaaggccttcggcgacagctcctacctcctgcgacaccagcgcacccacagccacgagcggccctacagctgcaccgagtgcggcaagtgctatagccagaactcgtccctgcgcagccatcagagggtgcacaccggtcagaggcccttcagctgtggcatctgcggcaagagcttctcccagcggtcggcccttatcccccatgcccgcagccacgcccgggagaagcccttcaagtgccctgagtgcggcaagcgctttggccagagctcggtgctggccatccacgcccgcacccacctgccaggccgcacctacagctgccccgactgcggcaagaccttcaatcgctcctccactctcatccagcaccagcgctcccacacgggcgagcggccctacaggtgcgccgtgtgcggcaagggcttctgccgctcctccacgcttctgcagcatcaccgggtccacagtggcgagcggccttacaagtgcgatgactgcggaaaggccttctcccagagctccgacctcatccgccaccagcggacccacgcggcgggccggcgctgacctggggccccagcaggggtgggaggtgtgggcagaagataaggggccagggagctagaggaacctttagggaggatagtggagaagccgcaggagaatggaggagctgaggatgctggaagaagagaaccagggtggaggaagtgacatgccctggagacttgtgggaagtgggttggagggaggccaggccggcagcgggaggccctgggagaaatggagagaggtcagcggagggctggcctcagccgcggctccttggtgggtgcctggcttggcaactgctagagcagggaggggggagggcaggggattacctaattagagtgggttagcttagattggtagctgctgaaactctcgttgagtcaggagcgggtaaaaggtaggtggggtggggagtggggccccggggtggggcctgggcctctgcgtgcaaaccccagcctccctcttcttcctcaggctttggagcccctgagtttgagttcaataaaaactttatgtggtaaaaaaaaaaaaaaa

SEQ ID NO: 30711 - DNA, 3627 bp, Homo Sapiens
attcatgctgtcgcgggaaccccgaaggtggggccccacgtaacaagaagatgacccgaagttgctccgcagtgggctgcagcacccgtgacaccgtgctcagccgggagcgcggcctctccttccaccaatttccaactgataccatacagcgctcaaaatggatcagggctgttaatcgtgtggaccccagaagcaaaaagatttggattccaggaccaggtgctatactgtgttccaaacattttcaagaaagtgactttgagtcatatggcataagaagaaagctgaaaaaaggagctgtgccttctgtttctctatacaagattcctcaaggtgtacatcttaaaggtaaagcaagacaaaaaatcctaaaacaacctcttccagacaattctcaagaagttgctactgaggaccataactatagtttaaagacacctttgacgataggtgcagagaaactggctgaggtgcaacaaatgttacaagtgtccaaaaaaagacttatctccgtaaagaactacaggatgatcaagaagagaaagggtttacgattaattgatgcacttgtagaagagaaactactttctgaagaaacagagtgtctgctacgagctcaattttcagattttaagtgggagttatataattggagagaaacagatgagtactccgcagaaatgaaacaatttgcatgtacactctacttgtgcagtagcaaagtctatgattatgtaagaaagattcttaagctgcctcattcttccatcctcagaacgtggttatccaaatgccaacccagtccaggtttcaacagcaacattttttcttttcttcaacgaagagtagagaatggagatcagctctatcaatactgttcattgttaataaaaagtatacctctcaagcaacagcttcagtgggatcctagcagtcacagtttgcaggggtttatggactttggtcttggaaaacttgatgctgatgaaacgccacttgcttcagaaactgttttgttaatggcagtgggtatttttggccattggagaacacctcttggttatttttttgtaaacagagcatctggatatttgcaggctcagctgcttcgtctgactattggtaaactgagtgacataggaatcacagttctggctgttacatctgatgccacagcacatagtgttcagatggcaaaagcattggggatacatattgatggagacgacatgaaatgtacatttcagcatccttcatcttctagtcaacagattgcatacttctttgactcttgccacttgctaagattaataagaaatgcatttcagaattttcaaagcattcagtttattaatggtatagcacattggcagcacctcgtggagttagtagcactggaggaacaggaattatcaaatatggaaagaataccaagtacacttgcaaatttgaaaaatcatgtactgaaagtgaatagtgccacccaactctttagtgagagtgtagccagtgcattagaatatttgttatccttagacctgccaccttttcaaaactgtattggtaccatccattttttacgtttaattaacaatctgtttgacatctttaatagtaggaactgttatggaaagggacttaaagggcctctgttgcctgaaacttacagtaaaataaaccacgtgttaattgaagccaagactatttttgttacattatctgacactagcaataatcaaataattaaaggtaagcaaaaactaggattcctgggatttttgctcaatgctgagagcttaaaatggctctaccaaaattatgttttcccaaaggtcatgccttttccttatcttctgacttacaaattcagtcatgatcatctggaattatttctaaagatgcttaggcaggtattagtaacaagttctagccctacctgcatggcattccagaaagcttactataatttggagaccagatacaaatttcaagatgaagtttttctaagcaaagtaagcatctttgacatttcaattgctcgaaggaaagacttggcgctttggacagttcaacgtcagtatggtgtcagcgttacaaagactgtctttcacgaagagggtatttgtcaagactggtctcattgttcactaagtgaggcattactagacctgtcagatcataggcgaaatctcatctgttatgctggttatgttgcaaacaagttatcagctcttttaacttgtgaggactgcatcactgcactgtatgcatcggatctcaaagcctctaaaattgggtcactattatttgttaaaaagaagaatggtttgcattttccttcagaaagtctgtgtcgggtcataaatatttgtgagcgagttgtaagaacccattcaagaatggcaatttttgaactagtttctaaacaaagggaattgtatcttcaacagaaaatattatgtgagctttctgggcatattgatctttttgtagatgtgaataagcatctctttgatggagaagtgtgtgccatcaatcactttgtcaagttgctaaaggatataataatctgtttcttaaatatcagagctaaaaatgttgcacagaatcctttaaaacatcattcagagagaactgatatgaaaactttatcaaggaaacactggtcacctgtacaggattataaatgttcaagttttgctaataccagtagtaaattcaggcatttgctaagtaacgatggatatccattcaaatgagagacctaaaatatattaacattttaattaagaatacttgatcaacattttttgaagttcaatttaccatattttataaattgcgcattctgcacagtggacaagtttgcaattctgacttattaaaatttcaaattctgcatatcacaaaatctccttatacttttggtatggcttgcagcatttatgagttttccaaaatatagaaagcagtaggtcagtaggagcaaactagccaacaggtactgtctttgaatttactactgtaagactaagcagtgttactggacacagttttaacttgttcaatctgcttcaaaaacaagaaaaacaacaactatgagttatcaaaatattgactccatttatgactagactacatttctgaaagatctttggtttacgattcttaagaatattgacaatacctataaaactttgaagataacttttacttaaatatgaaaattatagtttgaaaattaggctcaagcaaatatcaaatactgcaaaaatccccttgtcccaggataccctaaaatagaagtatattttgatgtttgtttattctacctcaaacagaggcttaagttttgaagtgtaaccagtttatacttcattttatacaaaacttattgctgagaagtctgaatattgtgctttttgttgtttgtaaatagaattgaatttaaatacaccaggataaatcttatttaaaggaagcctgtttgaaaatcaccaactttaacttattgcttatataaatccaagctctgtacctgatctttatgtaaagcaagattcatatgtgtagtatctaatgccctttggtgttacatttgactaaaatacaaatgtctgtatt

SEQ ID NO: 30712 - DNA, 4023 bp, Homo Sapiens
gcgtgggtcagctgatcgcgcactgagggtgcgatcccgggctccccattccttcctggggcgcctccccggcccagggccaactgggtcccggtgtcggcaggcctggggtcggcgacggctgctcttttcgttctgtcgcctgcccgatggacgagcctcccgggaagcccctcagctgtgaggagaaggaaaagttaaaggagaaattagcattcttgaaaagggaatacagcaagacactagcccgccttcagcgtgcccaaagagctgaaaagattaagcattctattaagaaaacagtagaagaacaagattgtttgtctcagcaggatctctcaccgcagctaaaacactcagaacctaaaaataaaatatgtgtttatgacaagttacacatcaaaacccatcttgatgaagaaactggagaaaagacatctatcacacttgatgttgggcctgagtcctttaaccctggagatggcccaggaggattacctatacaaagaacagatgacacccaagaacattttccccacagggtcagtgaccctagtggtgagcaaaagcagaagctgccaagcagaagaaagaagcagcagaagaggacatttatttcacaggagagagactgtgtctttggcactgattcactcagattgtctgggaaaagactaaaggaacaggaagaaatcagtagcaaaaatcctgctagatcaccagtaactgaaataagaactcaccttttaagtcttaaatctgaacttccagattctccagaaccagttacagaaattaatgaagacagtgtattaattccaccaactgcccaaccagaaaaaggtgttgatacattcctaagaagacctaatttcaccagggcgactacagttcctttacagactctatcagatagcggtagtagtcagcaccttgaacacattcctcctaaaggtagcagtgaacttactactcacgacctaaaaaacattagatttacttcacctgtaagtttggaggcacaaggcaaaaaaatgactgtctctacagataacctccttgtaaataaagctataagtaaaagtggccaactgcccacaagttctaatttagaggcaaatatttcatgttctctaaatgaactcacctacaataacttaccagcaaatgaaaaccaaaacttaaaagaacaaaatcaaacagagaaatctttaaaatctcccagtgacactcttgatggcaggaatgaaaatcttcaggaaagtgagattctaagtcaacctaagagtcttagcctggaagcaacctctcctctttctgcagaaaaacattcttgcacagtgcctgaaggccttctgtttcctgcagaatattatgttagaacaacacgaagcatgtccaattgccagaggaaagtagccgtggaggctgtcattcagagtcatttggatgtcaagaaaaaagggtttaaaaataaaaataaggatgcaagtaaaaatttaaacctttccaatgaggaaactgaccaaagtgaaattaggatgtctggcacatgcacaggacaaccaagttcaagaacctctcagaaacttctctcattaactaaagtcagctctcccgctgggcccactgaagataatgacttgtctaggaaggcagttgcccaagcacctggtagaagatacacaggaaaaagaaaatcagcctgcaccccagcatcagatcattgtgaaccacttttgccaacttctagcctgtcgattgttaacaggtccaaggaagaagtcacctcacacaaatatcagcacgaaaaattatttattcaagtgaaagggaagaaaagtcgtcatcaaaaagaggattccctttcttggagtaatagtgcttatttatccttggatgatgatgctttcacggctccatttcatagggatggaatgctgagtttaaagcaactactgtcttttctcagtatcacagactttcagttacctgatgaagactttggacctcttaagcttgaaaaagtgaagtcctgctcagaaaaaccagtggagccctttgagtcaaaaatgtttggagagagacatcttaaagagggaagctgtatttttccagaggaactgagtcctaaacgcatggatacagaaatggaggacttagaagaggaccttattgttctaccaggaaaatcacatcccaaaaggccaaactcgcaaagccagcatacaaagacgggcctttcttcatccatattactttatactcctttaaatacggttgcgcctgatgataatgacaggcctaccacagacatgtgttcacctgctttccccatcttaggtactactccagcctttggccctcaaggctcctatgaaaaagcatctacagaagttgctggacgaacttgctgcacaccccaacttgctcatttgaaagactcagtctgtcttgccagtgatactaaacaattcgacagttcaggcagcccagcaaaaccacataccaccctgcaagtgtcaggcaggcaaggacaacctacctgtgactgtgactctgtcccgccaggaacacctccacccattgagtcattcacttttaaagaaaatcagctctgtagaaacacatgccaggagctgcataaacattccgtcgaacagactgaaacagcagagcttcctgcttctgatagcataaacccaggcaacctacaattggtttcagagttaaagaatccttcaggttcctgttccgtagatgtgagtgccatgttttgggaaagagccggttgtaaagagccatgtatcataactgcttgcgaagatgtagtttctctttggaaagctctggatgcttggcagtgggaaaaactttatacctggcacttcgcagaggttccagtattacagatagttccagtgcctgatgtgtataatctcgtgtgtgtagctttgggaaatttggaaatcagagagatcagggcattgttttgttcctctgatgatgaaagtgaaaagcaagtactactgaagtctggaaatataaaagctgtgcttggcctgacaaagaggaggctagttagtagcagtgggaccctttctgatcaacaagtagaagtcatgacgtttgcagaagatggaggaggcaaagaaaaccaatttttgatgccccctgaggagactatactaacttttgctgaggtccaagggatgcaagaagctctgcttggtactactattatgaacaacattgttatttggaatttaaaaactggtcaactcctgaaaaagatgcacattgatgattcttaccaagcttcagtctgtcacaaagcctattctgaaatggggcttctctttattgtcctgagtcatccctgtgccaaagagagtgagtcgttgcgaagccctgtgtttcagctcattgtgattaaccctaagacgactctcagcgtgggtgtgatgctgtactgtcttcctccagggcaggctggcaggttcctggaaggtgacgtgaaagatcactgtgcagcagcaatcttgacttctggaacaattgccatttgggacttacttctcggtcagtgtactgccctcctcccacctgtctctgaccaacattggtcttttgtgaaatggtcgggtacagactctcatttgctggctggacaaaaagatggaaatatatttgtataccactattcataagttagggtaaagtgaaaacacaattttctggatatattgggcctcttagtattttttggagttttaaatataaaggagaatatctgaatgacacttaaaatgattgcttgtttatgtccagacagacttattttttattctaatgatggtagcaccactgatcttggatgtacatttatgtatactttgagaaaaagggttttaggttgatttttgtaatttcccacatttgtacatgtgcttttaaaggtgtacataaagcttcaaatggcaataaatatttatttttatacattcaaaaaaaaaaaaaaaa

SEQ ID NO: 30713 - DNA, 3180 bp, Homo Sapiens
ctctgactggggcgtccgactggagctcagccgcgcttgtccggtgctaggtcatcctgccaaacacccgaggccccaaagatggtgcaaagtgaacttcagctacagcccagagcaggcggacgagctgaagctgcaagctggggagatcgtggaaatgataaaggagattgaggacggctggtggctggggaagaggaacgggcagctgggagccttcccatccaactttgtggaattgctggacagtgggcccccaagccttggtaacccagacatgccttcagtcagccctggtccccagcggcctcccaagaccacagaggataagggctggtgggaaggagagtgtcaaggacgaagaggagtttttccagacaactttgtactcccaccacccccaatcaagaagctggtcccacggaaagtggtatctcgggaatcagctcctattaaggaaccaaaaaagttgatgcccaaaacatccctccccacagtcaagaagctagcaacagccaccactgggcccagcaaagccaagaggaagagcacagcagcccggtaaaggccccctctgtgaagagaacccccatgccggacaagactgccaccccagagaggcccccagctccagagaacgcccccagctccaagaagatcccggctcctgacaaagtcccctccccagagaagaccctcactctaggggacaaggcctctatcccagggaactccacctcggggaagatcccagctcctgacaaagtccccaccccagagaagatggtgactccggaggacaaggcttctatcccagagaactccatcatcccagaggagaccctgactgtggacgaaccctccactccagagagggtcttttcagtggaagagtcccctgccctagaagccccacctatggataaagtccctaatccaaagatggcccctctgggggatgaggcccccactctagaaaaggtcttgaccccagagctttctgaagaagaggtgtccaccagagatgacattcaattccatcacttctcttcggaggaagccctgcagaaggtcaagtactttgtagccaaagaggatccatcatcccaggagggggcccacacgccagaggcacccccaccccagcctccttcctcagagaggtgcctgggagagatgaaatgtaccctagttagaggggacagctccccacgccaggctgagttgaagtctgggccagcatccaggcctgcccttgagaagccccacccccacgaagaggctacaacccttccagaggaggcaccttccaatgacgagaggacccctgaagaggaggcgccccccaacgagcagaggcctctgagagaggaggtgctccccaaagagggagtggcttccaaagaggaggtgaccctgaaagaggaattgccccctaaagaggaagtggctccaaaagaggaggtgccccccatagaaagagcctttgcccaaaaaaacacgtcctatcaagccgcctccagactcccaagagacgctcgcgctcccctcgctggtcccgcaaaactacacggaaaacaagaatgaaggagttgatgtaacgtcgctgaggggcgaggtggggtctctaaggagggcgctggagctgatggaggtgcagctggagaggaagctgaccgacatctgggaggagctgaagagcgagaaggagcagcgccggcggctggaggtccaggtgatgcaggggacccagaagtcccagaccccgcgcgtcatccacacgcagacgcagacctactgagggtgggcctgggaagggaccgcggcctgacctggctggggccacccacgtccttgcacacgactttgggaaacgcgagaaatgtatgaacccagggcactgtggggacagggcgacgtgtgtccaggcgtttgccggtccggctgcccggtgcgccagatctcccgcaggatccgttcgcgctcctccagccgctgcgcccgctccagctcctccgccgacgtgaagacgttgacgttgaggggcccgtccggctctgcggacagctcggggcccggcagcgtgtcgtcggggcccagccgagtcaccgtgtcctcctcgtcctcgtcgtcgtcctcgggctccagggtgctgctgcgggggtcccggcgctgagccgggccccggggccgcgggcggggcgcccacgagatgctgatgacgagcaggcagaggatcaagtaaacggagtcttggagagattgaattgactttaccaaaaccgtcaggatttgaatctgctgctctctgatcctaaagcctgagctagaaaccaccgctccccctcctaggaggccccttccaggcaaagctgcttctcttccccagacccatgctggactggaagggaggggactgtccacccctccttccagggcccaggcttgaatgtgtcccctggccgagctctggtctagtcacgcagggttaatgattgttggactccagctttgagccagggcccggccagcagtctcgcagaccccagcgtggggcctctgtgcctgcgagctcctgcgctcttgtgcaccaagcagcttgtggcggcttgtggcagatcccaccccatcccgtcccccaccccaaggctaaacctgcctgtgctcacacacgcatttcccacctgggcttgtgcatgcaatgtggtgtgtgatcagtgtgtgtggcggggggcttccttctgccctgtctccacggggcccccccatcatggacctcccctcccttgctggagctagaatgagggggaggccgccttggcgggagccttagagaggaggaggaaagggggagaggaaattgcagacatagctgaaggcgctgcctgaggcctgtgggccagcgaccctctccctgtccgggctgcagacccctactcccccagtcccgagactgggttcaagtagagggcagatctagatgggggaggactaggactgactcctatggggatggaaaagggactcctgggtgtctttgtgactgtttagtgtgttctgtgaatgtgcgggcaggtatttttgcccacatctgtatatttgtctattaatgtgatgtatttgagtattgttgtgggggcgggtatgtctgtatataaatctgtgcagccactagtcaac

SEQ ID NO: 30714 - DNA, 3562 bp, Homo Sapiens
gcggttgccatgaagacccggtccgggagcagtcgactgccggagactcgggaggctgagctttcctcggcctgagccagccagaccccgggcaccgcgctcacccctcttcgccgccacgtccgcgaaggcctcacgcgcgaggccaggcgaggccccgaggcgcccaccacttcacgacaccggagcgaaccgggcgccagaggctgcgacccccctgccccgaatcctgccggtgggagtggctgcatttgaaccaaacggccttcgcgggcagcagccgtcgccccgcagtcccggggctcccaagggcctgtgaccgacgccgccctccgcgtcttcgtccccgaagccccgggaaccatccgccctcgggagaccatgctgcagatgcgaggaaagccgtttcctggaacatcggaattctaaccccagggtgaaggactcacgacaggcgaggggcagacatgctgaattccacgggcgaactggagttttcgaacgaagaagatcccgagatcatctcccaactcacttccctgcctctgtccggtgggaaaagctcagctggtgtgcccgaaaaaacgggctatccggactccgtttatgtcatggcagccaacatttttcagggtattcgaatcgaaaagtcggcacagaaagtcttaatcaagtatgggaatgaacccctgcggtccttgtccgagtctgaggatcagtcctttcagcgtttgtcttatgagctggctttcagtgccctgaaatatcaagatattttggaaactatattgatagacagctgtatcttcccaagtaccacaataccagatcatttgagcagtcttattattgtgatgctatatgatttccaagatagaaaatttcaaactcgtgtcctttctgataatgaagagcccatatcagaagttcaagaagtagagaaccttcttaacagttttaagataaaattggctgcagcattggcaagatgtcgaatcaagcatgatgccctttcaatttaccacatccttccagaaacagttaggaaacaggaactaagggcctccactttaccactttatgcttggataaatacttgtaaaatcagccctgaagaagtttataataatttgaagagaagaggctataataaagtcaaatctgtattgcatattgatgataaagtctttgctgtggatcaacattgctatgatgtcttaatttttccatctcatcttaaaaatgatcttataaatatagatcttttcaaagattacaaacttatatttcaggacaaatctcgaagtcttgctgtccattctgtaaaggctttattaaatatggatgatgatgtcttaatggtcaatacaggttcatggtacacagttgcccacatgtcaattttaacaaataataatacctcaaaagtatttgtgtgtggagtacaatcacaagctaaggatcctgacttgaagacccttttcacaaaaataggatgtaaaaatattgaaatacttcatgagaaatttattaacattgaatcaaaggatcacaggttacagaaagttaaagtgattttgctgctacctcgttgttcaggactgggtgttagtaatccagtagaatttattttaaatgaacatgaagatacagaattccttaaagatcactctcaaggaggcatctcagtggacaaacttcacgttcttgctcaacagcagtatgaacagctaacacatgcaatgaaatttactaaagctcaagcagttgtttactgcacatgttcagtttttccagaagaaaatgaagctgttgttaagaaagcactggaatttcaagaccttgggaataaaggacaaccttacagcgggacccttctgagacagtgtctgtgaatgatgttttggcccgagctgcagccaagggtctgctggatgggattgagttgggtaaatcatcaaaacgggagaagaagaagaaaaaatcaaaaacatcattgacaaaaggtgccactactgataatggcatccaaatgaaaattgctgagttcctgaatcgagaaactaaagccagtgctaatctatcagagactgtaacaaaaccatctcttccccagaaaaatactgctcaagtgggggcttcctcacagaccagaaaacccaacaagctggccccccatcctgcagtgcctgcatttgtgaagaacgcttgtccctccagaccgcgtgaacggcagacacacttcttaagacctcggccagaagacagaatggttgctctgaaacccatcgagattgttctgcctccagtctttatgccattttcaagtccccaagggatcagatctcggatgccaactcaacatttgtactgtcgttgggttgcacccaaggcacttgtgcccacctgccttcccacacactcactatccagaaaagaggaaaagcctaaagatgacacaccttcctccctactcaggcctcctcggcgatggctttgattgtcttgtgttttttataggggccaaagagcagttgattttttttcaaagtctagtatttctctgaagattctacatctctacacaagatattcattcttttggtcacctagggatcttctaagtgtgatattactttcagagaattcagacaagtgagaaacaataatgtaggagtcagcaaagcagaattcagagacttcagccaatcactgctgctctgagaggatccagttagagactcagtatcagcggtcagaacttatctcactcctgtgaactttcaggctggacttaaagctgccaagtttcccctgcagggaaggaaacactgcctcccttcagcaggtagctcattagaaagccaaacaggcaaacgatcctggcctctcccgccagctgaccgctcttcagcatccatgcggttgtagtcgtgactttctcagtcacgatcaagggtgattttttcttaaatatcaagctgttctttgaacagggaatgaacatgagtttttgtaacgtgactgaagttgagtttaagtaggaagcgcaggaagttcccaagtgccaggtgtgtgtagctcagagttccttttacagtgaggtgtctctcactgggggagcttccaggatcctgagcagactggacacaatcatctctcccttcctctatgtcaagcactgttacaaaagactgtgagcaaatttccatctaaatattaataattctgaagaagaggcaaaactgttgaatgcaagcgatacctattgttgaagaaacccacaaattatttctgattctaagatcaggggatacaacaaaatctacaagtcatttcaaatagcacacaggaatcaaactttggtaaatcatttctgaggcacaattaaatatattgtagcactatgttaattaattatattaaatgtcgattcatcttgaatgtattctcaattgcctaccaaaaattggtatgattatcatttctgggtctactgatttttcatcatggcaacagaaattgtcattaaatagaattaagatacaaaaaaaaaaaaaaa

SEQ ID NO: 30715 - DNA, 2110 bp, Homo Sapiens
gagaggttctgtggggacagagctgggagtcctgaaggagaaagcgcgcagccgaggggctctggagtgccttagagcagagctgcggccgcggaaggggagcagctgagaaaggagggccgctgcaggcggggttcgaaccgtggggtctgggctgctcccgcggagggcctgggcggacgcgggatgctgggggtccgctgcctgctgcggtccgtgcgcttctgttcctccgcccccttccccaagcacaaaccttcagccaaactgagcgtgcgggacgctctcggggctcagaacgcgagtggggagcgcattaagatccagggatggattcgttctgtccgatcccagaaggaagtcttgttcctgcatgtaaatgatgggtcatctttggaaagccttcaggttgttgcagattcaggccttgacagtagagaattaacttttgggagttctgtggaagtacaagggcagctgataaaaagtccatccaaaaggcaaaatgtggaactgaaggcagaaaaaattaaagttattggaaattgtgatgccaaggatttccccatcaaatataaagagaggcatcctctggagtacctgcgacaatatcctcactttaggtgtaggactaacgttctgggttctatattgaggattcgcagtgaagcgacagctgctattcattctttctttaaggacagtggctttgtacatattcatactccaataatcacatccaatgactctgagggagctggagaactttttcaacttgaaccttcaggcaaacttaaggtacctgaggagaatttcttcaatgttcctgctttcttaactgtctcaggacaacttcatctagaagtgatgtcaggagcttttactcaagtgtttacctttggtccgaccttccgagctgaaaattctcagagccggaggcacctggcagagttttatatgatagaagcagagatttcttttgttgacagccttcaagatcttatgcaggttatagaggaactgttcaaggctacaacaatgatggttctctcaaaatgtcctgaagatgttgaactctgtcacaaattcatagcacctggccaaaaggacagattagaacatatgctaaaaaacaactttttaatcatttcttatactgaagcagtggagatcttaaagcaagcatcccagaacttcacctttaccccagagtggggtgctgacctacggactgaacatgaaaagtacctggtgaagcactgtggcaacatacctgtcttcgttattaattatccattaacactcaagcctttctacatgagggataatgaagatggccctcagcacacggttgctgctgttgatcttctggttcctggagttggggaactctttggaggaggcctcagagaagaacgataccatttcttagaggagcgcttagccagatcgggacttacagaagtctaccaatggtatctggaccttcgtcgatttggatctgtgccacatggaggttttgggatgggatttgaacgctacctgcagtgcatcttgggtgttgacaatatcaaagatgttatccctttcccaaggtttcctcattcatgccttttatagctggaagattggttaaggaaaagcaccccccatggcagagacactgcacatgattgtgcatacagcagaatgcatgtttggattttagaaatgcagatttcaatatgtaattgttgtgccataagatatcatagaaaaaatataagtggttgtgattttcttagaaagttgagggtatttcacgtaaggatgagctcccgcaagaagaggtacttatagcaaggggactctcaaatccattacctcaattaagaaatgaagaaattgaattagtctcaaagtttcttttaaactctaaaacagaatgagataatgtattttacgttgtctataatcattaaatcactccctgtgtaatttgtgagaaccatctagtagctcgaaataaaataatgttgcatcttttctcccttgccatatactttgtgataaatccttatctcattttcagtacttcattaaacattgcagaaaaaaaaaaaaaaaaaaa

SEQ ID NO: 30716 - DNA, 4307 bp, Homo Sapiens
gccgaggcctgcgcgccgcccggccgcctgcactgcgcgcgcgcccaccccgcgtgggaggcagcgggaggggcccggagaggtgtggagcggcgcggcgggaggctccgtgggcggccacgggagacagcgccggcgggagcgcgcctctcggcctttcctccgcgcccccgcgtccccagccggccgctccgagaggacccggaggaggcaggtggctttctagaagatgaccatagaggaccttccagattttccattagaaggaaatcctttgtttggaagatacccatttatattttctgcttctgataccccagttatcttttccatttctgcagcaccaatgccttcagactgtgaattttctttctttgatcctaatgatgcatcatgccaggaaattctttttgatcccaaaacttcagtttcagaattatttgccattttgagacagtgggttcctcaggtccaacaaaacattgacattattggaaatgagattcttaagagaggttgcaatgtgaatgatagagatggattgacagatatgactcttttacattatacctgcaaatctggagctcatggtattggtgatgtggaaacagctgtaaaatttgcaactcagcttattgacctgggagcagacattagtttgcggagtcgctggacaaacatgaatgctttgcattatgctgcttattttgatgtccctgaacttataagagtgattttgaaaacgtcgaaaccaaaagatgtggatgccacttgcagtgattttaattttggaacagctttgcatattgcagcatacaacttgtgtgcaggtgctgtgaagtgcctcttggagcagggagcaaatcctgcatttaggaatgacaaaggacagatccctgctgatgttgttccagacccagtagatatgccgttagagatggctgacgccgcagccactgctaaggaaatcaagcagatgcttctagatgcggtgcctctgtcatgtaacatctcaaaggccatgctcccaaattatgatcatgtcactggcaaggcaatgcttacgtcacttggcctgaagttgggggatcgtgttgttattgcaggacagaaggttggtacattaagattttgtggaacaactgaatttgcaagtgggcagtgggctggcattgaactggatgaaccagaaggaaaaaataatggaagtgttggaaaagtccagtactttaaatgtgcccccaagtatggtatttttgcacctctttcaaagataagtaaagcaaaaggtcgaaggaagaatataacacacactccttctacaaaagctgctgtacctctcatcaggtcccagaaaattgacgtagctcatgtgacgtcaaaagtaaatactggattaatgacatcaaaaaaagatagtgcttctgagtcaacactttcattgcctcctggtgaagaacttaaaactgtgacagagaaagatgttgccctgcttggatctgtcagcagctgctcctctacatcttctttggaacacagacagagctaccccaagaaacagaatgcaatcagcagtaacaagaagacaatgagcaaaagcccttccctttcatccagagccagtgctggtttgaattcctcagcaacatctacagcaaataatagccgttgcgagggggaactccgcctcggagagagagtgttagtggtaggacagagactgggcaccattaggttctttgggacaacaaacttcgctccaggatattggtatggtatagagcttgaaaaaccccatggcaagaatgatggttcagttggaggtgtgcagtattttagctgttctccaagatatggaatatttgctcccccatccagggtgcaaagagtaacagattccctggataccctttcagaaatttcttcaaataaacagaaccattcttatcctggttttaggagaagttttagcacaacttctgcttcttcccaaaaggagattaacagaagaaatgctttttccaaatcgaaagctgctttgcgtcgcagttggagcagcacccccaccgcaggtggcattgaagggagcgtgaagctgcacgaggggtctcaggtcctgctcacgagctccaatgagatgggtactgttaggtatgtgggccccactgactttgcttcaggtatctggcttggacttgagctccgaagcgccaagggaaaaaatgatgggtcagtgggtgacaagcgctatttcacctgtaagccgaaccatggagtcttagttcgaccgagcagagtgacctatcggggaattaatgggtcaaaacttgtggatgagaattgttaagcttctaaaatattaaataagctcaaatatatatatttggtgtaaataaagagtccatggtaaatggtttactttatttagccatattaaaattttgaaaatatagttatcttcttaaaaaccattataacaattcagagagagttctttacaaagccatgaatatgaactatggggaatcatggttcttttaaagcaattttcaaaataagtaccaattaaagctttaggttccaagaagattctgggactcaggaagaaaaagtgccatcaggtgaccagctgttgcatttcttgcttattctgttttgtttttgcacatcataatggatttttcttagtgccctaattgtgaagggtttctctagctttggttatgtgtaatgttcacgtgacctttttttgtcaatcatttttggaatttttctttctttctgtgctttattactaataagtccaatgagtgagtagtagctagatgactagtatgtagttttatattttggtaaaattatttgccctttcagaaatgcctcatctaaagatacatgataattttggagttggaaggggccttagaggctctccagctctgcttcttgcccattgccaaatactgaaatggaagcccgtcttacctggggtcactaactggttggttaactgagctaagaatagactgtgggtctcctcacttgtggcccagtgctctttctgctatacaaaatgcctaatctcagatttttcttctgctgcttgactgcttcatctggatgaactacaaaaaacccatgattaaggtttatgaattcaagtaataattagattttttttgcacagacttacttaacttccttattggatatgtttgtaacacataaacacaaagcacttttcaaacatgatgcacttttatctttgtgaataatttactgtcctttcctcctgggatatgagaaacattttaaaaaacgtatttaacagaagagagcaaataaagatatatcaggaaggatgtattagttatttacttaaatgtttataatatctggattttttttgttttgttactcatagaactggtgttgtttgctgtttttatttctctaattgttgcagagttctgcctgttacaaagctacagaactgtattgtttttattttccttcttgagcacatgttaacaaactaagcttcacattagagtgatgtcataatgtaaaatgtttgcattgtggttaggtattgaagtttatgtcctgtctgtgtaaagattcatcttttattgtaaatatttagactttaccacagaaatattggaacagtttgctttataagattaaaaagcatccttcagaatggagcttgccttgtgcttagaaataatatgttgaactattttgcaatatactatttttaaatctaaattctgtcacttcgctgcctttttaaaatagtgtggtatttcaaatattgctagagctattttcctgaaatacatttgcaaaataaggctgctttgtaatcaaggaatatttttattgattgaaggaaatgactgtactgcgattcaaaagtaaacttattttattatacagattatttcttaaaaactctatttataccttaacatgaaatccatgaccacaccaaacttggttattcataatttttcctgttaaatataaaacactgtaagttaaaaacagtaatgccaacattgaatttatttttgaggtcaaagaaccagttgttctctttatatttagatgaggatgattgagtccatatactatgtatgtttacatatactatacatgcacattaggtgttttcatttgtgttttgcttatgaaatgtcatttaaagttcacttcttgagcatcaataaaaagggaagctgtgtggttttggaaaaaaaaaaaaaaaaaaaaaaaaagaaaaaaaaaaaaaaaaaaag

SEQ ID NO: 30717 - DNA, 2531 bp, Homo Sapiens
gttaaactcgtcatttcctccagctagaggagctcaactgatctgttttctttcgcccagccaaaatcacagaatgaaggcggtgaagagcgaacgggagcgagggagccggcgaagacaccgggacggggacgtggtgctgccggcgggggtggtagtgaagcaggagcgtctcagcccagaagtcgcacctcccgcccaccgccgtccggaccactccggtggtagcccgtctccgccgaccagcgagccggcccgctcgggccaccgcgggaaccgagcccgaggagttagccggtccccacccaaaaagaaaaacaaggcctcagggagaagaagcaagtctcctcgcagtaagagaaaccgaagtcctcaccactcaacagtcaaagtgaagcaggagcgtgaggatcatccccggagaggacgggaggatcggcagcacagggaaccatcagaacaggaacacaggagagctaggaacagtgaccgggacagacaccggggccattcccaccaaaggagaacgtctaacgagaggcctgggagtgggcagggtcagggacgggatcgagacactcagaacctgcaggctcaggaagaagagcgggagttttataatgccaggcgacgggagcatcgccagaggaatgacgttggtggtggcggcagtgagtctcaggagttggttcctcggcctggtggcaacaacaaagaaaaagaggtgcccgctaaagaaaaaccaagctttgaactttctggggcacttcttgaggacaccaacactttccggggtgtagtcattaaatatagtgagcccccagaagcacgtatccccaaaaaacggtggcgtctctacccatttaaaaatgatgaggtgcttccagtcatgtacatacatcgacagagtgcgtacctactgggtcgacaccgccgcattgcagacattccaattgatcacccgtcttgttcaaagcagcatgcggtctttcaatatcggcttgtggaatatacccgtgctgatggcacagttggccgaagagtgaagccctacatcattgaccttggctcaggcaatggaaccttcttaaacaacaaacgtattgagccacagagatactatgaactaaaagaaaaggatgtactcaaatttggattcagtagcagagaatacgtcttgctccatgagtcgtcggacacttctgaaatagacaggaaagatgacgaggatgaggaggaggaggaagaagtgtctgacagctagcaaactaagaacccaaactattgatacacggtttccttcttggaagtctttgattgactcagagagcactatggtggtgggtccagcactatggtgctctctgtaatgcctcttactgccttaagtctttcctctgttgctgaccagattgtgttaccatttgaatacactgactaatgtttgttaaactttttctgtggcaccttggccacatgcctgcaggcatttgttttcagaacagtctcaccaattacaacacaccgtgttttagtagaagtgttgtggttttagttggtgctttcagaactgctgcctaggaaactataaacccttggttaaggggaaatcatggcttgttctctttgtacagttactttatttatataggtgttaagctttgtggaccaggtgtttttcttttggggcgaacccctgagcagagaatcttactaggctttggttatcaccaaaacaacctccagtatataccaaagctttgacttgtttgagctcttgagcttagaagttgattttgcacttatttttttggggggtgggaatgtactgcagtcagtaaacattattgactgtttaacttaaacagatgctttatggcacctgctcaagcccgtgactgtacagaaggatcctggttgctaccagtgggtgctgattcagcatcacaagtgactgaaattggctgtggatctgttctttgtgaaagaattcctgatttctccatggagcatgtacacaacaattttgatcatattaactgtacttcagttttgcatttttattcaaatgttatctctttttttctttgagaaataaactgtcactgatgtgacagcgttctttctttattctaataacatgtatagatctaaagcaggttgtgttgtttacatgtttctacacatttcatcctttaaaaagttgttgagagaggttgtatttaccttcccaaggttggaaagcaggggaatttcccagtgtcctagttttccaccagaggaatatgtgtaagtagcaaagtatttgctgcttacatatagtgtgtatgtatgtatatatgtaaattgtgtgttaaagagctgatactgattttcatatgacaatgttaggcaaaggcctccctgcatttgaagagcaggttttcatttatatgtatttttgggataaaaaaataaaatttgtaaatataaaaaaaaaaaaaaaaaaaaaaaaaaaaaaaaaaaaaaaaaaaaaaaaaaaaaaaaaaaaa

SEQ ID NO: 30718 - DNA, 3159 bp, Homo Sapiens
acagtttcacccagcaagcgtgagaacaggtactgcttcctgagcaccgccagccaccggcaccaagaccggccacatcccagcactgcccacctctgctcccagccgccagatgacggaggctctcgccagaccctcagcacgcagagctggcttctgatagaagtgctcgggaaagaaagcaaagcgggaggtgcctctttagaaaccacgaagtgcacgcggcgtcgacagtgatcacgccacctggacagccagagtccaaggcataaggaggaaaatgagtctcctcaaagagcggaagccaaaaaagccacattacatccccaggcctccaggaaagcccttcaagtataaatgtttccaatgtccctttacttgcaatgagaagtcacatctttttaatcacatgaagtatggtctttgtaaaaactcgattactttagtatcagagcaggatcgagttcccaagtgccctaaatctaactcactagaccccaagcaaaccaaccagcccgatgccacggcgaagccagcctcttccaagtctgtcgcaaatggactctctgccttcgactcgaagcttcagcacagctctgccagggaagacatcaaggaaaacctggagctgcaagcccggggaacccacaggtgcctgggacagaagccagccctccacagggcatcaccctgcaagagcccagctccggaagccgccctcggtgcccagcctgctctggaaggcgcagctcggccttctgcatttgttccagtcggcgagcacagactcaaggggccagacaacgccgagccgcccgagacactggctttacacaaccccactgccaaggccgtgtctttccacaccaagtcggccttccacactcctggctacccctggaaagccggctcacctttccttccaccagagtttccacataaaatctcatctacaaaggggcttggggccatttccccttacatgcaccccacaatcccagagtacccgcctcacttttacacagagcacgggctggccaccatctactcgccttacctgctggctgggagctcgcctgagtgtgacgcacccctgctgtcagtctacggaacccaagacccgagacacttcctgcctcacccggggccgatccctaagcacctggctccatctccagccacatacgatcactacaggtttttccagcaatatccctctaacctgccgattccttacggattttacaggccagagtctgcattttcctcctatggtctcagactcccacctgtcactggcctcacccgagatcagagctctcacctgcttgaagaagccaccctggtctatccagcctcgagtccttccaggttaaacccttcggaccccaacagaaaacacgtcgagttcgaaagtccaattcctgaggctaaagactcctccaaggctgggcagagagacacggaagggtccaaaatgagcccccgcgcagggagtgcagccacgggctccccagggaggccgagccccaccgacttcatgcagacgagccagacctgcgaaggcctgtacgacctctccaacaaggcagcctccagcgcactgggaagactctacccgccagagcaaagcctcacagccttcaggcctgttaagaaaagcacagaatgcctacctgcccaggctgctgagaccacagcagagtctccagtaagcctcaatgttgtgaacggagaccctcctgctccgaccggaagcgcctctctcgtctcggaggccgcgccttccagtccggacgacagctccgggatgggccccctcaacctctccaagaaatcagagataaacctggcagccacccacgaacccacgtaccaaggcagcccccaggcggaaaccgccagcttctcagagctgcaggaccttccactcaatctctcggtgaaggacccctgtaacacccaggctccgaggcccgccttccccggtcgaccacgagctgcggaacctgctgctgctgttccacagaagactgggacagaaggttctgaggatgggcccagccaccctgagaccaagccaggcagcctcgacggtgacggggccccacccacaggccccggcgaggaggctccagacgcatgcgcggtggacagcagcgaggagcagaagcagacggcagccgtggccctgtgccagctggcggcctacagccccaggaacatccgggtgggcgatggggatgctgcggccccggaacctgcctgccggcaagacacacccacactgagctccatggagagccaagaggcccagtgtgacctcagacccaaaggacaaaagaggacaagtctaagggatgctggaaaatcccagcaaggagctaagaaggcgaagctgcaggacacggccagagtgttcacactacgaaggagggcccgggtgtcctaacgccgggttcacacgtgtgttcacagagctacggccacacacacgccttccaaggtggcaagctacaacacctctgaactggcactttcacatttttacaaatgcagctgctgcttctcaaaaaaacaaacaaacaaacaaacaaaaaaccctccaattcagtttttataaatattaagcatgaatattaaaaggtgcttctacttttggttgtaaaaacacctgaatgactctaagactgatatgtattttcaagtctaagctgtcttacagaagatcttttataaatgtttccttataaatatctcaccattacaacaaattgttttaactgtttttctattagctctagctgcatatttgatgtaaatgacaattactgaaaaaatgtcagaaaaaacattttcagtactaacattaaagtgccatatgtaaaaaagaaaaatgtgatttgtataactaaataacacacaaacatcaagaggctatttatacaaataatttatttccactagggaaagtgcattactggtgaaggtattatcaatttattctacttgcttataatgttacagtgaatgttctggcttactctgcctcactttccattccccaaaatgatgtgtatgttgctaattttccaataaactcatatgaaccataaggaaacataaaatgcaaataaacataaatctatgttatccttt

SEQ ID NO: 30719 - DNA, 1970 bp, Homo Sapiens
gaggccgcgccgggagcgcggtggggctaggcgtggggcgctcccggcatgtccctgtaccgcagcgtcgtgtggttcgccaaggggctgcgcgagtacaccaagagtggctatgaatctgcatgtaaagactttgtccctcatgacttggaggtccagattcctggaagagtctttttggtcactggaggaaacagcggcattggcaaagcaactgcccttgaaatcgccaagcgagaacatttttctgcacattgtggacttgtctgatcccaagcaaatctggaaatttgttgaaaatttcaagcaggaacataaactccatgttctgatcaataatgcaggttgcatggtcaataaaagagagctcacagaagatggacttgaaaaaaactttgctgccaatactctgggtgtgtacattctcacgaccggcctgatccctgtgctggagaaagaacacgacccccgagtgataaccgtctcctcaggaggaatgttggttcagaaactgaacaccaatgatctccagtccgaaagaacaccatttgatggaactatggtctatgcacaaaacaagaggcagcaagtggttctgacggagcggtgggcccaagggcacccggccatccatttttcttccatgcatcctggctgggccgacaccccaggtgtgaggcaggcgatgccggggttccacgccaggttcggggaccgcctgcgctccgaggcccagggcgcggacaccatgctgtggctggccctctcctctgccgcagccgcacagcccagcggccgcttctttcaaggtgacttcctccctggctgtgaaggcagctgacacagggctaggggcagcagctgggccttcgaggcgcaccttcccctccgtgaaacctggggtgggactgtcccctggggggtgcctgggcttctttggcgagatgattgctttgcctgctgaggttagttttgggaagcgcttcactccaggttggtagcttctttggagacttgtgataaccctgtcatcaaggtcctgtgagaacgggagaggcagttcctaccttgggaatggaagattttctctgcagtttgctgaggcccaggaggggcgctattcaaagctgcactgcaaagggagtaacggactctgcttctctgcagtgcaaagggtgtaagggactctgcttctctatttttggaagcagtgatctgttcacgtctctccccagtgggctcctaagggggcaggcgtgtgagtggacgccatccgaagacagcacttgacctcgggtggaagccaggctctttgcttggcttctctttcctctgttcttgatgagaaccacccttgcttgaggaattctgaagcgctggtgacccctggggtatccgggaggatggccgcaccccttcctgctgatcacccaaacgtggtctcccgtccagccctggctgcagcctcccagttcccaaactgcactttacatatcaatccatgctgcctgatccctgtgggacctttgacagcagggatgggggtctaacagctgtagggtgctgccactccagcaggcgtcggttcaaggcctgagcagcacagggacatggacccagccacgctgcagcagctcacacctctctgcggttccctctcacttttagatcggaagccagtttctacacacttgcctctcgctacagcgtcctcctcaccggccgaagaggagaaactcattgaaatcctggaacagctggctcagacatttaaataggccaacccagacacagtgcggtaccagaattgccttagaagataccagaaggtgcggtctagggaccagtgaataagaagaccccacttcaacttcccctcgaagacgttgtgcctcacagcgaggcctacaagggatgggaacttttatttcaaaataaatactaccgaggctgtgatcaggctcaccttg

SEQ ID NO: 30720 - DNA, 2676 bp, Homo Sapiens; identical to SEQ ID NO: 24346

SEQ ID NO: 30721 - DNA, 3000 bp, Homo Sapiens
atggagccccgggctgccgcggcgggcgagccagagccgccggcggcgtcctcctccttccaggcccggctctggaagaacctgcagctgggggtgggcaggagcaagggcggcgggggcgggcgcgctgggggtccagagcgccgcactgcggacaccccgtcgccctccccgccacccccggtgggcacagggaatgcaccggccagggggagtggtgcaggcagcaggtggagcggcttcaagaagcggaagcaagtgctggaccgagtcttctcctcctcgcagcccaacctgtgctgctcgtcgccggagcccctggagcccggcggcgccggcagagccgagcaggggtccacgctacgccgccggatccgcgagcatttgctccccgccgtaaaggggcccgcggcggcctcgggagcagcgggagggacgcctcctggcggacgctcccccgactcagctccttcctcttcctccgcctcatcctccctgtcctcctcgccccagcctcccccgaggggggaccgcgcccgagatgagggtgcacggcgtcagggccccggggcgcacttgtgccgccagaagagctcctctctgccgggcaccgcctgcctggagcagctgctggagccgccggctcctcccgcagagccggcgcggagtcccgcggagtctcgggccccggagacgggcgaggagcacggcagcagccagaaaataataaacactgctggaaccagtaatgcagaagtccccttggctgatcccggaatgtaccagctggacattacattaagaaggggtcaaagtttagctgctcgagatcgaggagggacgagtgatccatatgtgaagtttaaaatcggaggaaaagaagtttttagaagtaagataatacacaagaacctcaaccctgtgtgggaagaaaaagcttgtattctggttgatcatcttagggagccattgtatataaaggtatttgactatgattttggactacaggatgactttatgggctcagcctttctggatctgacacaattggagttaaacaggcccacagatgtgacccttactctgaaagatcctcattatcctgaccatgatcttggaatcattttgctctcagtcatccttacccctaaagaaggagagtccagggatgtgacaatgctaatgaggaagagttggaaaagatcaagtaaggaactttcagaaaatgaagtggttggatcttatttctctgtgaagtctctcttttggaggacgtgcggcaggccagctcttcctgtcctgggcttctgcagagcagagcttcagaatccttattgcaaaaatgtacaatttcagacccaaagtttacgcctatcagacctacacagaaaatcgcatctttggagaggaatagtcagcatcaccttgattgaagggagagacctcaaggccatggattccaacgggttgagcgatccctacgtgaagttccggcttgggcatcagaagtacaagagcaagattatgccaaaaacgttgaatcctcagtggagggaacaatttgattttcacctttatgaagaaagaggaggagtcattgatatcactgcatgggacaaagatgctgggaaaagggatgatttcattggcaggtgccaggtcgacctgtcagccctcagtagggaacagacgcacaagctggagttgcagctggaagagggtgagggacacctggtgctgctggtcactctgacagcatcagccacagtcagcatctctgacctgtctgtcaactccctggaggaccagaaggaacgagaggagatattaaagagatatagcccattgaggatatttcacaacctgaaagatgtgggatttctccaggtgaaagtcatcagagcggaagggttaatggctgccgacgtcactggaaaaagtgacccattttgtgtggtagaactgaacaacgatagactgctaacacatactgtctacaaaaatctcaatcctgagtggaataaagtcttcacgttcaacattaaagatatccattcagttcttgaagtgacagtttatgatgaagatcgggatcgaagtgctgactttctgggcaaagttgctataccattgctgtctattcaaaatggtgaacagaaagcctacgtcttgaaaaacaagcagctgacagggccaacaaagggggtcatctatcttgaaatagatgtgatttttaatgctgtgaaagccagcttacgaacattaatacccaaagaacagaagtacattgaagaggaaaacagactctctaaacagctgctactaagaaactttatcagaatgaaacgttgtgtcatggtgctggtaaatgctgcatactacgttaatagttgctttgattgggattcacccccaaggagtctcgctgcttttgtgctctttctctttgttgtctggaactttgagctctacatgataccactggttttgttgttactattgacatggaactacttcttgataatatcagggaaagataacaggcaacgtgatacagtagtggaggacatgctagaggacgaggaagaagaagatgacaaagatgacaaggacagtgaaaaaaagggatttataaataaaatctatgccatccaggaggtatgtgtcagtgtccagaacatcctagatgaagtggcttcctttggcgaaaggattaagaatactttcaactggactgtcccattcttaagctggctggccattgtagccctctgtgtgttcacagccatcctgtactgcattccgctgagatacattgtccttgtctggggcatcaataaatttacaaaaaagcttcggagtccatatgcaattgataacaatgaactacttgacttcctttccagagtcccttcagatgtacaagtggtgcaataccaagaactgaaaccagatccttctcatagcccatataaaagaaagaaaaacaatcttggctag

SEQ ID NO: 30722 - DNA, 12103 bp, Homo Sapiens
ccctgacaggctggatgaaatgagatccccatgtagcaattgccatggaaacctgtgactcccctcctatctcaaggcaggaaaatgggcagagcacatcaaagctatgtggaacgacacaacttgataatgaggtgccagagaaagttgcagggatggagcctgacagggaaaacagctccacagatgacaacctgaaaacggatgagcgcaaaagtgaagccttgctgggtttcagcgttgagaatgcagctgccactcaggttacctcagcaaaggagataccctgcaacgaatgtgccacttcttttcccagtttacagaaatacatggaacaccactgccctaatgcccgccttcctgtcctgaaggatgacaacgagagcgagatcagcgagttagaggacagtgacgtggaaaatctaacaggggagatcgtttaccagcctgatgggtcagcatatataattgaggactccaaagaaagtgggcagaatgcacagactggggcaaatagcaaactcttttctacagcgatgttcctggactccctggcatctgctggagagaagagtgatcagtctgcttctgcacctatgtcgttctacccacagatcatcaacacttttcatatcgcttcatccctcgggaaaccatttacagccgatcaggctttcccaaatacctcagcattagcaggagttggtcctgtgttgcacagtttccgtgtctatgatctccgacacaagagagagaaagactatctaaccagtgatggctcagccaaaaactcctgtgtgtccaaagatgtccctaacaatgtggacttgtccaaattcgatggttgtgttagcgatgggaaaaggaaacctgttttaatgtgtttcttgtgcaagttgtcttttggttatatcaggtcatttgtaacccatgctgtgcatgatcatcggatgaccctcaatgacgaggagcagaagctcctcagtaataaatgcgtctccgccataatacaggggattggcaaagacaaagaacctcttataagctttctggaaccaaaaaaatccacttctgtttatccccatttttctactacaaacctcataggacccgatccaaccttccgcggtttatggagcgcttttcatgttgaaaatggtgactctttgccggctggctttgccttcttaaaaggaagcgcgagcacctcgagctcagcagagcagccgctggggattacccaaatgccaaaggctgaagtgaatctgggggggctgtctagtttagtagtgaacaccccaattacctctgtctccctcagccactcatcgtctgagtctagcaagatgtcagagagcaaagaccaagagaacaactgtgaaaggccaaaagaaagcaacgttttacacccaaacggggagtgccctgtcaaaagtgaacccactgaaccgggagatgaggatgaagaagatgcgtactccaatgaacttgatgacgaggaagtattaggtgaactcaccgatagtattggtaacaaagatttccctctcttaaaccaaagcatttctcctttatcatccagtgtgctaaaatttattgaaaagggtacctcgtcctcctcggcgactgtttctgatgacacagaaaagaaaaaacagactgctgctgttagggccagtggcagtgttgctagtaactatggcatcagtggcaaggactttgcagacgcaagtgccagtaaagacagtgccacagctgctcatccaagtgaaatagcccggggagacgaagacagttcagccactcctcaccagcatggctttaccccgagtactcctggcacaccagggcctggaggagacggctcaccgggcagtggcatcgagtgtccaaagtgcgacactgtgttggggtcttcgaggtctcttggtggtcatatgactatgatgcactcgaggaactcatgcaaaaccctcaaatgtcctaaatgtaactggcactacaaatatcagcagaccctggaggcccatatgaaggagaaacaccctgagccgggtggctcttgtgtttattgtaagactggacagcctcaccccaggcttgcccggggtgagagttacacgtgtggctataaacccttccgttgtgaggtttgtaactactctaccactaccaaaggcaacctcagtattcatatgcagtcggacaagcacctgaacaatgttcagaatctccaaaatggcaatggtgagcaggtgtttggccactctgccccagcccccaacaccagcctcagtggctgcggaacaccctctccgtccaaacccaaacagaaacccacctggcggtgtgaagtttgtgattatgaaaccaatgtcgccaggaacctccgaattcatatgaccagcgaaaagcacatgcataatatgatgcttttgcagcagaacatgaagcagatccagcataatctgcacttgggcctcgccccggcggaagcagagctttatcagtactacctagcccagaacataggcctgaccggaatgaagctggaaaaccctgccgaccctcagctgatgatcaatccattccagctggatccagcgacagcagcggctttggcaccagggctcggagagctgtcaccttatatcagtgacccagcgctgaagctattccagtgtgctgtttgcaacaaattcacctctgacagcctggaggccctaagtgtgcatgtgagcagtgagcgctctctccctgaagaggaatggagggcagtaattggagatatctaccagtgcaagctctgcaactacaacactcagctcaaagccaacttccagctacactgcaagactgataaacatatgcagaaatatcaactggtggctcacattaaagaagggggcaaaagcaatgagtggaggttgaagtgtattgccattggcaaccctgttcacctaaaatgtaacgcctgtgactattacaccaacagtgtggataaattacgcttgcataccaccaatcacaggcacgaggcggccctgaagctctacaagcacttgcagaagcaagagggtgcagtgaatcccgaatcctgctattactactgtgccgtgtgtgattacaccaccaaggtcaagttgaatctggtacaacatgtccgttcggtgaagcatcagcagactgagggcctacggaagctccagctccaccagcaaggcctggcaccagaggaggacaacctcagtgagatcttttttgttaaagattgcccaccaaatgagcttgaaactgcctcattgggagccaggacttgtgatgatgatcttacagagcagcatgaggaggcagaaggagctattaagcctacagcagtggccgaggacgatgaaaaagacacaagtgagagagacaatagtgaaggcaaaaactctaataaagactctgttagtgtggcagggggtacccagccactcctgctggcaaaagaagaggatgttgcaacaaaaaggtcaaaacctacagaggacaataaattctgtcatgaacagttctatcaatgtccttattgtaactacaatagtagggaccaaagtcgtatccagatgcacgtcctatcacagcactcggtgcagccggtcatctgctgtcctctctgtcaggacgtcctcagcaacaaaatgcatctccaactgcatctgacgcatttgcacagtgtgtctccagactgtgtggagaagctgcttatgacagtgcctgtccctgatgtgatgatgccaaacagtatgctactgccagcagctgcctctgagaaatcagagcgggacacacctgcagccgtgacagctgaggggtctgggaaatattcaggtgaaagtccaatggatgacaaaagcatggcaggtctcgaggattcaaaggctaatgtggaagtaaagaatgaggagcagaaaccgactaaagaacccttggaagtctcagaatggaataaaaatagcagtaaggatgtgaaaatccccgacacactgcaagatcaattaaatgaacagcaaaaaaggcaaccgctctctgtttctgaccgtcatgtctacaagtatcgctgtaaccattgtagcttggctttcaaaactatgcagaagcttcagatacattcccagtatcatgcaattcgggctgcgacaatgtgtaacctctgccagcgcagtttccgtacattccaggctttaaaaaaacacttggaagcaggccaccctgaactgagtgaagctgaacttcaacagctatatgcctccttgcccgtgaatggagaactgtgggcagagagcgaaactatgtcccaggatgaccatggcctagagcaggaaatggagagagagtatgaggtggaccacgaagggaaagcaagtcctgtaggaagtgatagtagctctattccagatgacatgggctctgaaccaaagcggaccttaccttttagaaaagggcccaattttacgatggaaaaattccttgatccatctcgtccatataaatgtacagtgtgtaaagagtcattcacccaaaagaacattctcttggtccactataattcagtttctcacttgcataagctgaaaaaagttttgcaggaagcctccagtcctgtcccacaagaaaccaacagcaacacagataacaaaccctacaagtgcagcatctgcaatgttgcatacagccaaagctcaacattggaaatccacatgaggtctgtgctccaccagacaaaggctagggctgcaaagctggagcccagtggtcatgtggctggtgggcacagcattgcagcaaatgtcaacagccctggccaggggatgttagattccatgagtttagcagctgtaaacagcaaagatacccatttagatgccaaagaattaaataaaaagcaaactcctgatttaatctctgctcaacctgcacatcacccaccacagtcaccagcacaaattcagatgcaactacagcacgaattacaacagcaagccgcattctttcagcctcagtttctaaacccagcctttttgcctcattttcctatgaccccagaagcactgctgcagtttcagcagcctcagtttctctttccattttatatacctgggacggagttcagcttggggccagatttgggcttgccaggctctgccacatttgggatgcctggcatgacaggaatggctggctccttgcttgaagacctaaagcagcagattcaaacccaacatcacgttggtcaaactcaactccagatactacagcaacaagcacaacaataccaagccacacagccccagctgcagcctcaaaaacaacagcagcagccaccacctccacagcagcagcagcaacagcaggcaagcaaattattgaaacaagagcaaagtaacatagtgagtgcagactgccaaatcatgaaggatgtgccatcttataaggaggcagaagatatttctgaaaagccagaaaaaccaaagcaggaatttataagtgaaggtgaaggactcaaagaaggcaaagacacaaagaagcaaaaatccttggaaccatccatcccaccaccccgaatagcttcaggggccagaggaaatgctgccaaagcgttattggaaaactttggttttgaactggtcattcagtataacgaaaacaggcagaaggtacagaagaagggcaaaagtggtgaaggcgaaaacactgacaaactagaatgtggaacatgtggtaaattgttttccaatgttcttattttaaagagtcaccaagaacatgtacatgggcaattttttccatatgcagcgctagaaaaatttgctcgtcaatacagggaggcctatgacaagctttatccaatttctccatcttctccagaaacgccgcccccgccacctcctcctcctcccttgcctccggctcctccacagccttcttctatgggtcctgtaaagatccccaacacggtttctactcctctgcaagctccaccacccactcctcccccaccaccaccacctcctcctcctcctcctcctccccccccacctcctccaccttctgctcctccacaggtccaactgccggtttctctggacctgccgctctttccttccattatgatgcaacctgtgcaacaccctgcgcttcctccccagcttgccctgcagctgccacagatggacgcactctctgcagacctcacccaactttgccagcagcagctcggattagatcccaacttcttaagacattctcagttcaaacgcccacggacaagaattacagatgatcagctaaaaatcctgagggcttattttgacattaataattctccaagtgaagaacagatccaggaaatggcagagaaatctggcctctcccaaaaagttatcaaacactggtttagaaatacgctttttaaggaacgacagagaaataaagattcaccatacaacttcagtaaccctcctataacggttttagaagatatcagaattgatccacagcccacctctttagaacattacaaatctgatgcatcattcagtaaaaggtcttctagaacgagatttactgactaccagcttagggttctgcaagacttttttgacacaaacgcttacccaaaagatgatgaaatagaacaactctccactgttctcaatctgcctacccgggttattgttgtatggttccagaatgctcgtcagaaagcacgaaagagttatgagaatcaagcagaaacaaaagataatgaaaaaagagaactcactaatgaacggtacattcgaacaagcaacatgcagtaccagtgtaaaaagtgcaatgtggttttccccaggatctttgacttgattacgcatcagaaaaagcagtgttacaaggatgaagatgatgatgcccaagatgaaagccaaacagaagactccatggatgccactgatcaagtggtatacaagcattgcacagtgtctggccaaacggatgcagctaaaaacgctgctgcccctgcagcaagttctggctctgggaccagcacccccctgattccatcacccaaaccagaacctgagaagacttctccaaaacctgaatatcccgcagaaaagccaaagcagagtgacccctctcccccttctcaaggcaccaaaccagccctgccattagcatcgacttcctcggacccaccacaggcatccacagcccagccacagccacagccacagccaccaaaacaaccccaacttatcggaagacctccctcggcctctcaaacaccggtcccttccagtccactgcaaatttccatgacgtctctccagaacagtctacctccacagttactacaataccaatgtgatcagtgtacagttgccttcccaactctggaactctggcaggaacaccagcacatgcacttccttgctgctcaaaaccaattccttcactctccgttcttggaaaggcccatggacatgccctacatgatatttgaccccaacaatccgctgatgactggacaactgctgggcagttccctcactcaaatgccccctcaggccagttcctcccacaccacagcccccacaacggttgctgcttccctaaaaaggaaactagacgataaagaagataataattgcagtgaaaaagaaggagggaatagcggtgaagaccaacaccgagataaacgcttgagaaccacgatcaccccggaacagctggaaatactctatgaaaaatacttgctggattccaatcctaccagaaaaatgcttgatcatattgcccgcgaagtcgggctgaaaaaaagggtcgtgcaagtctggttccagaatacacgagcgcgggagaggaaaggccagttccgggcggtgggtccagcacagtctcataaacggtgtccgttttgccgagccctgtttaaagcaaagtcggccttagaaagccacattcgctctcggcactggaatgaaggaaagcaggcaggttacagcttgccaccaagccctttaatatccaccgaagatgggggagaaagcccacagaaatacatctattttgattacccatctttgccattaactaaaattgatctatcaagtgagaatgaattggcttctacagtgtcaacacctgttagtaaaacagcagagctgtcaccgaagaatcttttaagcccttcttcttttaaagcagagtgttctgaggatgtagagaatttaaatgcccctcctgctgaggctgggtatgatcaaaataaaaccgattttgatgagacttcatcgattaatacggcaatcagtgacgccaccaccggagacgagggaaacactgaaatggaaagcaccacaggaagttccggagatgtgaaaccggctttgtctcccaaagagccaaaaactctggatactctgccaaaacctgcaaccacacctaccacggaggtctgcgatgacaaatttctcttttctctcacaagcccatccatccatttcaatgacaaagatggcgaccacgaccaaagcttttacatcacagatgacccggatgacaacgccgaccgcagcgaaacgtccagcatagcggacccgagctccccaaatccattcggatccagcaatccctttaaatccaaaagtaatgatcggccgggtcacaagcgttttcgaacgcaaatgagcaatcttcaactcaaggttctcaaggcttgctttagtgactaccgaactccaaccatgcaagaatgtgaaatgttagggaatgagattggtctgcccaaacgcgtagtccaggtgtggttccaaaatgcaagggcaaaggaaaagaaatttaaaattaacatagggaagcctttcatgatcaatcaaggcggaacggaaggcaccaaaccagagtgtaccctctgcggggtgaagtactctgcccgcttgtccatcagagatcacattttctccaaacagcacatttcaaaagtgagggagaccgttggcagtcagctcgatcgggagaaagattacttggctccgaccacggttcggcagctgatggcacagcaagaacttgatcgtataaagaaagcttcagacgtgctgggcttgacggtacagcagccaggcatgatggacagcagttctctccacggcatcagcctgccaacagcctaccccggactccccggccttcctccagtccttctccccggaatgaacggtccatcctccttgccgggatttccacaaaattcaaacatcagtgcaggcatgcttgggtttcctacttcagctacttcgtctcctgccctgtctctcagcagtgcccccaccaaacctttgctgcagactccaccacctccaccacctcctcctcctcctcctccttcatcctctctgtcaggacagcagaccgagcaacagaacaaagaatctgagaaaaagcaaactaagccaaacaaggtgaaaaaaatcaaagaggaggaattagaggccaccaaacccgaaaaacaccccaaaaaagaggaaaaaatctcatctgctctttcagtgttgggcaaagttgtaggtgaaacacatgtcgatcctattcagttgcaggcattacagaatgcaattgctggtgacccagcttcctttataggcggacagttcttgccatactttatccctgggtttgcttcttattttacacctcagctccctggaacagtgcaggggggatacttcccacctgtctgtggcatggagagcctctttccttatggccctacaatgccccagacactggcaggtctgtccccaggtgcactgttgcagcagtaccaacagtatcagcagaacctgcaggagtccctgcaaaagcagcaaaagcaacagcaagaacagcagcagaaaccagttcaggcaaagacatccaaagtagaaagtgaccagccgcaaaactccaacgatgcttcagaaacaaaggaagacaaaagtactgctacagaaagcacaaaagaagaaccccagttagaatccaaaagtgcagacttttcagacacttacgttgttccattcgtcaagtatgagtttatatgcagaaagtgccagatgatgtttactgatgaagacgccgcagtaaatcatcaaaagtccttctgttatttcggtcagcctttgattgacccacaagagacagtgcttcgtgtcccagtcagcaaatatcagtgtcttgcctgtgatgtggctatcagtgggaatgaagcacttagccaacacctccagtcaagcttgcacaaagagaaaacaatcaaacaagcaatgagaaatgccaaagagcatgttagattattacctcactcagtctgctcccctaatcctaacaccacatctacctcgcagtctgcagcttcttctaataacacctatcctcatctttcttgcttctccatgaagtcctggcctaatatccttttccaagcgtctgccaggagagctgcttctcccccttcttctcctccttccctttccttgccttcaacggttacctcaagtttgtgcagcacctcaggggttcaaacctcactacccacagaaagttgttcagatgagtctgacagtgagctgagccagaagctagaagacttagataattctttggaagtgaaggctaagcctgcttctggcctagatggtaatttcaatagcatccgaatggatatgttcagtgtgtaggagtgaagacaggatcccgtgcttaaaaaaataaaaaataaaaaaataaaaaaaaaataagactttaactgcagttccaaagcttctctaacccaaaaattacagtaccaaatgattgactcaggattgtttttcccatattgatatgctggcaatataggatggtatgtaatggacagaactgatgcagatggttgaatgcgcttgtactatatgctaaaatatggaaaaggaaaaaaaaatctcacaagttcttttggaacttgtttcaagccaaaaactctcaagaaagcaaattgcacctcagctggattgatttccaaatgctagcatgtactgtatgggaggatgatccagatgtttcaaagagaatttctcttagtttagttaggtgtaattcagtagctttaaattctcaggtcagaacataacatttctcatttgttaaaagcagcaagaagcctggtaaaactgtgacttttccccaaacgtcaatctttattagaaagcattttctaggtgtgtttagtgtacaaagagactttataacccttactggacaacacacagatccttgagctcacgctgcaggatagtacagttttaccgcagagggaatctggaacagtggaatcatgtgtctgccctgtgtattgcagtttgtattgccacaagctatatttataccagtgtcacccttttcttgtagaatatactaataatctgtgccaactctaccttctcacttttacctctgacgtcattctttttttctgaaagaggtaataattctagttttgatagactctgaggattatgtgaacaggacatttttcatttgtgaatttaatgctatactgtcaaggtacttgcttgtgtctgaactctagtgcacttatgattttgtagaccatgtgaaatttaataagataccttttttttcctttctttgtgtgtagtgcagcaacagtttggtctgcatttgttagaagtttaactcctaacaacccaaagacctatttaacaattggtgcataaatgaaagtagtactgtatacttgaaactgtttaagtacaagttgaacaaaaattatgaaaaggtatatttgcttctcgggaaagcaaagaagctgctttaaaaaataaaaaggggactaaaaatttgttttgtataaagaggttagccctgcgcacgtaggactgaattcagtgatatccctatacactgccatttagtggataggttattgtacttccattcatactctgggcacttgtgttgtattgttctgttacatactttttttaacctgttttgttttatcatatatgcattaaaagtattatctttatca

SEQ ID NO: 30723 - DNA, 2400 bp, Homo Sapiens
ctgtaggggaggatattttgattgaacacaggcttgacagaatcttcttttcttcttagaaatcctagaaaacagaaagcaacaggaagatgtcttattgggaactacccccatcaacttcaccatgagtcaaacaaggaagaaaacttcctcagaaggagaaactaagccccagacttcaactgtcaacaaatttctcaggggctccaatgctgaaagcagaaaagaggacaatgaccttaaaacaagtgattcccaacccagcgactggatacagaagacagccacctcagagactgctaagcctctcagttcagaaatggaatggagatccagtatggagaaaaatgagcatttcctgcagaagctgggcaaaaaggctgtcaacaagtgtctagatttgaataactgtggattaacaacagcggacatgaaagaaatgggagaagcatttgagatgattcctgaacttgaagagctaaatttgtcttggaacagtaaagtgggaggaaatttgcctctgatccttcagaagttccaaaaagggagcaagatacaaatgattgagcttgtggattgctccctcacgtcagaagatgggacatttctgggtcaactgctacctatgctgcaaagtctcgaagtacttgatctttccattaacagagacattgttggcagtctgaacagtattgctcagggattaaaaagcacctcaaatctgaaagtactgaagttacattcatgtggattatcacaaaagagtgtcaaaatattggatgctgcttttaggtatttgggtgagctgaggaaattagatctttcctgcaataaggatctaggtggaggttttgaagactcgccggctcagttggtcatgctaaagcatctacaagtcctagatcttcaccagtgctcactaacagcagatgacgtgatgtcactgacccaggtcattcctttactttcaaatcttcaagaattggatttatcagccaacaaaaagatgggcagttcttctgaaaacttactcagcaggctccgatttttaccagcattgaagtcattagttatcaacaactgtgctttggagagtgagacttttacagctcttgctgaagcctctgttcacctctctgctctggaagtattcaacctttcttggaacaagtgtgttggtggcaacttggagctgcttctggaaacactaaagctttccatgtctcttcaagtgctgaggctgagcagctgttccctggtgacagaggatgtggctctcctggcatcggtcatacagacgggtcatctggccaaactgcaaaagctggacctgagctacaatgacagcatctgtgatgcagggtggaccatgttctgccaaaacgtgcggttcctcaaagagctaatcgagctggatattagccttcgaccatcaaattttcgagattgtggacaatggtttagacacttgttatatgctgtgaccaagcttcctcagatcactgagataggaatgaaaagatggattctcccagcttcacaggaggaagaactagaatgctttgaccaagaaaaaaaaaagaagcattcactttgaccatggtgggtttcagtaaactgatttcccatgtcctactaagctacaaaccattctccaaaggaaaagaacatgaacgaattccagagtcatgaactgaatttcaacttctgggccatttaatgggacttatattacaagagctttgtaaatatatatatatattacatatatatatgtaatatacatatatacacatatatataatatacatatataatacacatatatatgtaaatatatatataatatctaatatgagcatgccattattctctgtctatgaaacaaaaatggcatttttcaatggatttgttttggatatataattagttcatttgctgtttagaagccttgccaaaagtgtttagattttggtactgcaactgctttcctcttgcccagaaatgttttgcctcttcttttcctacaagttaaatgttctaaatataaaggggtatgtgtgtgtgtgtgtaattctaatgtgaaaggcactagctgtctaatagtttcatgtatcattactattactatatgtatcttaatgtagtctatgtaggtttttatcagaaagtgtacctttctatggtttattattttatattctggtgccttttatctcagatataaaccatgaacagtaatgatagtcactgacatataaatcttagtaaaaagtgattaaaaatctaaaactcagtatgaaaaacatatcttgttagaataaattaaaaccttttattgtttaaaaaattgttaaaaaaaaaaaaaaaaaaaaaaaaaaaaaaaaaaaaaaaaaaaaa

SEQ ID NO: 30724 - DNA, 6786 bp, Homo Sapiens; identical to SEQ ID NO: 24902

SEQ ID NO: 30725 - DNA, 1182 bp, Homo Sapiens
gttccagaaaataggactgaccaagaagcagaaaagcaagatgaatgatgtgaagcttgctgtcttgggtggtgaaggaacaggcaaatctggtccctacatccttaaataactgcaaatacttggtagtgtctttgtgactattacacatagtaccttgaagccagactgagtttgacagagaaaataaacagatgtcaaacttcttgcatctcaaatataatgagaaatctgtttctgttacaaaagcccttacagtgaggtttcttactaagcgattcattggagaatatgcttctaattttgaatctatctataagaagcacttgtgtttggaaaggaaacaactaaatctagaaatatatgacccttgttctcaaacacagaaagcaaaattctccctcacaagtgagcttcactgggcagatgggtttgttattgtgtatgacatcagtgataggtcttcatttgcttttgcaaaagcgctgatctacagaatccgggagccacaaactagtcattgtaaaagagctgtggaatcagcagtgtttttggttggcaacaaacgagatctttgtcatgtgcgagaggttggctgggaagaagggcaaaagctggcactggaaaaccgatgccaattctgtgaactgtctgcagcagagcagtctctggaggtggaaatgatgtttatcagaattatcaaggacatcctgataaacttcaaactcaaagaaaagagacgtcccagtggatctaaatcaatggccaaattgatcaataatgtatttggaaagagaaggaaatctgtttagtagacaggtaatcctgggagatttcctatatcagagagtttcaaacattcacatgataattaaactaacctttgtatgcaatttttttttggtaaaaagaattctcttggagatatgaaatgattgagtatgaaccacagctgtgttttcaaatatgtagtttgcctttttggttgttgtaccctgctcactctccttcacacagaacctttcatttattgtacaacatcacactcaccctaacctactggcggacagcgatcccagtttgccttgccaaataaactctgtttatgtgaatttattaaacgaccatgccataaaaaaaaaaaaaaaaaaaaaaaaaaaaaaaaaaaaaaaaaaaaaaaaa

SEQ ID NO: 30726 - DNA, 2674 bp, Homo Sapiens
gctccgctcccccgagaatcgggcctcgccctgctgggcggctggacctgggcaaagcctgggcgcgctcccgcgcagcggcgccatgaagcgctcggggactctgcggctgctctcggacctgagcgccttcggcggcgcggcgcggctccgggagctggtggccggggactcagcggtccgagtccgtggcagtccggacggccgccacttgctgctcctgcgaccccctggggcggtagccccacagctgctagtcgcgtcgcgagggcccggcgcggagctagagcgggcctggccggccggccagccctccccgctggacgccttcttcctgccgtggccagcgcggccggcgctggtgctggtgtgggagagtggcctggccgaggtgtggggcgcgggcgtggggcctggctggcggccgctgcagagcaccgagctgtgtccgggcgggggagcccgcgttgtggcagtggcggcgctccgaggccgcctggtgtggtgcgaggagcggcaggcccgggccgagggcccgtcagggtcgccagcagccgctttcagccactgtgtgtgcgtccggactctggagcccagcggggaagctagcaccagcctgggccgcacacacgtcctgctgcaccactgccctgccttcgggctgctggcctcctgcagacaactcttcctggtgcccactgccaccacctggcctggcgtggcccacgttctactcatctggagcccaggcaagggcaaagtgatggtggctgccccacggcttggtctctcctacagtaagagtctgaatcctggacgaggggacacatgggacttccggaccctgctccgaggccttcctgggttgctgtcccccagggagccactggctgtacacacctgggccccaactccccagggcctgctgttgcttgacttcgggggcactgtgagcctattgcagtcccacggtggtacgcgggctgtgggcaccctgcaggaggcacctgtaggcccgtgggggtctgcagccctaggcacatttcagggcactctggcctgtgtgctgggctccacattggaactgctggacatgggcagtgggcagctgctggagaggaaggtcctaagtacagacagggtacatctgctagaaccgccagcccccggcatggaggatgaggaagagctggagacccgagggaatcttcgtctgctttcagccttgggtctgttttgtgtgggctgggaagccccacagggtgttgagttgccttcagccaaggatctggtgtttgaggaggcctgcgggtactaccagcggcggagcctgcggggtgcccagctcactccagaagaactgagacacagcagcacattccgggcacctcaggctctggcctccatcctccagggccacctgcccccatctgcactgctgaccatgttgaggaccgagcttcgggattaccgaggcttagaacagctgaaggcccagctggtggctggggatgatgaggaggctggttggactgagctggcggagcaggaagtggcacgcctgctgaggactgagttgataggagaccagctagcccagctcaacaccgttttccaagcccttcctacagcagcctggggtgccaccctcagggccctgcagctccagctagatgggaatggcaagctgaggtcccaagcaccccctgatgtgtggaagaaagtgttagggggaataaccgctggaaaggaaccccccaatggaatactgcccccctttgaactcctgtgccagtgtctgtgccagctggagcctcgatggctgccaccctttgtggagctggcacagcagcagggcgggccgggctggggggcagggggcccaggactgcccctgtatcgccgagctctggcagtgctaggtgaggaggggaccaggcctgaggctctggagctagagctgctcttgagcagtgggcggcctaaagctgtgctccaagctgtcgggcagctggtgcaaaaggaacaatgggatcgggctctggatgctggcctggccctcggcccctccagtcccctgcttcgaagtgaaatcttcaaactgctgctggccgagtttgcccagcaccgccggcttgatgctcacctccccctcctttgccgcctgtgcccaccagaactggctccagctgagctcctgcttctactgaggacatacctcccagatgaggtggggcccccaaccccattccctgagcctggagcagagccccctctcactgtgggcttgctcaaagccctgctggagcagactggggctcaaggatggctgtcgggcccagttctaagcccatatgaggacatcctatgggaccccagcactccacccccgactccacctcgggacctatgactacccttcaggcatcagaacactcagggcctggaggcttgcttgggactggaggcttgcttggacagttcctctgtgtcactgacacaggaaatcatttctaggacacagtgatcagggaagggtgcctgggacttggagggtcccatgtatggacctgtgtatgcaatactgttctgtcatctggagctatttttaagatgtgtgtgttaaatatatacatagtttaatataaaaaaaaaaaaaaaaaaaaaaaaaaaa

SEQ ID NO: 30727 - DNA, 2179 bp, Homo Sapiens
agacagtatggctgctgcatttcggccctcgaatcgagttctcctgcaggcgctgcagattttggtgtatcctggggtgggaggctccggctctgtcagctgccgctgccctctcggagctaaaagatacctacttacagataatgtggtgaaattaaaagaatttcaacaaaagaaagtggctgttgcatgtaatctttctggcactaaagaaacgtattttagaaacttgaaaaagaaactgacccagaacaagctcatcttgaagggggagttgataaccttactacatttgtgtgagtctcgggaccatgtggaactggctaaaaatgtcatttacaggtaccatgcagagaacaaaaatttcactttgggggagtataaatttggaccgctttttgtgaggttgtgttacgagttggatctcgaggaatctgcagtggagctcatgaaagaccagcatttacgaggtttcttctcagactccacatcattcaatattttgatggatatgttatttatcaaaggcaaatataaaagtgctttgcaagtattgatagagatgaaaaaccaagatgtgaagttcaccaaagatacctatgttcttgcttttgcaatttgctacaaactgaatagccctgagtctttcaaaatctgtactacattaagagaagaagctctactcaaaggagaaattctctccaggagagcatcctgtttcgctgtggcattagctctgaatcagaatgagatggcaaaagctgtgtccattttttctcaaatcatgaatccagaaagcatagcctgcattaatttaaatattataatccatatccagtcaaatatgttggaaaacctgataaagactctaaaaaatgctgcagaaggaaatttatcaaaatttgtgaaaagacatgtgttctcggaggaagtgctggccaaagtgagggaaaaagtgaaggatgtgcctgcccttgtggccaaatttgatgagatctatgggacactgcacatcactggccaggtcaccactgattctttggatgctgtgctctgccacacccccagggacaggaaatctcacacgttgctattaaacaagaggatggtcagccgtcgcaccttccagccactcagccagtccctgttggctgagtaaccctggtttcagtccacctatggatctgaggggcctgcttctagtgagttattacctttcctaagaagccaggtatcgcacttcagcagacagtgtgctgacacttggtcttctcctgaaattcccaaattcactgaatggtaccatgccgatctctgagaagttatgttgcaccactgtgaaggtctagatgcaagcttggctccctcagaaaggcgcttcccttttgcatggctgaggatccttgaaggaacctggtcagtctccggttcagcttccgacaccagagtggaacccagtaagcaccatcaggaatgaatttcactacaagtgtggataactctgattttcaaaggagtagttacttgcaaattacatccttgctgaattcaggaggttaaggaaacgatccatgcaagagaggcccaatctcaactgtagactgtgtcccagtaagagagtcacagcttcaggtgtttgctgaatccaggtctgagatcacaatcccacctgaggacaggatccgcatatgagagtcgcacattggtataattgatttgtggtagagctgagattagaatccagattcctagtctagtatccttcccactgtaccacattatctcttttcagaggggaaaaaggagcagctcttaagaaacagaatactaagggcccccattactgtgtggccctgggcatcctcagtttcctcatttggtaaatggggataatggtaccgacctcttaggcttggtgtgaggatgaaatgagatagggaatataaagcaagcagatagtggctggcacatagtacatgcaatatgtttgaaactagttaaggaattataaaaacaaatgagttcttccttctgctcaaaaatattgaatttcttgtccttgtgctctgtgaaacattgaacagccccatttagagaaacaaattctctgccctcatagaatcctaattgtttctgtatgtgtctggtgttttgcacatgcaaaaaaaaaaaaaaaaaa

SEQ ID NO: 30728 - DNA, 3828 bp, Homo Sapiens
aagacaacgtcactagcagtttctggagctacttgccaaggctgagtgtgagctgagcctgccccaccaccaagatgatcctgagcttgctgttcagccttgggggccccctgggctgggggctgctgggggcatgggcccaggcttccagtactagcctctctgatctgcagagctccaggacacctggggtctggaaggcagaggctgaggacaccagcaaggaccccgttggacgtaactggtgcccctacccaatgtccaagctggtcaccttactagctctttgcaaaacagagaaattcctcatccactcgcagcagccgtgtccgcagggagctccagactgccagaaagtcaaagtcatgtaccgcatggcccacaagccagtgtaccaggtcaagcagaaggtgctgacctctttggcctggaggtgctgccctggctacacgggccccaactgcgagcaccacgattccatggcaatccctgagcctgcagatcctggtgacagccaccaggaacctcaggatggaccagtcagcttcaaacctggccaccttgctgcagtgatcaatgaggttgaggtgcaacaggaacagcaggaacatctgctgggagatctccagaatgatgtgcaccgggtggcagacagcctgccaggcctgtggaaagccctgcctggtaacctcacagctgcagtgatggaagcaaatcaaacagggcacgagttccctgatagatccttggagcaggtgctgctaccccacgtggacaccttcctacaagtgcatttcagccccatctggaggagctttaaccaaagcctgcacagccttacccaggccataagaaacctgtctcttgacgtggaggccaaccgccaggccatctccagagtccaggacagtgccgtggccagggctgacttccaggagcttggtgccaaatttgaggccaaggtccaggagaacactcagagagtgggtcagctgcgacaggacgtggaggaccgcctgcacgcccagcactttaccctgcaccgctcgatctcagagctccaagccgatgtggacaccaaattgaagaggctgcacaaggctcaggaggccccagggaccaatggcagtctggtgttggcaacgcctggggctggggcaaggcctgagccggacagcctgcaggccaggctgggccagctgcagaggaacctctcagagctgcacatgaccacggcccgcagggaggaggagttgcagtacaccctggaggacatgagggccaccctgacccggcacgtggatgagatcaaggaactgtactccgaatcggacgagactttcgatcagattagcaaggtggagcggcaggtggaggagctgcaggtgaaccacacggcgctccgtgagctgcgcgtgatcctgatggagaagtctctgatcatggaggagaacaaggaggaggtggagcggcagctcctggagctcaacctcacgctgcagcacctgcagggtggccatgccgacctcatcaagtacgtgaaggactgcaattgccagaagctctatttagacctggacgtcatccgggagggccagagggacgccacgcgtgccctggaggagacccaggtgagcctggacgagcggcggcagctggacggctcctccctgcaggccctgcagaacgccgtggacgccgtgtcgctggccgtggacgcgcacaaagcggagggcgagcgggcgcgggcggccacgtcgcggctccggagccaagtgcaggcgctggatgacgaggtgggcgcgctgaaggcggccgcggccgaggcccgccacgaggtgcgccagctgcacagcgccttcgccgccctgctggaggacgcgctgcggcacgaggcggtgctggccgcgctcttcggggaggaggtgctggaggagatgtctgagcagacgccgggaccgctgcccctgagctacgagcagatccgcgtggccctgcaggacgccgctagcgggctgcaggagcaggcgctcggctgggacgagctggccgcccgagtgacggccctggagcaggcctcggagcccccgcggccggcagagcacctggagcccagccacgacgcgggccgcgaggaggccgccaccaccgccctggccgggctggcgcgggagctccagagcctgagcaacgacgtcaagaatgtcgggcggtgctgcgaggccgaggccggggccggggccgcctccctcaacgcctcccttgacggcctccacaacgcactcttcgccactcagcgcagcttggagcagcaccagcggctcttccacagcctctttgggaacttccaagggctcatggaagccaacgtcagcctggacctggggaagctgcagaccatgctgagcaggaaagggaagaagcagcagaaagacctggaagctccccggaagagggacaagaaggaagcggagcctttggtggacatacgggtcacagggcctgtgccaggtgccttgggcgcggcgctctgggaggcaggatcccctgtggccttctatgccagcttttcagaagggacggctgccctgcagacagtgaagttcaacaccacatacatcaacattggcagcagctacttccctgaacatggctacttccgagcccctgagcgtggtgtctacctgtttgcagtgagcgttgaatttggcccagggccaggcaccgggcagctggtgtttggaggtcaccatcggactccagtctgtaccactgggcaggggagtggaagcacagcaacggtctttgccatggctgagctgcagaagggtgagcgagtatggtttgagttaacccagggatcaataacaaagagaagcctgtcgggcactgcatttgggggcttcctgatgtttaagacctgaaccccagccccaatctgatcagacatcatggactcgcccagctctcctcggcctggggctctggccaaggatgggctggaggtcattcagttggtctgtctcttccctggaaaccttctgcaaagatggtgtggtgtacgtggcttccctgtaaccacatggggcttggccatttctccatgatgagaaggactggaatgcttctccgggcaggacatggtcctaggaagcctgaaccttggcttggcatgccttctcagacagcacggcctgggctccaactcttcaccacaccctgtattctacaacttctttggtgttttgctcctcctgtggttggaaacttctgtacaacactttaaacttttctcttgcttcctcttctcttctcccttatcgtatgatagaaagacattcttccccaggaggaatgtttaaaatggaggcaacattttggccaacattggaaagcactagagggcaatgggattaaaccaacctgcttggtctctattagtcagtaatgaagacgacagcctggccaaccaagggaaaggaaattagtatctttagtttcagtcattccttgtaggatatggtttagctgtgcccccacctaaaatatcatcttgaattgtaatccctataatccccacatcaagggagagatcaggtggaggtaattggatcttgggggcggttcccccatgctgttcttgtgatagttctcacgagatctgatgattttataagtttgatagttcctcctgtgttcattctccttcctgccaccttgtgaagatgccttggttcctcttcactgtctgccatgattgtaagtttcctgaggcctccccagccatgtggaacagtgagtcaattaaacctctttcctttataaatt

SEQ ID NO: 30729 - DNA, 5067 bp, Homo Sapiens
aggcagttccggcgaggggggagcctcagcaggattgctgtgtgaaaaccgagctgctgggagaagagacacctatggctgccgatgaaggctcagcagagaaacaggcaggagaggcccacatggctgcggacggtgagaccaatgggtcttgtgaaaacagcgatgccagcagtcatgcaaatgctgcaaagcacactcaggacagcgcaagggtcaacccccaggatggcaccaacacactaactcggatagcggaaaatggggtttcagaaagagactcagaagcggcgaagcaaaaccacgtcactgccgacgactttgtgcagacttctgtcatcggcagcaacggatacatcttaaataagccggccctacaggcacagcccttgaggactaccagcactctggcctcttcgctgcctggccatgctgcaaaaacccttcctggaggggctggcaaaggcaggactccaagcgcttttccccagacgccagccgccccaccagccacccttggggaggggagtgctgacacagaggacaggaagctcccggcccctggcgccgacgtcaaggtccacagggcacgcaagaccatgccgaagtccgtcgtgggcctgcatgcagccagtaaagatcccagagaagttcgagaagctagagatcataaggaaccaaaagaggagatcaacaaaaacatttctgactttggacgacagcagcttttaccccccttcccatcccttcatcagtcgctacctcagaaccagtgctacatggccaccacaaaatcacagacagcttgcttgccttttgttttagcagctgcagtatctcggaagaaaaaacgaagaatgggaacctatagcctggttcctaagaaaaagaccaaagtattaaaacagaggacggtgattgagatgtttaagagcataactcattccactgtgggttccaagggggagaaggacctgggcgccagcagcctgcacgtgaatggggagagcctggagatggactcggatgaggacgactcagaggagctcgaggaggacgacggccatggtgcagagcaggcggccgcgttccccacagaggacagcaggacttccaaggagagcatgtcggaggctgatcgcgcccagaagatggacggggagtccgaggaggagcaggagtccgtggacaccggggaggaggaggaaggcggtgacgagtctgacctgagttcggaatccagcattaagaagaaatttctcaagaggaaaggaaagaccgacagtccctggatcaagccagccaggaaaaggaggcggagaagtagaaagaagcccagcggtgccctcggttctgagtcgtataagtcatctgcaggaagcgctgagcagacggcaccaggagacagcacagggtacatggaagtttctctggactccctggatctccgagtcaaaggaattctgtcttcacaagcagaagggttggccaacggtccagatgtgctggagacagacggcctccaggaagtgcctctctgcagctgccggatggaaacaccgaagagtcgagagatcaccacactggccaacaaccagtgcatggctacagagagcgtggaccatgaattgggccggtgcacaaacagcgtggtcaagtatgagctgatgcgcccctccaacaaggccccgctcctcgtgctgtgtgaagaccaccggggccgcatggtgaagcaccagtgctgtcctggctgtggctacttctgcacagcgggtaattttatggagtgtcagcccgagagcagcatctctcaccgtttccacaaagactgtgcctctcgagtcaataacgccagctattgtccccactgtggggaggagagctccaaggccaaagaggtgacgatagctaaagcagacaccacctcgaccgtgacaccagtccccgggcaggagaagggctcggccctggagggcagggccgacaccacaacgggcagtgctgccgggccaccactctcggaggacgacaagctgcagggtgcagcctcccacgtgcccgagggctttgatccaacgggacctgctgggcttgggaggccaactcccggcctttcccagggaccagggaaggaaaccttggagagcgctctcatcgccctcgactcggaaaaacccaagaagcttcgcttccacccaaagcagctgtacttctccgccaggcaaggggagcttcagaaggtgctcctcatgctggtggacggaattgaccccaacttcaaaatggagcaccagaataagcgctctccactgcacgccgcggcagaggctggacacgtggacatctgccacatgctggttcaggcgggcgctaatattgacacctgctcagaagaccagaggaccccgttgatggaagcagccgaaaacaaccatctggaagcagtgaagtacctcatcaaggctggggccctggtggatcccaaggacgcagagggctctacgtgtttgcacctggctgccaagaaaggccactacgaagtggtccagtacctgctttcaaatggacagatggacgtcaactgtcaggatgacggaggctggacacccatgatctgggccacagagtacaagcacgtggacctcgtgaagctgctgctgtccaagggctctgacatcaacatccgagacaacgaggagaacatttgcctgcactgggcggcgttctccggctgcgtggacatagccgagatcctgctggctgccaagtgcgacctccacgccgtgaacatccacggagactcgccactgcacattgccgcccgggagaaccgctacgactgtgtcgtcctctttctttctcgggattcagatgtcaccttaaagaacaaggaaggagagacgcccctgcagtgtgcgagcctcaactctcaggtgtggagcgctctgcagatgagcaaggctctgcaggactcggcccccgacaggcccagccccgtggagaggatagtgagcagggacatcgctcgaggctacgagcgcatccccatcccctgtgtcaacgccgtggacagcgagccatgccccagcaactacaagtacgtctctcagaactgcgtgacgtcccccatgaacatcgacagaaatatcactcatctgcagtactgcgtgtgcatcgacgactgctcctccagcaactgcatgtgcggccagctcagcatgcgctgctggtacgacaaggatggccggctcctgccagagttcaacatggcggagcctcccttgatcttcgaatgcaaccacgcgtgctcctgctggaggaactgccgaaatcgcgtcgtacagaatggtctcagggcaaggctgcagctctaccggacgcgggacatgggctggggcgtgcggtccctgcaggacatcccaccaggcacctttgtctgcgagtatgttggggagctgatttcagactcagaagccgacgttcgagaggaagattcttacctctttgatctcgacaataaggacggggaggtttactgcatcgacgcgcggttctacgggaacgtcagccggttcatcaaccaccactgcgagcccaacctggtgcccgtgcgcgtgttcatggcccaccaggacctgcggttcccccggatcgccttcttcagcacccgcctgatcgaggccggcgagcagctcgggtttgactatggagagcgcttctgggacatcaaaggcaagctcttcagctgccgctgcggctcccccaagtgccggcactcgagcgcggccctggcccagcgtcaggccagcgcggcccaggaggcccaggaggacggcttgcccgacaccagctccgcggctgccgccgaccccctatgagacgccgccggccagcggggcgctcgggagccagggaccgccgcgtcgccgattagaggacgaggaggagagattccgcacgcaaccgaaagggtccttcggggctgcgccgccggcttcctggaggggtcggaggtgaggctgcagcccctgcgggcgggtgtggatgcctcccagccaccttcccagacctgcggcctcaccgcgggcccagtgcccaggctggagcgcacactttggtccgcgcgccagagacgctgggagtccgcactggcatcaccttctgagtttctgatgctgatttgtcgttgcgaagtttctcgtttcttcctctgacctccgaggtccccgctgcaccacggggttgctctgttctcctgtccggcccagactcttctgtgtggcgccgccgaagccaccgttagcgcgagctgctccgttcgccctgcccacggcctgcgtggctggggccgagtcccaggggccgcacggagggcacagtctcctgtcaggctcggagaggtcaggagaccgaccccaccactaactttggagaaaatgtgggtttgctttttaaaggaatcctatatctagtcctatatatcaaacctctaactgacgtttcttttcgaggaagtggcttggtgggtgcagcccccgccggttccgttgacgctggcaccttctgttgattttttaagccacatgctatgatgaataaactgatttattttctaccattactgaacattaggacaaacacaaaataaaaaacaaaacacagacaacggtgctgattctggtgtggtttctactcaccacgtgaaataaactatcaactgtataaagagaacaaagtgattttagaataaaatgcaggaaaaacttttttaaagatgttagtcttgtagcgtgaataaatttgccatcaccttttgtgtggtggcctggcaggtcatatacttttttttggcatatacctttttaaagactgtaattagtgcagtaacagtggggttttttttgtgcaactcttctaaaaacattcataatgcagtcatgtttatttttttctgttaaaatgtttttgacagttttaagagcagtcttttggctctgaccatttcttgttctgtttccaatgaaatcaataaaaaaaaagaagtactttaaaaaaaaaaaaaaaaaa

SEQ ID NO: 30730 - DNA, 2196 bp, Homo Sapiens
cttgatcccagggcgcccctgacctttgagccggctcgggttccggctctggcgcgtgcacactcgcctcgccgttcgggaccagccagatcgcggcggcctcgcgggcggtttggtcggtgaggtcttggccgcgcgcggcaatgctgaggctgctggcgtccgggtgcgcccggggcccggggcccggcgtgggcgcgcgtcctgccgcagggctctttcatccggggcgccgccagagccgccaggcttccgacgcgccccggaaccagccccccagccccgagttcgtggcccggccggtgggcgtctgctccatgatgcgcctgccggtgcagacctcccccgaggggctggacgctgccttcatcggggtgcccctggatactgggacctccaaccggcctggggcgagattcggacctcgccgcatccgggaagaatcagtgatgcttgggacagtcaatcctagcacgggggccctccccttccagtccctcatggttgcagacctaggcgatgtgaatgtcaatctttacaaccttcaggacagctgccggcgaattcaagaggcctatgagaaaattgtagcagctggctgtattcctctgaccttgggtggagatcacacaatcacatatcccatattgcaagcgatggcaaaaaagcatggcccagtggggctgctgcacgtggatgcgcacacggacacgaccgacaaggccctaggagagaagctctaccacggggcgcccttccgccggtgtgtggatgagggtctcctggactgtaagcgtgtggtgcagattggcatccggggctcttccacgaccttggatccctacagatacaaccggagccagggcttccgggtagtcctggctgaagactgctggatgaagtcgctggttcctctgatgggggaagtcaggcagcagatgggaggcaaacccatttatatcagctttgatattgacgctctggatcctgcctatgcgccagggacagggacacctgaaattgctggtctcactcctagtcaggctctggagatcatcaggggttgtcaaggcctgaacgtgatgggctgtgatcttgtcgaagtttcaccaccgtatgatctttctgggaacacagccctgctggcggctaacctgctgtttgagatgctatgtgctctccccaaagtgacaaccgtctgagtcttgtgctcttcaagacaaaacagattgcgtcgctgacaagttctcaagaagaacttatgagtaagcagtctgagaactaaagagtttatgccaagaaaactttctgctgaaagtgtcattgctggctgtgaagtcgggataatcagtagaattctcacccaaacagcaacatttctaaggaacttggattaattgggggaaaaaaaaaggagtacttgtactgctttgattttttttcctttgatgaaagatggaggataaaggggaagtgaggagaatttctttcaagattatctaaacattagaaacatgacatttaaaaaaactatgaaataatactgtataagcattccatatttctatatcttccttttaaacatttttttttttgagatggagttttgcttgtcacccaggctggagtgcaatggcatgatctcggttcattgcaacctccgcctcccgagttcaatcgattctcctgcctcagcctcctgagtacctgggattacgggtgcctgccaccacgcctggctaatttttgtatttttagtccagacagggtttcaccacattggccaggctggtcttgaactcctgacctaaggtgatccgcccgcctcagcctccttaaagtgctgggattacaggcatgagccaccgcacccagccgctttttaaaattttgatgatctgcttcctagagtattgagtatcttcctttaaactacagctcctcctcggacgctgcagtgagctgagatcgcaccactgcactccagcctgggtgccagagcaagactccatctcaaaaaaaaaaaaaaaaaatacagcttctcctatgaggtgcttagggctgcatcttggttttaggaccactgtgaacgtaagtaaaaagtataaagtaacacggagagcctaatgaagaaacttcttgctcagaggcctagaagggtacacaaaatgtcttctaaactagaaaacctaaggc

SEQ ID NO: 30731 - DNA, 2255 bp, Homo Sapiens
agctggacggccccgggaggccgcagaccgccgggctccccgaggacacctcgcaccggaggaggagaggaggcagcgcccggccaggctgggagcacctacggccgcgcgggggcgggagccaggtggcctcggcgcgcccgcctcgcccgggcaccgagcaggaagtggctgcggcgcggcctcctcgcggtgcaacagggcggggaggcggccgcagcccgagccggagcccgagcgccgggagcgagacctcatggcagcggtggcgcccgcgggccccggggactccgcctcggccgccctggacgagctgtcactgaatttcacgtacggggcaccaggcgccggcaacggctccctctcgggcgactggtaccgcaggaaccagattcacctttttggagttttgctggctattttaggaaacttggtgatcagtatttctctaaatattcagaaatattctcaccttcagctggcacaacaagagcacccaaggccatacttcaagagtgtgctgtggtggggtggtgtcctgctgatggccgtgggagagacggggaactttgcagcctatggatttgctcccattactctgatcgctccgttaggctgtgtgtctgttacaggtagtgccattatttctgttacatttctgaaagacaatttgagagcctcagacttactcggtacgacactggcatttgcaggaacatatttactggtgaactttgctccaaatataactcaggcaatctcagcaagaacagtacagtattaccttgtcggatggcagttcctgatctatgtgattttagaaatattaattttctgcattctcctgtatttctataaaagaaaaggaatgaagcatatggtgattctgctaaccctggtggcaattctagcctcattgactgttatttcagtaaaggccgtctcaggcatgatcactttttctgtgatggataaaatgcaactaacttaccccattttctatatcatgtttatcatcatgatagcatcttgtgttttccaagtcaagttcctgaatcaagccacgaaactctacaatacgacaacagtggtgccagttaatcatattttctttacaatcagtgccatcattgcaggtatcatattttatcaggaattccttggtgctccttttctcactgtatttatatatctttttgggtgttttctgtcattccttggtgtatttttggtcacaagaaatcgagaaaaggaacatctgcaacagtcttatattgattttggaaatattcctgacacaaccccagagagaaaggcttggagggaaacaaatgttggacaaaatacaaccagattcacatagcttatcctatggaactttgcctgatggaagtgactcaacaaagagccaaagtggagagaagaaagaggtctaaatgctgagaaggatggctgttggcctgttattcgataccacctttttaaaaaattgcacatgttcaatttgtgtcagcagctcttttataagctaacatgtgctagcattcatttcagtcctttcccccacctcagcgtctatggacaatcggggacttcctaagctctgacagtctaatatttccatggaatgtgatttggagtgttccccacaccctggacctctccctagtgattatctagccagctacaccttactcagagcccggctgctctagcaggaatgttgcacagaaacatacatttgcggtttggccacaggtcgcataggtggcttctcccacgggtagtgtcagttgcttcactttaaaaagtcacttcagccccacaacctcactcccaaaagaaaggtttgagagcgctcattttttttctaagacaccttttataagcctccctataaaaatctcacctttcaagtactaagttagaattgcaagtcatcttttctgaaaactaatgctatcaaagtcctcctttgaaaattaagggtctctttaaaattagaatttataaatggcattcagtgatagtgtacaccaaaattaaaagaccttgactggtgggctttttacgtgtaaggaagaggaagtttaagaagtaggactctgcttgtttcagtagcccatgtactaaaataggaacaatgcagagattagcacagcccctgcacaaggctgacacataaattcatgaagcgttagagacaaaaagtaggactaatgtttgtttattttttaataaaaatctagaatggt

SEQ ID NO: 30732 - DNA, 1977 bp, Homo Sapiens
agtttcctcttggcctgaacttggctgacctccgcagcttccgcccgactctggctaaagtcttggaggctactgccttgaagatgacctctagggaccagcccagacccaagggcccccccgaaaagcacttcgccttgtcctgggatctcgaactctgagagctctccgacgctgaattatcagggcattctaaatcggctcaagcagttccccaggttttctcctcattttgctgcggagttggagagcatttactactcgctgcacaagatccagcaggatgtggcagaacatcacaagcagataggaaacgtcttacagattgtggagagctgcagccaactccagggtttccagtctgaggaggtctcacctgctgaaccagccagccctgggacgccccagcaggtgaaggacaagaccctgcaggagtcgagctttgaggacatcatggccaccaggtcctccgactggctccggcggcctttgggggaggacaatcagccggagacccagctgttctgggacaaggagccttggttttggcacgacactctgaccgagcaactctggcggatttttgccggcgtccacgatgagaaggcaaagcccagagacagacagcaggcaccaggcctggggcaggaaagcaaggcaccaggatcctgtgacccaggaacagacccatgtcctgaagatgcctccacccccaggccacctgaggcctcctccagtccccctgagggttcccaagacaggaacacaagttggggtgtggtccaggagcctcctggaagagcctctcggtttctacagtccatatcctgggaccctgaggactttgaagatgcatggaagaggccagatgccttgcccgggcagtcaaagagactcgccgtcccgtgcaaactggaaaagatgcggatcttggcacacggggagctcgtgctcgccacggccatcagcagcttcacgcggcacgtgttcacctgtggcagaagaggcatcaaggtgtggagcctgactggacaggtggctgaggacaggttccctgagagccacctgcctatacagacccctggggccttcctgcgcacctgcctgctgtcctcaaacagcaggagcctgctcaccggtggctacaacctggccagcgtgagcgtgtgggacctggcggcgccctccctgcatgtgaaggagcagttgccctgtgcaggtctcaactgccaggccctggatgccaacctggatgccaacctggccttcgccagcttcaccagtggtgtggtcaggatctgggacctgcgggatcagagtgtggtcagggacctcaagggttatcctgatggagtcaagagtatcgtggtcaagggctacaacatctggactgggggtccggatgcctgtctgcggtgctgggaccagaggaccatcatgaaacctctggagtaccaattcaagtctcagataatgagcctgtcccacagcccccaggaggactgggtgctgctgggcatggccaatggccagcagtggctgcaaagcaccagcgggagccagcggcacatggtggggcaaaaagacagcgtcatcctgagcgtcaagttctccccctttggccagtggtgggcaagcgttggaatggacgacttccttggcgtctacagcatgccggcggggacaaaagtgttcgaggtgcctgagatgtctccagtcacgtgctgtgacgtctcttccaacaaccgcctcgttgtcacaggctccggggagcacgcctccgtgtaccagatcacctactgaggggcctcgctgctgtcatcccactccggctcctcttttcatccccccccttccccccccccaacaagggggacatggtggagggaagcgggaaggctcttctgtggcatcgcacgatctagtctgtggtgtagactggtcgccatcacgtgtaataaagcacccgggaaaggc

SEQ ID NO: 30733 - DNA, 6528 bp, Homo Sapiens
cggccgccaggggtccccgctcggcgtccccgcgagacagtcgagccccggccggctgcgcggcgcgctgggtgcatgagggggctgctccggagcgacggcggctgcagctggagccaggcgctcgcccgtccgccggttggctcgccgggacctcgcgcaccggcggcagagtcccttgcgtggattggcaagcgacgccccacctgccccgagctcaccattttctttcgcgctggctgcagctgacccggcgaagggagccgaccgggccctgggctggaggtaaaaccccacggaaagaacatgaggttcccttggaaatcattcaagaggaagatggaaggggctgtttagaagagcttaaaagctacaggctgtaagactggggcctgagtgctggcagtggaaaacactgttgggctgtgatctctccctgaaaagttccaggtgccttttcgcttcctgcaaaagaaaggaagcgaaagagaagaccatgtccatagccctgaagcaggtattcaacaaggacaagaccttccgacccaagaggaaatttgaacctggcacacagaggtttgagctgcacaaacgggctcaggcatccctcaactcgggtgtggacctgaaggcggctgtgcagttgcccagtggggaggaccagaatgactgggtggcagtacatgtggtggacttcttcaatcggatcaacctcatctatggcaccatctgtgagttctgcaccgagcggacctgtcctgtgatgtcagggggccccaaatatgagtatcggtggcaggatgatctcaagtataagaagccaacagcgctgccagctccccagtacatgaaccttcttatggattggattgaggttcagatcaacaacgaggaaatatttccaacatgcgtgggtgttcccttcccaaagaacttccttcagatctgcaagaagatcctgtgccgccttttccgggtctttgtccacgtctatatccaccacttcgaccgggtcattgtgatgggtgcagaggcccatgtcaacacctgctacaaacacttctattactttgtcacagagatgaacctcatagaccgcaaggagctagagcctttgaaagaaatgacgagcaggatgtgtcactaatgctccacctcaccctttggaagaaaggaaagctgtttcctcctggtgccctgagcgggcaggaggtggaccaccctggctgaaatgacacacctactcccaggaacagcagaggtggaggcaagcagtgactcctgagagacattccccactcactttgtgtgctcttaaccttctgagtgctgctagcccagacctgtggacgaggcagaccacaacgtgaaagaaggaccagccccttgaccgttctggctggggaattgtccacgaggaagcctctgcacttccacacatggcacagttctgcctgtgacctgccgcctaagctttactggaattcaggttttgagactgagatgcgtgttcgtatttttccacttatctgtcttgtcagctggccgacttctctgtgattggttttttaagtgccgggtgaattttggacctctggatgtgcagcaagtttttatgcaataagccttcctttcaggtctctaaaagctcctgctctgatctgtggtttaacactgtgcagggctgtggagctctgagacacctgaacccctacccatcccctgcacctccctactctccctgccgaggcgtccatagcatttccctaataaatagttttatcagggacactccatggggtggcttgtctctgccccaaacagggtcttcacgttctaactgcagggaagagactggttactagcgtaaagctgacaagttaccagttcacctgatcagaatgtattttttataaccaccatcattccttgtctcttcagtggaagatattctttcctgtttcccagaagagagaaataaaagtcctaaataactaagaatgatcagcgggagcgttgggcatgattactgcagtgtttgttctttattaaagacagggagtcgtggctgtctctacataatactaacatttcagtgaaaaaagtacaattggttatttggtacgtgtagatttaacacccagacggctgacttgtaaccctccccactagccttctgagcatttaaacccagccgtcattctctccccactccacgctccccactcctctgccacgttatgttacggcacaaaattaatttctgcccctgtgattgggccacggttgccaaggtaacagtggagctggagctaacttccttctttcatcctttccaatttttctattccagaagacagtcagaataatgcattctgtactacatcctgccttttgaaacctaaatgagttttcgttgatgaaatgttgccttctctgattcattcacaaaactgtggtggttctgaccacctgtgacgaggggggtcataatacttccagtgatccttttaatttagcaaaatatttgtcggtggagggaagtagataagaatgtattagtgtattttaaagtaataatgattaaagaataactaaatgactctgattttgttttatcaatcataatgtgttaaagccctctgtggctgccacaaaagactagaatcatgaaatctttgtccaagctaagaaagggctgtctctgtgggtacagtggcattctctgttgacctaaccaagcagcctgaaccttgctttgtgtctcgtaaaggtcatctcacggaatccaattgctgctacctcaccatgttgctgtgccctggtcaacaataaacatacttttgtcccccttcctaagtaactttgagaggacaagataggcaaagttttttccctacatctcttttggccaaaagaatatctgaccatcacagagatccagagaacagaaacaagagcccctaagtcccagcctctgcaatacacagttaccagatgggaatgcagcacagtggcacagagaggtaactacggagcccatgccctggaggaactctgtagctgtgcatcatggaacgccacaggatttttacattaaaaagttgaatatgttcctgcatttcagcagtgcataatcgagcaggaggctggaatctggagacctttgttattcattctttttaaggttattttttattaactgtgcatatgaaatttccactcaatttaaaaatccaaatctttttaagcttcttggaagaatttcctcctgcttatattgttaattgcactaatgaactcttctagggtaaattctggcaaactaccctttttttttttttaatcacagaatattcctgttcccacagaactttggcacattctgaagaaaatctctgcagtcaatttttatctcctctgcttgactgcatctaactgttcatctctgttataaatggagcttcagccctctgggtcagagactgacaaccctccttcttcttcctaacctgtcctactctccttctttttctgctttcattttaattttgggaaattttaaagtaaaagtttcaaagttgaaagattatagtgagtacccttatgtcctttagtgcatcagttgttaatgttttgccttgttttcttttcttccttttttttttttaagagaaggggtctctccctattttacccaagctggccttgaaccccttgcctcaagtgagcttcaaccttagcctcctgagtagccaggactatggcatgtaccaccgcacctgcctcacattttctttctcactgtaaatacacattcttattcttgaaccttctgaaaataagttgcagacatcatgaaaatgtaaaatacttcatcatattctttcttttaataagagcattgtcctataaatctgcaatattttcacgcccatgaaactgaacactgatactgcataaatctaatatatgatccatattcaaaattctccagttgtccccaaaatatcctttatagctgtttatttttaaatccaggatccaatcaagaattatacgttatatgtagttgtcattctcttttgtttcctttaattgattagagttgcccttttgtgtgtgtctgagtggtgggtggtggggtggtgtttgtgtatgatgtgcagtgtgtgtgtgtgtggtgtgtctttcatgacactgacattattaaagagttcaggcaagtttgtggaatgtcccacaatctagacttttttactgattgtttcctcattacgagatacaggttacattttttttcccaagactgctacatgtgtgatgttgtttccttactactgcctcacctcaggaagcacataatgtctacttgtctcttttctgatattaggactgatcaggtgttgtctgcctgatccaatcattatcaagttccataattcattattaagctctgaaattcaggacacatacatttatagagtgtgaggctgtgcatacgtacattcatcccttaatgttctcaaggaggcccaggatccccaaaatattataagcattgcagtcagatgatatagcactagcaaagcattcatccctttccatataacaggagggaggggaagaaggaagtttccatgtgcaggcaatacgtgagagcatgggcaagtgaggatttgtatgctccctgtagccagaggtgaaatattcaacgcttttattttttctcccgtcttcaatgacctcccatttggacccatagtttatttatagagagcacacactccctaattgtcagatggtttttttgggaaaactcttagatagtacagtgagttgtgaccctccaaaggatcacaagtacataaacagatacaaagtatttatgtggtattaaaatttcatggtgatggtgcaagggagagatgattaggaagaaaatgtcttaaacggctgtaattgagaaatactgatctagagtcatttcctgcttcttaaattgttcgttttctcttccctgggtattttctcatttccaaagacccagagtctcagagccaggttaagtggaagaaactttgagaggtttcttaatcaattccttctatctctcaaaccatgccagtaacttccttggtgaaaaaatctatactcctctcacagttcttcgggcatggaaattctatagcattctttggtataaccaacccactgaaccctccacaacatcttgaattccattcaactcgagctgaagtattctttttgagtttcagtatatcttttctagtgtcccacttttagaaaggtccaaagatgatatataataagtgaaaatacaattaatcagagctttatttgcatatccattaaatatctgaaggctattaccagttgtgcttcagcctcctttcccttgcaattctcccagggtggcatcctctacggagtcttgttgctccattgttgaccactgatgtaactcaacgtgaaaccttcccaaagctctccacatcactctctgttatggctgtgaccagcagtgaacatgaaaagaacttatttcatgccttctccaaactatattgtttctttgctaagtccagacctgctttttctacatttataggttttctattttaatcgccatgcaaaattctttatcatactcaatcattttggtttatcttcctgacttcttacctttaacatccctgttaaagattacactgttgttgtttcaaaaaaaaaaaaaaaaaaaccttaattggcaaaacattaagggacttgaatagaattacacttatctttttgtgctgatttatgtcaatccatcattctggttattgatggaagcaaattgcttcctatgttctctaaaccttatgtcccttccatactccatgagtaccacactgggagaaaacaaaagcaaaaagattgtgggaaaagtatagccattatctttgaggaaatgtgtaccaaggcacaatcattaaaaggagttggaggcatcatttggttgacactgttgtcattcttgttctgatcattttggaccttgaagaaattggtgattctctcctagaattagacaaacaaagtgtgtttggaaataatgattgttttcctgccttaaaaaatatattaacagaaagcttttataacaggctgtttccctctggacaggtattaattctgagtaagaattttcagtgactacataaggatttgtgtaacttatgaaggaagagtccatttctaatcaaataattcacctgttttactagcttatagtgatctgatttcagaattttcctgtatcttttttacatacatcagaaaaagaaatgtttactatatttttggttccatttatgattgtattaagcatttgactataaggaaaactaacaattaaatcaattagaaaagcaacataaaattaaatgatatttaggaaatcagttatatgtgagcttgggtattcaaatgtcacaaataaaaagcatataaccattaaaa

SEQ ID NO: 30734 - DNA, 2070 bp, Homo Sapiens
agtagcgaccatttccattggcgttagggagtccttggagcgctgtgctgggaccgtggtggtgactggatccaggaggtcgagagtcgttcttctctttgcacagacgtgactctgcagctctttaacggcacccgctgctctcaacccagcttaccccacgtggtcccatggcggcggccgcgctaaggttccccgttcagggcacagtgacttttgaagacgtggctgtgaaatttacccaggaggaatggaatctccttagtgaggctcagagatgcctgtaccgtgatgtgacgctggagaacctggcacttatgtcctccctgggttgttggtgtggagtggaagatgaggcggcaccttctaagcagagtatttatatacaaagagagactcaggtcaggactcctatggcaggtgtgtctcccaagaaggcccacccctgtgagatgtgtggcccgatcttgggagacattttgcatgtggcagatcatcagggaacacatcacaagcagaaactgcacaggtgtgaggcctgggggaataaattgtatgacagtggaaactttcatcagcaccagaatgagcacattggagagaaaccctacagagggagtgttgaggaggcgttgtttgcgaagaggtgtaagttgcatgtgtcaggggagtcatctgtcttcagtgagagtgggaaagactttttgctcaggtcaggattactccagcaagaggccactcacactgggaagtcaaacagcaaaactgagtgtgtgtctctgtttcatgggggaaaaagccattacagctgtggaggatgcatgaaacattttagcaccaaagatatactcagtcagcacgagagactgctccctacagaagaaccttctgtgtggtgtgaatgtgggaaatcctctagcaaatatgacagcttcagtaatcatcaaggagttcacactagagaaaaaccttatacgtgtgggatatgtgggaaattatttaacagtaagtcccacctccttgtacaccagagaattcacactggagagaagccatatgagtgtgaggtttgtcagaaattttttaggcacaagtaccacctcattgcacaccagagagttcacactggggaaaggccatatgaatgcagtgattgtgggaagtcatttacccacagctctacattccgtgttcataagagagttcacactggtcagaagccttatgagtgcagtgaatgtgggaaatcttttgccgaaagctccagtctcactaaacacaggagagttcacactggagaaaagccttacgggtgcagtgaatgtgaaaaaaaatttaggcaaatctcttcacttcgtcatcatcagagagttcacaaaagaaagggcttatgagtgcagtgagtccagtctcattaaatattggagaatacacacctgagtaagatcctgtgattgcagcaaatgtggaaaatgtttacccaaaggtctgctctccttggatattggagagttcacactagagaagagtccttacaagtaaaataaatttgggcagttttgtagccacacctctgtattccttcaggattatagttaacactgaatgaaggccttactagtgtgacaaatacaggatatttatccagaagtctcactgcaagccctgcctcctgggttcatgccattctcctgcctcagcctccctagtagctgggactgcaggcaaccaccaccactcctaccttttttgtatttttggtagagatggggtttcaccctgttagccaggaagttctcaatctcctgacctcgtgatctgcccgccttggcctctcaaagtgttgggattgcaggcgtgagccactgctcctggcttgaattttcttataatcccatgaaaccatcatcagagtcacaataatgaatttatctaatctatcacctttgtattcacctggagcctttataaagtttttctctatgcagacaaccattgatttactctgctgtataatactttccattttctagaattttctgactgatgtaataaagtgtttcctcttat

SEQ ID NO: 30735 - DNA, 1551 bp, Homo Sapiens
gagctgcggcggtggcacctccgggtgtggaaggctccagtgagatggagtcgcgagtcgcggacgctgggaccggcgagaccgcgcgagcagcgggcgggagtccggcagttggctgcaccactcgggggcccgtagtctcggcgcccctgggagccgcccggtggaagctcctgcggcaggttctgaagcaaaaacacctggatgattgcctgcgacatgtatctgtaagaagatttgaatcatttaatctgttttcagtaacagaaggcaaagaaagggaaactgaagaggaggttggtgcatgggtccaatatacaagcatcttctgtcctgaatacagtatctccttaaggcataatagtggatccttgaatgttgaagatgtccttaccagctttgacaatacaggaaatgtttgcatctggccatctgaagaggttttggcttactactgcctcaagcacaataatatattcagggcccttgctgtgtgtgagctagggggtggcatgacatgcttggctgggctcatggttgctatttctgcagatgtcaaagaagttctgttaactgatgggaatgaaaaggccatcagaaatgtgcaagacatcatcacaaggaatcagaaggctggtgtgtttaagacccagaaaatatcaagctgcgttttacgatgggataatgagacagatgtctctcaactggaaggacattttgacattgttatgtgtgctgactgcctgtttctggaccagtacagagccagccttgttgatgcaataaagagattactccagcccagggggaaagcgatggtatttgccccacgccgagggaatactttaaaccagttttgcaatctagctgaaaaagctggtttctgtatccaaagacatgaaaattatgatgaacacatttcaaacttccactccaagttgaaaaaggaaaacccggacatatatgaagaaaaccttcattacccgcttctgcttattttgaccaaacatggatagaagattaagcttctcaaagacgaagaaacgtatcaagtgcatagggaatatttttacaaaaacggaaatctgtaaggggtataatcgcctgcctgcgccctttgcagcatttcacgtgtgggctatggactccacctgtcctcacccacgttattccccagctgccctctccagctccctccccgcctctttttacactctgcttgttgctcgtcctgccctaaacctttgtttgtctttaaatgtgtataagctgcctgtctgtgacttgaatttgactggtgaacaaactaaatatttttccctgtaattgagacagaatttcttttgatgatacccatccctccttcattttttttttttttttggtctttgttctgttttggtggtggtagtttttaatcagtaaacccagcaaatatcatgattctttcctggttagaaaaataaataaagtgtatctttttatctccctcccaaaaaaaaaaaaaaaaaaaaaaaaaaaaaaaaaaaaaaaaaaaaaaaaaaaaaaaaa

SEQ ID NO: 30736 - DNA, 1963 bp, Homo Sapiens
ttttttataaggatgaaaatccgttgcagaagattttgccttgagtcccattggctaaaactgggttccatgcctgtgccctagctgcaagggatgctgggaatctgagtatctagcacttcctcctggactgtgggaagctgactctgccagggtgacaatgggtgttcatagacagcttgcccatgtacagtggggaatggaagagtcctgtactctcctcctcaatgcctgtgtctctcccacggctgcaggtcagaggattcccagctcccaaccccgcagctagccaacccagagccaggagacaagagtaatgaacctgaagatgctgggaccagagacccagaccccactccagagggagcctggcagtcagacagcagctctggaagcagagccctggatgaagtggacgagcagctgttccgctccgtggagggccaggccgcctctgacgaggaggaggtggaggaggagaggtggcaggaggagaagaagacgccggcagccgaggccaagacactgctggcccggctctccagctgcagaggcaggtgtgatgaccagacggcggagaagctcatgacttactttggtcacttcggcggtgccaaccatgcccataccctgggggagctggaggcctgcattgccatgctggtggagcagctgaggactcaaggctgcggtgggaggaccctggggacctctgaggaggaggcagagttgcagcagaaggtggaagagaatgagcacctgaggctggagctgcagatggtagagaccgagagggtgcggctgtccctgctggaggagaagctggtggacgtgctgcagctcctgcagaggctccgggacctgaacatatcgaaaagagccctggggaagattttgctgagcacgctggacgctttcagggaccccacccacgagggaaggcccagccctgcagccatcctggatgccctgcaccaagccttggctgcctgccagctgttgcggagacagccctcggcaccagcctctgcagcagctgcgctcaccaaccccctcctcgtctcctgctgaggttactggcccaccctgtgggcaccctgctcagcctgactgcctttggaccagcctccatgatcagcccaaccactgacagctggtctgaccaccgtcacatcatcagaacttgagtctctgctggctccttccaaggttaagcccgagcccagagcctcccattgcagcacctggcagccaccccttcctcgggctcctccacattacctcgcagcccctgcattcctgccaccagagtccacattaaagccctgcagttgctggatcagcctgcacctgatgccgtatctttcccctgccctcagggcagagatgcccactttctgactgagtctgaccccaaatctcttccccagagtttcaggatctcctcccctcccagcactgtctccttcctcccactggcatgcctgctgcaacggagactgggcccaacctttgggatacctggtctgtaggaaagcactccacaccccaggaaatgttgatgactaggaaaggctgagggaattccaaggaaggaacaatcactgtaggctccctggtagaagctggccttgaaccagctctagaggacaggtaggatttagacaggtaaagaaaggagggaagggcatagaatctaaggtaatggcaagagcaaaggtgtggaaccagaggggggccccaggaatgcagtgcttggagcccctgctcctgaacacgcattaactcctgaactgcgagcccctcctcctgaactgcgtcatggggttgcaggaaggagtaggccaagatacccagtctcacctaacttagactgtcattagagagaaagatccattgccaaacagtgccatgggggtgaaaccagtgctaaatggaggtaaaataaagtttgtaagagccc

SEQ ID NO: 30737 - DNA, 2247 bp, Homo Sapiens
tcttctctgtgctgcgagtggctagctgggcagagccctgggggcgcggtgctgccgcctccaggtctccgccccgtgtgtgcgccctgcacttagggatccctccctcactgccccggtactcacaagcttctcggccccgaccttcgccctgggaggttctggccaggtgccgggaggggcgctgtgtcgagggcgatccccccaaagcagcgtcccgtgctaaagaaacagagcctcactctgtcacctaggctggagtgcagtggtgcaattatggctcactgcagtttcaacctcccagattccagtcatcctcctgcctcagccacccaagaagctgggaccacagggatcacatgcagtggtctaaggaagaagaagcagcagccagaaaaaaagtaaaagaaaactcagctgtgcgagtccttctggaagagcaagttaagtatgagagagaagctagtaaatactgggacacattttacaagattcataagaataagtttttcaaggatcgtaattggctgttgagggaatttcctgaaattcttccagttgatcaaaaacctgaagagaaggcgagagaatcatcatgggatcatgtaaaaactagtgctacaaatcgtttctcaagaatgcactgtcctactgtgcctgatgaaaaaaatcattatgagaaaagttctggttcttcagagggtcaaagcaaaacagaatctgatttttccaacctagactctgaaaaacacaaaaaaggacctatggagactggattgtttcctggtagcaatgccactttcaggatactagaggttggttgtggagctggaaatagtgtgtttccaattttgaacactttggagaactctccggagtcctttctgtattgttgtgattttgcttctggagctgtggagctcgtaaagtcacactcgtcctacagagcaacccagtgttttgcctttgttcatgatgtatgtgatgatggcttaccttacccttttccagatgggatcctggatgttattctccttgtctttgtgctctcttctattcatcctgacaggacattgtttatctgaaaatttttatgttcgaggagatggtaccagagcatatttctttacaaaaggggaagtccacagtatgttctgcaaagccagtttagatgaaaagcaaaatctggttgatcgccgcttacaagttaataggaaaaaacaagtgaaaatgcaccgagtgtggattcaaggcaaattccagaaaccattgcaccagactcagaatagctccaatatggtatctacactcctttcacaagactgaactttgtaacatgttaaggtacaaagccagaggactgtgctattcaaggactactgtaagtctattgtttctcaaaagacaatgagaaaaaaagaagagaatttgtatttcctgccgttttgtcataggtgagctcctttgtgcattttaagcacatgtaagtggttcagcacagtatgcctttttctgtgctttgaaaacttgatatgctcaagcttgtttgaatttattacatctaaccattttgcttgttccttgatttttataagcattcaattaagttagtattatgtcaagtaattttgagaaaatgtaacttgacattttttgcaagtaaaaaaaattgtttatttgtttaggcttagtaaaccagttcccaaacacagtcagactcttcccattgtcatctgattgcagagagaaagcacaccttatttccagggaaagctacaacaagcccaaggtcaaagtgtattattttttgtcttgttgttgtctattttctcccaatttttttttgaaattcagaggctcatatctgaaatagaattttagttcctctttcctttcctaaaattggggaagtacagcccatgctgacattattttcaggctattcttagatatacaagttgttaggccaggtgcaatggctcgcacctgtaatcccagcactttggggggctgaggcaggcagatcgcttgagctcaggagttcaagaccagcctggacaacatggcaaaaccctgtctctcccaagaatacaaaaattagccaggcatggtggcacacacctgtggtcccagctactcaggagactgaggtgggaggatcgcttgagcctcggaggcggaggttgcagtgagctgagattgtaccactgcgctccaaactgggtgacatggtgagaccttgtctcc

SEQ ID NO: 30738 - DNA, 2634 bp, Homo Sapiens
attaggcggcgcggggcggccggcatggagctcccggaggcgcggcagggtcaggagctcggtggcatggcggcggtggctgccccgatttcctccagctgccactccttgcttcgtgtccccggtccctagacgcctcgtctcctcccgtgtccctcttcccatggagtcagtacggatcgaacagatgctgagcttgcccgctgaggtcagcagcgacaacttggagtcggcggagcgaggggcatcagcggcccaagtagacatgggcccccacccaaaggtggctgcagagggccccgcacctctaccgacgcgggagccagagcaagagcagtctccggggacctcaacgccggagagcaaagtcctgctcacgcaggcagacgccttggcgtcccgggggcgaatccgtgaagccctcgaggtgtatagacagctctccgagcggcagcagctggtggctgagcagctggagcagctggtgcgctgcctggcggagaaagtcccgcaaggcgaggcgctggcgccggcgcccccggacgagggtagcactgcaagcggcaccgtggcggcggaagagacgggggccgccgcggctgcggcggccaccgaggtgtgggacggctttaagtgccggaaatgtcatgggtttctatcagaccccgtgtccttgtcgtgtggccacaccttttgtaaactgtgcctggaacgtgggcgggccgccgaccggcgctgtgcgctgtgcggggtcaagctctccgccttgatggtggccactgggcgggcgcgtggagcccggcgggctgggcagcagccgccgccgccgctgcgagtcaacgtggtgctcagcggcctcctcggcaagttgtttccaggcccagcgcgagcgtcgcaactccggcacgagggcaaccgactgtaccgcgagcgccaggtggaggcggcactgctcaagtacaacgaggcagttaagttggctccaaatgaccacttgctttatagcaatcggtctcagatttatttcaccttggagtctcatgagaatgcactgcatgatgcagaaatagcatgtaagctccgcccgatgggttttaaggacaatctggagctcccacattgttctagtcaggaggaagcagcagccaggggagatggcagcagtctgatggacccagctaaagtgaagggggatggtcagcagcaccacatgaaagaccaggaagaagaggaggagaagtgggatgctacctctccaaaagctgcttccagcaagactggaaaatgccaggaaaagaaaaggaaacattgccagattgaatcccaagaagaaacggggatgcctaataaagcctccaagcaagatcctcccactgatcagggggacaaacctgctctcagtttaccacttgcatctttcgacgcatctgaccttgaatgcgctctatgtatgagattattctatgagccagtcacaacaccttgcgggcatactttttgcttaaaatgcctagaaagatgcctagatcacaacgcaaagtgtccattgtgcaaagacggtctttcacagtgcttggcatcaagaaaatacagcaaaaatgtaataatggaggagctcatagctaaattccttccagaagaactgaaggaacgaaggaagctttatgaagaggaaatggaagaactttctaaccttaataagaatgtgcctattttcgtgtgtactatggcctatcccaccgttccttgtcccctgcacatctttgagccttgttaccgcctgatgattcgtagatgcattgagacaggcacgagacagtttggcatgtgccttggagatcctgtcaaagggtttgcagaatatggctgcatcctagagatcagaaatgttcaattctttgctgatggccgctcagtggttgacagcataggcaagaggcgcttcagggtgctccatcagagccagcgggatggctacaacacagccgacattgaatacattgaagaccaaaaggttcagggagaggattgtgctgagctcatgggattacataactgtgtctatcagcaagcatcattgtggtttcattcgctcaaattatccctaaagaatcggatactcaatcactttggtcccatgccggagaaagacgccgatcctcagatgaacccgaatggcccagcctggtgctggtggatgttagcagttcttcccttggaaagccgagctcagctccccttcctagcaatgaggtccttaaaggacagactgaatggtattcgacgagtcctggccttcatatcccgaaaccaaaactagtgagtggattgccgaagaggagctcccaccttccccactgccgtcggggggagtcttcttgtaaatatatctaattgcaataatatcttaacagaagggggtgtcaaacagaggcatcagcctgctgttgatcacagagagaaattgagtagaaagaccaaaagaatgtgacctatttgaaactttctgtcttaagatgcttcttgacatgctgcataactacataaacagcagaggtgtttaagagcccagaaaaacataatttgattttaacattaaaatttccaaaagtttaaaaaaaaaaaaaaaaaaaa

SEQ ID NO: 30739 - DNA, 2937 bp, Homo Sapiens
ggttgcgcgggagactatggcgtcctcctcggtcccaccagccacggtatcggcggcgacagcaggccccggcccaggtttcggcttcgcctccaagaccaagaagaagcatttcgtgcagcagaaggtgaaggtgttccgggcggccgacccgctggtgggtgtgttcctgtggggcgtagcccactcgatcaatgagctcagccaggtgcctcccccggtgatgctgctgccagatgactttaaggccagctccaagatcaaggtcaacaatcaccttttccacagggaaaatctgcccagtcatttcaagttcaaggagtattgtccccaggtcttcaggaacctccgtgatcgatttggcattgatgaccaagattacttggtgtcccttacccgaaacccccccagcgaaagtgaaggcagtgatggtcgcttccttatctcctacgatcggactctggtcatcaaagaagtatccagtgaggacattgctgacatgcatagcaacctctccaactatcaccagtacattgtgaagtgccatggcaacacgcttctgccccagttcctggggatgtaccgagtcagtgtggacaacgaagacagctacatgcttgtgatgcgcaatatgtttagccaccgtcttcctgtgcacaggaagtatgacctcaagggttccctagtgtcccgggaagccagcgataaggaaaaggttaaagaattgcccacccttagggatatggactttctcaacaagaaccagaaagtatatattggtgaagaggagaagaaaatatttctggagaagctgaagagagatgtggagtttctagtgcagctgaagatcatggactacagccttctgctaggcatccacgacatcattcggggctctgaaccagaggaggaagcgcccgtgcgggaggatgagtcagaggtggatggggactgcagcctgactggacctcctgctctggtgggctcctatggcacctccccagagggtatcggaggctacatccattcccatcggcccctgggcccaggagagtttgagtccttcattgatgtctatgccatccggagtgctgaaggagccccccagaaggaggtctacttcatgggcctcattgatatccttacacagtatgatgccaagaagaaagcagctcatgcagccaaaactgtcaagcatggggctggggcagagatctctactgtccatccggagcagtatgctaagcgattcctggattttattaccaacatctttgcctaagagactgcctggttctctctgatgttcaaggtggtggggttctgagacacttgggggaattgtggggatattctagccaccagttctcttcttcctttgctaaattcaggctgcaggctccttccatccagataactccatcctgtcgagtaggctctttctgaccctcagaaatacattgtcctttttcctctttgcccatttttcttccctctcttcctccccatgagaagtctgcttgtagtattagaatgttattgttgactctctcccaagtgccttgatctttgtaatatctcctgttgtttctatgatataggagctaggggaagggggttgtttgccttcttcaggacctgactggacagatggacctggctcaagcaactactctggatgcactttgctgtgtgggatgaactaaaagtgtctgaattttgctgataactttataaaactcactatggcatgcttccctcctggtgggccctaggatggatgacactcaagatactacagatgtgggtgcaggcatgcacacacacgatggaatatggccattcctacacaggtggggtagagagtgggtcagcagcctggcacctcacagaggtgggacctaagaggactcatgattatgcagagaattggattgggtctctgtcatagattgagtaatctcttcccttacctcaattccatctccacccatctctacatctgggcacagcaacccagagatggccaaaagcattcaagcctgggggaagatgtttgactattgctgctcttcaccagaacctcacacctctcctgggactggaacccttcagtgggtgtgtggccagttttggaggctggaatgatgggccagggtgtaggattcattctccatgtaaagtttcctttcatcctgcctagccatccccaaggtttatttccagaagaaaggaatatctctacttggatcaattctggtcatttcaagaggatggaggcctcaagtgtgggaacttcccctactccctggatgtgtgtacctagcacacttccttctcccacccctttttccagttggatttgtttttctgttctcttctgtcctgtcttatactgcaactgtgtctcctaggggacagatggccttctttgtcatcttcactctccacccccagagaggagtcagagccataactcaatcactcagcccctccaaagatagttgatgtgtgataatctcataatgttgagaaccctgatgagatacattgtcttcctctccctacaatgcctctggggccaaggcacccattcttcttgctatcctccatcccccttgaggcttccactttttttttttttagacataaagctgggcatcagcaactggcctgtggtgatgcaaagctgctttgctctgtatctggctggactgatctgtctcacaagaagccatgaggccatagggagaagctccctctccccttcatcttctgctccaaaggtggtagcaagaggagtacccagttaggggttggagcccccatataacatcttcctgtcagaagactgatggatctttttcattccaaccatctccctttcccccgatgaatgcaataaaactctgtgacaccagcaaaaaaaaaaaaaaa

SEQ ID NO: 30740 - DNA, 2037 bp, Homo Sapiens
actctaggcctttcggttcgcgcgagcgggcaggaaagcgtgcgtgcggctaagagagtgggcgctctcgcggccgctgacgatggaagaactggagcaaggcctgttgatgcagccatgggcgtggctacagcttgcagagaactccctcttggccaaggtttttatcaccaagcagggctatgccttgttggtttcagatcttcaacaggtgtggcatgaacaggtggacactagtgtggtcagccagcgagccaaggagctgaacaagcggctcactgctcctcctgcagctttcctctgtcatttggataatctccttcgcccattgttgaaggacgctgctcaccctagcgaagctaccttctcctgtgattgtgtggcagatgcactgattctacgggtgcgaagtgagctctctggcctccccttctattggaatttccactgcatgctagctagtccttccctggtctcccaacatttgattcgtcctctgatgggcatgagtctggcattacagtgccaggtgagggagctagcaacgttacttcatatgaaagacctagagatccaagactaccaggagagtggggctacgctgattcgagatcgattgaagacagaaccatttgaagaaaattccttcttggaacaatttatgatagagaaactgccagaggcatgcagcattggtgatggaaagccctttgtcatgaatctgcaggatctgtatatggcagtcaccacacaagaggtccaagtgggacagaagcatcaaggcgctggagatcctcatacctcaaacagtgcttccctgcaaggaatcgatagccaatgtgtaaaccagccagaacaactggtctcctcagccccaaccctctcagcacctgagaaagagtccacgggtacttcaggccctctgcagagacctcagctgtcaaaggtcaagaggaagaagccaaggggtctcttcagttaatctgttgtggcctcagctgctgaggatggacttggagaacagcttccaagcttcaccttgaaagaagcttacatggcagcaatatttctaaaatagtgatacagtcagaggcctcctgtaagggcgagagaactgaagttgatgttgacaggcccacagggaattggccttccctgttcaagtggaagccagtctctgagaatcccgtgctctcctctcttttggtggaggttctgtaggttcaggtttctaccatggactttaggtatatagggcaagtcagcaagaaagcaccacacactcaggaagccttgtctacctttccctagcgtctctagccagccagccccagatactcctcagagacccacttctctcttttgcatggaataaaaagcactcacagtccctgcttttgggattacttatgctgtggaactcataacccaattcacttccttcactgggtcccaccccattgttgtctctggatgaagtctagccatcagtctggtccttcagattcttcgtaaacttttctgcagttgccagagctaagtctccatttggaaactttggtctcaagaactctcttgatggtgggcacaagacagatagatgattgctgctttcctttgccaaacttggatgcatttttctctttgtttccaaagtataggcaacaggttaaactaccacgtggggtagtttatcaatcctcccgcctcatccttctgcataactgggactaaaggcacacaccaccacacctagctaatttttgtatttttttgtgtgtggagacaaggctttgccatgttgcccaggctggtcttgaactcctggactctagtgatctgcccacctcaacctcccaaagtgctgggattacaggcatgagctaccacgcctatccaatttctggtttatttactttcgatggttaaatgcctccttattcaaatatcctgtatatatactggcgtttctgtcctgatgtcaagtctcgagagaagatgatcaaacaataataaaataattataataagaacaac

SEQ ID NO: 30741 - DNA, 1817 bp, Homo Sapiens
attcattactacagggcaggaagggcacgttctcatcagcatgagggagtgcctttccatccacatcggtcaagctggcatccagattggggacgcctgctgggaactctattgcctggaacatggaatccagccaaatggcgttgttcttgacactcaacaggatcagctggaaaatgcaaaaatggagcacacaaatgcatctttcgataccttcttctgtgagacaagagctgggaagcatgtgcctagagcactcttcgtggacttggagccaactgttatagatgggatccggacgggccagcaccgttcactcttccaccccgagcagctccttagcggaaaggaggatgctgccaacaattacgcgcgaggccgttactctgtggggtcggaggtcatcgaccttgtgctggagaggacccggaagctggcagaacagtgtggtggacttcagggatttttgattttccgaagctttggaggaggcactggttcagggtttacgtctctcttaatggagaggctcacaggagaatatagcagaaagactaagctggagttctcggtctacccagcccccaggatctccactgccgtggtagagccttataactctgtcctcaccacccactccaccacagagcacacggactgtaccttcatggtggacaacgaggccgtctatgatatatgccatcgtaaactcggtgttgaatgcccctctcatgccagcatcaatagattggtggttcaggtggtatcttccatcactgcctccctccggtttgaagggcccttgaatgtagacctaattgaattccagaccaacctggtaccttatccgagaatacatttccccatgacagccttcgcccccatcgtctctgctgacaaagcctaccatgagcagttctctgtgtcagacatcaccactgcttgctttgagtcctccaaccagctggtcaagtgtgatcctcggcttgggaagtacatggcctgctgcctactctatagaggggatgtggtccccaaggaagtgaatgcagcaatcgcagccacgaagtcgaggcactctgttcagtttgtagattggtgtccaactggtttcaaggtgggcatcaacaatcggccgcccacggtgatgccgggtggggacctggccaaagtccaccggtccatctgcatgctgagcaacaccacggcgattgtggaggcctgggcccgcctggaccacaagtttgacctcatgtacgccaagagagcatttctgcactggtacctcagagaaggcatggaagaagcagagttcttggaggccagggaagatctggcagccctggagagggactatgaggaagtggcgcaaagtttctgaggcatgtatgatgggtgcaaatgaatgtcaagttaaaatggcatgttttcttttcaagccgttatatgcctagtgggtagttcccctgatgagcagaaaaatgaactcaaatcaggcaagactctaggttccacactaaattaagtgggtcagtaccaacaatgaacacattatttcctggtctactggtacaagtcagctctgctacctgggagcctttggaagcttagagtcctttgaactgctgagtcacttctaggtgggatttttttgttttaccaagagacaatgaaatcctaaagtttatgcttttcctttctggtaccggaagtagaaaacagcacatgttgattacgaatgttttttcccccatgtctacattttttacactgattaaatcataaatattttcagtatgaaaaaaaaaaaaaaaaaa

SEQ ID NO: 30742 - DNA, 3026 bp, Homo Sapiens
caccgtccggcagactactctcccccatggcggacttcgctgggccgtcttctgccggccgcaaggccggggctccccgctgctctcgaaaagccgcaggtactaaacagacaagtactttgaaacaagaagatgcttctaaaaggaaagctgaactagaagcagctgtgagaaagaagattgaatttgagagaaaagctctacatattgttgaacagcttttagaggagaatattacagaagagttcctaatggagtgtgggaggttcattacacctgctcactacagtgatgtcgtggatgaacgttctattgtcaaactctgtggttatcctttatgtcagaagaagctgggaattgtaccaaaacagaaatataaaatttctaccaaaaccaataaagtctatgatattactgaaagaaagtctttttgcagcaatttttgttatcaagcatctaagttttttgaagcacaaattcccaaaactccagtatgggttcgagaagaagagaggcatcctgattttcaactgctaaaggaagaacaaagtggccattctggagaagaagtacagttatgcagtaaagccattaaaacatcagatatcgacaatcctagccactttgaaaagcaatatgaatctagttcttctagcactcacagtgatagtagcagtgacaatgagcaagactttgtttcctccattctaccaggaaacagaccaaattcaacaaatattagaccacagctgcaccaaaaaagcataatgaaaaagaaagctggtcacaaagctaactccaaacacaaagacaaagaacagacagtagtagatgtcactgagcagttaggcgattgcaaattagatagtcaggagaaagatgctacatgtgaacttcctttacagaaagtaaatactcagagttcttcaaatagcactttgcctgaaagattaaaagcgtcagaaaattctgaaagtgaatacagtaggtcagaaataactctagtaggcataagtaagaaaagtgcagagcattttaagagaaaatttgccaaatcaaaccaagtgtctaggtcagtgtctagttcagtgcaggtgtgtcctgaagttggaaagagaaacttacttaaagttttgaaggagactttgattgagtggaagacagaagaaacattgaggtttttgtatggccagaattatgcttctgtgtgtctgaaacccgaagcctctctggttaaagaagaacttgatgaagatgacataatctcagatccagatagtcatttccctgcctggagggaatctcagaacagcttggatgagtctttaccttttaggggctcaggtacagccattaaaccactgccaagttacgagaatttgaaaaaagaaactgaaaagttaaatctgaggatcagggagttttgcagaggacggtatgttttgggtgaagaaaccaccaaatcacaagactcagaagagcatgattccacctttccactgatagactcaagttcccagaaccagattagaaaacgcatcgtacttgaaaagttgagtaaagtgttgcctgggcttctggttcctcttcagattacattgggagatatttacacacaacttaaaaatcttgttcgaactttcaggttaacaaatagaaatattatacacaaacctgcggaatggactttaattgctatggtgttgctgtcattactgaccccaattcttggcattcagaaacattctcaggaaggtatggtgtttacacggtttctagacaccctccttgaagaattacatctaaaaaatgaagaccttgaaagtctaaccatcatatttagaaccagctgtttaccagagtgatatattccatgaagacaaaatagaagatgaacttctattcaccgtttctggaattctagccgccatgatggtctggtggtgactgataactagttttattccaagacatacctttacctctttaagtttcaatctcccatctcccagtccttcagtccccaactgcagaggatgacctccccagatagaggagaatcattactccaacaagaataaccaagtctttgtatccctagtacaagacatagtatttttattcgaaaatgaatgtttaagtattaaattgaaacttgaatgaatattcaagaaaatataatgatctctactttttctggatgatttccagccatcatatcagtttgccaaaaaaattgagaaagttatgattttgacctcccaacctaaactctaaattctaaagatcagtaagcaattaggtcaataaatacatacaatttaagatgaagccctttggaagtctagtccaaaacaggaaaatctcagaactttctggactcaaggaaatgctttaaatggaatctgtagtttgtttgcaggagagacaatttctagaatttagattgcttttcaaaatgtttatcaggtaggcaagttagcagttgaggcggaacacagacaacttggggagctttactggaaggccaagaaaatactcttggacactggaggaaatgacagctactaaagcccaatcatggaaaaggaccagaaagcagcccactggaatggggagcttagtgggcaaggaggtagggatataatttctcttcttggctccaccagtaattagctctgtggcccagtcacctaaactttctggacttcagttcaggttgtatggcagtaggccatagaattggctactgccatacaatctctatgggaaaggactgcaaaaactaaattttatctctgtatgggcaaaggctactgtcatcctgttgttggtctggggccactctgacaattttttttaacctcatttgattgtgtaagggtctaaccacaacaaaaaatcatagtgtaatagaattaatcaagttcagcaaggtcacaggctagatcaatatacagaaaatcaattgtatttttctgttcagaaaactccaaaaatgaaataaagaaaattgtgttcacaat

SEQ ID NO: 30743 - DNA, 2964 bp, Homo Sapiens
acaactatttggccctgagaagtcgttctggacgctccatcatcaatgggaactgggcaattgatcgaccaggaaaatacgagggcggagggaccatgttcacctacaagcgtccaaatgagatttcgagcactgccggagagtcctttttggcggaaggtcccaccaacgagatcttggatgtctacatgatacaccagcagccaaacccaggcgtgcactacgagtacgtgatcatggggaccaacgccatcagcccccaggtgccaccccacaggagaccaggggaacccttcaatggccagatggtgacagaaggcaggagccaggaggagggagaacagaaagggaggaacgaggagaaggaagacttgcgtggggaggcccctgagatgttcacctcagaatcggcacagaccttcccagtcaggcatccagacagattttctccccatcgaccggacaacttggtgccaccagcaccgcagcccccacggcgcagccgggatcacaactggaagcagcttgggacaacagaatgttccacgacctgtgggaaaggatcgcagtaccctattttccgctgtgtgcacagaagcactcatgaagaggctcctgagagttactgtgactccagcatgaagccgacccccgaggaggagccctgcaacatcttcccttgcccagccttctgggacatcggggagtggtctgagtgcagcaagacctgtggcctgggcatgcagcaccgccaggttctgtgccgccaggtgtacgccaaccgcagcctgacggtgcagccctaccgctgccagcacctggagaaacctgagaccaccagcacctgccaactcaagatctgcagcgagtggcagatccggaccgactggacctcgtgctcggtgccctgcggcgtgggacagaggacccgtgatgtgaagtgtgtgagcaacattggggatgtggttgacgatgaggaatgcaacatgaagctccggccgaatgacattgagaactgcgacatgggaccctgtgccaagagctggttcctcaccgagtggagcgaaaggagctcagcggagtgtggggccggagtgcggacacgctcggtggtgtgcatgaccaaccatgtcagcagcctgcccctggagggctgtgggaacaaccggccggcagaggccaccccatgtgacaacggaccctgcacgggcaaggtggagtggtttgccgggagctggagtcagtgttccatcgagtgtgggagcgggacgcaacagagggaggtgatttgtgttagaaagaatgcagacacctttgaagtgttggacccctctgaatgttctttcctggagaaaccccccagccagcaatcctgccacctcaagccttgcggagccaaatggtttagcaccgaatggagcatgtgttccaagagctgccagggtggctttcgggtccgggaagtgcggtgtctgtctgatgacatgactctaagtaacctctgtgaccctcagttgaaaccagaagagagagaatcttgtaaccctcaggactgtgtccctgaagttgatgaaaactgcaaggacaagtactacaactgcaacgtggtggtccaggcaagactctgtgtctacaactactacaagaccgcctgctgtgcctcctgcacccgtgtggccaacaggcagacgggcttcctggggagcagataacactcctgcacccccatcagtagggcagcatcactgccttcccgggggcttcagcagtgcgcctggctggctgctgctccaccacgggccccctggcccaggcgctgccaaccaacttagtcaccacccctgcctccggtgaatgcaccccgtagtacccaggggctttttacacaagatgtttgaaagccacagtcagtcctttaagcatcaccatgtactgatgatcccctccttggacctggcatctgctaatggtgccctttgaaagtcaagcagtgggaagtacatggagctctcagccctgctcccatctggcaccttcaagtcagcagatgggccactgacagagcactgccccatccctggtgctactggtctttctaaacttagcaccctggagagtccaaggaggcagcgcccccaacccagcgccccactaagccttgctgacacgcgtgcatccctctgtgacctcagcccagatgtgcctgttttcattctcaaagacattagactgttttcctgccctatgacacagatagctcacatgaatattgtgctttatttagcaggtgtactcacagatactagctccttagcagctcacaacatcccagaatggaggcaggggggtgactcattatccccattttactgacagggaaactgaggctcaacttaagtaattgacctgccaggtatattcacccatccagtggaagagctgagtccccgccccagtcatctaccagtatccagcatggggcctgtacttagatgtgaaaggtgctgcttcatttctgaccaagagactgagaagtttcccagaatgcaaacaaagcccaggcccctgaaatctttccggtcaagcctttatcccagcactcagttgttttggatgtctgttcctacttgcccttacccccaaagttacagatcctagttacaggactctgccagctttgttaaactgtccgtgagacaagaaagccattggggaaaccaggtgattgcctgaaattcttactccgttccaagtgctgttcctcccaggaaatcaaaggccagggtccttatggccgtggagccttcccgaccacagagccaacttgtgaagcacacagctctgcagcctgggctctgccctgcctcagccgcctcccccacgctcttcaccacgttcctggagagtccggccaacctgtcccagccaaaacactgctgtattagaaaaagtctctttctggtc

SEQ ID NO: 30744 - DNA, 4139 bp, Homo Sapiens
gcgcagtgccggccggggcggggatacgccgtgtgcgcggccgggggcggaacggaggaggaggcggtggtgtcccggctgcggggtaggagtccgcggcagcctccgggtaagccaagcgccgcgcagtgctgagttcccgcacgccgcagagccatggagatcggcaccgagatcagccgcaagatccggagtgccattaaggggaaattacaagaattaggagcttatgttgatgaagaacttcctgattacattatggtgatggtggccaacaagaaaagtcaggaccaaatgacagaggatctgtccctgtttctagggaacaacacaattcgattcaccgtatggcttcatggtgtattagataaacttcgctctgttacaactgaaccctctagtctgaagtcttctgataccaacatctttgatagtaacgtgccttcaaacaagagcaatttcagtcggggagatgagaggaggcatgaagctgcagtgccaccacttgccattcctagcgcgagacctgaaaaaagagattccagagtttctacaagttcgcaggagtcaaaaaccacaaatgtcagacagacttacgatgatggagctgcaacccgactaatgtcaacagtgaaacctttgagggagccagcaccctctgaagatgtgattgatattaagccagaaccagatgatctcattgacgaagacctcaactttgtgcaggagaatcccttatctcagaaaaaacctacagtgacacttacatatggttcttctcgcccttctattgaaatttatcgaccacctgcaagtagaaatgcagatagtggtgttcatttaaacaggttgcaatttcaacagcagcagaatagtattcatgctgccaagcagcttgatatgcagagtagttgggtatatgaaacaggacgtttgtgtgaaccagaggtgcttaacagcttagaagaaacgtatagtccgttctttagaaacaactcggagaaaatgagtatggaggatgaaaactttcggaagagaaagttgcctgtggtaagttcagttgttaaagtaaaaaaattcaatcatgatggagaagaggaggaagaagatgatgattacgggtctcgaacaggaagcatctccagcagtgtgtctgtgcctgcaaagcctgaaaggagaccttctcttccaccttctaaacaagctaacaagaatctgattttgaaggctatatctgaagctcaagaatccgtaacaaaaacaactaactactctacagttccacagaaacagacacttccagttgctcccagaactcgaacttctcaagaagaattgctagcagaagtggtccagggacaaagtaggacccccagaataagtccccccattaaagaagaggaaacaaaaggagattctgtagaaaaaaatcaaggaactcaacagaggcaattattatcccgactgcaaatcgacccagtaatggcagaaactctgcagatgagtcaagattactatgacatggaatccatggtccatgcagacacaagatcatttattctgaagaagccaaagctgtctgaggaagtagtagtggcaccaaaccaagagtcggggatgaagactgcagattcccttcgggtactttcaggacaccttatgcagacacgagatcttgtacaaccagataaacctgcaagtcccaagtttatagtgacgctggatggtgtccccagccccccaggatacatgtcagatcaagaggaggacatgtgctttgaaggaatgaaacccgtaaaccaaactgcagcctcaaacaagggactcagaggtctcctccacccacagcagttgcacttgctgagcaggcagcttgaggacccaaatggtagcttttctaacgctgagatgagtgaactgagtgtggcacagaaaccagaaaaacttttggagcgctgcaagtactggcctgcttgtaaaaatggggatgagtgtgcctaccatcaccccatctcaccctgcaaagccttccccaattgtaaatttgctgaaaaatgtttgtttgttcacccaaattgtaaatatgatgcaaagtgtactaaaccagattgtcccttcactcatgtgagtagaagaattccagtactgtctccaaaaccagcagttgcaccaccagcaccaccttccagtagtcagctctgccgttacttccctgcttgtaagaagatggaatgtcccttctatcatccaaaacattgtaggtttaacactcaatgtacaagaccggactgcacattctaccatcccaccattaatgtcccaccacgacatgccttgaaatggattcgacctcaaaccagcgaatagcacccagtcctgcctggcagaagatcatgcagtttggaagttttcatgtactgatgaaagatactctacagaacttgtcaaatctttgaaacttggaatatattgctttcataatatgaagttttattgcctatctatctgaagtgtctaatttttcaagtttgtaagtttattatgtggttttaacattgggtgtttttgttttgtttttactatgaaaagacagcttaaggaagagctaaattctgttaaaatatttggggcatgtttgtgcactgctgttgtgaggatcagcatatgaaattgacatcatggttagtcatggtactgcagcttagggggctacacggttgctgtgtgagtggagagatgcagtgaggcagttgtcattattctaaaaattgtactactttcacttttcccaaagattatataatgttcataatccaccatgaaaacagcattggccaaaggtactgaggctgcttaaaatattcaattctgctttttaatttttaagtgaatttagtttgaaaagcatgattatacaggcctctcaggctgagtgctactttggtaaagttcccagttttcctgccttctgtgacaggatgaatgaggtgggtatggacagtggaggcagctggaatggcaagtgcagaaaataggaacagttctatacagtgctctcatttactaataacataatgccttctaaataatttttttgggaaactacattatcacaaaattatacaaatttttttacaagtatttacatactgtatctgaaaacagactttaaagtcacaagattataaatgtacatatatattctcacattctgaaaaataacattctcagaatccacagaaaatatacttagttactactgaagataatttttgaaatgtaaaaattagatttaaatagtatattttaaatgacagaactataattacagagatcagatcagataggtaaactgcaagatagataggatgaaacttttggcctactgtattacttacagagtttttttgtgtgtggtttttaaaactgttaaggcaagaagtgtcaaatgctttagagttaaataacagatcactgatttcaaagacttggtgtatagtgttaaaaattaaagcttaaaaggtggttagaaaagtggattaatgcaaaaggggtaataaagactgcaacattctcaggaccaaattaaactgctaaaaaaaaaaaaaaagttcattgacttgcttagtcgtatactcaaatgatgataaacctacatgtgcaaaggctcacgtttaagattgtcaagccagcagtctactgttgtgttgccattgcttttccattgggagaagaaagaattaaccagtcattaaaccatttggtaagttgcactttgctgtgctgatcccacaggaaaggcttgaaacacgagaagcagcaaagacagagcacacaagtgcataaggctgttgtcttcggcttgggtgaaatgacagttcctcttcattctaaaggtttactccattgaatttaaggcatttgttcattccagtgttgagatgctttgcatctctgcagaagaaatttattttaaattgtttaaatatctggaaatacttttagctatcatttataaagatagttttgttctcagtttcactataaattatagaacaaatgggaaacaagggtttaatttagttcagccattttacaaggaaataataaaatactaaaatctgaaaaaaaaaaaaaaa

SEQ ID NO: 30745 - DNA, 1755 bp, Homo Sapiens
agctttgggagggccggccccgggatgctacacacaacccagctgtaccagcatgtgccagagacaccctggccaatcgtgtactcgccgcgctacaacatcaccttcatgggcctggagaagctgcatccctttgatgccggaaaatggggcaaagtgatcaatttcctaaaagaagagaagcttctgtctgacagcatgctggtggaggcgcgggaggcctcggaggaggacctgctggtggtgcacacgaggcgctatcttaatgagctcaagtggtcctttgctgttgctaccatcacagaaatcccccccgttatcttcctccccaacttccttgtgcagaggaaggtgctgaggccccttcggacccagacaggaggaaccataatggcggggaagctggctgtggagcgaggctgggccatcaacgtggggggtggcttccaccactgctccagcgaccgtggcgggggcttctgtgcctatgcggacatcacgctcgccatcaagtttctgtttgagcgtgtggagggcatctccagggctaccatcattgatcttgatgcccatcagggcaatgggcatgagcgagacttcatggacgacaagcgtgtgtacatcatggatgtctacaaccgccacatctacccaggggaccgctttgccaagcaggccatcaggcggaaggtggagctggagtggggcacagaggatgatgagtacctggataaggtggagaggaacatcaagaaatccctccaggagcacctgcccgacgtggtggtatacaatgcaggcaccgacatcctcgagggggaccgccttggggggctgtccatcagcccagcgggcatcgtgaagcgggatgagctggtgttccggatggtccgtggccgccgggtgcccatccttatggtgacctcaggcgggtaccagaagcgcacagcccgcatcattgctgactccatacttaatctgtttggcctggggctcattgggcctgagtcacccagcgtctccgcacagaactcagacacaccgctgcttccccctgcagtgccctgacccttgctgccctgcctgtcacgtggccctgcctatccgccccttagtgctttttgttttctaacctcatggggtggtggaggcagccttcagtgagcatggaggggcagggccatccctggctggggcctggagctggcccttcctctacttttccctgctggaagccagaagggcttgaggcctctatgggtgggggcagaaggcagagcctgtgtcccagggggacccacacgaagtcaccagcccataggtccagggaggcaggcagttaactgagaattggagaggacaggctaggtcccaggcacagcgagggccctgggcttggggtgttctggttttgagaacggcagacccaggtcggagtgaggaagcttccacctccatcctgactaggcctgcatcctaactgggcctccctccctccccttggtcatgggatttgctgccctctttgccccagagctgaagagctataggcactggtgtggatggcccaggaggtgctggagctaggtctccaggtgggcctggttcccaggcagcaggtgggaaccctgggcctggatgtgaggggcggtcaggaaggggtacaggtgggttccctcatctggagttccccctcaataaagcaaggtctggacctgcaaaaaaaaaaaaaaaaaaaaaaaaaaaaaaaaaaaa

SEQ ID NO: 30746 - DNA, 2735 bp, Homo Sapiens
agcagagggatcatgacggggaaaaagtcctcccgggagaaacggcgcaaacgtagcagtcaggaggcggccgcagcgctcgcggccccggacatcgtacccgcgttggccagcggcagcagtggaagcactagcggctgcgggagcgccgggggctgcgggagcgtcagctgctgtgggaacgccaattttagtggaagtgtcaccggcggtgggagcggcggcagctgttggggcgggagcagcgtggagcgcagcgagcgccggaagcggaggagtaccgactcttccagcgtctcgggctccttgcagcaggaaactaaatatattttgccaactttggaaaaagaattattcttggcagagcacagtgaccttgaagaaggtggactggacctgactgtgtcattgaaaccagttagtttctatatatcagacaaaaaagaaatgcttcagcagtgcttctgtattataggagagaaaaagttacagaagatgcttcctgatgtgttaaagaactgttcaatagaagaaattaaaaaactatgccaggaacagttagagctcctgtctgaaaaaaaaattttgaagattcttgagggtgacaatggaatggactctgatatggaagaggaagcagatgatggttctaagatgggatctgatttagtcagtcagcaagacatctgtatagattctgcttcatccgtgagagagaataagcaacctgaaggtttggaattaaaacaaggaaaaggggaagatagtgatgtactcagtataaatgcagatgcttatgacagcgacatagaaggcccatgcaacgaagaagcagctgctcccgaggcaccagaaaatacagtccaaagtgaagctggtcagataaatgacctggagaaagacattgagaaaagtgtgaatgagattctaggactggcagagtctagcccaaacgaacccaaagcagccaccctggctgttcctccaccagaagatgttcaaccttctgcacagcaactggagctgctagaacttgagatgagggcaagagcgattaaagccctaatgaaagctggtgatataaaaaagccagcctaggtatttaacttgattttgaattttaggtatgtttgaacaaagccacatcatttaattttgtatctaaaatttatttggggtcttatatgttatttctcatgtaacccttattaggactcattttagccctaaattacctgtggctgtttctttttatttttttgactacttttatattataaatgtgtgttactgtcttatgaattcatggcaatatagttggatagcctggatactttgttagatgagtatttagctgtgtctgcaaatcttaaaagccattagcaaagagtcgtggtatttttttctttatttttaaatgtttgggcaccaaacctaaaagcaaaagattgacgaagcatgtttctcttaaggctacttgtattttacaatacaatattaaattatttaatttgagaaatttagttttgcttatatgcactttttaaatatatactattttgaagattccttatgtaaatgcaaatttcctagttaaaaccgaataacagagatctgaaatgactgagaaaaacttttttattaaaggaaggaattaatttaaggcaatttttaactatgtagaactaattgcccatgtttaattatagcagacacgccattctaacaggtatttgataccattggatgcattattctaggttttttctttaataaaaatggaacaagttttcatttacattccaagctgtcaggaaatgaagaatattttattatctaggattttatctgatgtagttgcttaaagatctgatgtgctataattccatgaatcagaaataataaaatgctatcattctggatctgaagacttttgatactttttcaaaagcaaaattaatttcaggaacctttgataagttgttgttataattaatctaattttgtatagtttttgtaaataaattaccatccttccacaattagggatgcttttatccccccatcactaattgcagttgtttgataccaaaataaatttacgtagagatccttaacttaaaataaattaattttttcaaaaaacataaatctggaactgttgtttctatatttgataacaaatacagtatattttatttataagccatggtctactgatactgtatgaggactttccttatatataaaagttgcagggattgtgttttattagctgctttaattatgttaattttagagagtttttaaatggaaatagaggacatttatgaaacgctggaattgcagttacaaattctttttgttgttgttgttcctgaacatgccttggaataattctaccattttttccccctccataaatctttctaataaagcatagaaaaagcctatatgattttaaatgcttctcttaagctggtaaacagatttgagttatgagttcattgttattgcttcaagatgaaaagacagtgatataatttttctatttcaacttaaaagtaatagttaatatgctaaagtagtacagaataaactttattgctgcttactaactacaaaatactgtagatggcatctgtatgattaaacatataaagtaaaacaggtctgagggctttgtagatgattaaagtctccaccttcatgaaaaaaaaaaaaaaaaaaaaaaa

SEQ ID NO: 30747 - DNA, 3798 bp, Homo Sapiens
tgggagaccggacgcgcgcggcctccgccgctcccagtcccgccagacccgatgccgggctggagaagcgcgggggccgacgcacctcggataggcgggggcaggggcaggggcagctctcctttaccctagagcggcgacagaagctcttcgggggatcagtggccaagggggcggacagatttgcacggcggattcctccgaagcaacccgtgtgaaagaagccaagcggaggctgcagcccgggccgcgatgggggtgacaccgcccgtggtcccgccccttcccgtggcccctcggagccacttccggcggcagcgtccgggctagttcctggcgcgagcggccgcgggccagtttctatctcctcatccagggcttgcgggcgaggcctgttttaagtctccagtaaccgagcggaggcccggcaggcgcgacccgggctgcgtacgtcagagctgcctccgaagtggtaaaatgtgctgcgagaagtggagccgcgtggcggaaatgtttctcttcactgaggagcgggaggattgtaagatactgtgcctttgctccagggcatttgtggaggatcgaaaattgtacaatttgggattaaaaggctattacatcagagacagtggcaacaattcaggagaccaggcgacagaagaagaggaaggtggttattcctgtggtactgcagaatcacatgacagcaaaggcataggcctggatgaaagtgaacttgattctgaggctgaactcatgagaagtatgggattgccacttcaatttggtaggataactgcacataaggattttgaggtatctatgaatactagaaataaagttaaaataaaaaagaaaaaacatcaaaagaaatacttagatgaaattgtgcaagaatcttggagaaaagaatatgaagaagacgacattttggcttcagatgatccatcttcaattgaacagtatgagaacaccagaacatatgaacttcaaagcaaaaaagatactgagacagaaaatcctccagttgaaaacacattatctccaaagctagaaattacagagaaatgggaaaagtattggaatgaatatggaggaggactattgtggcaaagttggcaagaaaaacatccgggtcaagcactatcttctgaaccttggaactttcctgatacaaaggaagaatgggagcaacattatagtcaactttattggtattatttggaacaatttcagtattgggaagctcagggttggacttttgatgcctcgcaaagctgtgatacagatacttacacatctaaaacagaagctgatgacaagaacgatgaaaaatgcatgaaagttgacttagtatcttttccatcttcacctattatggttgataatgatagctctggtacaagtgataaggatcatagtgaaatacttgatggaattagtaacataaaactgaattcagaggaagtaacacagagccaattagattcctgtacaagtcatgatggtcatcaacagctaagtgaagttagtagcaaaagagagtgccctgcttccggccaaagtgaaccacgtaatggaggaaccaatgaggaaagcaactcatcggggaatacaaacacagacccaccagctgaggattcacagaagtcttcaggagcaaacacaagcaaagacagaccacatgccagtggtactgatggagatgaaagtgaggaagacccacctgagcataagccaagcaaactgaagaggagccatgaactggacattgatgaaaacccagcttcagactttgatgacagtggttcccttctaggattcaagtatggctcaggacaaaaatatggtggaatcccaaatttcagtcatcggcaggtcaggtatttagagaagaatgtgaagcttaagtctaagtacctagacatgcgcagacaaataaagatgaaaaacaaacacatcttctttaccaaagagtcagaaaaaccatttttcaagaaaagcaaaattctgagtaaggtagaaaaattcctcacatgggttaataaaccaatggatgaagaagcatcacaggaatcatcttctcatgacaatgtgcacgacgcttccacaagtagtgattcagaggaacaagacatgtctgttaaaaaaggtgatgacctactggagactaataatccagaacctgaaaagtgtcagagcgtatcttcagctggtgaacttgaaacagaaaactatgaaagagacagcttgctagcaactgttccagatgagcaggattgtgttactcaagaagtgccagactcccgccaggcagaaactgaagctgaagtgaaaaagaagaagaccaagaagaagaccaaaaaggtgaatggtctgcctcctgaaatagctgctgttcctgagctggcaaaatactgggcccagaggtacaggctcttctcccgttttgatgatgggattaagttggacagagagggctggttttcagttacacccgagaagattgctgaacacattgctggccgtgttagtcagtccttcaagtgtgacgttgtagtagacgcattctgtggagttggaggaaataccattcagtttgccttaacaggaatgagagtgattgccattgatatcgatcctgttaagattgcccttgctcgcaataatgcagaagtttatgggatagcagataagatagagttcatctgtggagatttcttgctgctggcttcttttttaaaggctgatgttgtgttcctcagcccaccttggggagggccagactatgccactgcagagacctttgacattagaacaatgatgtctcctgatggctttgaaattttcagactttctaagaagatcactaataatattgtttattttcttccaagaaatgctgatattgaccaggtggcatccttagctgggcctggagggcaagtggaaatagaacagaacttccttaacaacaaattgaagacaatcactgcatattttggtgacctaattcgaagaccagcctctgaaacctaactatgcagcagtgcgaggacaaaagatcatggagtggtcaaaatattcagatgagacatttggcatgtcttcctttattcactgatattttctacccatggtcttatatcaccgtatgaaatggaaacttacaggacttaaatatcagtgaaatattttgagatctttgaataattcctttagaggaattatacaaaattaatatatatgagtcctttgtaatttatttttttttgagacaggatctcacttttaccgcccaggctggagtgcagtgccatgatcacagctcactgcaggttcagccttctgagttcaagcaatccttctgtctcagtctcctcagtagctggggctttaggtgggcactgccacaccgtactaatttttgtattttttgtagagacgaggtcccaccatgttgcccaggctggtgtcaaactcctgggctcagtcagtccccccatctcaccctccccaagtgctggaattacaggcgtgagctactgtgcccagccttacggacatccttttgaattatctttttcactcatagaatatgaatacatttatttagactttttctagaactttcctgttttcatgtctttgcttcatctggaattggcttaacacccttttataaagtttgtgtttgtaaaatttccattgtgacatcaatacgcaatatattttgtaatataggagtttctatttttttattaaaatggcaatgaaagcaaaaaaaaaaaaaaaaaa

SEQ ID NO: 30748 - DNA, 3869 bp, Homo Sapiens
agaagggagcgagagccccagagcgcggcggcagcggcggcctggcccttccagagggccagagccagggacatgcgggcgcccgggactccgcgttccgcgcggcccggcgcctgagcgcctccgttccccgtcccggagctgccggcggcatgatccgacacgccggggcgcccgcgcgcggggaccccacgggtccggttccagttgttggcaaaggagaggaagaggaagaggaagatggcatgcggctttgtctgccagccaacccgaaaaactgccttcctcaccgccggggcatcagcatcctggagaagctcatcaaaacatgcccggtgtggctgcagctgagtctgggccaggcagaggtggccaggatcctgcaccgggtggtggctgggatgttcctggttcgccgggacagcagctcgaagcagctggtgctctgtgtccactttccttctctgaacgaaagctcggccgaggtgctcgaatacaccattaaggaagaaaagtcgatattgtacctggaaggctcggctcttgtgtttgaggacatcttcagattgattgcgttctactgtgtcagtagagacttactgcccttcacactgcggctaccccaggccatccttgaggccagcagcttcacggaccttgagaccatcgccaacctgggtctgggtttctgggactcctcgctgaatcctccacaagaaagagggaagccagcagagcccccaagagaccgggcccccggattccccctagtctccagcctcaggcccacagcccatgacgcaaactgtgcctgtgaaatcgagctgtcggtaggaaatgaccgcctgtggtttgtgaatcctattttcatcgaggactgcagcagcgccctgcccaccgaccagccacctcttggaaattgccctgcacgccctttgccgcccacctctgatgccacctcacccacctccaggtgggccccacgccgcccaccaccccctcccccagtgctgcccctgcagccctgcagcccagcccagccccctgtgctccctgctcttgcccccgcccctgcctgtcctttgcccacctctcccccagtgcctgccccccacgtcacaccccatgccccaggtcccccagaccatccgaaccagccgcccatgatgacctgcgagagactcccatgccccactgcaggcctgggccccctcagggaggaagcgatgaagccaggggcagcctccagtcccttgcagcaggtccccgccccgccactgcctgcgaagaagaaccttcccactgcccctcccagacgccgcgtttccgagagggtgtccttagaagaccaaagtccggggatggcggcagagggggaccagctcagcctgcctccccaagggacctcagacggccctgaggacacgccccgggagagcacggagcaaggccaggacacagaggtgaaagccagcgatcctcacagcatgccagagctgcccaggacagccaaacaacccccagtcccgccccccaggaaaaaacggatctctcgacaactggcctcgaccctcccagctcccttagagaacgctgagctctgcacacaggcgatggccttggagacacccacgccgggtccacccagagagggccaaagccctgcttctcaggctgggactcagcaccctcctgcccaggccactgcccattcccagagctctccagagttcaagggctccctggcctccctctcagacagcttgggggtgtctgtcatggccaccgaccaggactcctactccaccagcagcacggaggaggagctggagcagttcagcagccccagcgtgaagaagaagccctccatgatcctgggcaaggctcggcaccggctgagctttgccagtttcagcagcatgttccacgctttcctctccaacaaccgcaagctgtacaagaaggtggtggagctggcgcaggacaagggctcgtactttggcagcctggtgcaggactacaaggtgtacagcctggagatgatggcgcgccagacctccagcacggagatgctgcaggagattcgcaccatgatgacccagctcaagagctacctgctgcagagcaccgagctcaaggccctggtggaccccgccctgcactccgaggaggagctcgaagcaattgtagagtctgccttgtacaaatgtgtcctgaagcccctgaaggaagccatcaactcatgcctgcatcagatccacagcaaggatggttcgctgcagcagctcaaggagaaccagttagtgatcctggccaccaccaccactgacctaggtgtgaccaccagcgtgccggaggtgcccatgatggagaagatcctgcagaagttcaccagcatgcacaaggcctactcacctgagaagaagatctccatcctgctcaagacctgcaaactcatctacgactccatggccctcggcaacccagggaagccctatggggcggatgacttcctgcctgtgctcatgtatgtgctggcccgcagcaacctcacggagatgcttctcaatgtggagtacatgatggagctcatggaccccgccctgcagctgggggagggttcctactatctgaccaccacctacggggccctggagcacatcaagagctacgacaagatcacggtgacccggcagctgagtgtggaggtgcaggactccatccaccgctgggagcgccggcgtactctcaacaaggcccgggcctcccgctcctccgtacaggacttcatctgcgtgtcgtacctggagcccgagcagcaggcgcggacgctggcgtcgcgggcggacacccaggcccaggcgctgtgcgcgcagtgcgcggagaagttcgcggtggagcggccgcaggcgcaccggctgttcgtgctggtggacgggcgctgcttccagctggcggacgacgcgctgccgcactgcatcaagggctacctgctgcgcagcgagcccaagcgcgacttccactttgtctaccggcccctggacggtggtggcggcggcggcggcgggagcccgccctgcctggtggtgcgggagcccaacttcctgtgaggccctcccggggcgcctcccctcacccccaggcgcacgtctggccccgcctctggctgcgcactcccgaccgcgacgtccacgcagcagagggacatgggccattccatgacgtgcccaggccaacgtcgcaggacagttgtgaaaataacatgacgctcgtccaaggccacttcctgagggcaagtcctaatagccctgagacaccgagacggcatgttcttcattagacggaaagggaaactgaggctcaggagagaggcgctccaggccgctgcagccaacaaaccggcgccctcttcacacgtagctcctcaggccattccccatgagtcccccacacccaccccatcctcggtctttgcaaagaagggcccgagcttagtttccccaggactggcctaggaaggagcaccggccacagctgctccccgtgccactcagggtggacccagcatctcaggagcacctcagggtgtcggttaagagacaggcctccacccctgcaccagagcctgctcttagctcccggtgcccccagaccccgcagctctgtgcccggcaagaagcagctagacacacgccagggcgccaagcacggccagctccgcggacccatggacaagcccagccccgcctcagggaaaacagggcctttccctacaggacacgccccagagctgtggcagattgcaggagccatcgtgtggggagaatttaataaaagcccttttgaaaaaaaaaaaaaaaaaaaaaaaa

SEQ ID NO: 30749 - DNA, 2566 bp, Homo Sapiens
actgcgcgggggcgggaccggggagctagctgcagactccacgttttgcaaagatcggttttgcctcagagtcaacaaactcttcagattggttccggtgtgtcctatgtttacaagtcagtggaaattaagcacaacacatataaattgaaaagtcaaataaggaaatgaattacctcccttgacggctctaattttacttggctaaagccaatttttaggttggcttgggcagaaaagtgaaaagagaatgctccactttaaccgatgtcatcatctgaaaaagataacacagaaatgtttttctagtatacatgttaaaacggataaacatgcacagcgatttctttcaagaacctttgcacttgcggaattgaggaagtcatggtattcaacccactctcttgttggagacaaaaatattatcctgatgggacctcctggtgctgggaaaacaacagtaggcagaataataggtcagaaactaggttgttgtgtcatagatgtggatgatgatatccttgaaaaaaactggaatatgagtgtgtctgaaaaattacaggatgttggtaatgagcaatttttagaagaggaaggaaaagctgtgttaaacttctctgcatctggaagtgtgatttcccttactgggtccaatccaatgcatgatgctagcatgtggcatctgaagaaaaatggaataattgtatacctggatgtacctctactagatctaatttgtcgtctaaaattaatgaagacagataggattgtaggtcagaattctggaacatctatgaaagacttacttaaatttagaagacagtattataagaagtggtatgatgctcgtgttttctgtgaaagtggggcttccccagaggaggtagctgacaaagtgctgaatgcaattaaaagataccaagatgtggactcggaaacattcatttcaacaagacacgtttggcctgaagactgtgaacagaaggtttcagcaaaattctttagtgaagctgtaattgaggggttggcttctgatggtggcctctttgttcctgcaaaggagtttccaaaattaagctgcggggagtggaaaagcctagtaggagcaacctacgtagaaagagcacagatactgttggaaagatgtatccatcctgcagacatacctgctgccaggttgggagaaatgattgaaactgcttatggggaaaactttgcctgctcaaaaattgctcctgtcaggcacctttcaggcaaccagttcatcctggagttgtttcatggaccaacaggatcatttaaagatttgtctttacagcttatgcctcatatttttgcacactgtatcccaccaagttgcaattatatgatacttgtagctacttcaggagacacagggagtgcagtcttaaatggttttagtcgtctaaataagaatgataagcaaaggatagctgtggttgcattttttcctgagaatggagtaagtgattttcaaaaagcacaaataattggcagtcagagagaaaatggatgggcagtgggtgttgagtcagattttgatttttgccagacagctataaaaagaatttttaatgattctgattttactggctttcttactgtggaatatggaacaatcttaagttcggctaactccataaactggggccgactacttccgcaggtagtttatcatgcttccgcatatcttgatcttgttagtcaaggatttatttcttttggaagcccagtcgatgtctgtattcccacaggaaactttggtaacattttagcagcagtgtatgccaaaatgatgggaatcccgattcgaaaatttatctgtgcctctaatcagaaccatgttttgactgattttataaaaacaggacattatgatctaagggaaagaaaactagcacaaaccttttcaccgtcaatagatattctcaaatcttcaaacctagaacgacatttacacttgatggctaataaagatggacagctaatgacagaattatttaatcgattagaaagtcagcatcatttccagatagaaaaggctctagttgagaaacttcagcaggattttgtagctgactggtgctctgagggagagtgcctagcagctattaactccacctataatacttcagggtatattttggatccacacactgctgttgcaaaagtggttgcagatagggtgcaagacaaaacttgccctgtgattatctcatctacagcccattactcaaagtttgcacctgctatcatgcaggctttaaagattaaagaaatcaatgagacttcatcaagtcagctctatttgctgggttcatacaatgcattacctccactgcgtgaggctttattagagagaacaaaacagcaagagaagatggagtaccaggtctgtgcagctgatatgaatgtcttgaagagtcatgtggaacaacttgtccaaaatcaattcatatgaaagctttcagagtaaatttttttttctagctataagcatgcaataataaatctcaaacactgatttggaaaaaaaaaaaaaaaa

SEQ ID NO: 30750 - DNA, 3946 bp, Homo Sapiens; identical to SEQ ID NO: 28403

SEQ ID NO: 30751 - DNA, 2165 bp, Homo Sapiens
agaacagcgcagtttgccctccgctcacgcagagcctctccgtggcctccgcaccttgagcattaggccagttctcctcttctctctaatccatccgtcacctctcctgtcatccgtttccatgccgtgaggtccattcacagaacacatccatggctctcatgctcagtttggttctgagtctcctcaagctgggatcagggcagtggcaggtgtttgggccagacaagcctgtccaggccttggtgggggaggacgcagcattctcctgtttcctgtctcctaagaccaatgcagaggccatggaagtgcggttcttcaggggccagttctctagcgtggtccacctctacagggacgggaaggaccagccatttatgcagatgccacagtatcaaggcaggacaaaactggtgaaggattctattgcggaggggcgcatctctctgaggctggaaaacattactgtgttggatgctggcctctatgggtgcaggattagttcccagtcttactaccagaaggccatctgggagctacaggtgtcagcactgggctcagttcctctcatttccatcacgggatatgttgatagagacatccagctactctgtcagtcctcgggctggttcccccggcccacagcgaagtggaaaggtccacaaggacaggatttgtccacagactccaggacaaacagagacatgcatggcctgtttgatgtggagatctctctgaccgtccaagagaacgccgggagcatatcctgttccatgcggcatgctcatctgagccgagaggtggaatccagggtacagataggagatacctttttcgagcctatatcgtggcacctggctaccaaagtactgggaatactctgctgtggcctattttttggcattgttggactgaagattttcttctccaaattccagtgtaagcgagagagagaagcatgggccggtgccttattcatggttccagcagggacaggatcagagatgctcccacatccagctgcttctcttcttctagtcctagcctccaggggcccaggcccaaaaaaggaaaatccaggcggaactggactggagaagaaagcacggacaggcagaattgagagacgcccggaaacacgcagtggaggtgactctggatccagagacggctcacccgaagctctgcgtttctgatctgaaaactgtaacccatagaaaagctccccaggaggtgcctcactctgagaagagatttacaaggaagagtgtggtggcttctcagagtttccaagcagggaaacattactgggaggtggacggaggacacaataaaaggtggcgcgtgggagtgtgccgggatgatgtggacaggaggaaggagtacgtgactttgtctcccgatcatgggtactgggtcctcagactgaatggagaacatttgtatttcacattaaatccccgttttatcagcgtcttccccaggaccccacctacaaaaataggggtcttcctggactatgagtgtgggaccatctccttcttcaacataaatgaccagtcccttatttataccctgacatgtcggtttgaaggcttattgaggccctacattgagtatccgtcctataatgagcaaaatggaactcccatagtcatctgcccagtcacccaggaatcagagaaagaggcctcttggcaaagggcctctgcaatcccagagacaagcaacagtgagtcctcctcacaggcaaccacgcccttcctccccaggggtgaaatgtaggatgaatcacatcccacattcttctttagggatattaaggtctctctcccagatccaaagtcccgcagcagccggccaaggtggcttccagatgaagggggactggcctgtccacatgggagtcaggtgtcatggctgccctgagctgggagggaagaaggctgacattacatttagtttgctctcactccatctggctaagtgatcttgaaataccacctctcaggtgaagaaccgtcaggaattcccatctcacaggctgtggtgtagattaagtagacaaggaatgtgaataatgcttagatcttattgatgacagagtgtatcctaatggtttgttcattatattacactttcagtaaaaaaaaaaaaaaaaaaaa

SEQ ID NO: 30752 - DNA, 3171 bp, Homo Sapiens; identical to SEQ ID NO: 24532

SEQ ID NO: 30753 - DNA, 6245 bp, Homo Sapiens; identical to SEQ ID NO: 23975

SEQ ID NO: 30754 - DNA, 1999 bp, Homo Sapiens
acgcgctcttagaccatggcgacccaggcgaagcgtccacgggtggcggggcccgtggacggcggcgacctggatcctgtggcctgcttcctgagctggtgccggcgggtggggctggagctgagtcccaaggtggcggtcagccggcagggcacggtggccggctacggcatggtggcccgggagagcgtgcaggccggagagctgctgttcgtggtgccgcgggccgcgctcctgtcgcagcacacctgctccatcggcggcctgctggagcgagagcgagttgcgctgcagggccagtcgggctgggtgccactgctgctggcgctgctccacgagctgcaggccccggcctcacgctggaggccctactttgcgctctggcccgagctgggccgcttggagcacccgatgttctggccagaggaggagcgccggtgcctgctccagggcacaggcgtacctgaggccgtggagaaggatttggccaacatccgcagcgagtaccagtccatcgtgctgcccttcatggaagcccaccccgatctcttcagcctcagggttcgctccctagaactctaccaccagctggtggcccttgtgatggcctatagctttcaggtaccactggaggaagaagaggatgaaaaggagcccaactcccccgtgatggtgcctgctgcagacatactaaaccacttagccaatcacaacgccaatctagaatactctgcgaattgtcttcggatggtagccactcagcccattcctaaaggccatgagattttcaacacttatgggcaaatggctaactggcaactgattcatatgtacggttttgttgaaccatatcctgacaacacagatgacacagctgacattcagatggtgacagttcgtgaggcagcattacagggaacaaaaactgaagctgaaaggcacctagtgtacgagcgctgggatttcctatgcaaactggagatggtaggggaagagggagcctttgtgatagggagggaggaggtgctgactgaagaggagctgaccaccacactaaaggtactgtgcatgcctgctgaggagttcagagagcttaaagaccaggatggagggggagatgataaaagggaagagggcagcctgacgatcacaaatattcccaagctcaaagcatcgtggagacagctgcttcaaaacagtgttctactgactttgcagacctatgccacagacttaaaaactgaccaaggtttactcagtaataaggaagtctatgcgaaactcagctggagggaacagcaagccttacaggttcgctatggtcagaagatgatcttacatcagttgttggaactgacaagttagcagtttccctgttccctgaaggaacagcaataagaactttattctaagctaatactcattgatgtttgaaaaagaggaaaatttggatctttcttttgcttactaaacaccaagaggaaaagtagcaaagttggtgtgctaggattaactcaggtaagggtgatgtgttttaggattgagaacagcagacttgggaatcactgctaattgttacttaaagcatgttacagctgttttgttctcagttttaaccaaagccagtggacatacggtagtaataactaagtcttgttgtgtttcagcatttaataatagactttggaggtagacccctggtttaaatctaagtctagtttgaggaagtcacttaacctttattgaaaagactctggatttaataagctgtgtaactggtactcgatagttacccaaagttcagtctagatggcacaaaccacctctcagggaataaaccctaagacatcactcaaggaggacttcaattatttaattttgaactgttttgtcctctctggccataaaacttgacagtcatgaaaggtaaggcaaattttaagtgggttaagtttttaaatacgtatctactcattttctttaaaaaaaaaaaaaaaaa

SEQ ID NO: 30755 - DNA, 1851 bp, Homo Sapiens
agggacccacgtgggagcctgggagcgggtggtcgtagctcggtagtccagttgtgggtaatcggggctgtttgttcctgtccgagagagctcggcggagacggctgtcgagtacccttcacctcggtgttgggagcctgggagcgaactgcggcgcgggttaccgctcccggggacgcagcaaggggcatcgagtccctggcgggagctgcgccatggcattgctctcgaccgtccggggcgcgacctggggtcgcctcgtcacccgtcatttctcccatgcagcgcggcatggggagcggcctggtggggaggagctaagccgcttgctgctggatgacctggtgccgacctctcggctggagcttctgtttggcatgaccccgtgtctcctggctctgcaggccgcccgccgctctgtggcccggctcctgctccaggcgggtaaagctgggctgcaggggaagcgggccgagctgctccggatggccgaggcgcgggacattccagttctgcggcccagacggcagaaactggacacaatgtgccgctaccaggtccaccagggtgtctgcatggaggtgagcccgctgcggccccggccttggagagaggccggggaggcgagcccaggcgacgacccccagcagttgtggctcgtcctcgatgggatccaggatccccggaattttggggctgtgctgcgttccgcacacttcctcggagtggataaggtcatcaccagccggagaaacagctgcccgctcactccagtagtcagcaagtccagcgcgggggctatggaggtgatggacgtgttctccactgatgacctcaccggatttttacagaccaaagcccagcagggctggctcgtggccggcacggtgggctgcccaagcacagaggatccccagtcctccgagatccccatcatgagttgcttggagttcctctgggaacggcctactctccttgtgctggggaatgagggctcaggtctatcccaggaggtgcaggcctcctgccagcttctcctcaccatcctgccccggcgccagctgcctcctggacttgagtccttgaacgtctctgtggctgcaggaattcttcttcactccatttgcagccagaggaagggtttccccacagagggggagagaaggcagcttctccaagacccccaagaaccctcagccaggtctgaagggctcagcatggctcagcacccagggctgtcttcaggcccagagaaagagaggcaaaatgagggctgacgtggactgtccacagtgttcatgtgctggagtcagggacggccgcacctgcctccgccggctccagtgtgcggggagcctctgcctgagtgtgcaccaggcccatgtttattgaccacagtctgagggggggggaaggggactgcggtggacaccagaggaagctgtttcctgttgtgatgttggacctgtagtaggacatggtgatttgttaatttccatgggaagccatgatggcctagcatggagggaatctgttcccaggccctgcctggaagttgagggaaagtttagacatctgcagagaggcaggcagcccagcccaggggacccgttcctcttgaaccagtcattgcctgtggcaaatgtgtgtatgagaatgtggggggtggagggcggggccctgatgtggagtagacagtgcgcacctcaggcccacacacggccccgccctggggccttgagcgcaggcctcatctttctgtgccgcgggactctgcacctacctcacagggttgttgtgaggctcaaataaaacatcactcagcacgtgggaaaaaaaaaaaaaaaaaaa

SEQ ID NO: 30756 - DNA, 1762 bp, Homo Sapiens
atgactcggggagccagactgcgatcagacgcgcgtgcccagctgaaccagctgtctctggacggagggacgggaagtggccagaaggggaagtgtgaggagttcccgtccagcctgtcatcagtctccccaggtcttgaagcggcggccctgctcctggccgtgaccatggaccctctggagacccctatcaaggatggcatcctctaccagcagcatgtcaagtttggcaagaagtgctggcggaaggtgtgggctctgctgtatgcaggaggcccatcaggcgtggcacggctggagagctgggaggtccgggatggtggcctgggagcagcgggtgacaggtcggcagggcctggccggcgaggggagcgacgggtcatccgcctggctgactgtgtgtccgtgctgccggctgacggcgagagctgcccccgggacaccggtgccttcctgctcaccaccaccgagcgaagccatctactggctgctcagcaccgccaggcctggatgggccccatctgccagctggccttcccggggacaggggaggcctcctcaggatccacagatgcccagtctcccaagaggggcctggtccccatggaggaaaactccatctactcctcctggcaggaagtgggcgagtttcccgtggtggtgcagaggactgaggccgccacccgctgccagctgaaggggccggccctgctggtgctgggcccagacgccatccagctgagggaggccaagggcacccaggccctctacagctggccctaccacttcctgcgcaagctcggctccgacaagggcgtgttctcctttgaggccggccgtcgctgccactcgggtgagggcctctttgccttcagcaccccctgtgcccctgacctgtgcagggctgtggccggggccatcgcccgccagcgggagcggctgccagagctgaccaggccccagccctgccccctgccacgggccacctctctgccctccctggacacccccggagagcttcgggagatgccaccaggacctgagccacccacgtccaggaaaatgcacctggccgagcccggaccccagagcctgccgctactgctaggcccggagcccaacgatctggcgtccgggctctacgcttcagtgtgcaagcgtgccagtgggcccccaggcaatgagcacctctatgagaacctgtgtgtgctggaggccagccccacgctgcacggtggggaacctgagccgcacgagggccccggcagccgcagccccacaaccagtcccatctaccacaacggccaggacttgagctggcccggcccggccaacgacagtaccctggaggcccagtaccggcggctgctggagctggatcaggtggagggcacaggccgccctgaccctcaggcaggtttcaaggccaagctggtgaccctgctgagtcgtgagcggaggaagggcccagccccttgtgaccggccctgaacgcccagcagagtggtggccagaggggagaggtgctccccctgggacaggagggtgggctggtgggcaaacattgggcccatgcagacacacgcctgtgtccaccctggcctgcaggaacaaggcaggccgcctgtggaggacctcagccctgccctgccctcctcatgaatagtgtgcagactcacagataataaagctcagagcagctcccggcaggggcactcacggcaaaaaaaaaaaaaaaaaaaaaaaaaaaaaaaaaaaaaaa
